United States Patent Application Publication US 2015/0052636 A1 - sequence listing, part 19

SEQ ID NO: 65364 - DNA, 977 bp, Cucumis sativus
  Intron number 1 from transcript Cucsa.267180.1 (locus Cucs a.267180) derived from phytozome v7.0 (chr-ID scaffold0236 4; pos 275599 to 276575 reverse strand)
cgaggaggatattatcaaggtatcaaggaactcttcaaattttatttctaattttatttgtgacaaattttaaaagcatgatattatttgtcgtttttatgccagaagtggctgcccgaaaatcagttattgttcttgaatactatggtgaaaactagtctaatatcactgaagcatttaacattctaaaagcctttcaaaatggtagggagaataaaactgtagactacaggaaaatgtaagtaccaaggatattcgttctagtttagaatcacaactagctagcattcctacaaaattctgcaatatggataatttgaacttttgtttacagtataccatgcctggtatggaagaaaatttcagagtatttgtgatttagagttttacttttatttcacgaagtaatttaattctattgttgccaactttgtcacaagacatactcttgaccagaaggttagaggtttgaatcttccatctttcagttgttgtactcgaacaaaaagaaaaatgaattgttgtaagtttatatacttcaacccgtgattgtgcatcgggtctctttccagcatgcataacattttttattagcgtttcttttaagttgatggatattaaatgagactttatcttgaccttatgcatttgttaatttcaatcctttaattttatccataatattccaacactagttccaacctgcacctagtaaactcctcttccacagttgggactctgataagctgccgactgaccatatagttaatccttgtattgactttgccgtataactaacctaaatgcctaacaaactatactttgtaccaatcactcagtacgttgtttttactaatctaatattattcactttactctttaacctataaaaaccaagtattatatgaatttagaaataagccacctttcttcctgctgcagtattacaaagaactgaatcattctggagttcaagc

SEQ ID NO: 65365 - DNA, 775 bp, Cucumis sativus
  Intron number 3 from transcript Cucsa.302120.1 (locus Cucs a.302120) derived from phytozome v7.0 (chr-ID scaffold0295 1; pos 341256 to 342030 reverse strand)
ctactcctcaggtaaactccattaaactcactcatacgagaggtttgttggccaaatatcagatacccaattatattagacacatttaggttgaatgtcatgaccgtcatgtatctaacacactatataacgtttgttggacatagatcggatatatacttgttaagtcatatagtagtgtgtcaatcaaacactttgatttgttatggaacagataatgttcatatttgtttacataaaatagaactttttacaatatacaagaagtaagaagaaataataggaccatcataatatattgcttttcttacacccgcatcatgccacaaattcactgtagaaatgtttaaacaataactacacaatttttttcacccacatttataattgcgtatgaaataagtatatatacataaagaaataaagtttgagagtaaaaactcatcaagttcatttgttcttttagctaagtatatttactacttttcttgtatagataatacttaccaggttcacgtgttcttaatctaaaaaaaaatgttctcaccagtattggactcttatctgtataatttctttcattttcataaacatataatcgaggatggaagattggaaaagaaagaggagaaattataaacataccctagtatgtgtaatacacaatctaaatggaaacatcagaaatcaagcattattattacttaggtaagaaaaatgttattattctaacatggcttcaacaaaattgtcgttgtgtataccaggaagaagg

SEQ ID NO: 65366 - DNA, 491 bp, Cucumis sativus
  Intron number 3 from transcript Cucsa.171440.1 (locus Cucs a.171440) derived from phytozome v7.0 (chr-ID scaffold0118 2; pos 7579 to 8069 reverse strand)
ttcaagttgtgcgaggaagagcagaggtaagtggacattgcgtttacgcaattaaacaccctggtctatttagccattcaagtttgattcacttgtcttgattagttcatatacttggtgattagtatccattttattggataatgatcaaaattttttgatttggcgatgtaccgatagtgctttttttcaaaaatgtggaagggacacgttttttgcttgagttattgtaaagagatttgcatgttcaacagttcctcgagggtagagctggcagcaggctagatttcatcattatattcactgttttgtgaatactttaagaagttgaagtcatcaatgagggttttccttgagataaatttactctatattatgtattattatcttctgagagagagagggaagaacacctgctcatgtctccaatctttctttgtttatatttaatgtggcagttatatatctcggtgtagggcagaatttgggac

SEQ ID NO: 65367 - DNA, 639 bp, Cucumis sativus
  Intron number 1 from transcript Cucsa.197120.3 (locus Cucs a.197120) derived from phytozome v7.0 (chr-ID scaffold0135 7; pos 624814 to 625452)
cagttttttcttttttgtatcgtatcattctatctttcatacctccttcttcacttcatacctatctcttaagttttggctgggtgctgtttcagaatactctctctgcttttgcttcaaaccatttttattgggttttttttttttttttccctcccctttctttctcacttttttcagtgaaacactttaagctgtgctgttaatggtgtattgactttaaagcttttttcccacttgattttgcttctgaaaggtttgttaaaaggcacttttactcatcttgtttttgggaaattactagaactgatgtgggtttttttcctcgttttattttatccttctcatgtctactttctgttgtttttgtgctatttattttattgtgtggagtcccatctatagtttttccacctagtattcttgtgtggtggtgcatgtgagtgttttactcttctgggtcctcatgtttttgactgttttctctcttctgctcatactttagtgtctatcgtttaagattactgcattttcatcatttggggtttttgttttggatgatttaggagatgggttgtgcttagatttgagttttgttgtacaggttgtgaaaattttttgtttcttgggtagaggaaa

SEQ ID NO: 65368 - DNA, 821 bp, Cucumis sativus
  Intron number 4 from transcript Cucsa.179930.1 (locus Cucs a.179930) derived from phytozome v7.0 (chr-ID scaffold0123 3; pos 301927 to 302747)
atttggaaaggtatcgagtaatttcatttggtgttttcctttttcaactttctttttcaatttttttgtaaaccttaccatcaaaagtttttatatcctgatgtcgagcgaaagtcatttttattattttggagtcacatacttacagttacttagtatctttgatttcctctgtgaacaacaaattgatttgttcaggaagaaaaggaatccatcctatatatgagttggatcctttttaaagctgatgcaaatgaaagcaagtcctacaggtggatactaatctcatgggtagtctcttaatatttgtttacatctgctattaatttgtgaattgtggttggatgtggttttaaagcaatctcaggatggaaaaaggattttttgccatctgtttggatcaattaattattgtgttccctttttttttttttttgtccaaaggaagattgaaacttgaaagtgcccttattgtttgttcatccttaaaattcaaatttcaggacttcggtttgatatattgattactgggtttttttggtctaataacttcgtttgtagattttttcctttttaccagctttagtttaaagtaacaatagtttcttgtaaatgttcaacttaaattggtctttgaagctttgtagatcttgttgaagggagagcgtgttagtttttttagtccaaactgttctagataaatatttgttttttaatttcaagtttttttatccatatgtttcttcagagcttcgctttatcatttctttaaacaaaattaattttttggtttagtactaacgttatatttcatatcagtt

SEQ ID NO: 65369 - DNA, 493 bp, Cucumis sativus
  Intron number 2 from transcript Cucsa.170670.1 (locus Cucs a.170670) derived from phytozome v7.0 (chr-ID scaffold0117 9; pos 19704 to 20196 reverse strand)
gatatacccgagatcagcttttgcagcttcgggaggtaaacattatgttctcatttagtctttgcggtgcatgtgtctacttcctctttctcaatttctcgtaagctgaattcataatcaaatgaaagtttttaacttttggttgttcttggcatattttgattgatatacattttctctcatttgttttgttcttttagttattatgataattgcctcattggcattgctccttctttttttttaatctctcttttggtttctaaatgaagaaaaagcactgacagctgctacctagttttaaatatttcaatgtcacagttatctgtattgttgatacttctttctatcactgtctaccgttttgcatacttttattgatactttctctggaagacagacattatgaatttctttagaatggcatagctgtctttggatgttttctgaatacccgatttctcttgtttcttgaagggtgtggaagttccag

SEQ ID NO: 65370 - DNA, 629 bp, Cucumis sativus; identical to SEQ ID NO: 64711
  Intron number 1 from transcript Cucsa.258050.3 (locus Cucs a.258050) derived from phytozome v7.0 (chr-ID scaffold0222 9; pos 5153186 to 5153814 reverse strand)

SEQ ID NO: 65371 - DNA, 772 bp, Cucumis sativus
  Intron number 1 from transcript Cucsa.137300.1 (locus Cucs a.137300) derived from phytozome v7.0 (chr-ID scaffold0105 3; pos 2332 to 3103 reverse strand)
ctttagtggcaaccccagcttctaggtatgctctcatagtatttgtttgtatcatgtgaggccatattgagggaagatgattgcttaaatgagcaagctcagttcctaggttccgtattttcatttcccaaaaatgcgagtacaggttccctgactatgtggtgcaggtgcaaataaagaagctgacaaatagatttcaagaggtttttgaagtgaaaattgggaaggtgatgcacacaaagagtctaaaaattccacaaaagtttattagccccaaaatactttgctgtcttcatacttataagttatagtaatgaaggcagtgaactaacttacaaaacggttaacttggctgtaaagactataaatgccttgaaacagaaactaaatcaaaggagcggttatcgtatcagcttaatctatgttttaggatgatgctcttgtatttttgttgttttatgtcttcttttgaatattttgttttctttgtattttgagtactgttcaatgatgctttgactattcaaccataatcactgtgaggtttttgttggaaatagggggctttgttggttgattatagccttgtgggtattttagcattttactataccctaagttatcctttttgtactacgactttttggagactataaagttgtcttctcatgtaattttcattgtgttaaaataataaaaagtgactctttgttgtcgtttttttctccctgttttagggttttccatctaaaactagcgttatcttttctac

SEQ ID NO: 65372 - DNA, 859 bp, Cucumis sativus
  Intron number 1 from transcript Cucsa.199320.1 (locus Cucs a.199320) derived from phytozome v7.0 (chr-ID scaffold0136 0; pos 49 to 907)
aggagaaggagcacgagggggagctggttgaggaggtatatagggtggtgtagatggccgttcaggagctggaggccggaaagctactatttgctgctccctctcaaaatcactaaagattttctcgacactgctcggctttctaaagataggaatgaaagaagtggactctcctttcccatctcctttcctttcatttctgctgtcattctcatgaacctgctaaattatcaaaccacaatgttcacagtaaaaaatgttgaattgtccatctattttcatgcatatatgatcaaaatcattactgagaaaaaaaaaaagttgagcaaacaaaagaaattaaatatacaacaatgttaattctcaattcatcattgatagttacatccatacaaacatactcgcaaaataagaagtcaagaaacaacttgcctctcctgactgacaagtgaaaaatctctttataaccgaaaaccaactgcctttctttcccatcttccttgcattaatttatttccctgaaagagaaggaaaatggaatcttcagcttcagtgcaaccatctttacgttatagaataactcttctatcttattgctcgacaaacatcgatcaaataacaacgaatacaagaaaaagcatacaaattacacaccaaacttctacaaagaacaaattttttatcagtgattagtagcaaaacaaaccataatgcataaatctatcaagttgatcaccaacctagaaagtacagacacaaatccctacaaaaccccaaaaatggttcgaaacgacagggccaaggaatttatccattccctagcctctctaatccatctcgtaccttcgtcgttcagagg

SEQ ID NO: 65373 - DNA, 630 bp, Cucumis sativus
  Intron number 3 from transcript Cucsa.178470.7 (locus Cucs a.178470) derived from phytozome v7.0 (chr-ID scaffold0122 7; pos 698436 to 699065)
cttttgggagatacggtaaaattatgttgcagataagtgttcttgtcaacaacattggtgttcttactgtgtacatgattattataggtgggtttcaattaattcataaacttattatgaaatctacttctatggctttgttttaggttttctttagagggtgaggatactagactcaaatttgaaactgtgaataagttctttatttatggaaatataatagtttatttgataaaaataaaataaggatcgaggttcaagccttctagggcacctttttgtttgggtttttttttatatacaacgcaagtgtccagactagcttacgtgcacctcgattaatctcacaagacaacccgtcgaccctacaaaatttggataacatagaaacttctagtcctagataggtggtcaccatggattgaactcatgacttcttagccttttgtcaagggaacacccttatttatcattagattagctcaacttagatggttaatgtatctttcaaaaaattgcaagagcattcatcatatgtcatattggcaatcagtaactttcttgactagaaatacttacatatatagttggatgagatgaacaatcttcgtacgattttgtcttcaggtg

SEQ ID NO: 65374 - DNA, 411 bp, Cucumis sativus
  Intron number 1 from transcript Cucsa.229470.2 (locus Cucs a.229470) derived from phytozome v7.0 (chr-ID scaffold0194 3; pos 7156 to 7566 reverse strand)
cagacgagactgctcgggtaagattaagactccttgacataaagcattggctcatttgaggaattttccgacctttctgagtttgtttttcgttttaacttggggtttcttcgaaatggacaatttggggcttcgattcttcattcttgcaaggaatttcttctgtaggtctttgcttcaaccgacgaaaagatactgttttctatcatcccttttcttttcctcccattatcactccactcataggaaagctaaagataaagaaagtaaaatacctagtctttcacggagttctgtgcatgtcgggttgcttctgttgttttggtttggggaggagttgattgaatcgaagaaatttagtgtctgttcttatataacatcttgcattttgatacttcaaattttcttcag

SEQ ID NO: 65375 - DNA, 413 bp, Cucumis sativus
  Intron number 2 from transcript Cucsa.161290.3 (locus Cucs a.161290) derived from phytozome v7.0 (chr-ID scaffold0114 4; pos 1178957 to 1179369)
tgggcaggcgttcctgcaagattgctggcaggaaggtacatgcttttcaatcttatcacgatcttgttttttgggagaaaatattccatttgctcggtagagtaaatgttatttgattttcgacgatagtaacattattactttgatctctgggtagtcctgttatggtggttttgatggttaatgagcttaaatatctcggacttttattttttctatattatgagttggtaacacttcattttctgtttgattttatctagttggctttctcatgttggagttttgactaattatgatgtgtcttttagtgatacttcgaagtatgtttgatgattgtgtatgttttgttggtgatattgaccttatagataagtttcttagcgtgcttaaatacaagcagggtgctcagg

SEQ ID NO: 65376 - DNA, 841 bp, Cucumis sativus
  Intron number 1 from transcript Cucsa.156060.1 (locus Cucs a.156060) derived from phytozome v7.0 (chr-ID scaffold0113 9; pos 331686 to 332526)
attaccgggtaatcttgtaattcatgctctcagaaagcttacgtcaatagaatgagtgaagttgaacttttattctgattcttaactctatctccacttctagagttcgaactcaaggcctatcatgttaaaccgtcactgcacctacaaattttagctgataagttactaaagacgtgattcattttctttatacgtttcttcacttgttaagctaccacttaacttgaaaattgaagtcctgttcacaaccgtttgatattcgaaaattaagcttataatcactatttccatcaatatgttcctttgttaatcctttaagggtattttcaaaatccaagcaaagttttgaaaactaaaattattttttaaaaacttcttcttttttttttgaatttggcaaagaattcaatgtctgttgagttaacatgaaagcccttttaaagattccgtgaaaaaacaagcatgtctttcaaaaacaaaaatgttaattggttattaaacgtgacataaagttagtatttatgctatcttttattcgtactcttaattcttagttttcaacatttgagtttggacacatgaccatcaatacatgacttcctcctacttgctaaggggttgtataaatttagtgttttgctcatattctcaatactcttctcatatgtaggtttgaaattagataatacccaccaagtgaaaatcaattgaagaggaattaatattctagtagctctagcgactcagataaccattctaaatcgccaagcattatttcagttggtagatccgagcaaattataatcttgaattcatactctttgcagttacgtccaaa

SEQ ID NO: 65377 - DNA, 543 bp, Cucumis sativus
  Intron number 2 from transcript Cucsa.193990.2 (locus Cucs a.193990) derived from phytozome v7.0 (chr-ID scaffold0133 7; pos 121256 to 121798 reverse strand)
atctgctgctgcaacaaggttgttatacattcattcattttttatattacgttcttgcatgtttgagtttctttatgcatttaatagttgttaaattcgacaatataatacatgttatcaatctgatagagggtcacattcatagtgaagatgcaatgtggctatttgttggcatctatggacttatttatcattgtcctgactatgatttgtgttcactttattagtcattaaattctgttttcacgaggagagaatggccatttgggtgttggctccggtcctaaaactggtgtggttcttttcgaagaatcaatgggggttcaaatccccctctctccccatataatagacactgatactttgctaataatgcaacatttaatattcttagttgttaatagagtgttcgatattccatttcttactgttttaactttctagtttattaattaaaattttcatatagcattcaaattttgccatgagttaatccaatttctaatgtatctttgtgttgcctttcattgttgtcttctgtag

SEQ ID NO: 65378 - DNA, 712 bp, Cucumis sativus
  Intron number 1 from transcript Cucsa.193990.2 (locus Cucs a.193990) derived from phytozome v7.0 (chr-ID scaffold0133 7; pos 122243 to 122954 reverse strand)
gctgcttctttcttttgatttctctgcaaattcttgtgggtaagctttcgattcttaatcctcttccttgttttgttttttatttcatgtttctcttttgatgattcatttctttgcaacttttatgcaattataaggcataagcatgtcatatttcttccttgatttgttttgtatgcctgttttaatgttttaagtcagatctagaattattacgttgtaaattgatgaccctttacggatcttggttaaactttgagttaatgtatggttttttttcataaacttatagcatcttaggtgttcggcaatagatggcatgccttgtctttttttttcttttctgatttacatctttctatggatgttcaataatattgtgaaatctgacgttacgtatatgttgtttcatagctgagatttagcttctattttttcttttgaaattggtttttctagatttgttgattaggttgtttctggtgtgtttatgttgttgtaaacccttcgacatgtactgttatgcgtaactttagggttattagatcttctattgtcatgttactttttaggatgttgtttatatcgattatgcgtaaaatatcagttgatttgttttctgtctaattctttgctgttatgttaacgatttcgtacgtagggagttcttatcctttctttgtttctttgtttgcagttcgattaataccaa

SEQ ID NO: 65379 - DNA, 336 bp, Cucumis sativus
  Intron number 2 from transcript Cucsa.151960.1 (locus Cucs a.151960) derived from phytozome v7.0 (chr-ID scaffold0111 9; pos 274897 to 275232)
tttctgctcttcaggttacatttcctgactttcagctctaaactagtttgattctgcgttttttctacttgattctcttttactagctgaatgaatgacacttcgatgattatgcaaatgttgagatgttagattaaaagaagaaaaaaagcagattctctttcagaactcattttttttatcataagaaatagtggcttgcatattagggattttatggcttaaagaatataccaaaatttgttgctgctttaattttcttctttagccgtttactttcttgtaagtttccatcagttctagaatttgattttctaaactgtgggtacagtttga

SEQ ID NO: 65380 - DNA, 653 bp, Cucumis sativus
  Intron number 1 from transcript Cucsa.278540.2 (locus Cucs a.278540) derived from phytozome v7.0 (chr-ID scaffold0261 5; pos 124372 to 125024)
tacttcagtccgatctctccgccctcactcaccaggttcttctctccatttcccctccattttgaaccttctacagttagtattcatatacctacaatcgaattttgttctgcctatcttgattttcatttttatagttggtgacaacggaagggaattactaggacggttcatactaagcaactctgatttcactcttcgcttggatcttaacaaatctagttagttgtattccatagtttgtgtttgataataataaattttgttttctttgtttctttaagtgctttgaatgcattcagcttcaggtgaaaatctgttatcaaaaccctgtactgttaattacttggaagtgtagaaatcattgtttgtaagtgttaactccatttatttctaaacagaaaaacacgtaatctgcccaaacaaagaagttgtttttttaaaatattgacatatattagttgcccttgtccattaagaagggtagattatgtacatatgaattctaatatgagttcttgagccaggtggtactcatctgttcaccaatgttaaattctctataatttgtgtagtagttctagttggttggctatctttttgtgttttgttatgttgcattgctcatttcaccgtgctggattggcagatcg

SEQ ID NO: 65381 - DNA, 949 bp, Cucumis sativus
  Intron number 2 from transcript Cucsa.192440.1 (locus Cucs a.192440) derived from phytozome v7.0 (chr-ID scaffold0133 3; pos 288762 to 289710 reverse strand)
tgattcacaaataatcactcaagccttttctctcagtaagttttttatgacttctcagggcctggtctattcagcactgcaatcaactctttgatatctagttcaacggacttgtgcattttgtctttcattttgaaagctgaaggtgtaaattggtgtcacagagtaagcctcgaggtggtttcaggcataagcctcaaatagtgacttcaaaacattttacaaatcctagattggtttgacaatgtattgcttaacatgatagtcatatctcatatgagagtttggaaaaagaaaaaaaattcaccccggcaattttcacataaccaaaaattcttaatgggtatctttgtattatcattaataggacagatttgtactataaatttttgccttcgatgtttttgaagtcacggaataattcgtcacaactcaaacttaaataattttttagaattaagcaaatgactattatttttctaattattagatgaggcatagagattttaattctcggggaattttcgcaaaggagtaagcattttatggttcaagaaagccacaagtctcagtttgagtcctgcatcaaggcgtcagcctcactagatgttcaaaacatcaagaatagctgaatataaatgtcagttgtcagtgtcctcagagccaagatttcttggcccgtttattagagcttgcatgcagaccagtggcttttcaatgttatctgcagcatcttttccctgttaatgccagcttttcattttattttgttagttttgccgacatgggatgatgattaactcttaatttccctcctcatctcctcctccttgtgtgttttttggcattgtgcatatgcggagttgataggctcttattgtgatataatttttgttattgatagttgttgttttatgatatagataagctgccacttggagcatcatcc

SEQ ID NO: 65382 - DNA, 483 bp, Cucumis sativus
  Intron number 1 from transcript Cucsa.238020.1 (locus Cucs a.238020) derived from phytozome v7.0 (chr-ID scaffold0202 3; pos 713616 to 714098 reverse strand)
gtatctcccaaacttcctcttggttatccatctaggtaacttcctattggagctgtttctttaactcttaatcaaattgccaatttctcatttcttattaaaaaaagaaaaacaaaaaacgaagaaagaagaagaaaagaaaaagagaatgcaggcctgtttgctgcctcgagagactgtttgccacacgtttgtatatgagtgaaaaggcatctttctctctatcattttctggtgtcatattggatctttgtttgagcaagatactcttgcttgtgcaccaaacagttcttatgtggagttgttgccctagcatatttattgacgtttctgttaacatttcttcaaattcgagccttcaaaattctgttaacctttatagcgttttgtatggtacttcttacaccaacaaggtaatatcatccttaattcccattgtcatgaccagatttcctagatcagtgcttgaagtgtcaaagaaaa

SEQ ID NO: 65383 - DNA, 878 bp, Cucumis sativus
  Intron number 1 from transcript Cucsa.135900.1 (locus Cucs a.135900) derived from phytozome v7.0 (chr-ID scaffold0104 4; pos 678132 to 679009)
ggcatttgcaagcaaagttgatcaatcttattgtggtatgtttacgttattattattatttagtggcatagaaattttttgatttagataaaaataaaattaaagtggaatcgattgggtggtattgatatgtacacaattgtgtctttagctgttaattgattataagttatataattcaaattatgcattcatacattttcactgctcacaagaacacaagtgctatgatttctttttcacatttgaaaaatattcctttttaggcaatttgtttttagtttctttaatttgttttccattctatcttcgtggccttttaaattattttgatagttgtttttaaatagaagaattttcaaaaatagtaaattttacaaaatttttatttattttgttatttttaaaaatcctccttttaaatataacaaaattaattaaccaattagcaagattagacactgatatctctattagtagttctctctaaaattttgctatattagtaaacattttcatctataaaataatttcccttgattcatattgtattgttgatcaaaatgaaaaaatttcctaaaataaatcttctctattatattctttctttagatctaattaagttttcatatcaatttttaccttaacttttttcatataaaaaacaatccttcctttttgaaatctcatatgtatatgagttatttatagggtttatatctcctatgattcgacatttgggtactttataaccaaatatataactcatttctcttataataatccattgggacgtcatcctcataaaatcaaataattatccatattttatttttgttgcaggacgagattcgaagtaccagcttccattgacggat

SEQ ID NO: 65384 - DNA, 685 bp, Cucumis sativus
  Intron number 1 from transcript Cucsa.197120.4 (locus Cucs a.197120) derived from phytozome v7.0 (chr-ID scaffold0135 7; pos 624768 to 625452)
cctggaaaaagccactttgcagctactccaaaccagtgtgtatatgcagttttttcttttttgtatcgtatcattctatctttcatacctccttcttcacttcatacctatctcttaagttttggctgggtgctgtttcagaatactctctctgcttttgcttcaaaccatttttattgggttttttttttttttttccctcccctttctttctcacttttttcagtgaaacactttaagctgtgctgttaatggtgtattgactttaaagcttttttcccacttgattttgcttctgaaaggtttgttaaaaggcacttttactcatcttgtttttgggaaattactagaactgatgtgggtttttttcctcgttttattttatccttctcatgtctactttctgttgtttttgtgctatttattttattgtgtggagtcccatctatagtttttccacctagtattcttgtgtggtggtgcatgtgagtgttttactcttctgggtcctcatgtttttgactgttttctctcttctgctcatactttagtgtctatcgtttaagattactgcattttcatcatttggggtttttgttttggatgatttaggagatgggttgtgcttagatttgagttttgttgtacaggttgtgaaaattttttgtttcttgggtagaggaaa

SEQ ID NO: 65385 - DNA, 596 bp, Cucumis sativus
  Intron number 1 from transcript Cucsa.147560.1 (locus Cucs a.147560) derived from phytozome v7.0 (chr-ID scaffold0110 7; pos 14330 to 14925)
cgctaagctcgctgagcaggccgagcgttgtttccacctcttccttattttttttctctcatttctattcttatgcttttttttttttgtttgttttacttttcactctctctttgctcagatcgtatttcttttgcttatctgctatgtttaattttgtgtttatgcttttttactacggatttaagtcacgatcgcttgcctttttgtgtactattttcggaagtgttgttatgtttatccgtttacacgatctgttttaaatttatgaaaatttagtttgcttataattttgctacatttctattgtttagcttctcgagtagtatatatatatatttttcttgatccattgatttatactgtttttctgtctgatctgttttatttaatggagaatactcttttttggcgaagcttggtacttcattttccactcatacttacacagactacttggtcattgttttatctgtaagcacaaagcaaattgaagtttgttcctgttctgtctttgcttgtcacacgacaaaactgtgattgtagttgcttttggatgatagatggtgattctgattaattttttttttaaagaa

SEQ ID NO: 65386 - DNA, 985 bp, Cucumis sativus
  Intron number 3 from transcript Cucsa.197660.1 (locus Cucs a.197660) derived from phytozome v7.0 (chr-ID scaffold0135 7; pos 980986 to 981970)
tccggttaccggcaaaaggattcagggggtatgtattcgatcattcttatctccctcttttatgacttaaacttgtttatgttttgatttatttatgatggttatgttatctctttgtagtctacatctttgtgctaaatacctttaaaacctattttgttgataaggaaggattaaataaaaactgtgatagtttattctagttgccgcatttgtgttgcattagggaaaaaattggtctcccagtactgaaattttggattttggttctttatgatcggcacattacctgttactgaatggcagactttacatgctgaagtgctctcataatcagaaccagaatatactgttctatacttttgtttaggtatcgtattttttaacagaagggtaatttgtattacttctctataattgtggtaaggattctttactgacctaaacatgattccgaatgttggactcctcattcttttaaactgaatcctaatggtactcatgcagaatatcctttcgttttatatgttaagatataatagctgaattatcttaggtctgttctcaagaaggtgttaataattgttcggttttcaattttggaaatacgtatatgggtttagtatagatagacatgttgtgtgcgtatctctttgcaccacaccaacgtgtctatctatactaaatccattaattgtagattggttgattcatgaatgtaaaattttgcatcattacctgcactatttatatgttggtagacacacttgcatttacatttggtactttagttgattttgaactatatgatagatagccttgtaaagttaagaatggttttcagaaattgggtattttgtaatttagttcatttgcgttccaacctttggttaagatggctcaatcttgattatgttaagttaatctgtgtaagtttatgattattgtagattcctcacttgaggccagctgaatataagaggtc

SEQ ID NO: 65387 - DNA, 887 bp, Cucumis sativus
  Intron number 1 from transcript Cucsa.308440.1 (locus Cucs a.308440) derived from phytozome v7.0 (chr-ID scaffold0297 8; pos 567860 to 568746 reverse strand)
ttaaggtagtaacacttcttacttaattttactctctttgatttccttcttcttccttgcactggtgaattcaatctgtttctcatattttattctaaattagtttatcttcttcttttcgatattttatatagtatcgagaaacgattcctgtatatactatactcttgttgagttacagttctggcttcatcttactcggattgattttgtggttcttccttgttcttgtttgtgttctggtgaatcgatctgtttcttctgttctgttcttaattcgttttttcttcttttcgatattctatactgtatccaggaatgagttttgaataatctcttgtttgagtttactgttcttacttcatcttgctgtgattgatttcgtggttcttccttgttattgtttgtactggtgaagtcgatctgtttgttctgttctgtttgtaattcattttttcttcatttcgatattctataccgtatcgagaaatgagtgttgaatatattcttatttgagtttactgttcctacttcatcttgctgtgatcgatttcgtggttcttccttgttcttgtttgcaatggtgaatcgatctgtttctccagttttgtttttgattcattctgcttcatttcgaagttgtatagtcttagtaccgataaatgattcctgtgtatatgctgataacctgcgactaattttaaatttattctctctctcgaacggaatgaattcattatttaagacaatcgaaatgtctcttaactgataaaaaacgttaaaatacaaccgaatctctgcatgcttctcgagataagacaatcgtgtttgtctaagtgctctcaactgcaggaaccagttacgaggcctctctgtgagttggacac

SEQ ID NO: 65388 - DNA, 935 bp, Cucumis sativus
  Intron number 1 from transcript Cucsa.148070.1 (locus Cucs a.148070) derived from phytozome v7.0 (chr-ID scaffold0110 7; pos 316454 to 317388 reverse strand)
ctggtaattcgttcgctaaagttactaagttaattcattgattaattgattgatgattgattcatataaacctccaaaatcccttttgggtataatatgtaattgacaaattaaagaactaatgacccatttgaaaaaaatatatggctccttatacttggttttgttttcaattgctttactaaaaccttgtagagagatggactataccataacttacaaagtattatgatccttttgagttcatatttgatcttgatcttcttttctctcaagttcttttgtaaaattcaaaacatccatttaaaaagaaaatggccctcttttacttaatttcagttttaatttctttaattatatacaccttattgtgagatgaactggatatcccccattaattaagtttaattttgattttcttctttctttgaaattaattatttagtaaaaccccaaataacccacttaaaaaaaatagccctttttacttaactttgtttttttcgactgcttcaataaaaacctttatagatagatgaatcagatagtttcattttagggtttattcttctttttttgaagttagtaaaaacaaaaacaataacccagctggaatcaaagagggctcctttagttttagtatagtttaggttttaatagagaaattaataattgagaatatcaccttagtgttcaatccatatcttcttctttcctatgaagtttgttttgtagaatctcatttccaaaagatgtcttctttttctaattactttaaaataaaccaagttatgcatataacttaattacatattcttgatgaacatggtataattaatttaattaaacaagtattttattgagatactgagatttggttgtgatttttttcatgattaggtttgttgaggtgtggtaaaagttgtcgactgcgt

SEQ ID NO: 65389 - DNA, 313 bp, Cucumis sativus
  Intron number 1 from transcript Cucsa.304190.1 (locus Cucs a.304190) derived from phytozome v7.0 (chr-ID scaffold0295 1; pos 1901530 to 1901842)
tggtattggcggctttggtggtctttttcctctaggtttgtttatttttttggcgacctttttctgaatttgtaactgtggaagttgtttaatgattctgatatgtttatccatttctggtttgaactgagaagtatagtttggtgtaatggttgggactgtttcaaaatcttgattttcttatgaacttggaacttaaggggatgctgctgttgatttgttgtttttctaaatagtttgtttttctttgcctttttgtttcttttctggatgaattttgatgcaggtgattcatatcttgtcgctggcactg

SEQ ID NO: 65390 - DNA, 578 bp, Cucumis sativus
  Intron number 3 from transcript Cucsa.256570.1 (locus Cucs a.256570) derived from phytozome v7.0 (chr-ID scaffold0222 9; pos 4164943 to 4165520 reverse strand)
gaattttgggtatatcctcctgtcacccaattagtgttttcttttactagtcaaatttgtgagagttggctctctttgagaccgtgttgtttgttatattgtacttatcactttgaaactgatagcatttacgttttgaaacctggcattcatttcatttgaagaacaaaattagttcttggtatcatctagtagcttaatacttagggctcaagataacaacgtgacatgtcggcatctgaggtgtagtattatgacttactaaacaaaatcaaagttcatcctgattacggctgtttgccatgtccattttccagtagcatatttaaaaaagaatgtaatactacagtagataggttaggtaaaacaggaaataaggaactattttagacacttaaaaagatgtgcatctgttgaaaaattctgtctggatgagcttctagtccttacacggacgacacaactccgtacaactactgatgtcttgcccatctaaaaattattctcctcaaatttacgaaatgttaaccgttatgtagtatgggattattgtaggggttttcctttgtggttgcgag

SEQ ID NO: 65391 - DNA, 931 bp, Cucumis sativus
  Intron number 1 from transcript Cucsa.295070.1 (locus Cucs a.295070) derived from phytozome v7.0 (chr-ID scaffold0285 2; pos 40812 to 41742 reverse strand)
tggaattgcctgctcctcctggttggaacaaaaaggtttcctcctttttcttctttttatcttacatttttgtctctcctttgaacttccctttgctcatttgttgtgctgtgaattttctgatacttctgtacttctgttctgtgttagaatttcaagcttgaatgtgtttgtatggaggttagggctgatgggtatccttggaattaagccgaatgctataacacttatgctttggggcttagggatttgtttttttcttcttcttctttttctttatagattctatcgaatctatctttttgtttagtactcattagccagttattggaaaaagttggtgttagttctgtctctttttctttattgttattgtttctttttcttggaatgttttgaatctcttatcctatactctgaatgatcaaacacgaagtctacttgctctagcaagttggagtcctgattgatgcactctaatagagttggggtgcgacgcttttaggccgaaattgtatttatgttatttacattatgattttggtcaaatggtttagaagagtgtggtagatgcatctctctaaatctgtaatatgatatttttttctctctcattttgtctacgaacatagctaacatattagtgtatcacataattcactctgtcgattttgttcacattttctatttgttttttattgtcgatttattaacaatactttaccgtttctcttaaatggttctttctagttggaagaccttattagtatgcaactgtttggtgtttaggttaattatagtgaggttgccttggtagtgtcaattttcaatcaagataatttgattgatgccagtgagttttcattaagttgagataaaatgaggtgaaaaattaaaatcttagtttatgtgcagtttctacccaagttag

SEQ ID NO: 65392 - DNA, 1054 bp, Cucumis sativus
  Intron number 1 from transcript Cucsa.253970.3 (locus Cucs a.253970) derived from phytozome v7.0 (chr-ID scaffold0222 9; pos 2422161 to 2423214)
tagccgtcgcttgcttcacgctccctctccaaaaggtctgttttcattatcccctgaatatcatattaagtccttagattatgataaatatatttgagctttataaacaaaagcctctttacataattaagaaatttgaatctaacacattttgatccagattgtataatttaagtttttttctttttttttcctttctaatgacattgacaggttatatggtcccgttcgatttgatctttttctttaataattaagaaaaaagaagaagatgaagttaaaataaaacgcattctaaaataaaagttcatccttaagattttttgtttgcctaattatagtttaaggttgaaggcaaacaaataaaagaaatgtgacaaaaaaaaataattatttcctccttggattcatttttattttaaagttttttaaagtaacaaacatatttatcacacgaacttattattattatttattttaagtttgccgcaaacgtttaataattcattaaagataaataatatttgtttggaaaaaaaatcaatttcctaacgattatcacttaaaatttttaatttgatctaattacacctaaaacttcgataagtgcgatagttattatagccttaaaattgaaaaagtgttacttttttcttgtcataattaaaaaatatttttaatccagttgctagtttatataactcattcgaattttaatttaagtttgggcaaaatttgatatcataaaatttagtaagtttgtggagtttttttaaatacaaaatttaatttttttctctctgtattttccaattttcatttaactctatcaagtttactttaggcacgtagaatttagttggagaaataattcatagagggattagactttagtggcagaaattttagagaaagaaacttttgttgctgaacagagcagcctacttactaagtctatttcttgttacttttcctacacgttatttgcttcaaataatttccacataccaacaaactcacattgttctctgcagattttgaaggatttcttgtt

SEQ ID NO: 65393 - DNA, 477 bp, Cucumis sativus
  Intron number 1 from transcript Cucsa.228040.2 (locus Cucs a.228040) derived from phytozome v7.0 (chr-ID scaffold0193 3; pos 42737 to 43213)
cctcattctagtgagtaaattaagcttccccaacctcttcatttttcttttctttatgctattcccttcacaacatttctctttttgcaaacctttatatcttctttttgttcctggaataaaggaaagatggagggaacagaaaaatccaacaacaaactttgaggactgttcaatcataacttttatttgataatgttttgcttgtatgtttttttcttcttatatgtgtgtgtgtatccatgtgaaaaaagttgaagaaacaagtatcttgaagcttgagatgttgcactcatgtatatgatatcttgaattgtgatatcttctttgttttgagaagatggccacttcttcctctttgtttacttcaaatatattagtttttcttctttactctctctgttgtgttaattttaatgcccttaacatggttgacatttttgttgtcaatttttgtgtgaagaaggagatactccc

SEQ ID NO: 65394 - DNA, 759 bp, Cucumis sativus
  Intron number 2 from transcript Cucsa.237190.2 (locus Cucs a.237190) derived from phytozome v7.0 (chr-ID scaffold0202 3; pos 175043 to 175801 reverse strand)
ctagagtgctcatcaggcagaagcatatcaggtataatggatttcattgccttttcttctgattgcattcttttcctttcattagctattttggttttcttaattatcattttaagaaattcttattggtcggtgatcaactgttagctgttacaggcatcatattcttcgtgctgctttcaaaataatgtctttatgtttagtagtgtttttgtcttggataaaaattcatttgttgcaaaagtttctggcatggtaagatacttttgacgaaatgggttggtggttttgaatcttcactcatttcatgatctgaaaacaatataattagattttcttaagaaaaggggagccgcaagcacttaaaaggtgttgatatttcttttacccaaatgcttggtctagaagcttttttttatagtataactgcggtgtgggagtttaacctccgaccttcagagatggtgggcatgccaatttgagtgcctagctcactttggctggcatagaagcattgaaaagtctttagaagcgtagggccaattgccaaatgccaaatgctttactgttcaacatttttttaattctagttcttatactaagatatatttttataaaatgaggatcttcagtgcatttttctgctattggtatgtttatgttatccccgaagtacttgttaataactttattcgtcacatttctctctttttgtctttcttagggttggaaggcaggtggtgaacattccttcgttca

SEQ ID NO: 65395 - DNA, 406 bp, Cucumis sativus
  Intron number 1 from transcript Cucsa.237190.2 (locus Cucs a.237190) derived from phytozome v7.0 (chr-ID scaffold0202 3; pos 176153 to 176558 reverse strand)
gtgcacgtttccttctataggaattgtatgtataaatccctataatctctttcaatcattttcttcattctcattttttttccaacttttgtttctcttctgcttccctgattgtgtttaccttacttttcccaacggtagagctggaagatttcgaatgaatttgatttattttacgttagttttataactcattttgagttgctgatcttaagtttcacttgttgtggaatcggtgatgttggaacatattgtagaatcactgagaatgttctaatttttttttcttgtttgattgcttgcttactgcatcatatggagtttatgttcatggcatagttcaattttttttttcttgttgcttttgctgagagacgatttaagtgtgggttctatcattaaatag

SEQ ID NO: 65396 - DNA, 645 bp, Cucumis sativus
  Intron number 1 from transcript Cucsa.142190.2 (locus Cucs a.142190) derived from phytozome v7.0 (chr-ID scaffold0107 9; pos 487950 to 488594 reverse strand)
caagcacttcatattgcccttgaaactgatcctcggtttgtttcttcaatacccttttcttcgtttttagtttctgattgcttgtatatatatatatttttatctcttctctgattctatcattgcatgcagatgggtgtggtttttctttgatttttgttgtgtatatacgatttttctttgattgctggttggtgtttggttacccttttgcccgagcctttggagctggctaagtgagaattggaaaataagagaacttcattaatagagggagttggaaataatgaagtcggtggctaaagagctagtgagagcttgcatggaaatgagagagaaggaaaattgatgaaatctgtcaatacattgtgaattggttgttggtgggtctgtggctttcgctgcttcctttgattaggtgaaaacattacagctctttattagagattgtttgttctgaggccacatattggcgttcttctgtataaacatatatatatatttttgacaaagtggaattggaggattgtattcctctttgtgtaattgagctgatttcttatcaccctttatgcccattgtttgttttatgttccactagaacattttatgctaaagaacgttatacttctatattcagtgctt

SEQ ID NO: 65397 - DNA, 456 bp, Cucumis sativus
  Intron number 1 from transcript Cucsa.165590.1 (locus Cucs a.165590) derived from phytozome v7.0 (chr-ID scaffold0115 3; pos 916781 to 917236 reverse strand)
ttcactccactgcttctcctctttcatttcattctgtaagtttcaaatctcttctcttcatccccgtttctctctccccccctttttttttaatttcaattgcaaaccctagaaatcaactactttaatttcttcccttttttcaaagtcgtcgctttgatttttctttttctttttctacattttcctggagtttgttctatacacttaggtttaatgatttgctatttgtttgctgttattcaatccatgtttgcaatttcctatctggcttctttcttatttcatctgggggtactgggtgcttatgaaatgaatcgtgggcattctttagttttgttcctttaactctttttactttgcttctgtttcttacttgatgtttttgacgttgatctgatatgggtctgactgtttgtattttttttttttttttttaatgattttcagcccaat

SEQ ID NO: 65398 - DNA, 805 bp, Cucumis sativus
  Intron number 1 from transcript Cucsa.191660.1 (locus Cucs a.191660) derived from phytozome v7.0 (chr-ID scaffold0133 0; pos 34240 to 35044 reverse strand)
gaaacgctgctgccaaatctgctttctggactcaggttgtttgcttttacttttgcattttgccttatttgcgctagatcctaaggctgcttgcttcgagatttttctctctggctcctcgtctttgtcttctattctataagacgtcacgattcactaggattgctttgttttctacactgcgttgtttgtggattgtatttcttctgtatactttgtcttgaagctacagaaatcgaagagagattggtgaggaaatgatgttcgagttttagacatcttgttttgtggctctgtgaatgtattgaagttcgtgagctttctcggcacccaacctcttgggtgcctgctttttccggttctcctccttaagtttcctttatgcaacttttgagaagtggtttttcaattgtttttttttttctttttgttgaatcatgatggtaaagtccattttctaccagtttctctggacccaaaaaattcatataatccttttcattccctttttttcctttacctttctcttactttttggtcctgttgactttttttttcctgatcttattattttaaacgaaaatcaaacggccatcatgattatacagctgaaacatcaatggatgttcataacaagtttgattggattgaacttttttccttatcctcagcatatagacattttcccccttcaaatcattaacctcgtttcataatttcatcaaattactcttcctgaaacgactaattgttgattaatgatcatgtagtgggcttgtgttcatccacctgtttattacatttt

SEQ ID NO: 65399 - DNA, 652 bp, Cucumis sativus
  Intron number 2 from transcript Cucsa.242570.2 (locus Cucs a.242570) derived from phytozome v7.0 (chr-ID scaffold0204 7; pos 2291238 to 2291889 reverse strand)
aagaaagcttcaaagaacacaccactcttaatcctgtaagtctaaaacacttccacaaaacttaatccaaaccataccttaaacccatattccatcgtctcttcctcctaatttctttattttactttttcacttgtctcaaaaacagacttcagaatcaaaaactaattcaattttatttcttaatcagttcggattattttgtgttaacatctaatttcccttcagcttatgattcctttctcactaggttttggttaatactcattttgttttcagttttctatttttctatttcattctttttcttagtttctcaattatgatttcatatttgaattcttttgtcaaattctaaaaaaaaaaatcaaaatttaacatgattttttagtaatatttataagattactttgtctctaaaaaaagcaaaaaaacaaaatagtcttaattggcggtggtggttttaagaatgatataaagtctatgaaataaaatattcatatattttgtactgagtgtttatatataaatggaaagaaaaaaaaaacatataaattttaaatttttgggtatggctgaataatataattttaattctttaaattaattttcagaagcagaagctagcactagcaaagcagctaaacctccg

SEQ ID NO: 65400 - DNA, 690 bp, Cucumis sativus
  Intron number 1 from transcript Cucsa.137030.1 (locus Cucs a.137030) derived from phytozome v7.0 (chr-ID scaffold0104 5; pos 20200 to 20889)
tgattaattctgtcattctgcaggtaatggattagttttggtcaaaccccatttgatgattaatgagttttgattaagtctgttgctgcttctttctaaaccctgtattgatttcttcatactgtggtatttagctcaaattggcgttgaaggattctgagtactctttcattttttggattttctcattttagtgctcactcaccttagtttctcccgttcccaccatttgaccggagatttgttttgttattccttaaggacttgcttgctgttctgaaatcagtgctcatccattttttgttcatcatgaagggataaattcagttgttacagataaagttctgtttgtttctttgttcatttgttttttaaattgacgtggtctagagtatttggtttgaaagaaatcagatgtttttgaagaataaaaaggtttcttgggaggaaagctaaggtgcctgtggccttttgagttctttctaaagcttattgatattcagttttttagtttaattcctgttgggtaatttgcttgttttgtatgtaatttttagttttggttttggggcttccttgtttcttgtttctagttactgttaccaatagttgtccttagattgtaaatttaattattgaaaagaacttttttcttctctttattacatcgttggactgtttttgttcagg

SEQ ID NO: 65401 - DNA, 687 bp, Cucumis sativus
  Intron number 1 from transcript Cucsa.300030.1 (locus Cucs a.300030) derived from phytozome v7.0 (chr-ID scaffold0292 5; pos 56381 to 57067)
gtgagggccaaagacggcagtgcttttgctaggtgcgtttttcttcttcttcttcttcttcttccgctctccatattctttttgcgtatacttgttgatttacattgtctgtctgagggctgatgagtatgtagttgtattgctgaatctctgaaactttgtgtttcctttctggttctgcttatatgcgttataatctggtttttggagtttatgtctctgtcttggtctttaggcatccgtaatctctgattttcagttcgtcttttagtctgatttagttgtagagttggaagcaatgctcgttttctttatgaaagttcatgttgagttacatcaactggatttaaggttaataggacatagtaccctgcgtatttgttcattttctttcctctgagatctattcgtatgttgatgttgtggttttttaatacttcattgcttcaatcatttcttaattagctgcggtttctagagttgtgttgtctatggattgacagtgtttggttatcagtttgccttttggttggagttattttagagttgaatgaaacgtaactagagaagttgtagaagcagcaaatttgagtttcttgacaacggtagaaactgatttctctcgtttgaatgatcgacttttggcttgcagtgacgagtgcggtaaaagtgttccggtggccttaa

SEQ ID NO: 65402 - DNA, 839 bp, Cucumis sativus
  Intron number 1 from transcript Cucsa.173540.1 (locus Cucs a.173540) derived from phytozome v7.0 (chr-ID scaffold0120 9; pos 190257 to 191095)
ctcctcatccttgttcgcggcccgtttcttcatcggtaatttttacatcttttcttgacattaaatatacttttataccttgttcatttaaaacttaaaagtgattgtacaaaatatggttgtccacaaaaaccacactcaacttaatacaaacattgtcttacatgaatattccttaaaagaattataagaatgtaaaaagttttaaataagtaaacgaaattaattttttgtttattttttatttttgcaattttttaccatataataaaatgtgtcaattcactccttacgtaaatgatgttaaatttgtagaagtagctaaaaatgtcaaatgtgttatatgcttcttcattctgttttttctttttccttcctcatttctctttgtttataatattgctgctttttccatttctttctacttctttcttcttcttctatttctatactcttttttttttttcatttcaagggagcaacattttttcccctaaattttgtttttcataacgcagtccatcaacttttctctttatttaattttaatatttttaagtttacaattttcagcaaagcaaaacgaatgttagaataacaataatggatatcttatttataaaaaattatttgagatttaaggttcctgcaatgtcgactagctatgtcaatagatggagtttgaatgaacacttgttaaaatgctttaattaaagagaaattgttgaaagcatgttggattaacatcgtctaagatgagttagttaacttgttagaaccttcattatttatacttgcatgcagaggaagaaaataataaagcagcaacaaaaaagaag

SEQ ID NO: 65403 - DNA, 886 bp, Cucumis sativus
  Intron number 2 from transcript Cucsa.157200.1 (locus Cucs a.157200) derived from phytozome v7.0 (chr-ID scaffold0114 1; pos 227641 to 228526 reverse strand)
aggaccgcacctagtccggccatatctatctcaaggtaggatctttataataacaactactacgtacaaaattcccctgaaccgaactaattttagtatcgaaaacttgcttttacagttttcttttatcatttgggtgcttttttttttctttttttttttttttaattgttaaagtagtttgtaatcggaggagtagagttctttatctaattttcacagcaccaacttgaattcccgccattgatgtattttagtcttttaacatttttttttatttaacaactaatgggaaagttcaaatcggatttgttctgcacctacattttagtttgacaccttatttacaaatatgcaacgctgtttaatccgcttgacaattgtttgacatgtatcgaatgtactgaataaacgggagcacacatattcattaagctttggagcgttctttatagcatgtagtagagatttgaagcacatttgactatatcgaacagaatcatcgttttgtatttgacaccctttgtcaatatttgaaaatggaaaatcagccttctttcttatcattgatgtgtacactgtgtgcttgttaattccttcactttgaaaattcttgaatttgtcaacactttttatcccgttgctttaccacgtggtctccattgcttgtgtgttctgctgcaaatgaaggattttggaaacgaagaatgattgattgcttaccgttgttttcattttttttacttgttcatattcccattttgcatatttgttttttgtgaataattgtttatctcatccctggtttttaactcattgattttttatttcttttacattttaacaaatcaattttaaggactaagtggcgagattatttgtgcag

SEQ ID NO: 65404 - DNA, 777 bp, Cucumis sativus
  Intron number 2 from transcript Cucsa.154270.1 (locus Cucs a.154270) derived from phytozome v7.0 (chr-ID scaffold0112 9; pos 4157 to 4933)
aattgaagcctcttggagtaacgtgccaaaagaaggtttgtttttgtttttgtttttgttttttttttaattttaaatttataaaattactcttttaaacagtttctaaaattatttttaattgactctgttgggttggattttatatacaatttgagcatgttcagaagatttgtaaagattgtttttcattttttcttttgggaatttgtaaagattaaagaatcttagtataaggatcgaagaaatctagattcaaccatgataactgatcatagaacctcactcatctccaaaagaatctttttccttttacaaattcaagattagcttgttggataatcgatccaattatcatttaaataagaaatataaaaaaaaaaaatctatttacaaaatataccaaaatctatcaaaattatttctaaaaattcaatttatttatgaatttctcttttaaatatcatggttagatatttttaaccgaatgcatttctatcaagtttagaagaaaaaaaaaatagagaatttctttgaaaataaatccataaaaactatattttggagggagggggagggggagggggaggggggtaatttgtataaaaaagtttagtatttgactaaaattaaaatgaatatatatactctcaatttaggtcacatactatagctataactgtaagtctatataagtatatataaagaaggcattggatttttacaatagtgtgttatgggttgaaattgttgtgtaacaggagaaagagtacaaag

SEQ ID NO: 65405 - DNA, 900 bp, Cucumis sativus
  Intron number 2 from transcript Cucsa.284330.5 (locus Cucs a.284330) derived from phytozome v7.0 (chr-ID scaffold0265 3; pos 1152835 to 1153734 reverse strand)
ctcctgccccgaggggagggggaggggggaggaaggtgtgcatctttcacagatttcgttttactgttgggatttgttcgaatgaggatctcgttccgatcatttgtttgcttacacgatgaagtggttagagaagagatccttcttcttcttcttcttcttcttcctcctcctcctctttctctatctctggaagagtctatttttgaaaattatttgctccggagcctttgaagtttttacttaaatagcgaacactcttcgcctttttctctttttgttaaagtctggacggcgtgttagctaatcgaagaatggggagttcattctaccggaattctgcaaatatagatattatggtcttttgataaattttggtttcttatgggaaaggaccgtaaatagtgcatcagtttgtgttattggtgtatgaattcttttttttttgtcaaatcacttcccagctcgtggcttgggggttcttattgtcgagtctagataaattctaccttttttttttttggttagtgatccattggaagttaattctgtatcaatattcttgctcttgtggtcaagtgttgatttttatgtccttgtgttatttccgcagatcatctgttgctgtgaatctggcgaaatggatctgtaggtgtagttttcggctggcatccttttgtctgtggtgccgtttcggtcacggggctttgtttctttgagaacgatgtctaggattgaggcttcttctatctattgatgattattcgggagtctagactctggttcttttcaaccagcattctgttttgacttgggcgccttctcgggagggaattcattctcttccttggccatttcagtctttggctgcaaacacgtcctccgtttctttcattttta

SEQ ID NO: 65406 - DNA, 618 bp, Cucumis sativus
  Intron number 3 from transcript Cucsa.253070.1 (locus Cucs a.253070) derived from phytozome v7.0 (chr-ID scaffold0222 9; pos 1822685 to 1823302 reverse strand)
ctggtgagcttttgttctattacaatgggagcaatatggttgtagatttatttccgtatgtttccaagtaatattataatttttttttactcttttctgatgataaatacaatccctttagaaaatggagaaaggtttactgaaatagaaagaggaacggttggtctaccaactactaaataagaagtgaacaacaaatatgtcttgttgtcctaatcccaagcaagaaaaattatgttttcttgtttataaacctccaaggttccaacccatatattcgactcttacatgtttttgtttttctaaaaaaatatcttataagcatctgacctcggtagtgctcaacttgcctgttctcatagaatagctgcatgacctacttcatttggactcttccatggttttcgatgataattttttagcaaaaagttattctcttctaaaacttgagctatctatctttacgttgatatgcattttaactttttcccactttttctcacagtatgcttgtattttccataattgaattgctggcacagtctgaagatgtctttgttttgattggaaataaaaagaaaaggcctggtaatattccgaaggagggaaagaggactt

SEQ ID NO: 65407 - DNA, 603 bp, Cucumis sativus
  Intron number 1 from transcript Cucsa.159820.1 (locus Cucs a.159820) derived from phytozome v7.0 (chr-ID scaffold0114 4; pos 198519 to 199121 reverse strand)
cttccgaggcacattctacagtttctacgatagatgtgagtttctcatttatcttcttcgttttgcgctgtttgtttgctttctgattcgcgatgtgcgatcaatcttgtttgagtgttaatttaagtttgaagatcggtgtgtttattcaattattgaattttcgaggttttattaagtaaaggttggtggatgtatgaatctggatcctgatttctacttcgatttgattagctgttaattaatgcgtaaattcttactctcaaccagtagaattttctcgaatttaattgagttgtgaagatttggaacatatcttaacttttgtctctcttgaacttttagtaatagatttttttctattttagcaattgtaatctgcttccggtttttccgtagtggagtgccgttctgtaagatcctatccataaatgtcgcgaggcatttgcgaggcaatttttcgatattttatgaatgtctttgaactctaaaatatcagaagcgatgatctacatatcgatctactttacttctatctttctgtttcttttctataaacatttactagatcaacatatatttcttttcagttgaaacgagcat

SEQ ID NO: 65408 - DNA, 1012 bp, Cucumis sativus
  Intron number 1 from transcript Cucsa.180210.1 (locus Cucs a.180210) derived from phytozome v7.0 (chr-ID scaffold0123 3; pos 548662 to 549673)
ttcatattccaacaaccaaatcctccatttcatcggtaaattctctctctctttttctcctttacgcgttttctttgttttggaattttattttgatctgcgtagtacccacaaatcggaactccaaatatgttacaataccagattattgctttgctttccttttttatttctgaatctggaatttctgattatagattaatctttttgttgaaatacgctggaattcattttttttaattagtgttatttgttgatttcaaattattttttgtatgtgtcttacgtttcgggagatcgtgaatctacaattggtgatcgatttcgtgttctttatgatttgtgatcggttgtgattgcgtttatggttgtatcattttctgtcgtgtgttaatttcttttaggaagtggtatattatgtagagaagaacggagagggcaggttcaactattgatgtttgagtttttctctaatttgttctatttgaagtttcataattgaaagattacatctgtaaaagttggaatgcaaatttcgctccttcttataagtgttgggacatgatcataacatattatctacactaccgagcttagatctctttggtttatcaatatagaagttgcattttactcgcacattgaagatattttttgttcattctatgttaggcatgttcacatcgttaacaagttttgttaaatgtgatcaatcctttttgtctcgatctttctggaaaagaaaaaagacactatggagatcattttagaggctgtcgagtcattggcgtgaagtctattttttaaatgtcttataagttccaacaaattagcgcatctcgttgattgagaagcaatcaatttctcttttcccctggaagctgtttttggaattgtaattatcttgaatggttctcctctgtgctaaatgaggagtgttgtgttcctaacttctctggtttgagtgaagtttgtttgtcaattttcagttgttattagaagctgataaatc

SEQ ID NO: 65409 - DNA, 878 bp, Cucumis sativus
  Intron number 2 from transcript Cucsa.140450.2 (locus Cucs a.140450) derived from phytozome v7.0 (chr-ID scaffold0107 1; pos 355485 to 356362 reverse strand)
caccacatcgtgaaggtgacctctatttctctctaaataccatattttgttcaaattagtttagtttatcttgttaaactttcattattgtttaattattggtagagtttagtgggttctcttacactaagcctaatttcaaatcttgtctcatatattttttctttttttcccttatgattttcagttgtctttggtagggtcaaactccatgatattcaggtgtaacataagtatggaaaaagatgacttttcttcccgtttggatttttttgattagttgctatgtgacttgacctgacctgtggctgttatcaattcaaaccacagcaatgttgattcacatatgattgggctattagttttaccgtctgtttgtggcctttaaatagctgtagccgctagccagtagaggggatgcgaaagaagagaagatggtggattgaggagaggagaaaaatgaaatattatattatttggggggctgggtgctcaaattttaccacctcttttttctggactaccacatataattattacctaagaggattgaccaattgggcttagtttttcaactaggacatgtagactatcttattctctctattactaaattaatcccaaacgatttcctcttcacggacattggtgattgctgctttttagtcccttgttccgtttccgtaatttttcatttgtttgtttcaacggaaactgctttagtaaactttatgatctttttgtgcgacccacatatatggacattacttctgctgcttatagttgggttgtgcacattctttttgttgtttgattgtgaacggtatgacagagatgtggctatttgacaggtcctattctctcaaggaatcaggcag

SEQ ID NO: 65410 - DNA, 640 bp, Cucumis sativus
  Intron number 1 from transcript Cucsa.162880.3 (locus Cucs a.162880) derived from phytozome v7.0 (chr-ID scaffold0114 4; pos 2386180 to 2386819)
accctagcacttatttccgactctctattttcgttgtgagtcctatttttcttttcatccctttctaccaattctactgtgtgcttcgatgcggagtttttcttttatgatgtttattgttcttccaagcgagctgggttttgtatcaatgtttacttttcttggatgattttttctctggctttatggttagactattggtttatgttcggttttcaatttatcaatcttaggtcgcgtattttgatgtttctgttttcgattcgcgcgtttctgttgctttattatggttcactgactgaacagctagacgaagtctttcttagaaagctgaatttaaaaaaggggttaaatttgtttggctttggtttttttcttgagaaatggggtttggtcttcttaatttctgcttcgtttgtggaaaatattcctggctactttgtttttatgctagtgcgtaaattgcaagagcgttaatccaggcgtgttgggttgttctgaactttatcagcaagcaatcccattctactagtcatatagcagtcgtgctcggtgatttatgaatcgagtttcgagttttgacgtgagattttttttactgtgtctggaactaacgtttattaatgctgtatagaaattg

SEQ ID NO: 65411 - DNA, 914 bp, Cucumis sativus
  Intron number 2 from transcript Cucsa.179000.1 (locus Cucs a.179000) derived from phytozome v7.0 (chr-ID scaffold0122 7; pos 1395839 to 1396752 reverse strand)
tcgagcttcatcttgtaaggtatgccccatatcactcaaaagtctatgaaaggttggaattcggattatgctgacaattttcccccctctttcatcatcatttgttggtttctggtttctggtttattttttaaggaaagaaaaccatttatttatataacgaaatgagtttaatgctaaaagatacaagaacaataattaaagacaaatatatgaaaggatagaattgtgagagatatgcgagcattatctcattattgttttaaagaatttgaatgagaatatcgcatgtatgtgctgttgttatgattgattgttaatgtagattaagtaacgttcagaagaatgaaagagtgcttgaaaataaaacaaactagtgggtcgtcttaacattcttgttgatgtcagagggaggaaccaagacccttgggaagacctcactagctttggcttccgttattaacctagcaattacttttgaagttgaagatgggtcaagtcactgatctagtgatctgtttctggaagaacaatgtgtatgggctattatgctcctttggagtttctctaggatgtacttgttgatattactcatcttggacctattgctatggtttttattttactgggaaaaactgttgcttgaaatgcattattcaaaaaaggcaggatattcatgagtggacactggacagatatagcatactcaatttgaagtgaaatgccctaagaaaatgacatattaaccagaaaaaaaaaacaatgtcgtacttatgacaactattagacccttaaaatgataaaatggaaattagagtgatttcttttctgatgtttatcttaaagagtttcgctatcttaatttttgctttttcttaatgcaatgtacctatgctagatattccagcagcaca

SEQ ID NO: 65412 - DNA, 603 bp, Cucumis sativus
  Intron number 1 from transcript Cucsa.198900.1 (locus Cucs a.198900) derived from phytozome v7.0 (chr-ID scaffold0135 7; pos 1804680 to 1805282 reverse strand)
ttctctccgccctcattctttctccctcgtttaaggttcgtatcgacgtgcttcttcgatccatggattttttgtgattttctttgtttgttctgttccttatccatagcattggcagcacttcatatttgtattctctgcgagaaagctgacaaatgattgcatttattcttcagttttgcttttgtttgccttcggtgattagtgttattgtcttttggttgttggttatatgatcttgtttcatgatagacagatgattattgggattgagattcgagatattttgatttgcagttcttcgttttgtttatgagttggaaaccttgaaatgttatgcagacattttcgttctccctccttctcttggttcaaaatataagtaattagaattgtaactcgtatatgctttctgaaagttggtttctttaacaaatctctagtttcatagaatattatgcactgatatacgtaagttctttgtttcccactagttgttccttgaacttattatgttgttcaaatttagaagtggagctgtatagtaaaggaaaagattcttggattgaataagatttaagttattggtgggttcgtgcagga

SEQ ID NO: 65413 - DNA, 697 bp, Cucumis sativus
  Intron number 1 from transcript Cucsa.220160.1 (locus Cucs a.220160) derived from phytozome v7.0 (chr-ID scaffold0165 8; pos 1680230 to 1680926 reverse strand)
cgtaattaattaacaaacttcttttaaactacgaagaacaaattttcaatttatcctataattaattgtataatgttacaaaataatagattatacaatattaatttaaaaaataaacatagttgaatagtttattgtcaaattattgagtgaataactacatcgaaatttggtaccaaaagcatctgaaaacataaaaggattatatttcttgtttttaatttttaaaattttaatttaagtaagtcttaaatttatttaaaatgtatagaatacaattaaaggagtaatagaatatatatatagactaaaattgaaggaaggtgaagtataagtaccaaaaatagaacaatattttaaagagagaaagtacgtagatggtagtgtattccattttttgggttataaattaatgcattactaatctttgttcaacaacgcttaaatctcaaatttgccgctgcgctaattacagtttcactaaattggtttaaccacaaatcaaaatctttatcttctccataaaccatgaacattactgcaattccgtccaccttcactcctcctaactccttaacaacaacaatggccataataatctcatcaacgatcattgctttccacttacagtttcatcctacacgcttcaaccatggaccaagacaccttggtcgtggattcttccttcatccaaccc

SEQ ID NO: 65414 - DNA, 752 bp, Cucumis sativus
  Intron number 1 from transcript Cucsa.136450.1 (locus Cucs a.136450) derived from phytozome v7.0 (chr-ID scaffold0104 4; pos 1069240 to 1069991 reverse strand)
ctataactcagtggttgaagaagccaaaattagtgggtcacaattctttcttgccaacctgatctttatcttcttttctgttcttcctttttaattatttcttctaatgcgttgtaatcagattacattaatcaataaaaatctttctttaatttttctctttattattaatcccaaattcgaacataaaactcccactacgctgcgccaaaaagggggtccaatccaatccctttacttgtttttctcttcttccctcgatctttcttcctttctcctctcgaccctttccccaccttcgatttctcccacgaattcgcttctgggttctttgttttggcccttttcgtttacagatccaccgtttttccaagttcttatctcaggtttgtgattttaactccgttttgtttcacatttccagctcccaactcccaagatcacgattgatttctcgtctttaagatctttgttgttaaacagtgttggttctgggtgcgtttattggcttcaggttcatgtttgttttgttggaatatcatgatctaatgttgaatgggatcgggagtttaagttaatctctctctggtggatttattattattattattttttttttttgcattttcttcttcatgaaacagaagttgatttgaagcgtatctgtgtttagtttgattaatgtagtttttttatgattgtgatctaacaaaacagagaagggaacttaggtttgagagttggggattgct

SEQ ID NO: 65415 - DNA, 1034 bp, Cucumis sativus
  Intron number 3 from transcript Cucsa.302170.3 (locus Cucs a.302170) derived from phytozome v7.0 (chr-ID scaffold0295 1; pos 383806 to 384839 reverse strand)
gatattgaatttgaaatcgcaaggttgagacccaggttagtgatcgaaacaggattctgatttttgttcttctagttttctctggtcttgaataaactccacaattgcctccttatttgaatttagttgcaccttaattttagttaattaaattttaaattagtcgttaggatttaattggaattattatttttttgttttttggaaggctaaataataggaatgtattagggtgatgttaggatctaactcttaaggaacataagtaattagttaggaggttgttaagatatttgtttatatgtataaatggagtgggagatgaagggagtaattaggcattgattctcttggtttagtgcttgattgatctcgaataaggaaggctccaagttacccaaattgcaaagtactttaccaaaatatggtcttctttggttcttatcactataaatggctagtattgggtgtgacagggagcttttggaaccttcgatgataagagattatgagtatcgggcccctaaagtttgttaagagtggatgtcagttagctgaagtttttagatttagtagtggtttaggatggtatggatgagtaagtcttgagttcaaacttctataacgttattatcataaccactgagttgaggtaagtagtatcaaaacaagtctttgtgtttgaacttctaaaatgtcattaccatccataatacaatgtgttttagcccttgaaatgtcatttactacgcaccaactcaagcttttggatttaataaatttaacatggtatcaaagtagatcttcgtcttgtatttaaactaatatcattatcatatcggcttaagttatttaacaaagttgatattgtttttcaaatggattgatttctgccatgtatgcaagcccactgcatcagtcaggatgtagaaccgaaaaattttgaatttgaataaagccttctgatatttttgtggaatagaagtattcctttaatttttcttcgctacaacatgcatcaaatggcaggctga

SEQ ID NO: 65416 - DNA, 820 bp, Cucumis sativus
  Intron number 1 from transcript Cucsa.303210.2 (locus Cucs a.303210) derived from phytozome v7.0 (chr-ID scaffold0295 1; pos 1184506 to 1185325 reverse strand)
ggttgcagtatcatccggaggtaatggggttcattttttttagaactttgcactttgtactctgttatttaactattggaatcctactttctttttctgtgcgtttcttgtttcttgttttgctttaatgttcattttttttcaggttgaagtttgacctcagatttgttttgattccggagatttccacctcaactttgtttgtgttttttgaacttcggattttgtgcgtgtgtgatagctcgtccagaaaaaaaaaaaaacccaggtcgagtagatagaacctgcgttgtgtttatgaaatggacgacctgtgtttgggcgctttcaaaacattatagtctttgatgaggtttcatcttggttgaaaactctgcaggctttttgtatgcccttggattctttttttttttcttttctaaatgaaaacagttgtttctatcaaaaagttattctgtggcttcagtggattacttgtaaactgatttcaagtactcatcttcaacccagatttttgttttctcaggtttctgcaatgtatgggtttgttggttgtggcttttgtaaattaattttgctgggccaacatatccctggttgaagaatagtgtttttatgattgataactatgttctatcacttattattgtaagcttgagatgtataatgcaattttttaatgggaagggggattggcataatttaatcttgctaagtgatgaactgatgggggatcatccgtggcatactgatcaggtattgtcaatatgagaagtttaacttgctgtatcttgtgtaggtgacacattcaccagaagga

SEQ ID NO: 65417 - DNA, 341 bp, Cucumis sativus
  Intron number 4 from transcript Cucsa.284180.1 (locus Cucs a.284180) derived from phytozome v7.0 (chr-ID scaffold0265 3; pos 1035018 to 1035358 reverse strand)
tcatttttttggttacatctgcgctgcttggctacgtgagtgttgatcaatctgaccagaccacatatatttcttaatcttttgatcgtgcttgtcaattcaactttttttttctcactacgtagcttgtatatatattttagcaattagttaaacctttttgtccaaatcaaatgattctggaactttatttcctggtttacaaaagtcaaggaaatttgatttgttttttaatcgtttttgcaagaagctaccaataaataccaatattgaaaacttcatacttttcatgtatttttcttcaaggtgtgttcgcctcatctagattcagctccaccaag

SEQ ID NO: 65418 - DNA, 552 bp, Cucumis sativus
  Intron number 1 from transcript Cucsa.161410.1 (locus Cucs a.161410) derived from phytozome v7.0 (chr-ID scaffold0114 4; pos 1310875 to 1311426 reverse strand)
accccgggtacgcattgcatctgattgtttggtttatcgtttttcgtttcaatcattgtttttgtcaattttgaaaagttgtgttatctgttcttattgtaagctatttttaaatgattgagtgaaataattgttggaatttgggcgtggttattttttgtgtttggttgctgagtatctgttcgtcgcaaaaacaaatgattactagaagtctgttgttgggatttttcatttgttgtatttgcaaactgaatattgaagacaggccgaaacttgcttcttttctgtgttcttttgcattcaaatggaaattatgatttgcgactcagcaactgactgttcatgcatctcgataaacaaatgagaaatttcagcaggttttgctactgactaggttttcgttttaattggatttcttgacaaggagtaatttgacgatgcttcggttatttctttcaacgttggatgtgttattcatttatcttttctaagtgtctaatctttaggcttggagttcactatttcattggcaaattttcaggcaagcgaaag

SEQ ID NO: 65419 - DNA, 833 bp, Cucumis sativus
  Intron number 1 from transcript Cucsa.142050.1 (locus Cucs a.142050) derived from phytozome v7.0 (chr-ID scaffold0107 9; pos 366489 to 367321 reverse strand)
gatactctgtctgaaaccattcaggtaacgaataacttgagatttcttaattctctttatcaattttgttggatttttttttatatataaaagaacttaagtacattattaaatgtatacacatctttgtttttaaaatttggtgtcttagaaacttagaacattgaatgagctaaaagagacttgggagtttttctcaaagtcatggtgttttgattgtggaaactatatggttgtttttagaaactttagtctgttttctaactcttatttccacttttgtttagaaaataaaaagagcaatatggcattttttttcttttgttatttttcttataaaaacaataaaatgtttgaaacaatattttattcataaactttcttttctataagcatatagctcaacttaattttttttaaaaaaatgtaatgttttaaggtatatatatttgagaatcacctcatacattataaaataacaataatatataattttttattcaccttttcaaaatttatacgttgtttcatgatcatattatttcttttatttttttattgtttaaaactaactataccctctcatctcaaaatctaactatatgaatgcaaatgttctcagaagttgaaaaaaaaaatcaagaaataataaccctaaacaatttatcttttctatattaacaagattcactatcaaaggtcattatatatcaatagataaaatgtttatttaggaaataggttcaaatctctcataaaatgtatgaaataataaagaatataaggagaaaaaagttatagaacacttatttgaatgtgatgcatgcagttgt

SEQ ID NO: 65420 - DNA, 621 bp, Cucumis sativus
  Intron number 1 from transcript Cucsa.292810.1 (locus Cucs a.292810) derived from phytozome v7.0 (chr-ID scaffold0277 9; pos 453809 to 454429)
tgggttacaagccatttttgtgttcgttcaaagtgtgaggagtgaagtttgacaatgtaccaattaccggagcactttctgtctgtggtcatgaaagaaacctggagcttggaaaactacattgtttagctgtgagaacaggacatgagactcatacttctgtcggtaatgttttgatctcgacatactccaagtgtgacatggttgaagatgcaaagccagtgttcgagttaatcaatgacaacaatgtgatttcatggacgactatgatattgttgtatgaagaaggtgcagtatttttgttcaataagatgagattagatggagtgtatccaaaggacgttacatttattggattacttcatgccattacaataaggaatatggtggaacaaggactaatggtccatgaattgtgtatcaaagctgactttgtatcagaatttaagtgttggcaatagtttaatcaccatgtatgctaaatttgagtttatgcaagatgcgtcaagagtgttcatcgaacttccatacagagagataatatcatggaatgccttaatttctgggtatgctcaaaatgctttatgccaagaagctttagaggcatttctttatgcagta

SEQ ID NO: 65421 - DNA, 686 bp, Cucumis sativus
  Intron number 1 from transcript Cucsa.185900.1 (locus Cucs a.185900) derived from phytozome v7.0 (chr-ID scaffold0127 4; pos 1300334 to 1301019)
aggtacaaaaaaaaggaaaaactattctttttattattctaaaagaatttaacattttgttttgttttcttaattgtgaatgttggacgtaattagttaattaaaaatctttaattaactaattacttctaccctttggtgttggatgaattaatatggtagtcctttcattttccataactaattccctcatctcattcatccaattgcataaaattaaaaacaaatcacttcataatttattaagctttgtatgttcattctcaacttcaatttttacactaaaaaagattcaaactatatagtgtttgatattgttagacctaaaagttaaagtgagtgacacaaaaaagtctccttccaacatggttaatgataaaatttaccatcgtaaaaagtaaaacataaagaatagagtattaaactaacatgattttgtctcgttgaataatatttcgaaactaagaattattacatacaaaaaaaaagattcatgtttgaaccctttttggagtgtcttgtcaaaacaagtacctgaaagtaaaactcttcatgatatttatttcgtgcgattcgattcgatgattaattttagaaagatgagttgtatattatttctcacactgatgattgattttcaaaatgaattaggtggagcagaagtataaacaataccaccaacaaat

SEQ ID NO: 65422 - DNA, 893 bp, Cucumis sativus
  Intron number 3 from transcript Cucsa.385560.5 (locus Cucs a.385560) derived from phytozome v7.0 (chr-ID scaffold0390 4; pos 861914 to 862806 reverse strand)
cattactttgtctttctttcagagctaactcccaggtgagttttggttttattatagttggttgtgttggttttgatagatagaacatggaggagtctataataatctataatgtactagcaaacattgacattgatgtactctgagcattagtattttttcatttcattgatgaaaagtttactagcaaacatgaactttatcatatcaataattgggatttaagattaatgtcattttccattcccagttcttattcctatcagagaaatttgaatattcggtaaccttgaaattggataaaatacaattgtacgcacactagtagcctagtggctgccaagttgccaacatttgaatcgatggcctaaaagctattccttttgaattaaatcttagtgattgggtgctacgaatttaccaaattaatgaagagcaggagagttcattgttttccttctcttcactttttcaagaaaaatattttctctgttaaaaaatgatcttgttccattttctttgtctacttgcatagttgcaagcactaaaataagattgcctacttcatattcaaattttgatgctgtttgggtatggaattaaaaagttcccacacttttttaaactacagttttttctttaaaatagaaaacttatttatacagttgaataatctataacagtgaaagattctttacttagcccaatacaaactgttccttagaaaatagcgcctttatttccatattttacttccttttaatgaaaaattggaacggaaaactttcatcagacttagtcaggtgggcttgcatatcatttgtttgatcaaagaaaaggtgcactttggtgttatcaataatcatcatatcttccttttacctttacaggcc

SEQ ID NO: 65423 - DNA, 572 bp, Cucumis sativus
  Intron number 3 from transcript Cucsa.392170.1 (locus Cucs a.392170) derived from phytozome v7.0 (chr-ID scaffold0406 2; pos 411317 to 411888 reverse strand)
ggcttgaaacagagattttgtcagcagtgtagtaggtataaacgttgggacttagatttcttttcttgtttggtccttttttttttttttctcttttgctaatcatggtatgactgatctgttctgttctgttctctgtcaacaacttttgaggattacccattattttattcttgaagaaaagtagcagcttcaaggaacattttttatatgctttgctagaaaatggggagctttgattttgctttttggatggaaatgggaactgttggtgtttttatctgaagaaatttgtcctctttctgtatggttaaaagtttttttccagaacgttttggctctggaattttagtcttttcatgagaaagttctcgcataaaaagttgagataagtaagaaattgaaagttccaaaactggttgaaattttttacccaattttggtatcttaaagatgcaagcattattgaattcccatctcctctgttttgcaatgctctgtttttttcctttttttctcttcttcttctttctataggtttcattcacttgaggaatttgacgaaggaaaga

SEQ ID NO: 65424 - DNA, 927 bp, Cucumis sativus
  Intron number 1 from transcript Cucsa.310130.1 (locus Cucs a.310130) derived from phytozome v7.0 (chr-ID scaffold0299 5; pos 19221 to 20147 reverse strand)
ttcgcttctacgacgctcgtctggaaggggttcgttcatttgctttatacttctcctattgtttgattctgagttcatctctgattccttttgtttcaaattttagtctctgagttacttctaactttttcgagcaggacctttgtttagaaactttgtttggtgattttcgttctcatactgaagatagtctctctagtggtggagttgttgttgttgtttgtttgtttatttgttttttcttttgtgtgtattattttaaggatcatagatggtgtaagactattccatatgccatagtgtagtatgagttttggaaggtttgtttcagagattatgcatggtttacagttgccgttttactgatcttaaaatgaactttctgaaattattttggaatatggataaaatattgtttttccttgattctatatatgaatttgaaacttcaatattttattctaactcttttgtgcattttaattcttaaaattttgtaaaacttcatttctttttattaagttctgagttgtttcaaaatttaaggattaaagtgatgattgtttattagctccattaagtacaccatatttatatgcaatcagtgacatgacatctatctatgagttggtcatatgagcacttatactatcatggacaacggccctcatatcttcgagttgatatggtattatccacttgtatgaaccctcctgactttgtttttggtttaacccaaaaaatctcatgtcattggatatagttgtttttatttacaagtcccatagttgatgaacaattatatattggatttttgaagaatgcttaattcgaattttcatatagtatcaattcaattagaagacttggcattttcattttctccatgactcgtgcattggtaggtggattatcttgaacactctt

SEQ ID NO: 65425 - DNA, 876 bp, Cucumis sativus
  Intron number 3 from transcript Cucsa.356370.1 (locus Cucs a.356370) derived from phytozome v7.0 (chr-ID scaffold0357 7; pos 1149203 to 1150078 reverse strand)
aggtagcatgtttagtaatttttttcatgttgaagtttaaatgcaagtgggaccaagttccttggcttaactaatgcttgaaatcagtgttctgtttgcaagacgcaataaggtgacaagtctctaaatcatcttggaagataaatgtattaatgaactattgaatatttaaactcaaattaacttcaaattttttatatgtttaactttagcagcctaattaagtatcaaaattgaacattatttcgttgaaaaattttgttttcttaggaaaaacctaaaagtcaaaacagtaaattggatgaaagattctgccgtctagcctccagatttgatggcatgtagtggcagtttgcactttacatacagtcatttgacaattcttacactccatgtgggctgttcattgaaaggcttgttaagttaagaagttactaagtcgaggttgagtttcttttttaggggcaggacagttgatatgttttatttatttatttttataaccatgccttgttttcagttttatttacagcttagtctttagtttcagtttttattcttttagtaagaaagttatgtgttttatttttagatttactttcattcccttctataaatattgatctgtgatcatccattttgaagtttttagtctgcaatattcagctgtttttgggcttgtttgatttttaagtttgctttgttcttagtgttctactgttttgctcggggtttcatttctgatgattttgtgagtcttaaaagtgcatagcttacagttatgaacttgcaacttgtacaagttcatggtctattaaatatttgggaatggcttcttcaggtcagggatctcactcacttgccatttgctgagag

SEQ ID NO: 65426 - DNA, 504 bp, Cucumis sativus
  Intron number 2 from transcript Cucsa.342540.1 (locus Cucs a.342540) derived from phytozome v7.0 (chr-ID scaffold0335 6; pos 4830438 to 4830941)
gcaaacaaaacaaattcgttttctcagaaaactcggtaagcttctgttttctttcttaatatgcaagctattttgaaaatgaggaacttaacctttagcagaatgctttccatttaattacctgtttgtccttcaattcattcatttaatttccaaaattgtttcgttttgttgagggagtaggtagagagtgagatttaattagatatgcttaggctatatcgtgcaaatagagaattaatacaaagaattgttggatcaaactgtactttgtgttttaagttcgagagaattggtttggagttcttggaacgatatttttttccccaatttttgttggtgggttttgataccatttctttctgttgccctcacttccaaggacaagagaaaacaaaccattaaagaacaatgaacatggtgattttatttgtattagtgaagtttcttcattgttgctataacgtaggatctctgctggaagaggatccacggcagctgaaa

SEQ ID NO: 65427 - DNA, 465 bp, Cucumis sativus
  Intron number 1 from transcript Cucsa.327640.2 (locus Cucs a.327640) derived from phytozome v7.0 (chr-ID scaffold0315 9; pos 10178 to 10642)
gccttcaacagctagcccagacgtgtcgcttcaaggttatcttcttacttcttagttcttagtcgtgattttatcgtttttggttccgcttacttccttcttcattttcttattccttccatttccaaaccgaatcaaagccctttcaatttcaattccatctcttttcatggtgttttttttttacttaacgctttaatcggatcattatttgttgaagtcgaggtggtgaagtcctccaccgaatgtttttctccctttataactcaactgaagtgttgaatttctatggaaacgcaattcatcgttctgcaaaagcttggaaacacagtgtagtcaaattatctttaaatgccgcgacgctaaccacacattcgagtgtttcttagatgctttaattttcaaatgctccgttggagttcattttggtgatattgtgataaatatgctggtgttttcgcaggc

SEQ ID NO: 65428 - DNA, 720 bp, Cucumis sativus
  Intron number 2 from transcript Cucsa.398130.1 (locus Cucs a.398130) derived from phytozome v7.0 (chr-ID scaffold0415 8; pos 671747 to 672466 reverse strand)
ccaaaacttgtaagtgacatgtctataagtgaagccacatgtattagatagtcttatttattcattatattttctgttgcagtcaagttgtagccatttcagttggtttccctttttattttctatttttatgtatattaagaaaaatcaatccttttgtgcccacattcaaagacaaagcttcgagtactttggatagaaggagttttctagtatgccatccttcagaaaatttagactggatgaaattgttaaacaacagtttggggaggaatttattaatacatttcttgaatctgtcgaaggatgaaaaacataaacatgaatttgacgtcccttggcagtatgggagcttgtggggagttgggcttaattgttttagtaaaactttatcatccatcttgtatgtgaatgagttaacaatgtcagttggctgttgggatactgaaagcttaacacttttttgaactttcttaccctaaatttatgtttaagctcattaataatgttgtaaatatgataataaataaatccactatagatggcaggttggctttattaaggtggtttctgatagacgttttccaatctcaatttattgtcacttatcttaccataatatctatttgatgcattttcttcaatcctcaacatgaaatgcctgacctataacatttattttctggacagggttggaaagctttctttgaggaaccagtt

SEQ ID NO: 65429 - DNA, 1008 bp, Cucumis sativus
  Intron number 1 from transcript Cucsa.355900.1 (locus Cucs a.355900) derived from phytozome v7.0 (chr-ID scaffold0357 7; pos 466388 to 467395 reverse strand)
gctgtgttctggaagatcggttgccaaaataccaagtaagatttattctccaaaaccccatgaaatcccatccttttgatttttctttggagcagtggaatatccctgaaagaatgatgggatctgggtttcattccagcgttgtttgtttagttcaatctaaaaggaaaaaaaaaaaaggaaaaaaagagtaaaaaagtactcgagagagtactgtgtttgaaccctttaaagtgggaaggtcattaattagttttggatttatgtttatccatagcttgtgcttattgaagttgaagggatattaagtagctaagatccacatgattggttgaaacaaaattgtttgatatgtggccttgttcgactgtcactaactgcaacatcattttctctttattgacaaccttttactagcatctttatcccttttttagcagcagatgttttggatggattctgaagaatctttagggaagtagatttttcaattttttttcaattctgtttgtttttgggcggttttctttggagattagtggcctttggctttagcttccttgtttgtttttctttttctatttttgctttgtggagtgagcttttgctttttttggccaacgggtctttgagtaatatgctgatgacttgctttcacagcattcatatgtggctgacagaatagagttaaaagttgatgttttcagatccctttgactaatttgttatcttttggaaaatggaaaattttctgaacttgcttgcttgcctaaccatattattgaagctggacttttgtttttctaattacttagcaatatatagggtttcatttctttttctttaaatttttaatttatactttttattcctttctcaaatttcgctcaaatgaggaaaatattatactgcttctttactattgggatctctagtttaatgccatgctgttatctttgaaaatgaaagtgaggcattttgaacttgcaggctcctgatttgggaaga

SEQ ID NO: 65430 - DNA, 560 bp, Cucumis sativus
  Intron number 1 from transcript Cucsa.395150.13 (locus Cuc sa.395150) derived from phytozome v7.0 (chr-ID scaffold041 00; pos 778142 to 778701)
aaggttagtagatctttagatctcggcttctcacttgttttttgttagggtttttattactttggtgtagctaactgcggttttagtggtgaatctatgttaattgtggtatgcgggtgtgttgaaacggtttttttttttgtttgctactatggctctaggagtaggataaggtagatgactagtttttgatcttgtgtggtttaattcttttgtagttattggatacggaattccttttcttagtaagaggatggtattgcgaaatttgtctggaattatggttcctgtatgaatttgagcttttcatttttatcgtttagatcaatacctaccgatcccgtttgttatttctactattctattgcttgtgtttcttacttgttttcttttaaatgttcgattattttgagtaaattgtccaatacgattgctggtggtgttgttattgcagctcgtatgatgttaatatattctatcttctgtttgagtaatatgaggacatttctctctcttgcgtttcagcaattgattcaggaagcttcaacaacagtgtagca

SEQ ID NO: 65431 - DNA, 445 bp, Cucumis sativus
  Intron number 1 from transcript Cucsa.342630.8 (locus Cucs a.342630) derived from phytozome v7.0 (chr-ID scaffold0335 6; pos 4906421 to 4906865 reverse strand)
cgtgatacggcctaattttttgtatcttttaaaaggtaatggatcttcaaacacttcccagtattaagactgatgatcaggacacaataatctagataacccttataggtaataaaaaacgttgaatccgactctgtgaatctgttactctactcttttttttttccttgttaactcgtcgccgaggaactaatatttgaattcattcaagctgatgactcttacactgttctagtttccttcgcctgaatgttttgacttcaaatttcaatttcctttaagttaagactttagtttgcggtgttccctaattatatatgcgttcgaatcgccaattccttaagcaaattcagttggtgttgtgacttgtgtgttttttggtttagattggggattatgttttttttttatctgatcattttcattttggtgaacaaaaggcgat

SEQ ID NO: 65432 - DNA, 914 bp, Cucumis sativus
  Intron number 1 from transcript Cucsa.342970.4 (locus Cucs a.342970) derived from phytozome v7.0 (chr-ID scaffold0335 6; pos 5258056 to 5258969)
ccttctcttcgttgattccttgattttgtctcaaggtaataattattaggtacttatatttgtctctcgcatttcctttcttcaacctaagcctttgttgtgtttttctttatttctggcattcagtggtatttagtcttcagattgctcggttgagatgcttcatgttttgtgtattagatctctctcactatcttattcttgtttttctcggtcttgctggtcttaggctgataatgtttggagattttactttattttttggaatttggatacggtttctttgtggttgtttggcagatgctcctgacgttttgttattccctaaatttgaagttgtttcgagttcttttctcttggagttttttgttcgatcgccgttgatgaaattaagttgcgatttcattatgtggaaggctagaatcgctccatttggtttgtagtagcctgataatggccaaggaatacaacattttacgcattgtattggccaatttatcttctcattttttgctttatagtttcttttgattgcttattcacaattttagcctgtttctgtgatacgagaaatgtggttaaaaactgtgtggcgcagtaatgtgtctagtactgttacgaatttctgattgaggaaagttgtggtactgtctatctttttttttctttgtgctatttcttgcaattcggttaagttgattgtttagaagagtgagaacatacattaactgttccttttgcatcaaacagcaattattatgtaactcttcaatttttttattccttgttactcgttgtgatctcctacttcttataagaataaacgattttctcattgttagcttcattgatatctatctatggcgtttttaatttaaccataactgatctctaaattttgttaggcattcaag

SEQ ID NO: 65433 - DNA, 170 bp, Cucumis sativus
  Intron number 4 from transcript Cucsa.342970.4 (locus Cucs a.342970) derived from phytozome v7.0 (chr-ID scaffold0335 6; pos 5259319 to 5259488)
cattcatttcgtaggggtttgatgtagatgatgttgttaggatgcctttgttttttccattttagaacctttggtctggaattcagttcaatccttatagttagctgctctttacttttgaattgtgaattgttaatattattattattcttcatttgtgcagggttcct

SEQ ID NO: 65434 - DNA, 530 bp, Cucumis sativus
  Intron number 6 from transcript Cucsa.342970.4 (locus Cucs a.342970) derived from phytozome v7.0 (chr-ID scaffold0335 6; pos 5259828 to 5260357)
ctgcacaatcaacagcaaggcctcgccagtctcaggtatagtcttgtagataagttcagttgagtcgggattgtcttaatgttcttcatctcttggttttgaaatggtatttacatcaagtggcgtggaaatagttatactgcaaatgcaatgctgttgtgtgttattttaaccattgctgttgtatgcatttgaagtttcgcgtagacctgggatttgccaacgtgtaatgatttctctccttttgttctcagattctgaaatgtgcaaatgatttttcagcaattcatgcctactccactttgactcgatatttttctttttctttggaatctagtggagaaggagttcaagtatcactttcgttgcatgcatatctgacatttgtttatacagtgcatgtggctgattttttttttaaaatacattataaactgatcgtggcatttatggcacttatctccgacttatttccataaacctgcacagcgacagcaagggtcaagagttccagcagacaacgttgcacc

SEQ ID NO: 65435 - DNA, 731 bp, Cucumis sativus
  Intron number 1 from transcript Cucsa.313700.6 (locus Cucs a.313700) derived from phytozome v7.0 (chr-ID scaffold0299 5; pos 2913603 to 2914333 reverse strand)
caagacacttgctgttagtcctttctcagttccaggtaattttttcagttggagatactgtttaatttgcatacatgatgaaaacattgctatttggtgtattctacctgtgtttctgtatacggtgcaacggttctagaccaggtatgaattttcggagggagtcattgaagtgttttctttgtcaatttgttatgttcaatgtttccctcttttgaagtctttagtttgaattaattgaagggtttttgaaatttgaatcgtttcacaattttggttaaatggcgaggaagtatgttctctaagatgaactaattgctgaactggaatgaaaatagcatatattgtacattgaaatactaaatggattataagggcttcgtttgataacgtaccacttccaccttttttcttgttatgtcatttactttttaggagtgtttttaaatatcaagctaagctttgggagctaaaaaagtagctttttaaattttgttacgaattcaagtgtttcgtttggatggatgaaaaccatggtaatagaaattggaagaaacaaacacaattttcaagaaccaaaaacaacaaacaaaatggttattaaatgaaaccatcaattttattacaagagaagttgaagaataatagaagatgggagagattcacaattttctcagttgattaattttatggcagtcttacctgcaataaggaataacaaccaccacgct

SEQ ID NO: 65436 - DNA, 882 bp, Cucumis sativus
  Intron number 1 from transcript Cucsa.393890.1 (locus Cucs a.393890) derived from phytozome v7.0 (chr-ID scaffold0410 0; pos 34488 to 35369 reverse strand)
ctagcaccgaggcggccttgatcgaatcgattaaggtttgtttcagctatttggttggttttcataaatgtatgctggattcaattgtgttatgattccaattgattgcgagatcttcttgggattgtaactttttggatgggggtatatgtaatccgtagtcgggaaacggcttttcttgaaaaaaaaatttcgacgattggggaaattttacatgtgggtttttcttgtatcgatggagactgagcgctgtaagttgtgtaccatgatgattatttggactgtagtttccagtttagatctttgagagttcaagtgtataggttagtggattagggttctgctagttgcatgtcgtactcttcgttcatggatcttgtatggatgtattccttgtttcaaaatcaaaataatttaataaaagtttgtttctatatcaaaataatttaatgaaagtttaaacttgaaactttttatggatcgtttattcatcaatctttatggatttctaatgcttttaaaaaccctggtttaaatgctttctaaatagttttctgcaagttttaaatagaagcgacttagggtttctttaagtttgttattatgaacgctcttgtagcaagttttcatcgaggcctttttttctttaatatcttcaggcatatgaatacatgatatgaatgtatgagtttgcttgttggaatatatgattatctgaatccagatacaatttctcctttagaatatagatagctacccgttttgaagggttgaattatattagttagggaatggttgatctgtttggtgcttctgtcgtctgctctttttgaactggttattctggttcgttatagctccaatctgaaagacagagcaaga

SEQ ID NO: 65437 - DNA, 282 bp, Cucumis sativus
  Intron number 1 from transcript Cucsa.321400.1 (locus Cucs a.321400) derived from phytozome v7.0 (chr-ID scaffold0308 0; pos 1193802 to 1194083 reverse strand)
ccatcaaattccacatctctccactcaaaaccacagtgacccacataaaaaaaaacaacacacaaaccaaacccaacagaggaaaaaccccacaaatgacaaagcaagaacatcccacaagaaagaaaaaaacacaacttaccagcaaagtattcagcctgaaaatcccaaaaactcgagaaaatcaaaagacggttaatgggtaaggaagaagaagaagaagtaaacggaatgggttgtgatcgaatcgaggtttatagagattatgaaagggttttaggc

SEQ ID NO: 65438 - DNA, 895 bp, Cucumis sativus
  Intron number 1 from transcript Cucsa.337430.1 (locus Cucs a.337430) derived from phytozome v7.0 (chr-ID scaffold0335 6; pos 507061 to 507955)
ccaaaagactttaccaagtttggaggggaagtaatgtgagttcttagccttttttgtgttttgttgatgggtttgtttttaattcattgctttgtttgtttgtttgattcaacatgtgcaatttgtgatagtctttgatgtatcggcgacgttgtttctttcttgacaatttatttgtgttgtcctacttcaactcgacgactctgtttatgagctgagaatgttgatggaatgtctaagttgtatgtgagagtgtttctgccttctatgatgtcatgtaaacagaattaagtagtcgaattattctgtatttcacgatcagataccatgtttatttttctctctctttggggttaaaagaatttggtttacgtgtcgttggtcaaatagtgtaaatcagctgcgtagaactttagaaaccatagctgagtgtttggatatcgaaaaatatatgagtatgattcctgtcttctgtatattaaagaaaatcaatctcatactcaatggtcaatactatttgacaaaaaaatttcactcttctggttaggaccgggccacttgcgttacatttctagttattgcttctcatcacttcaatacttaagtgcttcaccttttccaagtattttgtgagttgcgactgaagtcttgagggttataataccccatgttaaatttctagtgatgacagtattaataaacgtacatcatatatgagttggagaatgatacctgtctgatatttggttcgatgctatgcatatgcaaggatgacacccacaaatcgagaaatatttctgtgcatattgcagacttaatcaaattgatatgatacttcatttttctttttgtcttttcagagatttttctgtggtgggagattgatatttgggcc

SEQ ID NO: 65439 - DNA, 943 bp, Cucumis sativus
  Intron number 3 from transcript Cucsa.321360.2 (locus Cucs a.321360) derived from phytozome v7.0 (chr-ID scaffold0308 0; pos 1164118 to 1165060 reverse strand)
aaaacccattacagaaccagcttcaaaaagcttaggtacctacttcccttttgattttgatttttttttctaaaaaaatctgcttttattttctttgctgcttattatagtttgaaatctggacacgtgcttagaattttcactgcattcacatttagaagtctaattgcaaacacgagcacacccgttgagtcataattttgtgtttaatgttgcctagattttaaagtttaggattatgttagcttagtcaagtagtacaaattatttgaccaatgattctcttccccaattaggtaatactttgttgtatcctcagctgttgtgtatctcattcaatttgttcaatcattgtttaccttgtggtaaacgcttcatacataagatctgtgtttgttgcaaaatctatgcatgggcatggatgcctgatggctggctaggaaatactcactggctgttgtccttttcttggttttctcattgtctggaagtatatgggtttttttagtttcagtttttatagcttttgcaagttgtgttctgttttcgcttatgcaagtgatgatgggaatttccagttgttggtttaaaactttgagtattatgcagtttgaagtgatatttagtggttggaataatactgactatataacatgtagtgttgttaagttaccaactattgctaacttcatagcactattatgagatgtaatgtagaggttgtttgtagcaactgtttccgactatataacatcttgcacttcagctggaaacttatctcccatgtttatgtcggtactgcctttggaacatagaacattcagcatcaaatttgaatatattatagtgcttgcggtgcttgtttcctctaaggagttgcttgctcacttccttttcacttattgtagtattgggaagagtcaaagacttcttgggagtaata

SEQ ID NO: 65440 - DNA, 888 bp, Cucumis sativus
  Intron number 2 from transcript Cucsa.328000.1 (locus Cucs a.328000) derived from phytozome v7.0 (chr-ID scaffold0315 9; pos 288153 to 289040 reverse strand)
gacaacaaggcaacaagagctacaaattcaggtctggccatgaattgactttttatataaaatacaattacatttacctcacaaactaaagaaaatttatccaccaatggatttgcttggcacagtttattgcagtgtaatattgtaaatttaagtttgctagtttctagttgctaaatggttttgtctggtaatttgttagtttacttgttagtaactggcttaaaatagtgtgttagtctcttgtatattaggatgacttttgtgtaatgataaaaacttgtgattgggaatccatggagtttaggctatttgatactgggttacagtagctgaggcgttccttgcagagataaagagaccatggactgaaaatttagttgtcatgatattttacaattgttaagggcatgtttctgcatccatcctctgaaggctttcctttgcttttaacaactttcaatgctcatcaacttcaacccttggcattgctctacttgtaacaataagtgatctggacatgttaataggttgaactcctatgaaattctgaaaggtcgtttatgccaggagaatgatctttgtgccctactatttgaaagttgagtaaaataaagtatgtcttctagtgagaagatgtatataaatgatcattaaaaatgaattttcccttattttgatctcatgtatgttttttccccagcattaagttaccattcttgagaaaataggcttctgagttttgattcgtactgtgttctagaaggaataaaatcaattctcaaagcccgttcttgttattggagtaaatttctgaaaataacccctaaattttacccccactactttacaggctgaagaagcacacaaattgcgtagaaaaagaaa

SEQ ID NO: 65441 - DNA, 810 bp, Cucumis sativus
  Intron number 2 from transcript Cucsa.311960.4 (locus Cucs a.311960) derived from phytozome v7.0 (chr-ID scaffold0299 5; pos 1438966 to 1439775 reverse strand)
cattctgttactgattcactggtcagtttagcagttttcatcaagcttctatctattgatgacatgacataatacttttaccttattcttaagcactaaaatttgtgagcttaagggagtaaagtatgataaacaaggggttgagaggaatagtaagatctctcgggcataaggaagtatgagaaataaatctaaactagaagtgttagagattttgaaatgaatatgattaagtttctttttttcctgacattcattcaaaacgaaggaaaagatgattttactaatacaaccttttgtatcataaatgtgggtgtgaaaatatttaatggacggggaaattctgcgaattcgaactattatagtttgtatttttccttcagatccgaagataaatagaccagaattatttatttgttttcacagctagatcatacattgactgtgtttctttatgatttgtactatccttgacttcaatgtaggttttcctatttcattaatgcgacgtggttgtttttctttactctgtttttttgttcactgatattgagacttctcattgtgggactattgagtttatttctctatatttgttttatgatggtataaaaaatgtgtttatatggacttttgacatttgatagagtgtttgccactgtccacaagtaacttaattaacttactagttgagtttgagggcttacaattgattgaatgagtctaaatttgcttaggggagatacttatgatttgaacttttgcattccattactgatattcttatttaggagtttgatttgcaggatt

SEQ ID NO: 65442 - DNA, 763 bp, Cucumis sativus
  Intron number 2 from transcript Cucsa.365920.2 (locus Cucs a.365920) derived from phytozome v7.0 (chr-ID scaffold0361 1; pos 3797355 to 3798117)
cccttgtcaagcaaattgttcgcactggttctgcggttgattctctttcttcaattcattttctcttttgatgctgccttttttttttctttttaaatttttataatttaatctctctttgaatgattctgttcctccatttcattttcgtatttcatttctttgcaactgtcgactaggtttgtttcttggaatttggaatctggttgctgttttttcctttgtcctgattagtcacattaatcacggcttagttatccgatatcgtgaattgtagtctcttcgagctattttttaccgatggacaagtcttggatgaaatttctgtttcttggtaacgtgttctcgaacctctgcatctcaacaaatggtcaaatgaaactaaaatctgaaacagaggctgagattgaattgcatctctttgagattatttgcttccagctggaaataactgcctaaatgattgagggtggtcactggagttaatcctgtacaattaagagagagttcatctagtttttggatcagagaaggaacttcgtggtttcattttcaactttaggaacttgttgtataagaaatgcattaaatcatgagatgtgcatgaacatttttaatgttggaagacaaagttctgcttgctagttgtattaatatcccttttatgagatttgtttgtaaaatatttaaacaaaagaaaaagaaatgttcatctatgaagctcactgcattgtctgcttccctatatgtaggcaagtgtata

SEQ ID NO: 65443 - DNA, 958 bp, Cucumis sativus
  Intron number 1 from transcript Cucsa.342390.2 (locus Cucs a.342390) derived from phytozome v7.0 (chr-ID scaffold0335 6; pos 4719592 to 4720549)
ctacttcgtcttcgtttaaggtacgctccgctttcaatctttcctgcttccacggttgaattttctgcccttttccggctttgatcaaaccgaaatcgccagaggcgtacaatctctcatccacgaatccattttttcactttccatctcctgcaccatgtgttgaagttcaggaactcgttttcaaactgtttgctcgtttttcggctgttcatatgataagattcttccaatctactttcttggaatcgatatgtcgtctccggttaccgatatgtagcagatatttacttgccttttacaagaaatgatgtctgttgcctgtagatattctttgttttgttttgttttttaaatttgcaacgacttcctctttcaaagactgtaggacgttgctgagagtggaatgtttaaaatcgtctacctcattcagtattacaaaagcatcagtcgaagttgtagaacgtcgtttgtttagtatttatctagatactgattacaatagttcaagtcaaaatactgttgcaactgcacagtctagactaaaggaagattctatttgggaaatgctgagcatacttttataaatatcatggcatctccaaacattgtgaagttgttcgtattaagaaaaaaacattcagcacttaattatctatggtattcgcaatgctgtcaatttctgttacttattggtgattatttcacatttcattgatgtcttcctcagattttggacgattttctagatgtctaatcttttcatcaataaaaaggccaatatgtgaattagaattttcctctattttaaatacaaactcgtgggtttgctaaacgttgctgtgtgtgaaaatgttcataaccaatgtggtgtggtttctgtgatagtgtttttattgtatgtaacgggttctgtttgacagataattttgggatcatcttcagtggcacgtaggaa

SEQ ID NO: 65444 - DNA, 141 bp, Cucumis sativus
  Intron number 2 from transcript Cucsa.365420.1 (locus Cucs a.365420) derived from phytozome v7.0 (chr-ID scaffold0361 1; pos 3150157 to 3150297 reverse strand)
aaagaaaccaggtctgcttaaattcaaagaagaaaaagaaaaacttcagggtttgtgagattattattcttttctctcttcgaagtttcttatggtgatttgttttgtgtgtgttttttctttagttccaaggagctgtac

SEQ ID NO: 65445 - DNA, 553 bp, Cucumis sativus
  Intron number 1 from transcript Cucsa.352710.1 (locus Cucs a.352710) derived from phytozome v7.0 (chr-ID scaffold0353 3; pos 448647 to 449199)
cctcctccagctccggtaatttggaagttaatgtttttttaacacatttttcaattctttatttgcttatcgctttgacttcaatcttactgcatttatgtaaatgttttcttgtttgttgcatttcaatacttattactgtactggttttttttctttttgccccatactagacttcctttgtttcttcggttttttatgttaaattaggattactgaggctaattcagaacaattctgttttccttttaatgcttctgttctgttgcttttttcatgtctttaacaattttgatatgttcatactaaagaatgtctgcaggttcgatcacatatttaagcaaccctgtctcagccatgttcaagtccacgttaaataatttcatccctgtgtattgaaatccgaagttacagcatcaagtatataggcagagatcgagttgtttttcatatctgagttgtgaatttgtatgttattctactgtgactttgcatgttgattttgctgtgtttttcttgactgcattcgcagatatagctttgaaccaccacc

SEQ ID NO: 65446 - DNA, 559 bp, Cucumis sativus
  Intron number 1 from transcript Cucsa.327710.1 (locus Cucs a.327710) derived from phytozome v7.0 (chr-ID scaffold0315 9; pos 62203 to 62761 reverse strand)
tttctccattctcttctctccgcctttaatctcaggtttgttcttccatttttccttcttcttcttcttcttcttcttcttcttctttgattcgattccattcgattttatgtttttgttttttttaattccttgttttttgttttctgcttctttcgaggtacttcttttttttttttaaataattgtttcttcatattttactttacatctttaactttttgttcctgattctttttcttttctgggttctagtttttgaattaggtttgtttagtggtggtgttagacacttgggtatggagctcgtattggggaggttttcctggtgattgaattttgtgaagtctgggtttttaattgttttcttggacggtatgttagcgatttcctttcgagttggattgttttggagtttagtatttatttatttatttatttggtagtttaggtgatgctttttgttttaaaatttcgactttggatttaacattccgatttctttggtgtttggttgtttttatttttgcagttcttgttttgggggtgctgagattta

SEQ ID NO: 65447 - DNA, 836 bp, Cucumis sativus
  Intron number 1 from transcript Cucsa.385940.7 (locus Cucs a.385940) derived from phytozome v7.0 (chr-ID scaffold0390 4; pos 1124780 to 1125615 reverse strand)
tggagcatctttgttgtatctcgatccaatcgaaggtgaatgtgctatgctctccatttctctctacttccatctctctatctcatactctttattccaataccccagtcctcccacctgtaagcttcttcttttttttttttctttttttttgcggtttccatcgaatgcatatacaacaatctttgcttcctaacaaaatgtggagctatcactaatgcctttccttctgcaatccactacaactcactctgaccttcaaatcaaagcaactgaaggccattcatgccacaatttggttcggaacacgatacactgactgtgtgttacttctattatcttttatcgtcttttttttttcttcttaaaattttgcattcgttttcgttgttcttatcggttgttgattagtttaattcggtttatttatcgttatttggttaatttatacttttctaattcttactgatgaatttctgtgagctttggcttactatttcgattctgtttgtcatttcacaatgtatgaaggtgttggggtatttgtttatttctagctgttatagacgtaatcctataatggttctttatttaatttattttttcaatgaatattcgaagcgtatagattgttaagattgatggagataatgttactgttcacttacgcattattcaaatcattaatcgaattgcctgttagttggagttggataaacgggtttcatctatgttagtagattgaattttgagttatttcatttgcttttggcatggaatattaacgatgacttcctgcaggttaaaggctaccttaaaatttctgctacaacaaa

SEQ ID NO: 65448 - DNA, 981 bp, Cucumis sativus
  Intron number 2 from transcript Cucsa.394290.2 (locus Cucs a.394290) derived from phytozome v7.0 (chr-ID scaffold0410 0; pos 305901 to 306881 reverse strand)
acttcttcttaaggtaatccttttcttcccctactttcatgtttgcatcgttgctaaagtcgtgcctcataaggaaaacttccaatcatgatctcaactaaacattgttccttgtcaaaattgtttgattgcctcttccttcattatgcgattccggtcaaacctgctcatcaatctccctaactttcctcgtttagatatccccacttctgatacactaagctttttcccgttccttttgccgcgtccccatccctgttgatgttttttctgactatcgctacatggttttatgattgattcaactcctgctatttcttctgatctgatctccctctattgttatttctgaattcgtgcttcccttgaattttatgtttatgtttaggtttgactttctaacgaaaacgtgatggtggttagtttctcgtattttcacctatttggatgggttgttattcatagtaaatgctacggatatctggattctgtaggaatattgattgcccattatggggtttcaaatactgaattcagtcctggaatatcatacccatgtttcataataggatctgttgaagatgagcccccttttgttttattaacaatgaaacttttgtggcaatgcgatgtctgttcaataacttaatccatccaagatttttggcatttttgagaaccgactcacagaatactctaagccttgtttcttgcttgtctacatgtaatgccaaagtaaccatagcccaaggttaattgacatatgaatttttttcatttgaggttggagcttcatatctccatactccactcgtacttaaaaattcatattattgtcctttttcttcctcgctgtttttttcccatcagtgaatagaatgattaagactgctgtctccttttgcaggcagtgagccttccgtgctgtccgtattttaattttctctttatctgaaggtcatcgattcaattctctggaaa

SEQ ID NO: 65449 - DNA, 909 bp, Cucumis sativus
  Intron number 2 from transcript Cucsa.378560.1 (locus Cucs a.378560) derived from phytozome v7.0 (chr-ID scaffold0381 0; pos 155324 to 156232 reverse strand)
acttctccagttttgtcagacagctaaatacttatgtgggtattgcagtacagcctctaatggctactgtggtctgtatgtaaattttttgttccaccttttgttttctgctctttttgtaattatcttgatttctttgtacttttatgcttgtttttttgcctctaggtttgttttctttttcaattttttgatttgttattttcttctctctgtaattccttgacaaagaccgttgctgggagacggggatggggtttcccccctcaatctcaatgtaattgactcatttttgtacttttggaatatttcttgggatgtatcgaactttactcctcacgcttctgtataagatctttccattcatatttttactggttgcttctctgtaatgggattggtgtatttatgtcagttttaaactattgtgtataattagtgttattttatgtaccttgtcatcgattttgtacaatttgttcttaagtaatgtaagagttgctaggccactctttcctgcttgatattgcaggcctgaggaaatacttccctagtgtttgaaggggattgaggacttccatcttcaccacgtagaatcaggtcaaattgactgtgttactatgtttacttacctttctgtctatgtcagcagaaacaaatttattagttttcttactgatcagagattacaaaggtgatggagcttcccctataaaagaaaactttcgactacctattgtgttgtgtgttaatttttgtttaaatacgtaagtcgatgtatgctgatgtttgttaataggaacatcttaggtacgttgctatactcctgattttgtcttcaatgatttgaataactcttgggaattgaattcagggattccgcaagatcgatacggacaagtgggagtt

SEQ ID NO: 65450 - DNA, 842 bp, Cucumis sativus
  Intron number 1 from transcript Cucsa.373700.1 (locus Cucs a.373700) derived from phytozome v7.0 (chr-ID scaffold0373 1; pos 270 to 1111)
tactggattcctactcattatcaggagcagcccaggtttgcacagccatctatttttatccctgtttactttggttaaaacttaaaaatgatattttccagttgagttttatctattaattagaatgttgctccactttggaggcggttgaaacaagagtagagttgtaaagcttagagagttgtaaacgccttgtgcgttgattgtaaggagttaatatgacacaaaattaatacgttttagttgtgagcctacaaactcattgggtcaaacaaggagcggagttcacaactccactttcctcaactcctattttccaaacttcttggactaaaaggtcatatctcactctattttgttcaggcttaggttgtgtattcttagtattggcctttatattttcccatattaggttgcatgttaatgaaaatgctgtgatttcaaagatctgagccgcataacatttacgaaaagaatctaacgtctttgtatcttgaaaagttatttgatttctcaatcagaaagtagctcttgatgcccaattctataggccattggcttggccttcagattagcaattcatgagggcttttaaaagtcaattacactgacctcatctattcagagtattactgcaaatacctcactgtctatgccacattatatgatttctcaccttttgttgaggcatttgtaccgggtttttggaaatactgtcattgacttttcatattagatgcaatctgtgcttagacttgcataatttccgctgtatctactttacattgactgcaatattgtgtccttggtgttgcagagagaaactgtcgttgagatattct

SEQ ID NO: 65451 - DNA, 801 bp, Cucumis sativus
  Intron number 1 from transcript Cucsa.352210.1 (locus Cucs a.352210) derived from phytozome v7.0 (chr-ID scaffold0353 3; pos 124647 to 125447)
gttcttcacactggaaagtaagcaaccatattcttagtgaatttttaactgaatttgaacttcctggtcaaatagaaattatgcaactctattcttagtgaatttttaacttgcgtttgttcaactggaaacgtgtcacttgaagatgaacggaactatataatttgagattgaagttacggaacttctacggaatgttcatcagtttccatagcacaagaacaagaatcacgagtaccgtcaattaatctcttcgaagttcattgattttattcaattttttggaatttgattaataattggaatacccaaagactttgactctaaaaaattgatgaaaaaatggctcttgcaacagtacatactcaacctatgtcccttagcccatggatattgcttgcagtactcgcaatattatctttatgaaaaagggtttcacaatatgaatgattaagatttctatctctctcaaaaagatatgtagtctaagccagtagtcaagtcaatatatcttctctctcttactcatctgattaggtgttcgtagcatgtatgctgttatctcttagtaaaagtttcaagttgctattatttcagcatatctcctcagagacaaaattatagcgttttgtagttgtttttcttcccttggatgtatgagatatcatgactgttggtcttgcaattacaatggtggataaaaaatctgaaagagaatattttgtgtcttggagtcattagcatgatgaagtagagtttaatctccattcgttaatcatctttaatcatacacttgcagat

SEQ ID NO: 65452 - DNA, 890 bp, Cucumis sativus
  Intron number 1 from transcript Cucsa.346030.1 (locus Cucs a.346030) derived from phytozome v7.0 (chr-ID scaffold0344 3; pos 306617 to 307506)
tcgtccctgccaacccacgtttcacttcaatcgttctctcttcttcaaatttctctcttttgagatagaaatatatgtctaaatcatatgttacatttagtttaactcttaacacatctaccatatggttaagtttttgagttgaatgggaattaattatatagtatattattaatgacaatagattggtgatagtttgttgaaactaatttaaattgaaaaaaaaaacaataatgaaacctaaatttctttaaaataatttctttaaaataatttcttaaaggtaggtgtttgataactatgttttgttttcaattataaatcttttaaacctgggttctacttttgaattttctaaaattttctaggtcaattattcttcacttaagtgatggtatgtgttttgaaaactatgatcttttattgctttttgaaatttggctaactatgagattttaaatatttctttagaaaaaaatatataaaacaacaatatataatatttatgagaactaataccactctaattattaaataagatttaaaggagttctttattcgaagttcaatagttaaagtagatggaggctcggaccaagatttggatggggctcgaacacgtatgcacacccacataaactaaacagtagatagacaagagaataattatgttgtgctattatatctcattttttgggaacccttggatgtttaaatccttgtcttacacattattttgcactaaacagaagtttaagaggcatagggtttcataatatgaaaaaaaaaaaaggattcaatttacttattactataacctatcaacttaaattagatgatgagattttgggaattggcatgcaggtgaaagaaaagactgaagagagaaa

SEQ ID NO: 65453 - DNA, 402 bp, Cucumis sativus
  Intron number 2 from transcript Cucsa.338300.3 (locus Cucs a.338300) derived from phytozome v7.0 (chr-ID scaffold0335 6; pos 1245405 to 1245806 reverse strand)
tcctttcgagagaaaataaggggggattgtcccaggtgatgttctaaaatggatttttcttagtataagatgtaaaatctgggagttgagtaatccttatcaccttgagcatttaccgaattgttatgtttcccgtcaagatctttgtcctcttatttatattcttgtatgatatgatttgtaacaagtcttttattttattttatttttctgttttttttgtttggtttttttcctcttcttttttttgtactgtaatcttaatcttaactattgttttcgattataatggttatttaatatattcagtggtttctgtttcttatataaaagaaaagaaaagaaaagaaataaatatattgaattttttgatgaaagtttttttcttcctttgtagtattt

SEQ ID NO: 65454 - DNA, 605 bp, Cucumis sativus
  Intron number 1 from transcript Cucsa.338300.3 (locus Cucs a.338300) derived from phytozome v7.0 (chr-ID scaffold0335 6; pos 1245822 to 1246426 reverse strand)
acccctggcatacaacgagaattttataattgcaggtatagtcgaaacgattctgattaatgattatagggagaattgctcgtacccttttgatttttaaacttttgctttgtattaaacctcttgattatcgttgcaatagcatttgcggaaaatgtgctgtagaattctttcagtcctttaggggatgagtcatggaatatgcatcgtgaaattagggcatttttgttttctaaatttatgatgagaaatctacttcatctacttttgttagggtcctttcaagagtagagctaataatttgattgggtttggagagaataatttgattaatttctaccttcagtcttcgctttcagtttctatacacggtgaatgtaggaattatccctttggatttaatagagatcaagaggtccctcgtatgctatacctggctaggtttattggactttcttagtaacggcacagaacttgtgtaatagaatctagaagtattatatatttgaattaactgtggtatctctttttttttattttctttaagtctcgtattaagtttgaatgtaatgcaacattccatttctttctctccagtcaacaag

SEQ ID NO: 65455 - DNA, 343 bp, Cucumis sativus
  Intron number 2 from transcript Cucsa.322690.1 (locus Cucs a.322690) derived from phytozome v7.0 (chr-ID scaffold0308 0; pos 2358497 to 2358839)
ccgtcaatctaatttgcggagctaaaacccaggtgcttctttgatttctcttcttttggggttttaatcaggtagctgggaattgagttgcggttagggttatttgggtggggatgctattttttttcttctttttatcatgaaaaaaaaaaaacatattgcatttttttttttaatcaaaaggaaattagtgaattagtttcatgtgactatccggtgtgttactttcatatttttctttattaatgtatgattctgaagttttgaggaatgtatgtacatgatcgtttgctgttttgttaaaacagtctaacccggagaatacagtaggagttcttacaat

SEQ ID NO: 65456 - DNA, 768 bp, Cucumis sativus
  Intron number 3 from transcript Cucsa.322690.1 (locus Cucs a.322690) derived from phytozome v7.0 (chr-ID scaffold0308 0; pos 2358907 to 2359674)
cacggttagttcatctactttccttttgtatgaagtttgcccctgttcttactatgcaagtttgaggcttcttaaaatgttaaattagagtgcattttatccgccatctatatgcaacagattatttctcaacagaaacaccgtttaatatatgtgtgtatatgtataaaagaaactgctgatgtaaattacgtatgttttctgtagaaaaataataataaatttgattgagacatagagttcttgttacagttgttcaagtaggtgccattagtttgaacattgggaataattcttgtgctaatcataaatgcttaatggtctactttcactcgttagttggattagatgtaatccatcataacttttactttgatccctattaaagttgatgagtttattttgttagtgcagtttgttcattcctccttgtatttctgtcacacacatacacacatatagatatatacatacatacatatatgatttttcactttaaatatttttcccaaagaaaaacatctatccccaaaacttcttagaattgagtactgttcaatttcaagttagtattgtacagcattttagttatttctgggtcttcacttttttgatgcatcagaattgtgcgtattgtgggttgtaaaataatctccactccctagtgaagtgttgttgatcttttcctctagcttctgtataaaacttaacgtccttcttttttgcacaataggtttagagataggtggagagacaaacttggctgct

SEQ ID NO: 65457 - DNA, 852 bp, Cucumis sativus
  Intron number 1 from transcript Cucsa.352430.2 (locus Cucs a.352430) derived from phytozome v7.0 (chr-ID scaffold0353 3; pos 270441 to 271292)
gctagttggggtgtgtgctattcggagactttgaggttagagaaacaatgaattttttcaaacgcttgagagatcaccgattgaggtttagtcctttgtttgatttaatatgtccttgtgtgctttattaacgaagccctttcataattatgtgttaactgtcaagtcttatttcttttgattggagtccccttttatggtttatctccctttttgggttctgtttttgtatacccatgtgctattttatttcttcacaacgaaagtttagttattcataaaaaaagtcaagttgtagttaaatttcaatcagcattctgcacaattgcaacataaatctgtcatcacgaactgattgcattgatctgtatatttgacatctgattcatgacatactgaaaaacaaagaaaaaaaacactacgatggggttatatttgtcaacattgttttgaaagtaacatttcaaagatgaactgtattatagaatttgaaatgttttaaacctttctgttcattgacctaaagatgtcttgcacctatgtttaccaattgtatactactcttttttttgtacaaatggaattgtatgttaactcattttataccattagttttctacccgtgttgattgaaaaatatattgacaaacatatggtattttgtaccttttagaagaaacgatagtacacatgaatgtagttgtagtagtcagctcagatggctaaatcaatggtcaaatcatggatggagcgtattaggctattagctaataccttaaagaacagaataaagaacaataaattttattaatagcttttggcaccttgtttgtcatgttcgaacaggttgta

SEQ ID NO: 65458 - DNA, 824 bp, Cucumis sativus
  Intron number 1 from transcript Cucsa.321900.2 (locus Cucs a.321900) derived from phytozome v7.0 (chr-ID scaffold0308 0; pos 1739426 to 1740249)
ttcgtgaaatcaagcccaagagcagaagaatcgtattgcgcttttctactcatttttcttttactgtttcactttcccgcattctatttttgctattctggtattgatttttctttgttttatattctgggttttgttttttttgcgattttaattttgaatattgcttaatttcagactttctcatctggcttttgagttttttgtgttcagtttcccgcattctgtttttcattcactgtttctctattttttttctctggggttgctgataactttgattttctcatcagggtattggtattggtttttttctgttttctcatttgagttttggttattcatttaatatttcacttggttattgcctattttgctattttctcatctgggtttgccttattgctccagtttttcacttggctattgcttattttgtgattttctcatctgggtttccgttttcctgatttgactttccgacattctctgtttctttcgtttgggtttggatttaagttggattatcccatctgggtattcattttcttctgttttttcatctgtgttttgcttgttctaccaatttttcacttgggtattgcttgtttttttatttatcatctgggttttgattttctcctttgactttcccacattctgtttttccttttggccttcggcatgattttccccatctgggtattgattttctactgtatttttcactcggattttgctttgttttttaatctctcgattgttttcatttatttttttttgacattgctcttgatttattctttttctatagggtcctgacg

SEQ ID NO: 65459 - DNA, 743 bp, Cucumis sativus
  Intron number 1 from transcript Cucsa.365280.3 (locus Cucs a.365280) derived from phytozome v7.0 (chr-ID scaffold0361 1; pos 2838677 to 2839419)
gcgtacgttgaacgaggttctctctcgatctctctctattcagttcttttttttatttcactgctgagaaattggtagatcacttttggaatcagaaatattttggattttctttccctggttactccaagaatttcttgcatagaattagggattttggttctactcgtcttcagatatgatccttctgtgtttgggttgttcgtgtgttatctatcgatcctttccctatttcccttagctttatgcatttcatgattttgatttccattttgggcctagtaggttagatccaaggaacattcttctcattgcatatctctttgtctaatttctttatgaattttgtgttgccaaatatcaatttgaaaaaccgtacacagaagatgaaaccacagaaatggaaaggaaataaacctaggtcccgaatttaataatgaagaggggaaaaaccgtcgaattccagttggagaggtagttgttctacgacctaatggaatgacgggaaaatagagatatacgagtttgggaaatttattgtcatttgatatgttagataagatacatagcttgatggttttattatgttgtatgagttgaattcttatttcgttaacttaaattttgaattttgttgtgccacttttacgagctgttactgatactttaaagatgaagggatttagttatttctttgtgtggtgacagagattttctaacgagttctacactgtttatcaatt

SEQ ID NO: 65460 - DNA, 939 bp, Cucumis sativus
  Intron number 1 from transcript Cucsa.364980.3 (locus Cucs a.364980) derived from phytozome v7.0 (chr-ID scaffold0361 1; pos 2455310 to 2456248 reverse strand)
aatcctcccaatactcatccactgggatttgaagggtaagatcgcctcatcatagttgaatacatatttctctcttgccttctgttctttgctcattctgtttgcttttgattgactctgaatctacaatgttcttcctcaattttcatcgttgtgcatttccgcccacttctgtttgtatcttcggaattgtttgtttttatgccatctatttcattttccgtggtttgttcttgtgttttctgccttgtgatttaattgttttgccgcgccttgtacaattaatggggtttgtctgtaatgtagtgttaatccttgatatgatttgggaaactgctttagattaggtttatatctggcttacagaacaatccattatctgtcggtaattttcttgttccaactatgttgtatttaatgtttttaattcttttcaagtaacccatctcttttttggacaggtagggaaatttttgcacgtcccttcttaagaatgttctaaagacatcgtagagttctatttctgtttatactcgttaaattagaaaatatatgttcaatcttttgcaagccttccttccatagcactgcaacttagtctagttagggattgttcaatgatcttatttaagtagttaaacatcattcgttatcatgttgaattcaatccaatcttctctaatgttatatatcttttgatctcaaattgattgtatttctgatgtttctaactttgtatagtagtgttgtctggtaggatcctttgttgatttagttggttttcccccttttttttctcttttctttcaggttcatctcttatataaagcataattgagtcattgagcataaagttaatcactaataagccttggtcaaatgcaactatagctactattgcaggtggtcatttctgaccagtagttgcctgttgttaga

SEQ ID NO: 65461 - DNA, 249 bp, Cucumis sativus
  Intron number 3 from transcript Cucsa.327620.1 (locus Cucs a.327620) derived from phytozome v7.0 (chr-ID scaffold0315 9; pos 3305 to 3553 reverse strand)
ggaggctatatatgtatgttaactttattacatgtgttctttaaccaaatttcaggattaacttttagacgtggtttggtttgggtttaattttctatttagctttttgtccgttgctccttcttcccactatcctccactgtatttaagttattatgttgttatttgagtaccgttctttgttctgaaataagtttttgtttttgatgattagcatcacaatctgtgaaaaaaattattgaaatcaat

SEQ ID NO: 65462 - DNA, 988 bp, Cucumis sativus
  Intron number 2 from transcript Cucsa.337850.2 (locus Cucs a.337850) derived from phytozome v7.0 (chr-ID scaffold0335 6; pos 867849 to 868836 reverse strand)
agaagccttggggtagatctcgcctcaggtcgactttcttcgaatttcagtttattatgattaattttggttttattactcttaatgttgtggtctcgatctggagaccttgttttctgtgaatgaagagtcccatgcattaccctcattgacaaaagaccgttgttgactagatcaaatcgaacgtataattaagaagaaattagatgtcttttaggtgattagctgttcatcaaagtgcatgtgctatttgggttttgtagtttagtgtaaaattatttgggcttaattggcatagtttcaaggaaattattgtgtatttaacgaattttttttcacactgttaggtcattgaccattataattctagctttatgtttgtggttgtggccatccagtttcctagtttattttgtaaatttattttgtcagaattaagtggacttaaaacctttaataaatattaatcaaaattgattgtcatggtttgtgttttcttggtcagtccgaagattaaattggtctaaatatctttaatagtggcaaaccaggcttagaaataccttcctttttcttcaattcttttttattggagaaattgcttactcgttaatgatctattgagatcctgattgctagctgcataacattgaggattttgttttgtccgaggggaaatggttaataaacctttcccaggatctttgtatcagttcaaatggcagtagtatctccaatttgaatggtagattatgtcctcaccaattaatatgggttttcactctgttttagatgatatcatactaaatttactttcaggatttaacattaatcctaactagattcctttattcattaattgatcttttgaggattgttttgtctgattaatccagagagcgaaaagtttttttgttttaattcttctcctgttcctttttaattaatggcgtaatgaaagtaattgcttttatggaactctgtagat

SEQ ID NO: 65463 - DNA, 896 bp, Cucumis sativus
  Intron number 2 from transcript Cucsa.386590.1 (locus Cucs a.386590) derived from phytozome v7.0 (chr-ID scaffold0391 8; pos 52738 to 53633 reverse strand)
ggaattgagctctccacctacctaagtgaaactgagtaagtgctttttttttctctaatatatttttctcagcaaatacctattttttcttgtggattattaacaacagtttggttaaactacaagtttattttgtttctaaaaagaaaatacaagaagaagaaaatatgtagaaattgagagcaataggagaagagttatagttatagaaaagagccttgatgggtagacaaaggtagcgcaaagttgaaattacaagttatttatcttttaactttatgggtcatgtcaaatataattatgtactttatgagttttatgagtttcaaatagcctttcaactttaattatgtatttaatatatagatttgaattttaaaaagtgtataataagtcaattttcaatcctcattttaataaattcttgtactttcatgtctaataaatcaaccatctattagtgatttatttttttacaattctattactagacataaaaatttacagtttcaagtgatttattccatgaaaagtttgattgatctatatctccaataaattttttattttaaaattggttaaatattccaagaaccactagatagcaaaccaagattttaggaacctatttgacacattttcaaaccgtatgaacttaatagacagaaaattaaatgtctataaagatacttttttaaagttcataaaactagttaactagctatttgacaaaacatgaaggtttagggtttagttcaataacccatttgatttttgaaattatttgtgcttgttttctcatttcatactttcgatattaatatttaaaatatttgacatttttttgttgttgtgtatgattttttttttcaggaaccaaccacagaaatatttga

SEQ ID NO: 65464 - DNA, 389 bp, Cucumis sativus
  Intron number 1 from transcript Cucsa.311910.1 (locus Cucs a.311910) derived from phytozome v7.0 (chr-ID scaffold0299 5; pos 1429126 to 1429514 reverse strand)
ctagccaagcaggttcgttttgatttctccatttctctaaataaacaaaatctcattcgtttttctccttttgagagtagcatttccttcgacttcactaaacaatcttgcagaagaacagaaatgaattcatttcgccatttttaggtggttttttatcttttaattgagagggtaattcgagcagatacattgatttaagattgcagataatattcaaacttcttaacataatcgtagtttaccagttcgctagttagttaatgaaatttatccatcatgttttttgatgaactgagaaatctatataattagggattaatatattataaatgctttccttttggtgtttttaatgaatgattggaaacttataactttagggactg

SEQ ID NO: 65465 - DNA, 669 bp, Cucumis sativus
  Intron number 1 from transcript Cucsa.334570.1 (locus Cucs a.334570) derived from phytozome v7.0 (chr-ID scaffold0331 2; pos 8930 to 9598)
cctcagctcgccgcaccttgctgtcatcgtcgctggttagtttgatttctatgctctttgtttttttcccacactgttgtgaaatttgaaaatccccaaattttaatttgaacagtagttaggtaaaatggcatcttcatgctcaagccagggtcaatcttctacttccataaactcagcctcctccattgttgaagatgaaacaaaacctctttggaaatatgtgaccaaaattcataaattgggtgatgggggtggaaatttctattggcaatgcaataaaaaaaaagctcttatacacgagttagagttcatttgttgtgatgatgctatagaagtttaagatttgaacgcttgaggtttttctagtatctagtctactttgtgctaaagactttgtgatgctaatatgtatttagggatttaattataaaatgacgtaaactagacatattcatatcatagttttttttcgtagtagatgaattgccgtatcctattgtatcgcgaatccgtatccgtgaccgtgcttcataggtttttgcacaaaggtcgttttgtagcattttctctgtaaaactgttttttgttttcaacctttgcaactcaagattttgcttgcggttatatgtgctacagatcttggattactgattcgtagagatagca

SEQ ID NO: 65466 - DNA, 929 bp, Cucumis sativus
  Intron number 2 from transcript Cucsa.397630.1 (locus Cucs a.397630) derived from phytozome v7.0 (chr-ID scaffold0415 8; pos 45607 to 46535)
atcttaaagtaagaaccttcattgaatctgatttgcgattttttgcaagttaagtttgttaaatccgaaagtatgacataatatttttttcaagaaaagactgatttacatcaaagtaacttgatttttgcttctgttggttatttgtttattcatttagccagattgtgcagtgttcaatgccatccttggtgtctttgacaatttttttaatcataattgttgagtaattggaaatatcttctatttaaactttttctggggcatttccctctttttttaataaataaaaatatttgggttttgtttttttcttcccatttgttttcctcattttttcttccttggatcacatttttaaagttagttgcagtgatgatatcatgaaacttgatagtatataccaatgctacatgaaacgtcgacaactatgtcggcctgagcggttaatcgagcaacctaactcctctatttgatttttaattgttgtatttttgttctatttaaaaaaaatgtttttttgtttctttctgctttgcatccattgtgtgttaaacgtgctgatgttttctgatcgatttaagcggcacctacctctaaggaacaagtttttcacaaaatatattgttgtccattctgtctttgttcataggaaactttttcagcttggttttgggatttaaaactgggaattttggtgttgtcaaccccctttcaagtgtggcgttgaatgtgaaagataatttcgaaagggatatcacatccccttacatagctttgtcaacttggaaaaaccccattttcatataactgaagttgtaattgtacatttttcattttgggattgcaatagcttcaccctgtgaatgctttgatgattacttgtgcttgcagcttgagtctgttgatacatacagtcttgccttgta

SEQ ID NO: 65467 - DNA, 260 bp, Cucumis sativus
  Intron number 1 from transcript Cucsa.342300.1 (locus Cucs a.342300.1) derived from phytozome v7.0 (chr-ID scaffold03 356; pos 4664010 to 4664269)
ggtttgaagaagcttttacagagggatccaacttggtaagccattttcttatcaggtgaagcttggaaaatggagatcttggatggtagatttatgggttttctttcttttgataagtttattgatatttcttcctttatgtctaaataatttctttgaagtttgtattctttctttgacgcaagaaatttttattgatcttgtgagtattttgattgagatcagctcaaggacaagaagaataggaaagtggtaaccca

SEQ ID NO: 65468 - DNA, 556 bp, Cucumis sativus
  Intron number 2 from transcript Cucsa.342300.1 (locus Cucs a.342300.1) derived from phytozome v7.0 (chr-ID scaffold03 356; pos 4664322 to 4664877)
aagaaaaatgtgagtattgaggaaacaagagaatgtgttttaatttcttcttcttttccactatgttccttcttggagtttatatgataatacttataaataagaggagtgttggaatgaaagaagtaaaggggaagaagaatgaaaaagaaatttgttgtagatagaagaaaaagaagaggaagaagaagatgatgaatttaataattgtagtttttagacaatggatttaatttttgagaaactacaacttttcatttaagagggagagaaatgatgaaaataaatggaaaaaacatataatcatagcatggaagggaagaaaaggaaatgtatcaaatggggaggaaattctagctttatcagggaataagtaatctttataaacaaaataaaaataaaggtatacaaaagttactagagaaagaatgaagataagtcatgaggaatgagtttgagtttagaattcatataagttcatggttggtcaatggttattgatctatttattgaaatttcaggttggactgaaatttgaatctcttttcaaccgagg

SEQ ID NO: 65469 - DNA, 855 bp, Cucumis sativus
  Intron number 2 from transcript Cucsa.311140.1 (locus Cucs a.311140) derived from phytozome v7.0 (chr-ID scaffold0299 5; pos 794424 to 795278)
atcatctggcagcaagtattttgaaagcttatccggtaatgatcaataatatgtttttgttgcgtttgaagagttacaattgctgtagcgtttgatgttcgacttcttggttacttccgcttatttgttcgttttctaattgttttagagtgaatttatatatttgtcgcgttcgtagtgtgtttgtctaccgatttttatttgctgtttagtatgttgttttttgaattatttaagttatattcttactttagagctctgtctcgcgcatatactactcttagaaacttaagtcacaacggtcgatacaatctccctagagaaaagctggaagagttgcaattttcatattggcttgtgtttggaattattcaagttacactcttacatgctgattccgaagtataaatttctggtatttgactttttggttacttccgctcacttgtattttttctgaatgtgttggagtggcttagtgaatttatgtttatatggcagtgtgataatttgttttctatcgttggttgtgtttgagttttttaattttcagactaatacactcctgtttatggattcgtttcggacttttgcagcaaatgttagaaatggaattttatgaacattttaaaaacttatccggtaatggtcaatcatatgtcagaaggaaaactattcaaagagttgcagcgtgaatgtctgtcaatgctttctgccatttgacaattttagttactccagttaatttctcttttttctaagtattgagcagtcgcctggtggtgatattgtgttattttgtttggcgtttgtgttacagttgcagggcagcactcttcaaaattatactagcaa

SEQ ID NO: 65470 - DNA, 661 bp, Cucumis sativus
  Intron number 2 from transcript Cucsa.395550.2 (locus Cucs a.395550) derived from phytozome v7.0 (chr-ID scaffold0410 0; pos 1093969 to 1094629 reverse strand)
cgtccggcattcctgaagagcatctccatcgtcgggtatgccatttctaacggtgaaattagttgctctctgttttgttttgttttagatatattggacgatattttattgaattcaggttctgttgtatggttgcttttgaagaatcttagagaaagagctgaatatgacagtcagattagagtaaaagttgtcctttctcaggaaaactttgacaactttgctgaatgagtttcatgggtgttgcctgtgatatcgtgttaaataaacatggaattatatctcaattgcagcaagagattgcgaggtctttcttttcttttcttttttctcatgtgtgattctcgaccattggagttttgtttgcttttgttgcagtaagagtgttccttcattattaggagtgtttagaaatagaaagagttgggaagttgagggagagataacaattgatactgtaatttctctttcttgtactgcaatgctttatattgtcctcttctcacttctgattggtattctaacaaattaaaatgaaggaactgatattataatgttataatgttgttactgtcagtatttgagtttgtggaagaactgattggattctcctttatgcattccaggttataatctactcacctgctagaaccgccacaca

SEQ ID NO: 65471 - DNA, 765 bp, Cucumis sativus
  Intron number 1 from transcript Cucsa.321580.5 (locus Cucs a.321580) derived from phytozome v7.0 (chr-ID scaffold0308 0; pos 1375306 to 1376070 reverse strand)
tcaaaagacaagagccactgtttctctctctgaaggtagttaaagttataccttatcagttgtaatgttgtttcatagcctcatttttttttgggagaaatggagtttttatgggtctaagttcttgtaatttgcatggaagagttgggatttgagtttttagctctgttcttttcttcttgctttgtctttgcttcactcagatgagaggaacaaccttttgttctctttccatttccttttctgtttaatggatgattttattgtttgttctccttatttttctggagatcttactccattcttatggagaaatggcttactctagtgtaagaatgaatggttttaatttgagatctctttctctactttcagctcttgttttgtttctcttagttgttgctgagtcaaagtttagatcagttagtcaaccagttgtgtctctttgcttaatttgaagctcagttcaatggcagatgatatgatccttattgttccaacaagttgttttggatcacttttcaaagactgcaccacacttttgatatcttgtgtatttgatatgttttccctgccagatctccatattttttatacatctattgtgagtttttttgtgaataaatatatggattcaaatgatatttggttacttgtatggattggaattgttgagattatgggagagataatggtgaaatgtcatttgaactatttgtgggttttgcagaggttgctgagagttgatttggtgctgaaaagcag

SEQ ID NO: 65472 - DNA, 785 bp, Cucumis sativus
  Intron number 3 from transcript Cucsa.332570.1 (locus Cucs a.332570) derived from phytozome v7.0 (chr-ID scaffold0326 4; pos 351347 to 352131)
agagatcaagttctttgtggtgttctagaggtcaggtatgttccctcaattgaccaattctcgttgattgcttgacgaaatctcttactcattcacagtttcaaactttgcgctccaaactcggagtgataaatctaccatctcgtttgaggggatgctagaaaagaaggaaaaaatgacaaagtagccacgttatcaagccatgccaagttggaagatgattcaatgggtaaataataaaaattcaagcatttttacgatttagttacgaaggcgttacaacacccttgtgccaaacaaaagtcaccatgtgtcctctcacatgtttgaatgcatttatttttattttttatttttttattttatatcttaaaatcaagggatcaaaattgtatatatgtatcctttccggctcccaataatagtggaaaatcggaggaaatactttacataaacaaattatctcaaatcctaatttctctctttggatgttttgtttgtctcttcaaaatcacaacaatacctactctttaagttagagagtataaagtgataccttgaaaaagtggttttgaagaaggaacaaattctgttaaacaatttgaagcaagtgtctaaagaaacaaaagaatacaaactttattacatggagaagaaaacaaaagcaaaggaaacgaaagggagaaaaaaaaaaccaattttgtgtgtgtgtgtgtgtgtgtataaataaactattacgtgtgtgtaagtaattatttgttgaagtgaaagaagaaagagggaaa

SEQ ID NO: 65473 - DNA, 365 bp, Cucumis sativus
  Intron number 1 from transcript Cucsa.386080.6 (locus Cucs a.386080) derived from phytozome v7.0 (chr-ID scaffold0390 4; pos 1285905 to 1286269 reverse strand)
cccaagcagatcaaagtctggtttcagaatcgcaggtatctcttctatccttctttctcatacctcattagtagcttttaccctttcttctctctttcgcttcttgatctgattctatgtctgaaatgcttcatttttttcctgcaattcctatggctttaatttttaaatatctggacaccggtggtggcgctcggcaacggtgtaatgaatgtgtataaaacggccagctttaataatccttgggtttgtttttcttagtgagcagaagtgaaataattacgttgtggtggagggtttttctctttggttttgattttttgctgttttggaatgctgaatggtaatggtgtttggacatgcag

SEQ ID NO: 65474 - DNA, 668 bp, Cucumis sativus
  Intron number 1 from transcript Cucsa.397860.6 (locus Cucs a.397860) derived from phytozome v7.0 (chr-ID scaffold0415 8; pos 399619 to 400286)
cttcctcagttctcttctgcttcatttctttcttggtcagttctcactttcacttcttttcttctcattttcttctctctaatcttgtttcttttctaagaaaacccaccttctcttcttgacgttgttagtttttgtctttttttttttcgctttttactgctttttttcattatcgatacatgtatatagatttttaggagcttgttctcttcgtttcttgctcttggagtgaaaaataaataaaataaaaataaacggaatgggaactttggaggttatttatttatttttttcctttgatgttgggtttaatttaattttctgggaaaatgttttgagatttccatgtgacgaagttttggagagtgaactttgttcattgcacactaaaattttcttttactctaatcagtttcttattgattgtttcgctgcttgtgttttgtctttattctcaatttgagctgaaaatgtcgttttgctcaataatcgatatgggtttggcttttaatgcgttttacttgatctgcacatgtcttcaaaataagttgtggctgtttccagctatttttgaccattttttgtctgttgtctgagccatagatgtttttttatgtttggttgtttcagttagtttttataggttggcttttgggttcttgcta

SEQ ID NO: 65475 - DNA, 510 bp, Cucumis sativus
  Intron number 2 from transcript Cucsa.319550.1 (locus Cucs a.319550) derived from phytozome v7.0 (chr-ID scaffold0307 8; pos 246817 to 247326)
tcaaaataaacaacatcacttatctcattcacaaggtttgttcattagttgattttcattggtccaggaaagtagttttattttaggaatttcactaaaaattcaaatattcgttaaaaaaactctactggacacaattctatctttggtatacaaaataatttgaatatttaccgttttaaaagaacaattgtatgtcacttgaattagaatgaaaactaaaggtattcatagaacgggttgagtggattgaagtacgttttcaatctagttattaaaatgttgcatgcatggataatccaaatatatagttggcaaacgagatgctattttaggtgaaccttatgtcacaaactcaactgtgaatgaatcttcaactcaatccaacccgaattatattagacaaaaccgggttttggttggtttttattgttagcatgttgagtttaactgtggtgagttttggtagctgcagttccctgtggtagcaaagtgtggtcttttacagag

SEQ ID NO: 65476 - DNA, 476 bp, Cucumis sativus
  Intron number 1 from transcript Cucsa.311460.2 (locus Cucs a.311460) derived from phytozome v7.0 (chr-ID scaffold0299 5; pos 1053316 to 1053791)
cggtgcttctcacctcttcttcaatcacttatacggtttgttcttctttctgggtttctttgtttttcttctataattgatttgcttgttcttggatgtgcttggaattgtttgtatagtgatctaatttttcttctatttgtggggttttttcaatgatggaagatattttgtgacattttactgagatttttattcatctgcttgttaatttcttattaattaccaggtgaactctgcttattattgatataaactgtcttctcggattataattggaagttttgagttttcataggattggaaagagggaaggggttcttaattggttgtgatgtgaatagattcttcgtttaggattggtgacttatggtgttttctttgatgtcttggtaatgatttggatgtacatatattctaaaagtgaatttgttttgttagatcctttgtcgctcattcgggatcatcgagtgaag

SEQ ID NO: 65477 - DNA, 561 bp, Cucumis sativus
  Intron number 2 from transcript Cucsa.342250.1 (locus Cucs a.342250) derived from phytozome v7.0 (chr-ID scaffold0335 6; pos 4622407 to 4622967)
aaggtcctcccagacctctccgccgcttctttcaggtgatctttcttttctttaccggcgacggtggcatgtttaaacttatttcattgaatttttgttgctttcgaattcgggtatgatttggcaaatttttgtgttggtgttaacttccgtatttgaatctgtcgagagaaaagcaaaaagtattccaaccttttagtttggttaggtttaactttttacttcatgaattttaaaactagttattattcgaattatatttttacataataaactaaaatatttacacaaatattatcagtagatgaaagtttacgtgtaatctttctatcaataaaattaaatgtataaacaacattttgccccaaaaaagtcttcatttacttctaacataaattcatgaaaacaaactagattgaatatttttaaaattaaattttgaccaaaagaaaaaagacaaaaaataacatatattatatgattaattaagtttttgtgtattttcaattttggggaaaaaaaacagggattagacccacggtacacagcgaatttgttcga

SEQ ID NO: 65478 - DNA, 341 bp, Cucumis sativus
  Intron number 1 from transcript Cucsa.356480.1 (locus Cucs a.356480) derived from phytozome v7.0 (chr-ID scaffold0357 7; pos 1287075 to 1287415 reverse strand)
tggtatacttgctatatatcaaaatgtgtgcattttcttttcctaagccctcacatggttccttgtgttgctaatgtttccttactatttgtcaaatgacctcaaattctaatacaacttcaagtacttttactctgaaatatatacccgttctctcctcctttcctcactaaactaggaagatgtttgtccctgcttggaaaaattataaatgaaaactataaatggaaaaaaggtttctcaagttttttttttttcttgtttattctctatatttttcttacaactatttgaaatatatcaaattactctgtaaatgtcaatggcgttatattgcaggt

SEQ ID NO: 65479 - DNA, 771 bp, Cucumis sativus
  Intron number 2 from transcript Cucsa.367210.1 (locus Cucs a.367210) derived from phytozome v7.0 (chr-ID scaffold0362 5; pos 637217 to 637987)
aacacagtcttcgagagcttgatttgtaatcattctcttactatctttgtattcattacaaaatggctgaaatcactttttttttcttcgttcttaatagaaatcggttaaattttgtgttggattgagttagaaaatttaataaaaaaaagttgaacgaaggaggtgaattgtgcaagtaaggggttggggactcgagttgactcggcccaacccaaatatgtatacaatatataactatacctagttatataatttttaggtgattttaggttttaggtttgaatgttaacgtgcatttacatatagaggaatcgtaaaaaagagcaaatttgacaaaatatttacaatatataacaaaatttcaaatttaatagacactagtatgtttctattaataacagtgatagaagtttatatatatatatcaccttacaccttgaattaccatttgttcacatttcatattcaaaaataaattttcaatgatttttttggttggttggttgggttgggttgatcgttacctattgaatcgatatatatattgtgatagtttgtattgattcataattttttttcacccttaatgtttaatcgattcggatgcatggatgaccaaaaaattagagaagtaaaaaaacaaaaatatgttagaatagccgtaagaggaaaaaaaaaaacaaacttatgtgattctctaagtataatatctatatctttttttgttttccagctcgagaagcgattggggttgccaaataacagatc

SEQ ID NO: 65480 - DNA, 1032 bp, Cucumis sativus
  Intron number 2 from transcript Cucsa.372020.1 (locus Cucs a.372020) derived from phytozome v7.0 (chr-ID scaffold0370 3; pos 55243 to 56274)
tgacagtggaagatctactggtcattgcaaaagaggttgtttgccctctactacataagaaaactacattttattttctgacgattctaggaagtagtaatcaatttatgttattcctaacattattggtatgctttagagattgacggatagttgaatgctatgaagcacaaacacaaatacaaatatagaatatggatatgagtaccaattttgaaaaagctaggacacagatgcattgatgataacttttcttttttctttttctttttgatttatagattctaggatatgtaaatttaacataaagatactaaatgtaacccactaaaaatcataaaatgtcaagttaatgacaatagtacaatatacaatacaaatgtcaaaatactatacaaaaagcaacatcagagatattgaaatattatagttgatagattaccatagaaaaggttgatatattaccatagaaaaaaggttggtggcgcattggagttagatagatcaaagaagaagaagattggagggagaagtacaaagataaatgaagaactttgttgaattgttgaagatattcaagtgggttattttttgcccggctttgtggggacttaatcatgattagatgattctagggtttattttattttatttattattattatttttaagttttgactaggggcagtgggcttttaaaataaactgattaattttggattgggaaagattagatgagcttttatttatttattttggaaaggtctagagtgcccccttcatgtatctagaaggggactcgtgtgtttgatattaaaaaaaagaaaaaaaaacagatttgccaacttcgcgtattagatacgtagttgggagtattggtatcttgtatctgataccaattgtctacctcacatgaagtatttgtgcttcataggttgaatgtttggtgggtttgcttattttaactatttatgcttttaattcatctactattcagttttaggaacataattattttcatttgcatgcagt

SEQ ID NO: 65481 - DNA, 519 bp, Cucumis sativus
  Intron number 4 from transcript Cucsa.360010.3 (locus Cucs a.360010) derived from phytozome v7.0 (chr-ID scaffold0358 8; pos 775298 to 775816)
ctttttgtattagggagaaggtgatcggcattcaggtacatcaggtgtgtttcattttctttaattttccttgaatcttctttgtaacttttatttacaatttttgtttatagacaaagcaccttatgcatttggaacttctaatattttttttttgtatgcaagttcattacttgatagttctttgaaacttctaaatactttttaaactgctatttagaaattctaaatcaaaatttctagccgatcaggtcagtggaatttgtgtatgagagaaagagatgaaccggcttccatggcattgtttttggaaaaattccttgtgtcgtctcattgtcagctgtcatttttcttggactagcgcaatagaatctgatacatatttcaataattccttgtgaattggtttatatgaaaacagttcttagtatctgtattttctttttacaattaagatagtattctattatcaacgatgttcatttgtgtttattttttgataatttaccctaggtgggg

SEQ ID NO: 65482 - DNA, 415 bp, Cucumis sativus
  Intron number 1 from transcript Cucsa.322780.4 (locus Cucs a.322780) derived from phytozome v7.0 (chr-ID scaffold0308 0; pos 2421009 to 2421423)
acttctgacttgtcaccattcctcttttctctctggtaattattcgtccatttttttctctttatgtatttctccatttttttaatttttttatttatttttagaattctgatatttgctgtgggagtgtgtgaggtcatgtcgttgtaatggcggaggtctgataatttattgctgttttttgagaattctaatgcattttgaattttgttattatttttttcttttgggtttatttgtttcgttgaaaaggtgagtcgatgaatggaaatggaatatactaaagagtaaagtgtaaagtgtaaattgtaaagaagagttcgtgttctggtttttagtattgatgtttttgtggatttttttctttacctgatttgtatgtttttttttttcctttgattctgttgtagccgac

SEQ ID NO: 65483 - DNA, 438 bp, Cucumis sativus
  Intron number 2 from transcript Cucsa.322780.4 (locus Cucs a.322780) derived from phytozome v7.0 (chr-ID scaffold0308 0; pos 2422123 to 2422560)
ctcgagtcagggtatgtatttgattctgttttttttctttttccaagtgttattatttatttgtttatttaaacaataggatcttcaaagatgcgttttcctcatgcatgttgactttctcgttttttcatctgctctcgataaagggtatttccttcattaacaagagggggaacttgaaaagatcacagcttaaaataataaaaatggaaataactgctaggcggttggtgagctttggaaaatgaaacttatcattgatggataaccataggaaaatctagtactgttgtacacatatcatttgaatttgaatagttcatctaacttaccgcctacagatgcttctttgaaatttcttgacttatttgataacgtaatctgattaacttcaaattctcaggagagactggaagacattgagaaggatcagcgtga

SEQ ID NO: 65484 - DNA, 864 bp, Cucumis sativus
  Intron number 3 from transcript Cucsa.386820.1 (locus Cucs a.386820) derived from phytozome v7.0 (chr-ID scaffold0391 8; pos 345440 to 346303 reverse strand)
ttactagtcccaggtttatccttgaatatcttagactttctgctacttcttccatttgatgttgatctgtggatcgtatacgtttagcaattcctatgcctggattcatgtatgccacgttgtgtttcatcttctaaccatgcaactttgtgcagttttgctgttcttttagagttcgtgcttttgaaaagttgtgaatgaaccatggatccttgttttggcatttattccccgattactaggcatgaacaaaattttggggtttcaaatgtgagcataagaaaagaaagtgaagctatgaagaagttatctgttatctgctggtcaagtttagagtcttgctggaaagaagttacttgaactatctatcgtgagaagtttgttatttctttgtgaagctataggtttgatttgatattttagaatgcaaacatgtgaataaggttgtgggcacttctttcttccttaaagtcacagtcctacatggttaatcccattggcatacctggatgtatttttgctatagcagtacctgagctgaaacttgatgatgccttatttgttgattcctgactatatggcatggaaagtgacaataagtttctgggaatttttctttggtttatattttacaaattggcttggctgatatttgatcagtcactcaaatctcaataacttcgattttgacatctatataaaaaatttctggaattctgctttgaagactatacatgcaccttttagagaatttctaatctttttaaatgatttccaatttttcattctttaatcaaatttattctaactgaaaagagatgggaacaaatgttttaatggttgacagagatcaatacgatacaa

SEQ ID NO: 65485 - DNA, 447 bp, Cucumis sativus
  Intron number 1 from transcript Cucsa.362190.1 (locus Cucs a.362190) derived from phytozome v7.0 (chr-ID scaffold0361 1; pos 164990 to 165436 reverse strand)
cgtgacctttcaagtaagaaaaattcccatctgattttcaaaccctaattttcaacttcttcaccattcacactcaaatctgaatctttgcatttacctatcaggctttcatctgtcgcagatttgaattcaattgcttctcaaagataccaactttctagattgcaccctttcgttcgttggatattgttctgttttggttttttatcgttttgttctcgatctgggtgtctttgagtttattggttccgatatagggcttggatgaagaaatcgtgatattgggggaaattgtttgatctgaatacactgtaaggagttacttaatgactagtgccaaattgttcttcattttttttattctgatggaatgatttatagtctgtatatgagcagtattgatttaggcattgtgtaaaagaggaagttttgaagggcaattttcag

SEQ ID NO: 65486 - DNA, 746 bp, Cucumis sativus
  Intron number 1 from transcript Cucsa.342690.3 (locus Cucs a.342690) derived from phytozome v7.0 (chr-ID scaffold0335 6; pos 4974066 to 4974811 reverse strand)
gaagggaggtatgtttcttgaacccttccttttcctccctttaaatactactctcttcgaaatgtagaagcaattacgaagatggatgccgcccttattttgatgtgtttcttttatccatttggcacacatgatttagatgttagaatgtgggttaggatgcttcatactttagaaggatggatgatttagctaaactataagaggtagaatttatgaattattctatatttgagtggagtggaacatttactaatttcattgggcgtgatgaacaacgacaaccgcaaaagaagatatcagatgtgaggacgcagagacaaaagagagggtgttaatcatcaattgggggttatgcaaattaggtggttgcctaaaatttttggactgggttcttttgatttcagaaaatacgtactttcagaaggaaagagcgcattccattaggttggataacatatattttagttctgagtgacataaaggatgcagtatgatacagtcagagttaggatatgtgatcaaaacatgtctgatgaaaggttctgttgaaatattttggggaagagatttcgtcattcattcttcaacagttgattgcaatcaacatttgtgactttcttttaattaaaaacatggattaatgggtcctatccgtctatggtatttaaagaaattgaaatgaggaatttgacttattcattaattcaggtttttgaagaaaaagcttatctcgtcggtgtaga

SEQ ID NO: 65487 - DNA, 391 bp, Cucumis sativus
  Intron number 1 from transcript Cucsa.360160.5 (locus Cucs a.360160) derived from phytozome v7.0 (chr-ID scaffold0358 8; pos 907738 to 908128 reverse strand)
ggaactacaaaatcttccaaccgaagaaggtaaactctcaagaaatatgagcattttctcaattcgaaacccgtctatctcccagaattcgaggaacttttgtgttcaattgattctccaaaagccaacgctattttttcttcctttttaaagaatatcattattattgttaaagtttaaaccaattatcaaaatggtcaaattggagtttatcccaatcttgaacgttttcgattcttgcacgtctctctgatatttatttgttgcattgtgtgtgtgttttttttcagttttcaatcgctaattctctacagtgacattacttccattttctctctgggtttgatctcttgcaggtaattcattccatttcttaagaacttttcgaatc

SEQ ID NO: 65488 - DNA, 746 bp, Cucumis sativus
  Intron number 1 from transcript Cucsa.321530.1 (locus Cucs a.321530) derived from phytozome v7.0 (chr-ID scaffold0308 0; pos 1338317 to 1339062 reverse strand)
ggaacacctctgggtcgcatattgtgaatcatctggtacgctactgtgtcgttatttgtttcggcctttgttcatcccgtttcattttggataattttaaacattacacattttccttttatttcccttcgtggaaatttgatgagggccaattgcccggtgaatgttgaagaacatgtgaaagtattgtgcaatatcaggatttgttttacctcatatggaagttgcggacgttctgtcctgattagcctaggtgaaattgatatgagaaagggcgttgttatatttctttgttttttttttgttttttttttttttgttagatttttcggttaagcagtggggaatgctttttgtaccacgttgcatatttacgttattatgctctgctgcaatattttcattaaatttgtttgttgcgcaatgtcagtgttagttttctggtttttgaggttttaattggactttataatatgattgaataagtccttattcttatacagcactagtagttaaatattggaaagaagatgatttttttttctctgtggatgtagattgtagaaaatagcatattttattttttatgggatcttatcttcctaactttcgtattagggaactgtgattcttgtacgtaatgatattggttcttgctaaagagatttttatcagagaacttacattagtttttctgtttaatgattttaggtccgggcaaagcataaggaggtttgtcttcacaa

SEQ ID NO: 65489 - DNA, 635 bp, Cucumis sativus
  Intron number 1 from transcript Cucsa.338150.2 (locus Cucs a.338150) derived from phytozome v7.0 (chr-ID scaffold0335 6; pos 1136817 to 1137451)
tgaatatcgcggggaatctatctaacattgataatgtaagtgtaattaaacattaagtgttaacaaattaaaattaaaatttgcatataaagtatctgctaactgaagccaattgtaaactcaaaattttctttttcatccatccatggatcttcctcaaaaaaactgaaaccaactgtggggttgtgcaagtagtgtggttgtctgctaattttacaacttcttggtagtgtttgaaccacaaatttttttattgtaagtatagtctccaatgattaataatgattggagcctttgatggtttagttttgttggcagtggtcttctcatctatcggccttaggctgttttctcttcatttttgtttataatacagctcttctaaaataaaagagatcggtgatttttgggatagtaatgtatactttttcctccatgtggtgttttttatccaaagagttctgcaatctcttttccttatcttcgtgaattggagccattttggaaacattttttaatgtttccttgccatatttatgtatttatttttattaaaatttactttttttatcttaataaatgctggcttttactttgcagcttcagaactgtattggatctgctgtaactgctat

SEQ ID NO: 65490 - DNA, 914 bp, Cucumis sativus
  Intron number 1 from transcript Cucsa.338760.1 (locus Cucs a.338760) derived from phytozome v7.0 (chr-ID scaffold0335 6; pos 1519914 to 1520827 reverse strand)
cagcaacagctactcgagcaggtattttgccttcttctttctgaaattctgattttgtggaagattccatttctctttattctttatgcattgttgaactcggttcttagctttgctatcacataaactaaaatgaagtgtgatgcctgagtttcctgatggtgatcagctagctagttaggaaatccccagattttgtgatatcactaaagatagtgacaaccttttgtctttttgataaggaactgataataaattgatcaaagagatttgtacaaaaataggggaaggggaacgaggtttttcctacaaagccaaagggttacaaatgggcctcccaactggcaaatctatgtaagaaatcatatttacaaccttttttgaaatttagtcaatggagttacaaaccctgatcaaacagttgagaggtctactaccctccgctaattctactaggacaaaagtgataatagcctcttgctgatactcacatatagactgacaagaaactgtacgtatctgcctaaaagaataaacatggaacgaacttatatatagctggcaaacatgtaacaaacatcaaacagacttatatataaaaactgaaaaccgtaagtactagctgttctcttaggcattattttggcttgtgcaaacttctagttctaactcctataggtataacagactggaggccagacattatgctgaaatattgttgtgatgtccagttgtgttttttagaagtactcttacacttaatgcaatagtttgcaaaaaatgatcttgttatccatcctaagattcatgtttttcctgaatttccatttgtaggagctcaaagtttgacattgaatttaactttgctgtgttatgcagattgcagagagaaagaaattggtttcatccattaa

SEQ ID NO: 65491 - DNA, 863 bp, Cucumis sativus
  Intron number 1 from transcript Cucsa.315860.1 (locus Cucs a.315860) derived from phytozome v7.0 (chr-ID scaffold0303 3; pos 25245 to 26107)
tcttgagaattccatccttgggttgtcatattctggtgcgaaggtacttacatggtgtgattgtggggggtttgatttatttttgtcttaattatggtgtttggaactgttttacctcacagttgctgtttctccattctgcatagcatttgctgttgtttggtcaagacgtacttgtaagaaaatggtgtgagccagaatctattttcaattacatgaaaattttgaagtttagaatattactgcttaatgtaagaagctaacttcttgttttaatgttttgtaaacaagggaattgcattgataattacagttcgtccaatagttcacataccgaatcttaagttagaatttttaaatcttggttctatgtttatgtatctgaaacatgctgatcttaattggttaatttgtattaaaagtcaaattgacgtctcaaagttaattggcctatgttttgtcttttgcccaaaaaatcatgatctctactcactgatgtgatatataatcccttttctatagcttgatattagaagttaaattacaaaagttaaactatgaacattatatctatctatatgtaggttgaactatcaccaaagttggtcacaatgggatagataactaaaatgtttttagttttgagactaaatactcacgttgctttaaatttagagatgaaaagccattgtaactcatgaaaacataaaatataagcattctcttaaatttcttaaagataagtttctttttccaaacattttgtgacgattttttcaaacgttatcagcccatcttcatacttcaaattgttataaaaaacctcttcctatataactaatactttggagaaccttacaggt

SEQ ID NO: 65492 - DNA, 387 bp, Cucumis sativus
  Intron number 1 from transcript Cucsa.349340.2 (locus Cucs a.349340) derived from phytozome v7.0 (chr-ID scaffold0348 7; pos 619748 to 620134 reverse strand)
ctttgcagcgatctaactccataaacgccggtcaggtaagcttcttattcttccccttcttttttccttcatcaatctgattctcttctacctgccgtttgttcttgaagcttcactaccttttcatttgacttttcaattcaggttttgaacttcttctgctacttttgttgtttttgtgaatgcatctggtctattaattattgttcttctttttaatattgaggttgattttgtgtttctatattttctttttccatttcttgctgaagttggaagtaaagctggttggtgatgtttgatatggaattatgatttggattgtttgatgagatatgtaagtttttggttttgttttgttagagcaatcttttgttcgagaaaaaa

SEQ ID NO: 65493 - DNA, 338 bp, Cucumis sativus
  Intron number 1 from transcript Cucsa.311780.1 (locus Cucs a.311780) derived from phytozome v7.0 (chr-ID scaffold0299 5; pos 1306806 to 1307143 reverse strand)
caggtatacctctagatttatacttcgttttcttgttctttccattttgttttctcaatggtatgagctctggagtctgattccttcagtttgtactgtcaaatgtaccttcactagtctgtctttagggatcgtttgtaccttggtttggatctgtatgctttgaaatccatttgcggtctctgggtggttggattctttgaataatgtggagtttttattttctaatagcgaacttttgttgaagtttctggagtgatggcttttcttcattcagcttagactgattgatttgcttttcaggcacctgcgagtacttgatctgattgaatctgacg

SEQ ID NO: 65494 - DNA, 732 bp, Cucumis sativus
  Intron number 1 from transcript Cucsa.359000.1 (locus Cucs a.359000) derived from phytozome v7.0 (chr-ID scaffold0358 8; pos 110875 to 111606 reverse strand)
cttctatcccttctgctcttcggatcgctctgaaggtttgtttctctacgctgatatcatatctgattcagatttccttgttttattcagttgtagatctgagactctttcgcttcgtcgattcagccattttgaagttcgtttgtgttttattcgctttcttctcttcagattcggtgtctttttcttttacattcatatgaattctactcttgttactcttttctcgaaatgaatctgttgcttcacttttttcttgacgttcttacctttttttgcagattgaagcatctcgacctagtttcatatcttgctttttgttcattatttcgtgtatttaatgtgatgtgtagtttccttgtttgatctgtctcttgaaatgtcgagacgtactgatatgataataagtatttaatggagtgtttttctaatttggttgcaagaggaaactaacggattgctctatacttggatcctggctttggcgtttcatgtttcttgtatcgtattcaaattgtccaatcaaatgcgcaagatgacgtattgatttgtcattactgtagttactacttataagttcaagaatataaacgatattgatactattatataatgattattaggacggttcttcttaaggatgaacaattgcaaatctttttcttgttgataatgacaacctcattaacattttcaggttctactacttctccgagaccgattgtttttgac

SEQ ID NO: 65495 - DNA, 1028 bp, Cucumis sativus
  Intron number 1 from transcript Cucsa.319650.2 (locus Cucs a.319650) derived from phytozome v7.0 (chr-ID scaffold0307 8; pos 338950 to 339977 reverse strand)
ccttcactctcttcatcctttccttcactactacggtaagtcgctcttaccagttctagtcttttgctcttttgttattcttttcctttggagtttttcactgttgtagtttactttgatgcccaaattctatcacgttttcagcttgtgtttcgtttcgttgccagtagctggtgggtttttgagttttgttgtttttgatatgtgctgtaattgattgaaatattagaatactctagatctgttaacgttactcttgctcatttgagtaccattgtacttgtttatatctatttatgaagtcctgtttttattagtctattgttggtgagttgaatagcaagaagttgatttttatctgtctaattttttagtttttacaacttctatggagatgcttgatttcattgctaatccgttaatttatcttggttgtttattttcctctctttctgtttttactctcattaagttcttcattaggaatggggaatgtggttagttttctttaagggaaggcgaggattggcgttgttcagtttccctgcttttataattttgtccctggaataattgtatttggcttctctttgcaacttttatgccgcaaccttctcttgtgattccaatttttaggtaaattttggataatagattacctcaactgattgatccttcctatcaattggtttcttgggtgttctctctctgccttggtgtgacagatgggaaaatgtggagttcttgatcggaaatggtcctattcttatgattttctcattttatcaacacatctatgatctatttctgctgctcccatttacatttgaaatgtaagaggttttaaatttcaaaacgttgtgtgtattattttaggaaaatgcagctttttaatctaagactagagagttaagccatctaatttgcggatggggaatatgaaaatgattaggtatctggatatgcataacatgtttgatcgaattagtgctcaatttctttgtgtaaataaatggtctacaggaata

SEQ ID NO: 65496 - DNA, 515 bp, Cucumis sativus
  Intron number 2 from transcript Cucsa.355940.1 (locus Cucs a.355940) derived from phytozome v7.0 (chr-ID scaffold0357 7; pos 573229 to 573743 reverse strand)
gtttggtagtaaacccctctccattaagctgaaaggttagtcttgttttttgtttttttctgcacaattagttttgttttcttcatgtctatcgatttggaatttgggattatagtacagaagttgaatgctgtaggattttcatgatcttatgtcaattattgaagcgtctaattgaactttgaagtaaacgttagcgttttcaatcaaattaagttttggaatttctagtttgtgtagctctttgaatattaatcttatttttaacctcttttctcatagaatgatagaatacactagatatagccaatgtatattgttgttactctttttattaaatgaactccttcgtatttgggtgtgagggctgttttgctttatggtttatttttaggtattgtacttgtgtatgctttcataattctcaatgagagtttggtttcgaacttagtttttggtataatggtattttttctgtttaattgattaacattctatttcataaggtattacaa

SEQ ID NO: 65497 - DNA, 873 bp, Cucumis sativus
  Intron number 2 from transcript Cucsa.366450.1 (locus Cucs a.366450) derived from phytozome v7.0 (chr-ID scaffold0362 5; pos 69224 to 70096 reverse strand)
gcagaattcaggttctgcctcatttgcaaacctataaaatttcctttaaatgagtttaattaattgattaattgattgattaattaattgattaattgattgattaattaatttatgattaatgcacgatcaagttgggatgacgttgtattgaagcttctgttctgaggaataatttatcgggtacagtggcctccaaaattttagtttttcttttttaaaaaacctgcaatggctgtgtgcaataagctgggagggggtcgcttcatatattacttatagaagggggggcgggggggatcttgtcaagatttagcagttcgtttatagggaatgtgaggacatcaatagaatcaatcatgacgagaaattgggggagtttagtttgtaatcacggtggagctttctctagtgagtggtgagttgtcaagctccatggcaaggatagaatgtttagacaaggtatggcattagcgcagtatttgaccggaattcaatattaattaggaaggaaatgactaaaactcatgacctcctgctttgatgttttgttcaatcaccaatcaatcaaaagcttacgcttttaggtttttagtaaatttgatattacatcagcaatctatctatgattatggcatgtatctttgaccaaaagattagaggtttgaatcttcacctcccaaccataaactaagatacttataaaatttctggtgaatcaaattcgcctattataacttttgtcacccttgttaccttgaatgtaaactgtgcttctgatcattttcccacttcaacttcggaaaacacttctattcccatccgtcatctgaattttatgttttgaacagggacacctggacgttgaattaa

SEQ ID NO: 65498 - DNA, 557 bp, Cucumis sativus
  Intron number 1 from transcript Cucsa.375220.2 (locus Cucs a.375220) derived from phytozome v7.0 (chr-ID scaffold0374 6; pos 103701 to 104257)
aacctctctgactccaccgagaagatcattgcagagtacatatggtttgttccttttcaaattttcatcctcccacttcttttttttccactctattccccgattttctttctgggttgctctctatgaggctgcaagttccccccttttgctcttaccactgcttgactttctttttctttttaatctgttttcttgctctttttttgtttgctgtttgtttcctatgaaagattttgggaaatgggttgaagttaagtgattatcatttgtggggttttggggggggttttccctcttctttagtacactgagtgcgtttcttgttcttccttattgaactttacccattcttcgatgattctgtaaatttctgcatctgctcaagtgttctggcggtgtttcttcttcttcttcttcttttttaatgatgcaaatcgttggaagttgaagaagagttatcgtatttactgggatttcttctgtttttattgttgttctgcttttgatcattggtctgtttattgttccatttgaacaggattggtggatcaggc

SEQ ID NO: 65499 - DNA, 807 bp, Cucumis sativus
  Intron number 1 from transcript Cucsa.313920.1 (locus Cucs a.313920) derived from phytozome v7.0 (chr-ID scaffold0299 5; pos 3067221 to 3068027)
gctcccttccaagcccctccctcctgctcaggctggtgggttttcttccttctttcttcttttctgatttctttctctcagtgtcgactttttgagtttttagaagccattaacttttcaatcccttgccatcttattttgccatctatgttacgtctattgagttataacttgtattaatgctcgacttcatgttttgttaagttcttttgtatttctgttcgtttcttctttttttggttcaactgattgcttgagataatgtatggtgcttttctacgtctagattgtgattgctttgttcttcattttgctgttaaaaccacttgtcctctcattttaatgtgaatattagtctcttcataatgattttattttcaatgtatgacctatttgctttgacaatgatttggaacgaatattagtaattcttattattcatcctgaaattactgacggtctttttgtaaattctataacgaagataattactttgttgtggatatcatttaaaagaaggtccattgatgcttaaattttccatgccatataactccttgggagaagtaggtacatctgaagaggtatacggataagaagtcaatactgcagattctttctattagtatgatgttgaaagttagaattgtgatgctgattttatgagtcttaaaaagcttccgtggaatgttatcttgttgaactctttttcctttttcttattaatatgtctatgattttctttaatatgatctaactttgggtattgttatcatatttatttatgaccagtaagggagtcaaaga

SEQ ID NO: 65500 - DNA, 554 bp, Cucumis sativus
  Intron number 1 from transcript Cucsa.395660.1 (locus Cucs a.395660) derived from phytozome v7.0 (chr-ID scaffold0410 0; pos 1140823 to 1141376)
tgtcacaatccggcactaatcgcgccaaacaaaaggtacggattcccatctcaaacctccgtctgttattctcaggccgaccaatcggcacaactgacgtggcatttcattttcttttccttatttaataaatgaaacgatggcttctttctttataattaaaaaatgtgggatttggtttttgaggtggaagagaaggctgttcggccacgtcactctttttcttggctctatcttttatttaatttcatttccttttctctaaagtaaataaataaagactttaaaaaaatctgagtaataattaatacgagcgcctccctcttaaccttatatttcattgcctaaactttaggtttaaattataatttaatcccatcaccaagagttaatgcttaaaatgttggtatttaaatttgattttgcgttttatatacttataattacatgaaatggaattgaaattattagagtactgattttagaattggtttattttgtgggtgaaaatgagaacaggcggagaaattgatagagcttctacggcaaccaag

SEQ ID NO: 65501 - DNA, 410 bp, Cucumis sativus
  Intron number 1 from transcript Cucsa.358520.2 (locus Cucs a.358520) derived from phytozome v7.0 (chr-ID scaffold0358 6; pos 116353 to 116762)
ggcttcaagaccaatcgttccccaacaaatcagaggtacaccatattgttcttcctcctttacataattacgcatttatcttttctgggtttcttctgaatcttcgtttctgaatattttctaagattcctcctctgttctgtagtaattcgaattcctatggtgtttcgtgtactgtgttgatttctttgtgtattttctctggaagatctgtaaatcggtattgttgggttgggttttgagcatttgatttgaattccagaacgaggaaatcactggctgtttcatggagtcttgtattctttttttattattattatttatgtattctttctcttgcttttgtattgaattgggtttctttaatgagagaaggtgaggcagtgaacggcggaggaaaacaagcaaag

SEQ ID NO: 65502 - DNA, 845 bp, Cucumis sativus
  Intron number 1 from transcript Cucsa.395730.2 (locus Cucs a.395730) derived from phytozome v7.0 (chr-ID scaffold0410 0; pos 1184006 to 1184850)
gaggtgagtcgcgtcaattactcttctcttacttcttttgattcattttttgtcgtgttctgccgctctattttacctatttgcattcgatctagggttcgatttgcttgttgggatcgcttcattttagcttaatgtctttttttttttttttttggctaatgtcttacggatcgttgtctagcgttcgacctttgcggatatggtgttgttttggaccgtgagggaggtttgctgtgagtgtattggaaagtgggaatgaagaatgtagctggatttgttctttttacattatttagagagaaattaatatattgaaggcaggaaggttagggaccaatcccgatctttattgaagagattgtgagaaaccattttagtttaatctgtttttatcttatctattgaggaggactgtagctcgaggaggtgggcaatccatcgcaagttggcatttttcatgtgacgttttcgatattttatttcttatagttattctttgtaaaatgtggaaactggcatgagatgcatctttatgttgtcgattcagtcatctattgtttttaatgaaatagccgaagtccaactgcttcaaatagtgtctgctaactcagggacagggggagagagaactctaggtctagtttagagtactttttctggatgttaattatactggtaatgcacatgaggagagatgatcccaaattgctccatcattttcctgtgtgacttatcttttgatttgttgatttatctgttttctttatgagacattgctactaacaattttacagtcaaattctccattttttttgtttaattcttttaaaacagtggtcaag

SEQ ID NO: 65503 - DNA, 639 bp, Cucumis sativus
  Intron number 2 from transcript Cucsa.338700.2 (locus Cucs a.338700) derived from phytozome v7.0 (chr-ID scaffold0335 6; pos 1471875 to 1472513 reverse strand)
ctcttcctcttcctcttcctactacatcttctcaggtacaaatctctttttcttttcttaaattatacctttaatttctattttcacattctcaattccttttctatataattccaaaattttataattatttactcttctctatttctattgtttgataaattctttgttcatgaagattatttaaagactaaagtttaatttgttaaatcaattctttcacaaactttataaaatttgactcatttatatgaataatattgaagacacactattttctagaaaaatatttaaactcagttttttctttattacagcttatttaccatggtttttatttttatttacttcctacctaaatttaaaagaagaaaacactttattaaataataaagtggataacagaatataactttcataaaaaaaatgtacttttctttttctttttgtaaattagaaaaaaaaaaggacttagatgatgaaggccatgctgcacgaatgatattgtggcacgtggcaattaaatttcttatgtatataagttaatttacgttttaccatttgtataaaaggtgaaaaacatttggtagtacagctaatgatcgctaaatttgattatttaaattgggtgcagaagga

SEQ ID NO: 65504 - DNA, 782 bp, Cucumis sativus
  Intron number 1 from transcript Cucsa.375280.1 (locus Cucs a.375280) derived from phytozome v7.0 (chr-ID scaffold0374 6; pos 221432 to 222213 reverse strand)
attagtaattgtatccaccaaactataccatttatttttctttttgagttcaacatggacttttaaatagtaattagcactatacccaaattatttgtttgtttttttttctaaaaaaaatgaattgacttgaaaatagtaattaatatctttatttatcaaaactaaactaaacccatttggttaaatttataatttaacgaaagtaagggaggtaaagggtaaagttggtagaagaagagaacttgaattggggcaaaacagaaaagagtacctgaaaattaaataaacagataatttaatgcaacaaagaattttttctttaaacttcccttcgtattaaagccttcttagcattcttttctaattaaaaccccccaccaccggagtttataagctgctactaccttccggcgagaccaccggccaccgacgaactttctcaataaacccctctttggatcagaaccgacgacggtatgtaattttttgttctcctaaattgataggttccttatttttcaagccaaaaacctccccaccaacctctctcaatctctcgacctattatatagatctccctaacaaaggaatcaaagattcttaatgaacacaacatacccggaaatacccacatcccaaaactccgtttttccatcaaaatccgtctctgaaatcagatcatttggttctgtcgacgggatttttgtagaggggaagttggaaattggggttttattatgttaggcggtgttcaattgggtattttggctgcgtgtatt

SEQ ID NO: 65505 - DNA, 646 bp, Cucumis sativus
  Intron number 1 from transcript Cucsa.340670.1 (locus Cucs a.340670) derived from phytozome v7.0 (chr-ID scaffold0335 6; pos 3056690 to 3057335 reverse strand)
gacgagtttatcgaggcaccttgcgatctggagaggtatgttttccatcagtatcttatctttcccaatttttttgttatcatataaacactgtttttacttctgaatgtcttttttgttttgttatttacctccaacagtctcactcaaattcattccaaagttttgaaaaactaaaaaattaacagtttttaaaattttggttttgatttttaatttatatactcataattaagaataattcagttgtatcttaaagaaaatggtgatcattttgaagtttttttttctgaataatatatggttcgataccttaaagattgaggttacaaacttatgaaaataatcacaattacaaaaagcgataatatattataaattaaccaaagtgacattacatttgacaaaggacatttggtttttgaattccgataattaagtagagaatcaaattcaaattaaaccttaaagaatgttataattagatgggtctaaatgagctgtagtaattaatatttttaaaaaagaagatggctgggggatgggccgagatggaatcgtgtatatatatttatgatgtgatcaattgaagcaatatatatatgtatatatgtatgcatatatgcaggtagtagcaataaagaaa

SEQ ID NO: 65506 - DNA, 866 bp, Cucumis sativus
  Intron number 2 from transcript Cucsa.364770.3 (locus Cucs a.364770) derived from phytozome v7.0 (chr-ID scaffold0361 1; pos 2149536 to 2150401)
gagaatcctgatcaggatcagcaagatccaaggtattactcatctgggtctctttgatttgtgttgctctcgtggttttggctctagttttcagtgattgaagtggttttagttcgtgggtagtttttgttttgttgtttgagcttgtgtgattctgcggttggtggaattggtcttcaacaaagtgcgttagatttaggcgattttgagtaactttcttctttaggattctggagtgagaattacttgtttgtcgtcctcctgagttgatttgtttttttttttgtggtctaatttgtttaatatcaataatttgggcaggtgtaggctgctgtgcattaggaaaattttaatgttttctttttgtttatatttggcttcaacttttcagttttctcactcatgttttgtatgtttgttttcatgaatgtgctatcccgttccttcagtgataagatctagacattttagctccgtaaggatgtaaatccggtttgtttcaaagctaaaattgaggagaaatgtcatggatggatactgacatcggacaagagaaatggaacttgaggtttctatttaattttagatcagatggaacttctttgagttaatttttaaaaacatcacacaatttttatgggttattgtgaaaacgaactgtactcaatactctgatcgtatgtttggtttgcttttgaatgttgaagtgtgcctgtgattgacgttgagcaatcaatagtttacattctttactttctcagcttttttttctctcaccttcttgtggcctctctctctgattttagtgtgttttaatgatcattggttgcatcaggagtgttcctggtgtggaggacacaactgcc

SEQ ID NO: 65507 - DNA, 340 bp, Cucumis sativus
  Intron number 2 from transcript Cucsa.348630.1 (locus Cucs a.348630) derived from phytozome v7.0 (chr-ID scaffold0348 7; pos 79068 to 79407)
tgctcataagccacatcctcccactcctcaacgttcttcttgattctttttcatctgtaccctttttctttgttaactaaatgctttgatctcttcaatggattataaaatttcccacatgcaatgtgtttgtttttttccattgctttctttgaattctcaccttcaatggaggaggttgaatctgcattttgaaggacatttttttgtctttttggctgtgaaacatatgaaatctaaaacaaacataaggggagtaatattttctcaaaagtaaccacaaagtttgtggaacaaatttgtaggtgttggtggaagatttagaggtgcatctgggatt

SEQ ID NO: 65508 - DNA, 657 bp, Cucumis sativus
  Intron number 3 from transcript Cucsa.388670.3 (locus Cucs a.388670) derived from phytozome v7.0 (chr-ID scaffold0396 7; pos 1091310 to 1091966)
ggtaaggtatcattcatccaatacatttaatttgattgttacgttgaatagtagcttaagtttatttttatgatgatatatctgcacgatcccattggatattactttgcttagtatataccctacttcctaacatacattgtaacttgacagtcatgttacagacgcctcattctctttcacagctggaggcctatcacttctatcttgtgtaatctttcattttaactcatggatatgtcattgacatggctactagattcattgcatttacttgaccctttttttcttttatcaatttaagttctgtaacttattttatccactaagagtcttcataattaatttctatctttggatcctttaaaatattttacctaatcgtgtaaactactttgaattaagctctgcttgagaccatccaagtctatattcaatttcacaattttaccacgtcatgtaacccggatgtttgttaaaataatggagcctaatctaacaacgattaaatgtaagttgatgcttcctaatctaacagagattaatgttgaatcggattgctttacccatcaaatgctctatttcttttttgccgttacttcattgtttatatttcatccaggcacgctctaattataccaaaatctcattattctt

SEQ ID NO: 65509 - DNA, 791 bp, Cucumis sativus
  Intron number 1 from transcript Cucsa.395170.2 (locus Cucs a.395170) derived from phytozome v7.0 (chr-ID scaffold0410 0; pos 800476 to 801266)
ggccctttaaagcctgcaacaaagagtgagtggtttctgcatcccaagagctatggtctctcctctttcttgctctccaccccctggttttctcttgtgcggctgatacttccttctatctttatttagtgggtccatttcctccatctccaccttcatgcagagtcctcttttttgcctcttcactctctctctcttccttttaatggttctctgagatgggtgtcattcattttccagagctgtacgtattttagctttaaagtttgagaacagagattgagattatacatctccctgccgttcaatcctccaaacttaaacttctcggggtttgagcgcttgaagctattccattctccttttttcatgcaaaattttgtatcacttttcttttaccatcggctttatgttgttgtgatttggcagaagccggaaaagtgggaatacagcaccagtcattattacttcttttccccttgtttttttctataaaagcaaagcttctcttccactttatctgaactttcacaatggcacccttttctggagaaacaaaagaaaccaagttctttgaatcttctcctttttcttttttaagttgtctttgatcacctgtgagtgaagaaccataaagcagtgaacattatagcagttttttttcgttttataacttgcaggtttaaagctcttcactaagccatcacatccatttaatttgcttagaaattcaggacacggtcatttttttttcaggggatttggtgtggggctttcgctctaagtttctc

SEQ ID NO: 65510 - DNA, 904 bp, Cucumis sativus
  Intron number 2 from transcript Cucsa.318750.1 (locus Cucs a.318750) derived from phytozome v7.0 (chr-ID scaffold0307 6; pos 266929 to 267832 reverse strand)
cttcgtcactttcacctcttaaattctcctctcgggtaattcttatttctttagagtttgagtttcttctttattatcaacatatttctctctttcttgcgtggtttaggtttgtgttgttgaatgtttgctggtgctagatcaatggggtactggtggggtgtgatgtgcatgatcagtttcttttagctttaatcgtctcattatcaactagttggaaaccaaacattattagccaaaattactttatttggtaatcctactaattcacctcttcaaccaccaaatctctttgttaaaatggtgtttttcgtcatttttttttattgttcatggctattgttattgcattggttgctctagaatccaaatttatcatattggagtatgggtttaggaggaaaacaaggaacaaagacttgtaaattggaaacttttcaatggctctggcaccctttttaagtgttgttcgtctcaggaatatattaggtatcaaattattaagcctatgcaaatgttagtttgggtttttcttcatcatttttatgattaccgtgttatatttaagttaaatataaaccccaaaaagagtggcgaaagctcttactgagatgctggattgcttttgtttcttatattttattcatgagtcattttcaaattacaggtcatattaatgtcttaatctttacgatacctccatttgtggaataaagtaaatctgaaattgaaaactgtggttagactgttaaattttaaataatctgttttgtttcttttcggattttttcctttaaaattagttattattattgttatcatttgaattttttcttcaagaaagaatttttcaaaatctgatggtctaggcttctttgtctttgtatttatcttttgcagacca

SEQ ID NO: 65511 - DNA, 442 bp, Cucumis sativus
  Intron number 1 from transcript Cucsa.310610.3 (locus Cucs a.310610) derived from phytozome v7.0 (chr-ID scaffold0299 5; pos 360772 to 361213 reverse strand)
ctcttcaatttctcttttcaacatcaaggattttggtgagtttcttctttccaactccgatcctccttatacctcttcaattctctactttttctttggatttttactgtttttttcttgtgtatttttgtactgataagtgaaattaatgaagttttgtttcaaactgatgtatatgttctcttatccaacgaactgatttgctttggtttgatattttctcagtttatgaaatgttaggtttagaagtaatggtacttgcgtgttactctttatgtatttggtcattaagatttgatttccgcgattgtgaagtgattaaatcttttacttactgaatgttagctttggatatttggattttcttctttgaatcttggttttgaagtgggtttgttgttgtacaggatttgattcttctgatctttgtttttcttggtga

SEQ ID NO: 65512 - DNA, 920 bp, Cucumis sativus
  Intron number 1 from transcript Cucsa.348870.1 (locus Cucs a.348870) derived from phytozome v7.0 (chr-ID scaffold0348 7; pos 295199 to 296118 reverse strand)
gcctcaaggtatatgctattctcaaataaaaatgactgaaaactatagcattttgttcatttttgttttataattctttgttacttcacattgaattcgaggcaattatttgtttgcttctgagtctctttcttaatgtgtgacttatgttcataaggactaaggagtttggactaactacttaatctctcgttttccccattaaactaattgggtttgttgtagtgtaagattttgaatgttgaaagtaagagagaaatataacgttgatctcctcgtgttgaaagctacgagggaattgttttacatttcctgaaacttccaattcgagctaaaagcgacgtgttcacacaatgtaaaaggatgctggcggaacatagcatccattttgaggtcgatatagcctgggaagttttttggataaattttcaatacgaaaaaatcttgaagattttgtaaatctgtgcggttatctttgatgtagtaatatttgttgatgatttaattcttgattgttgtttttgttttgttaatcagtaactcctccacgtacattcatgcataccaaactgttatagtattcattgatatgattgaatcgtgtagaaaaaatgacattctcttcgtatcagcttttttgatgttcctactgagattattgtgagcaaagattctttcaacactattggctgattttgttttcatttcaaaaaaacaacaaagttaacatatgtctctagtttctttgcatataggtgtctagacgtgttgaggttggtaagtgctctaacttgtcaatatgtgataaaaaaaaagtcagattttatttggacagttttagtcatatctacaaatattgattcttcttgatgtatcccatcctaggtggaggttttgcttctggaatagcaagtcttggg

SEQ ID NO: 65513 - DNA, 688 bp, Cucumis sativus
  Intron number 1 from transcript Cucsa.398260.3 (locus Cucs a.398260) derived from phytozome v7.0 (chr-ID scaffold0415 8; pos 851696 to 852383)
tccttcccttctacaacacccatttctcatcttcagtaagcccactttatatttacaatttgtattccttttttttcttacaaaattaagtcagtaaatgtattattttggcacattttagttgattttggtttatttttagtttttgataattaaatctaattgcctaattttttatcaatggtttgtatcaatcatatggaattattagagtcaaattccaaaactcattaacaaaactttaaattctatttaaaatgcctctaaaaaagtagatatattaaaggtagaagaggtattaatagattttaaacttttttacatatattttgagagtgttaaaaaaactaatcacattttgaaaactaaacaatcatgatttggaatgaatttgttttctactttcgtttttgaaaattaattaagcttaatttacttctcatgttttacttacaattatttgtatctttaagggaaaaaaaacaaatttgtaaaagttattttttgtagttttcaaaatttgaataagaagtaaataacaaatgaattgaatgttaaagtaaaatgtgtatctaagttacaaaagttataaattgttacttttaagtcatgagggtggcttcaaatgaatacttttcatgtcacttgtttgataacaacttgtcctcttcacattttaatatagaca

SEQ ID NO: 65514 - DNA, 942 bp, Cucumis sativus
  Intron number 1 from transcript Cucsa.383830.1 (locus Cucs a.383830) derived from phytozome v7.0 (chr-ID scaffold0388 2; pos 953844 to 954785)
ttggtaagttcccaatatctttatttaatttatttttatttttctggattctttcaattatttgaaattaatccacattagaaaaataacctctttttttttttttaaatatacccaaatgaatttttataataaaattttatactttatccatgtttatatagaagaaatctaaaattttgatgtatttttacctttgcaataattaaaatctaaaactttcgatgacaactgaaaaaaagggtgaaaaaacttgtatcaagacagagagttgactatcaaattaaaatttcccttttttatttttatagagacaaatttcatttggtattgcaaagtgatcagaaagactatggtgcactagttgtagacaattttttcctttaaaatttttattcgtttatcacatataaatatagttaaaggtgggctttgcttaattatttttcttgcaaaataagtaccacaaataattttctaaatcaaattgtcatatggtcaaattttgtggagagagatggaggaacgaagaagaaggcacacaattatgtgccaataaaaacaatagaattattcaacattttaaaatttttttattatatattatattattttctattactattaattaaaatcgtaacaggtctgtaggttaggtatggaactttattatgttttaatttccacctacgaacgaaattatgaatgtaggacgggagagagaaaaaaaatagtgatttaatttctttttcattacacattttaaaaaaaagataaaaagaaaatatctaataatgaattaaatatattagggatttataatttgaaaaagcgtaagtcagtagaaacaaaaatacaagatatttgtggttggaatatggaggagctaaaaaaggagttaatttgtgtttgggagtgcagcaaggcaattgggatttaagg

SEQ ID NO: 65515 - DNA, 182 bp, Cucumis sativus
  Intron number 2 from transcript Cucsa.383280.4 (locus Cucs a.383280) derived from phytozome v7.0 (chr-ID scaffold0388 2; pos 271559 to 271740 reverse strand)
gtttttcaggtctgctggagcctccattaccagttagttttattcttagtttggaaattcagcctcaacagttcattaacaaacgtgggacaaaaaatcttcattttttcccttttgatttacttttgttgttgtggtgtttctcagggaaaagtggagacaaagaacaagcaaagaagcag

SEQ ID NO: 65516 - DNA, 727 bp, Cucumis sativus
  Intron number 2 from transcript Cucsa.363030.4 (locus Cucs a.363030) derived from phytozome v7.0 (chr-ID scaffold0361 1; pos 693230 to 693956 reverse strand)
acggttttctgattcagaaataggaccagaagcaggttttgtgaaactttggtaacacttgactgcttcttcttagcttggaatttgtggtgtccgggtccctgttgatgaaaatgcatgtctttatttttccttacttataaaagttataaatttacagaagcctatatcgaagattcaaaacccattttattttgatttaaacaaaaacgaagaggtccactttgttccctaaaaatagaaatatagaacggactttcaactctttttcactttaacattgttttatatattttgttaactggggtgctggcctacttcttgcattatgctcttagccttcctcaattaatgtttgtggaagtttcatcctccaattctgatagccagcaaggcttcttttttttttcttttcttttttgtttaaaagagagtaattctgttttcatcctagcctcctaggggtttgaagttaggaactctggaaggtatctcccattctccctgcattgcgagttggtaccaacaaatatgtgaaattaattaattaactactacattgttgttttctgccattttcttgtgaaatgaacactggttactggcttctttgttcttaacttttttacttgaactaagtggatcatttgcaatttccaatctgttattaattagtttagggatttctgcagtttctgccgctgttggcattatcactgcagtcaat

SEQ ID NO: 65517 - DNA, 604 bp, Cucumis sativus
  Intron number 2 from transcript Cucsa.377720.1 (locus Cucs a.377720) derived from phytozome v7.0 (chr-ID scaffold0380 6; pos 193274 to 193877)
ttaaggtcaatattatatacttctctcatctctcttctttttgttatgctattttgtttttattacgtttataattaaattataaattttatcagtttaatagttgtttagtattttaatttttacttttgtgtactattgaagttttgtttataaaaaaatcatataactacgagatacaagatgtaataggaaagtttagagtttcgttcaacagttaatcattaattttagacataagagatctattacatatgaagttgatatttgataaacttattggataaattatattttaacatttgagtgtcataatacaaacatactaattttatatctatttttactgggtttaattggaaaccaacgtccaaatcatatatatctataaaaaaaagtttattttctcttaaaatctcacaaaagcaactatatatgtcactttggtatgtcgaggactgaaaagtatatggttcaaattcaatgaaatatactaattatatatctttttggtatgttcatcataaatcgggtacaagattaaaatcaattaattgaagaaaaaaaaaaacaatgcagagatttctgccatcggaatttggaa

SEQ ID NO: 65518 - DNA, 563 bp, Cucumis sativus
  Intron number 2 from transcript Cucsa.332780.2 (locus Cucs a.332780) derived from phytozome v7.0 (chr-ID scaffold0326 4; pos 608779 to 609341 reverse strand)
ctgtttcggtcactttaggacctaaaggtttgtacaacttcctattttctttgattctacaccatttttagatgcattatttatttcttgcggaattttgtttaatatcacatgtttgtgtgtgtttgggaagccagtgtctaattcttcgcattctcaatttgctggttaattgtgcgctggacttaaagtggcgagtttatgatgtcgtttctgtaaagataatggttttgcattatattttaattagtcaatcacttctaatttgaagaaattcagaagatagtgtatgagcatgtgaaaacacaatttgttggagttgcaatttctgaagtgtgtgaaggaaaagaggaaaagattggccatttcaaaattctctcctcccgtgtaatttcatttgatttgggtgaagaactcttgaccacttaaatctggaactgtttggtgataattacttatttattgttcaatctagttaccctgtgaatggttcaagaatgatgcataatatcctgtccattttagatattttagttctttttcactaaaacatgcaggccgca

SEQ ID NO: 65519 - DNA, 896 bp, Cucumis sativus
  Intron number 1 from transcript Cucsa.341140.2 (locus Cucs a.341140) derived from phytozome v7.0 (chr-ID scaffold0335 6; pos 3533114 to 3534009)
ataatacttcattttaatttcaaaggtaaccccctcctcttttttcttcttcttttttgttcaaatcatatatatttgggtggctattaattattctatttcatttcattgatattatcaagatttatataatttatttccaccaaaaaaaaccaaacccagattttgtttactctctctctctctctctctctctttctctcttcttctctttcatgcttatttttttcaaaaaaaaaaagaaagaaagaaagtgtctgaaaaattgtctgttgggtgagtgccaaattcaacacaaagattcaatttcaagagcattggtggtgagttttcagtaattaagttgctattctcaaaagaaagaaagaaaggatcaaattaaatagaccactttttaggtcctttcttttgttcactttcctcttggattttactcttcctctttcccccctttatttcttaagatccatccactctaaatttatttttatttaattttaattattattcttatatatatatatatacctgtatattagggatgattaaaagtttgttgcttcaacatcaatctcaagctatggaggaaaatttgtcaaatttaacttcagcttctggtgaagccagtgcctgctccggcaaccattccgatcagattccgaccaactattcaggccagttcttttccaccccaccaccaccaaaaaagaagagaaacctcccgggaaatccaggttctttttcttttggaaattagatttaaatgattaagttaaaattacaaaaatttcactttcatgtattcgggtgtaaagctgtcagttacattgtttgattattttgtttacggatctgacgattgtggacgtttgttttgattttgatgttagacccag

SEQ ID NO: 65520 - DNA, 705 bp, Cucumis sativus
  Intron number 2 from transcript Cucsa.341140.2 (locus Cucs a.341140) derived from phytozome v7.0 (chr-ID scaffold0335 6; pos 3534380 to 3535084)
tgactgtggaacccttttctcaaggtaaaattaagatttatcttacgtatctacgtcctacttctactgttaaattacaaaatttagtgatcttatgaatttttttaccgtttgagttttgtgcatatactgataacatcataaggacatgttaattagatatataattaaaaaacacggatacttgctagttataggaaaaaagctgtcataaaatttggaaaactttgtgttttttctacaaaacaaacgcgtgattttggctttagtgatggtttttctctctcttctctatatttactgatgttcatgtgtcaagaaaaatctaatttgttctagtgtgtgcttaaccttctattcactttagatcacttgagtttataggtcttctcaaacacacttatcattgtcttctctgtacttcaattctctagctttattgtatgcatataactcttctcctcctgaaatgcattgtttgtggacatgaagtatgatgagggggtaaggcgtgttacaaaatatgttaatgcttgatccttctaatcttttagaatttgacaaatataaagtttattaattatgtcattaagtagttttatgataattaattgatgtgcttttgattatttcatggggtgttgtttttgttgttatgaatattattcaggagggatagtttcatcacccacagagctttttgtg

SEQ ID NO: 65521 - DNA, 254 bp, Cucumis sativus
  Intron number 1 from transcript Cucsa.366860.8 (locus Cucs a.366860) derived from phytozome v7.0 (chr-ID scaffold0362 5; pos 356321 to 356574 reverse strand)
ggttttgttgaaatctcagaaattttgataaaaaggttagttgagcgcgttatccacgaatatctactgtttttgtctgtttgatttgttattttgagctttattcgcaaagaagaatttgaaacagggaaaaagaaatgataaatttggtgagattgctctggtatttagctattgtgtgtgagaaagagatgtgcctcttcttgttatcatgtgcagggagcgagtgcgagagatttggggagagtgagcga

SEQ ID NO: 65522 - DNA, 699 bp, Cucumis sativus
  Intron number 1 from transcript Cucsa.310440.2 (locus Cucs a.310440) derived from phytozome v7.0 (chr-ID scaffold0299 5; pos 263367 to 264065 reverse strand)
tgctcccgccatttcctttgctctccacggatccagtaagcttttccattctctcatttctcttcgcttcttcaattcctccagatccattcccttatttttacagttcatattctttatctttgttgatgcctccatatcgatggatttggatttggatttggatttggatttggatttcaaattacctcgatctttatttcttcttccgtttttgtataatttgaattctcaacgacctgcttctagatgtgttttttttaatgctatttcttctttcggatttttggtggttcagttgcgaagagttggtagttgaatgcatttcacggtttagatgtcgttatttaattgcgtttgttgctgtttctatgcatgttaatgtgtggcggtttactgagggattgagtaactatgatgagtttatttactctggtcctaccattcttaaatgtttcattgttttttttttttttttttttttgttgttgttgaagtggatctaaatccaaccgtgtggttttggttctcatgtccaagcaacaagaaaatacatcgaattcccgttgcatttcatcatgaaaagaagcagagtgtcatgattatcaattgaaattagaatttattgatgttttgtgtttgggaaggagtggattattgattttgtggtgttttgtgtaggatttgaaaccgatattt

SEQ ID NO: 65523 - DNA, 242 bp, Cucumis sativus
  Intron number 1 from transcript Cucsa.342900.1 (locus Cucs a.342900) derived from phytozome v7.0 (chr-ID scaffold0335 6; pos 5206392 to 5206633)
catcggagtcggctggaactcagggtgatcaggtaattagcaaaactaaccctccctccccatctattaaatccttactgttcacttgagttgttcagtagagtactgttcttacaatagttctgtttcttccctacagtaattttagataattgaggcgacatttgaatttgtagtagtattttattttgtataaactttaaccagttttcttaacatgtttccttctttcttcgtacagg

SEQ ID NO: 65524 - DNA, 427 bp, Cucumis sativus
  Intron number 2 from transcript Cucsa.365190.1 (locus Cucs a.365190) derived from phytozome v7.0 (chr-ID scaffold0361 1; pos 2712770 to 2713196 reverse strand)
ctcatccttgaactccattccaagtggggcaaccggtaagaacgtagttgaaaatacgaatctagaaaattaaatttaccgtaacgctcctgtcaacattttctcagttaaattatatttttgaaccaacattgataatcatttgttccacgaaacagaataagattttgtgttctctcttgtattttattttctcttacaaaaggtaaatggtgttttgacttaacgtcttcgtatctgtacttcataaccatattttctctttcgttcttaatattgatatttatttgttaaacaagatgaattttcaagtttctttttcattctctatcttaatcctgatttaggtttcattttaactcttgtaacgtcatttgaagcaaaatttaaaatgttttattcgtttgtttctgttgtcaatccttag

SEQ ID NO: 65525 - DNA, 615 bp, Cucumis sativus
  Intron number 1 from transcript Cucsa.311290.1 (locus Cucs a.311290) derived from phytozome v7.0 (chr-ID scaffold0299 5; pos 951788 to 952402 reverse strand)
gtcgctttcaggtcacaaaacaactctgtttgtaaaattttgtttacgttgtccttctgtcattcttggttgttcttgaagtttgagctagaatagtattggaatgttggatgagtttcgcgctggtttccgaattttatttgctgaaagaaacacttgggcatggtgtttggagttctgaatttctccactctaattctttttacttttattttttaatataaggtcgagtactgaaataacggggttttccctggttgggactctggatttctgtttgttcaagtgaaattagttcctcttcatttcagcttatgattaaacaaaattgaagttgaagtagcctgttttgtttcttatgcaacattgtcatgttgattatctgctacatttaactagtcagtaaggcatttattcgtgcacgcatgcattatattctatgagcgcgcccctgataattgaatcgttgtgccagatatatatattttaaaccatctgataaactggttaatcattcgtattgacattcctgttaaattttttgatgctgtaaaatcttgtgcattttctttggttgcagctgcaattcttattggaggaggcttgctttggtat

SEQ ID NO: 65526 - DNA, 426 bp, Cucumis sativus
  Intron number 1 from transcript Cucsa.340610.1 (locus Cucs a.340610) derived from phytozome v7.0 (chr-ID scaffold0335 6; pos 3022179 to 3022604 reverse strand)
ctgtttctcctccacgatcttcgacgatttcccatgtttgtactgccttctatctctaattttaatctctaacgtccttgaatttttaactgatgttagggtttgtggatttactttttgacttttgtttgtattgttagcttctttgtgtttgttttatttgattttgattgggaatctcagctgtctcttcatggttgtaatttgggtttttatgagctgaaatagttgctgtatgcttttatatttctgtattttaatcctttttcttgtctggaatatgtagtgatgaattccgatgttggtgttttatttgtgggagaatcccacttttgcaattcggttagcacttgattatgtatattgtttattaacccttttgtttgctgttcaatagagtggctttcggattccaaaagctcagaa

SEQ ID NO: 65527 - DNA, 853 bp, Cucumis sativus
  Intron number 1 from transcript Cucsa.365460.3 (locus Cucs a.365460) derived from phytozome v7.0 (chr-ID scaffold0361 1; pos 3259110 to 3259962 reverse strand)
ttcagtaagctcccatttttgcatctgggtttctctttaatcctttaattctttgtgttttgtcttcgaattatctagggttaacttcatttctccattttttttcacctgcaatttgtttgattttttttcaactgtaatttgtttgattttccttcttgctcatggttaaattttgtggagcctgatctatttataatatttttttttttttgaagtaacctttgtgatttagaaggatggatcatgtttgatgatgaaattcttcttttcatttgtttaaatgttacttcaaaaacctctgtgatcatctgaggtccctctttacttctatgcttgaggagccgcaattttcaggcgtccacaaggagagctatacacgtcaccatccattttactaccaattgtttttggagaaatgacggcagaacatcatgaatgacacagaatagcctctattgacaaaaaataattatgttttatgcattggatctcttggtcccatttgaattcacttttgttatttgaacataacaggctaatgccttctcttagagtttaacgttccagtttagcataataaaaagaaaagaaaaaaactcaccattctacaataaactgcagctagctattaagttttacttctgaagttcaagaacattgattggaacttattcaatgtccctcttttaggcgttggcaatttttttgaagtaaatgaagtatttttttatgttctatgattttcctcacccggctatgtcttttaagttttacgttattctctaaacgtattgcataatttttgttttatgcagaagattcaaagacttgcagtcttttgttggaatca

SEQ ID NO: 65528 - DNA, 665 bp, Cucumis sativus
  Intron number 2 from transcript Cucsa.340110.5 (locus Cucs a.340110) derived from phytozome v7.0 (chr-ID scaffold0335 6; pos 2619075 to 2619739 reverse strand)
cataagaaactcctcgctagtgagtagtctttcattcttaaaccttttgattggatcatgcttttttttttttcccttttgagatcatgctcctaggaagtggcctaaatgttcgactcttgttgctctgctgcttgtttaattagtttcgttagtggacgaagaagatatggttgggtgataatattttgagagttttgtattttggaattttacgggggaagttactcgagtttgattttttttaatcttttttttttcttccttttctgggaagaattgttgagtttattcaggaactgatattctgtaataagtgtttgacgaaaaatatgaggtttctgtaaagtttgagctggtctctgaatgctataggatatgaaaatgttaaaaccacaatgttgttttggagatctccgacatttatatgaagctggaacgtgaggatgataccctctgcaattttaattgggtttgaattgctacctaaaacaaagaagtatataacattcgggagtttatcaatttgctttctttctgacgcttttagagtgttttattttctattagtgcttgccatctaatttccgttagtaattggctttctccttaatatttggttgtttgcagctcctaaagtggttgagaagcctggggataattca

SEQ ID NO: 65529 - DNA, 981 bp, Cucumis sativus
  Intron number 1 from transcript Cucsa.356600.5 (locus Cucs a.356600) derived from phytozome v7.0 (chr-ID scaffold0357 7; pos 1427851 to 1428831)
gcttacaaggagtattacaaagtgcggtaagtgctctactcttgtttccttgatgttctcttaaaaagttggttaaatcattaatttagtgcttgaactttgatgattgtctatttatgtcctaagctttaaagttctaattatattcttatactttgaattgtatgcttttttagttcttactctttactaaataatgatgtgtatctattagaaaaatatcagtcgatttgacatatgatgtgacaaaaaattgaataaatagataatttgatatatgaaattacacatgataaatgaaattacatgtgtaatttttcttcgttgaagcaacgagtcagattctttttgtagactgtactactttatatttttggttaaattactggttccgttgagctctgaagtttctatccctttggtccgtgatttttagaattactaatttagtctctgaattttgatatatttttttagttaaattactgagatatattattttttgttaaattaccgatttaatctgaacaatttttgtcgattttctttataaccacaattgaaagtttagggatctattaggcacttttaaatgtgaatgtataggaactgaataaacacaatcctcaaagtttggactaaacttgttatttccctatatttttcatctcacttctttttgtcatttgtttatcgtgttgtactaaatttgctaatatcttttaattgagatgtgatcacaccatttagttaatactattagtattaacaataatgactacatattattataatttaaaattaaaggatataactagaacctctaaaaatttagtgcatatgaagacacacctatcaaagttatctacgctcttaatttaacttaaaaagtgttatttttaatgtttcactccagtgattaattttcaatttttttactttgcagtcacggcattgacttgcgttttgagaaacagccat

SEQ ID NO: 65530 - DNA, 391 bp, Cucumis sativus
  Intron number 2 from transcript Cucsa.319710.1 (locus Cucs a.319710) derived from phytozome v7.0 (chr-ID scaffold0307 8; pos 385575 to 385965 reverse strand)
gcttaaaaggaattgaagggctttctaaacttactgtaagttccacactcatccttcctcctatataaaaagtgggcttccattcttaagatataaaatgacattttctcatgaatgtagaaaccaacccttgtccagttgttgaattattcaccctctatttaaacgttatgtgggagtatcttcaatttatgtgggtgtttttttttttgtttttgtcttgttctaattttgttcattatggtcgtctcctctattaatctatggatttctgatatggacaaatttctgtagatgctacgttaacactttcttattcaggaaagatattgctgtaggtgctatggatttgattttgagtttcctttgcttttttctaactaggtattaa

SEQ ID NO: 65531 - DNA, 903 bp, Cucumis sativus
  Intron number 1 from transcript Cucsa.348990.4 (locus Cucs a.348990) derived from phytozome v7.0 (chr-ID scaffold0348 7; pos 370349 to 371251 reverse strand)
gaaaggtactatcaaactcagaagttttccccattcattttatggttttagatgtccatttaaatgtaatctattaagcgaacttagttgtttcattgatggaatattttcaagtataggcggaatagaatctattttgatagaacctcttaagaagtattggtatatgaaaatgatgggttgagcctgttatggtctttggtgaatgaaaacaaaacaaatgataaatcaagtttgatattgcaatgaagtattaccattagcattgatctcatgctgatgtggtagaccatagagatactcagatatgagggaaatttctagtactacagttgcacgaaaacttttctgtcctaccaccatccattatttgccataatagaagttctgtaagaatactgtggctccataaaataaaataatatatcacctatggtacatcaaattgtgaatgaaatgagtatgtactaccaaaatttttcaacggtagttggtcgagaatataaaactcttccgatatgtcttgtttgctggtttagttgctggacagtaactttagttttgtttgtttaacataaccggttgttttgttttatttcttatgccttctcatttatgcttttttttccatgtctaatctctttagcttttaagtctttaataaaaagttttgtttcttgttgagaaaaaaaaagtagaaaggcatcccaattcctaattaatagtaatgacttagaagaacaaatccttgggcttagctaagtttaactactctcccaaattcttagcttttatttattgacactttatgaccatccttttattttcatgctgttcactatattgatttgagcgtagtcagtaaaagtatatactttctctttttgtaaaagggccttggag

SEQ ID NO: 65532 - DNA, 560 bp, Cucumis sativus
  Intron number 1 from transcript Cucsa.385680.2 (locus Cucs a.385680) derived from phytozome v7.0 (chr-ID scaffold0390 4; pos 954941 to 955500 reverse strand)
tgaaggcgttgtcacgctcacccaagaggacggtctgtacacttcttactgattagtttttgatttaccctaagacttgaggagggtctgaatcaatatttagtaatttgcttgtttttggctgtttgagttaaatgggtgcaggaattggaatagaagtgggtttttttatgcgtctgggttatgagattgatattggctttgattgaaatgtgatacgtataaagtgggttcttaatttttgcctgcatttcgttgttcttgacatttttttgtcctgatgtattgacacgcacataagttgacttttaacttcaggagcatgattgtattgattttgtgacgtttcctttctcccagggtctgttgtaactatgtttattctatgaccaatgaacttgtgatgacttttccccgtccgaaaattacaatttataagcacaatattagtaatagtaacaaaggtaacaataatgaagatggcaatggtaacgatagtagtagtactaatactgtgattctgaaaaatgttgtattgtttctaggtccaacatctgtca

SEQ ID NO: 65533 - DNA, 982 bp, Cucumis sativus
  Intron number 5 from transcript Cucsa.312070.2 (locus Cucs a.312070) derived from phytozome v7.0 (chr-ID scaffold0299 5; pos 1565361 to 1566342 reverse strand)
caaacgaggattgtgtttaagctaagaaaagacaagtatgaaaccacaaactcccacatagatttttttacttccactctaatatatgtagcgtttgtttgacataccttttagtgcataagtaagtgattttgaaaaggttataatctctttagaggtgtgtttgggagtgaataatccctttagagggtgtgtttgggagtgaatttgagatggtcaaaatcacattttctcttgtcaaaatcacttttccttaaattagtcatattcaaaatcactttgaaacatgtcttaatcacactcaaaattaatttagtatttaattctacatttttaaatgtagttctcatatcatcaaaattggttttgaatgattaaatgcatgtgtactaatgattttgaaaatgacagaagtgattttaactattttagaatcaccctaaacaaacctttaatttagcatttgaaaatgttttataattgatagaatcacttttgaatattttgtgaccaaacatcatgtaacataattttgaaaaagccttttaaatgccgttctcgtatcattaaaattggttttgaatgattaaatgcatgtatactagtgattttgaaaatgacagaagtgattttaactattttagaatcaccctagaccctttaatttagcatttgaaaatgttttatattttaagttttttcaaaaatatgttacacaaaatattcaaaagtgattctatcaattatagatatgtgttcacttattttgaagagtttcggttagtcactttaaagtcatttttgagatttcatctgtcaatcaaaaccaatttttagactaatccaatttttttgaactactacaataaactcatctttttaaattactcagcttaaacacacttttcgattggttatgcagtgaaccattaattaattatgatgtttttgttttcttggattgtaatataggtttcactat

SEQ ID NO: 65534 - DNA, 968 bp, Cucumis sativus
  Intron number 3 from transcript Cucsa.323290.3 (locus Cucs a.323290) derived from phytozome v7.0 (chr-ID scaffold0308 0; pos 2737877 to 2738844 reverse strand)
cgtttgataccaatcgtgcttgttagtgactgctgtttttatttgttactttattttttcatccccttctacaattgttcggtctctctctcaccatcgtagaagaaattatttatttatttttttaaaaaaaaccataaaagaaatatgagaaacgagatgtttggttataggaaacttggctcctcgtatcttgtcttaataccttgtttatggcacaaggttataatgagcaaacatgcatgatatcctattgggtgcattttggtttttagtgcctctaagattactgaatgaggctacacttcccaaattgttgtgtggtcggatttttgtggctgagcatgaaccaccactcttttgagtcgtttccaagtagtggaagggcttgagcaagagctttggattttatacaacatcttacgtactccacttttttttttcaagtgttattgtgttctttcattgtttctcaaggaaagcaattgtttctaaaaacagaaaaagaagtgtactcctcataacgtctctggggcttatgcctcaaggatgtcttgaagcctttcaaaacatggataatcattttgtatttgcgtttagtggtttcctttttgttttctgcttccattttggtttaggtgataaaaaacttatgttctttctttattttgtattacctaaagttttgtttcccaaataaaaaaaacaaacaaacaaataagttggtaataaattacaatagtaggaaacgacaatacagtagtcttctatcattgtccttgtttgatagaggaatcaactgaatccaaaggagaaatcttcactttcttccttgggggactgtgcatctttttccttattttttatggatatttcttttatttaagaaatcctttattttcagagaaaatatttggaaaatacatttttttgagcaattttattttccaatgttgtagtttttggtt

SEQ ID NO: 65535 - DNA, 591 bp, Cucumis sativus
  Intron number 3 from transcript Cucsa.398180.1 (locus Cucs a.398180) derived from phytozome v7.0 (chr-ID scaffold0415 8; pos 741103 to 741693 reverse strand)
aaactcaggtctctctctctctctctcaaatttagaggttaggaagaatttaaactagagcaatatttagatacatgaattctttgtgcattctaatccaatctcacacacaaaaaaatgttattaaaaaaaacgacacatactataagattggacaattgaatgaaatataaaaggataccgagtacttttctctgaaatatatattctatattagtccttttggtttcttttaaaaaaaaatatcctccctcttagtcttacctaacatacacaaaatggactagttagatgaatccataatttttaagatattcataaaacaaataaatatacattttaaccttttgaaaaaagtacttatttatataggttaaaaaaatagacatgtttggtctgtgagataagaaggttcaatttaaggaacatataaaaaagggtacactattgttattgatatcattagggtaatgctcgctatatatttatccatatgatctaaaatataatatactcatctcttccatataaccaataatatattaactctaaactttcactaatacttgtagattcgttccctgtttgaag

SEQ ID NO: 65536 - DNA, 287 bp, Cucumis sativus
  Intron number 1 from transcript Cucsa.322860.1 (locus Cucs a.322860) derived from phytozome v7.0 (chr-ID scaffold0308 0; pos 2465286 to 2465572 reverse strand)
cttgtctgcgatcttcactttcttcttcgccctaggtttgtttcttattgatcttgtgttattctttgcatcatttttgagtttttgaattctgtgtttgtgttcttcttgttaattccttcaatttcatgatattcatatgaatggtaacaaattggggaattgggtttgcctcaaaagagaagaagagaaaacattcaaacaaggggttttgataattatttgggtttggaggaaaataaaattgttctttgttgcttttggcagttgggactttgcttggagcc

SEQ ID NO: 65537 - DNA, 982 bp, Cucumis sativus
  Intron number 2 from transcript Cucsa.364480.1 (locus Cucs a.364480) derived from phytozome v7.0 (chr-ID scaffold0361 1; pos 1945234 to 1946215)
gtcctacattcgagtaagttcaatgtcttttaattattcagcctcaattatattgaagtttgttgtctcatgttgtagtttttggtggtggttcatcaattaaagaaatgcttgtactttagatcctgtcttaatttttaatgttatcaactaaactaacaaaaacagaatcagataaagtaatcaaaggagaaaggtatgaattaagatttaattgaaggttatggagttcaagttctgttgccgagtacaatttactgccaaataacttgtaacttgaactgaacaggaacaacacaacccaattggtaatgaaatattctgatttctggatgtgagttcggttcataggttataagtattcagttaatttttcttaagtaattattgtttattgcctaaatgcttatcattttagtctccagtgtttgaatcttcatttgcagctacctattttgttccttcacttgcaggctgcacccactgattctttggctacaaaattagactttgtttttcactcccacaactgatttaatttcttctcttgcagttgatttaatccctcatatcatgctagtcactcacttgagatgcttgcatcctagtacctagcatcatagcatagtgcaaatttgcagattttaataagttattagtaccttttggtttggttgtatggtgttgttctataatcctttttattttctttttgtgaaagccatctctggttaaaaggttttgctcgtagaaacctgtttggctgttcatcttaattggtttagatatggtatctaaggatcatgatagtagtttttcttttcactgtgtatatgttcgtttctatgaacccaagtgggattgcgatgttttcggccttagatgttcatatactgatgatctatgccaaattactggagatggcaaaacacgccataagaaaacttacacttaaacttttccttggatgacagagatctgg

SEQ ID NO: 65538 - DNA, 461 bp, Cucumis sativus
  Intron number 3 from transcript Cucsa.395430.3 (locus Cucs a.395430) derived from phytozome v7.0 (chr-ID scaffold0410 0; pos 996825 to 997285 reverse strand)
ccgcctccttcctccgccgccgctcaaatcaacaggtattccctagttttttaacttgctattctctgtgttccattatgtttcacaaatcgttgagaatcatagttcctgattcccattaccaaaccaaacaatccaatcgttgagaatcattatccccatcaccaaacaaatgaaaccccagtccctatttccgtcttcaatcattaagcgaaaattttaatttggtttgaattcccttttaaaaaacactttttgaatcccttagaaagtcaatggtggtcactagctttcaccatcagctaggcatacccccccttatttcttttatgggcttgatattttctgccgagctgtcccctaagatatctagaattgaaaaaggtgaaactttgagcaaaaccattgattatttgaatttggttttaagtttcgtgcctatttcatttatgtgttgcaga

SEQ ID NO: 65539 - DNA, 825 bp, Cucumis sativus
  Intron number 3 from transcript Cucsa.323280.1 (locus Cucs a.323280) derived from phytozome v7.0 (chr-ID scaffold0308 0; pos 2727858 to 2728682 reverse strand)
acaaggtattttttgttctttctgtaatgaccacaatgtttcttgcttcaatgatgacatgtttggatcgtgtgaaatctaatataaatatttcaaagatgcttttagttcccatgtgactttttgtttagggcttaagctgcctcgtacacattgaggctataaaatgcatttgagttagcacggacactttagtttggatagtgtgttcgtgtcggacacttggacactttgacacttggtggacaccttttgtacctttttagtgcagcaaatgtattagatttgcatagaacattcattgattagactaaaaaggcgtatatatgacaatgataataacttttgggcatggaatacatcaagctcagttttttaagcatataaatgcatcaattcatttactatgaattttcttttactataaatatgatatatatactttaaatatgaatattttaataaatgtgtccttgccttgtcgtgtcctagatttttaaaatatggtgtgtcgtcgtgtccgcgtcatgtcgtattcatgtctcgtatctgtcttcgtgcttctttggctactgtgcctaaatttaatggtcgagaaaatgaacatggtatttatatcttcatgcaaagtgttttaactgctccccttcatcaaccttagggcataggtagttaggggagaaaattgcgggtgtatgatttacttttttattttgctttcttctcatgatatttcttgtttcatttgattcaattgtttttttggctctgaaatcttatttttgacacatccatcactggcatcctttctggacaggtgacttc

SEQ ID NO: 65540 - DNA, 547 bp, Cucumis sativus
  Intron number 1 from transcript Cucsa.323280.1 (locus Cucs a.323280) derived from phytozome v7.0 (chr-ID scaffold0308 0; pos 2729563 to 2730109 reverse strand)
aaaattacaaccacacatcaaatcagcaatttcaggtttgaatccccaagcatgcagctccttctcttttccagattaacccattagcatctgcatctcataccgtttccccgtcttctccccctcaaaatgcatatcatataatactaccttgtctctctttttcgtcaattttaggaaaatgtgtgcatgctgttccgtttatttgattcgattgatgcagggagggcacgagaagcgaatcttagggttaggtttttccataaaagttaagatgaggatcatgggttgagcgttttgtataggaagttgctgtcatctaccgagtattgatactttcatgtcttatttctcatagacgccaactcctttttacggatttctgggttgggtttcccttttattaagtgcagcatttttttccccttatctgtcttctgaaaattacgtgttgcattctttccttcatttcttaaactttcttctggaaacctaacttccattagtatttacttgtaggattctgattcttccgttggaactgaag

SEQ ID NO: 65541 - DNA, 674 bp, Cucumis sativus
  Intron number 2 from transcript Cucsa.345790.1 (locus Cucs a.345790) derived from phytozome v7.0 (chr-ID scaffold0344 3; pos 68377 to 69050)
tccctctctcatattatactggaattcttggtattatttctctgtgtaatgccctcaattttcaatttactatgtatcatagtgaatttgggatgattttgagtatcgttcttttaagaagagtacttgttaccgtttccgataaagagttttgggagaagtggcataattaagagcatctgtttcatgtttgtcacttcatttctttttaaaactaaacagtgagcttttgaagtttatggataagtaagacaccaagctgtacaggcaataaaattcttgatagttctgacatctgaataattcacaaccttccatttgcattgttccttttcttgagctttacatggaggctacagcattgctgtattgatgatgtagcagcttgacttggatatataactccaaagcatgcaagtagcagtgttattgtcgagtttaatgtattggggttttggaacaatattttccatacacatcttggcattattcctaatttgcaatacaatgaaaatcatagccaaaagtaaagaatgaggattgtctgcacgttttcgtggtgaaacaaaattcattacgtcatgtacaataatttctatttgagaaagtgatcaatgtcaagaattgttttctcattggttgaacgttatatttggtaattaatgtttacaggt

SEQ ID NO: 65542 - DNA, 871 bp, Cucumis sativus
  Intron number 1 from transcript Cucsa.349440.1 (locus Cucs a.349440) derived from phytozome v7.0 (chr-ID scaffold0348 7; pos 705197 to 706067)
ctctcgcccttctgatcactcctggacccccaaaggtacttatgattctctttatatttatattcatatatgcacattcctttctctctctgaattctctcttctttctgctctctatcgatttgatccgttgtcttcttcgattcaatttctttcacttaatgtcttctttatctttcttgatctgacctgggtttgcttatgggtttttcttatggatttgaatctttatttttccactccttgaattagggttttgaatgtttttacttctttcaccaattttttttatctcctctttcttagggttttcagatcgtgtgcctttctttttctgaatttttactgctttcctttattggctatggttatctctgttctctgttcgttgttgtattggttttcgtttcgttctatggtgattggatgaaggagggaggaatttagatgtactgatgttttgggttgttgttcaatgaatctacattttctttttaaattttggtggctttagttttattgattcggtatttgctatctcaatcctctggagttcacttgtgggttctgggttgtttgtttttcgtagtcgaatttgtttatggggttgtaatctttactaaagagatgaccatgttggacaattctgaggccttttatgtttattataggattgtatttgttaggttattgatccacttattgcgatcgttattattattatttctttcttcttgtcttctaactgtgtttggatgtattgccactttattggttttttttttgttttgttttggttagtatgttatatttattgccttactaacgttgcaaacacatatgtccttattcgttgaagcttctggaggga

SEQ ID NO: 65543 - DNA, 658 bp, Cucumis sativus
  Intron number 1 from transcript Cucsa.367240.2 (locus Cucs a.367240) derived from phytozome v7.0 (chr-ID scaffold0362 5; pos 658705 to 659362 reverse strand)
acacccaggtaattagattttcttccctttcattttcctctattacccagaatttagaacgtaactgcgggcgagaatctgttataaattttgttttctggatatcatttacgagtattgtttttttattaaaattgtccattttgacgacggcattgtcagaaatagttgtcgtttcatcatcgtgtttaagtttgtttacattttgatgagatgcttgatccattggtgccttgataactttccaacgacattcggaagttttagcattaaatcctggggttgtgtcattgtgtatgtgtgtgttttgttgcttgggaatgtactttggccaaatggataaactttattgtttgttgtttttctgctctttgttggtgtaaatggctgcatcttgttctgagtgtagtctctctttactttggccaaatggacgacctttctataactccatttattccctcgcctttccttcaactcataatatttcatacatcaataaaatacatgttttcttaaaaaaaaaacagcaaaacttttgttaatatctaagcttctcttcctctttggagagtttatcatatatttaacctccaacatttttcttgactcttataatgcagctgaaaccacgaggacaagatcctgcttctaagga

SEQ ID NO: 65544 - DNA, 370 bp, Cucumis sativus
  Intron number 2 from transcript Cucsa.385780.1 (locus Cucs a.385780) derived from phytozome v7.0 (chr-ID scaffold0390 4; pos 1027801 to 1028170 reverse strand)
gttttttgactttgctaagctacatccttttgctggtaaatcctctttgtatttgtgagttacttctaattggtttgcatgagattctccttcaatggacgtgaaggatttagaaggagacgcattttaaaaaactttcattaaacaacatatagaaaacaacctaaactaaaaggcagagtccttttgcctaagagaagatgctcggagaatatgttactaatagaatttgtggggaaattttttagtgccttttatgaaatgtagctcaatcttccttcacataagctgtttcgtttccttttgattgctagttgaaattttgttgcgtactgcagctgaaactgtaagtgaaattctggagggagag

SEQ ID NO: 65545 - DNA, 696 bp, Cucumis sativus
  Intron number 1 from transcript Cucsa.392050.5 (locus Cucs a.392050) derived from phytozome v7.0 (chr-ID scaffold0406 2; pos 335380 to 336075)
aatatcaacgaggcagggaaaattctattgaaaaggtaactttgatctcccccaaagtattgtatgtgcatttgggtatttaaattttgtctcaggatatgattaaatttgcattggagatggttgagggtcaaagttcgagttatgtacacgatttcacttttgaattgatagaatgcctgttctttagatagtctaagactgatatttatgagatgatataacaaaatgaaatttctgactatattaacaaattgagttatcataaggttatgtgaaacttgatcagaagaaattttttttattctatatgaaggatgcatgcatgattgaaatctagagtaggctctctgttttactggttaaactaagcttgagtttggtaatttagatgcattatctgtgtggaaagataatgtgatgaagttgcctaatttgagtacagtaccctaaacaagaagaataagcatgagattgataatttgaaaaaaggagagtttcacgtatgcatctcctagatgtgggttttgtttgtttgtttgtttatttttctcttgtgtgtgtgtttaaataaaataaaatgaatatttatggtttacatcaagttattttggaaaaatatggaaaattgttgaactcaggtgtttcttatgattatttttcaggggtgaagggaaacttgaaaggcaataccgc

SEQ ID NO: 65546 - DNA, 665 bp, Cucumis sativus
  Intron number 2 from transcript Cucsa.313300.1 (locus Cucs a.313300) derived from phytozome v7.0 (chr-ID scaffold0299 5; pos 2466615 to 2467279)
ccagagcatatctcttccatttgcttgcaggcacggtattgttccttaattcaccaattattgatgaactttccatattcatattccaattcataattataaattatttctatgggtaacaactttgataattgattgtataggcgtcgaattagtagtttcgcttgcctgttagtgacatttgtcactggaaagctgaaatttgtcataaaaatttgtagatacttcttaagatcgtggatttattgactcatagacttatttttattttgtatcctatggaccatgaaaattggattctaattggtgtcattctcattaagcagcgtgatttgaaaaaatgtaacttctatagaaaatctatctatactttcgagtttcaatacatttcaatgatttgcctacatcaggtgccatgtcaaagggtgtaactgcatattcatggtcacgctttgttaaaaactgaaatatcagaatggtttacgaccagatataaatcagttacatggaaaaagtaaaaaccaacattttcccctgctcttcattcgactgatacctcctgcaatagagccattttctgattccttttgatctccacatgccatgttctgaaaatatgtttcgttgcaggttgttgtactagttgtgctgttcgaattaaatca

SEQ ID NO: 65547 - DNA, 887 bp, Cucumis sativus
  Intron number 4 from transcript Cucsa.332440.3 (locus Cucs a.332440) derived from phytozome v7.0 (chr-ID scaffold0326 4; pos 157560 to 158446 reverse strand)
acaaacactacttttcattagccaagaaacttgaggtacttgtctgcctaccctcacatctcaataataattcaaacaatcatgtttccaattctttcatcctagtgtcaattaaatttggagtaatcaatcagatcaatctagcttggattggcctctataataagagatgaggagggagcataacaatatctaccataccatttgaagattttaaagctctctctaatttgcatgatatttcattgtaacgaggacttgtgaaaatctctcatgctatgataaaaatccaaaacataatcattgtatttaactatgaaaggtaagagctagaagataacaaaagtaattgcttaacacaagtctaaaaggccaaaaccatcgaaacaattctcttaacttaatcattttccccttcttctatttctactcaaataccccaacttaccttacgtatagctaattataacaaagaacaataaacgaagataacgaaagatagaaacaaaaaagatattgtccaaaaaggatcaagtgcttcaactgaatttctatgagttttataggttcatcgaagtacaaacaattacgagtcttcgtaggtaaatagaaaactaagctaagtcattaggccactaactctaaacgtaaaagccactcccctaaataaaagccaataacattaattttgaaaatcaactaattcaattacttgccaactaagttgcattaattcttaacaataatctaatatatagttactacttttatcgtactctgatagcatttcaatcgttgggttcaaacgtatatgaatctcgtgttatgaagaaacaattttcatgattgtagggattgaagttggaaaggtgtctgaattcaacaaa

SEQ ID NO: 65548 - DNA, 356 bp, Cucumis sativus
  Intron number 1 from transcript Cucsa.387760.1 (locus Cucs a.387760) derived from phytozome v7.0 (chr-ID scaffold0396 7; pos 112003 to 112358)
aagcagatattccgaagactcgctttaaaattaaggtatgagaacctttaaagtcttttgatcagttaaacttcaaaatgagaagaaaaatcctctttggaatgctatttgtgctagtagttgagtattctggaattattttcccaatatactcactccttcaaaaaattaaatacataaagaagggaatatgttttgttttcagttaactcactcataactttttatgctttgcactcctagaatttgatcttccttgtgatgatgacttcagttatttcaagtatattggactatgcatacaactgtttctattttgttatgtcgcagccggggaaaactcttagtgcaagaag

SEQ ID NO: 65549 - DNA, 710 bp, Cucumis sativus
  Intron number 2 from transcript Cucsa.387760.1 (locus Cucs a.387760) derived from phytozome v7.0 (chr-ID scaffold0396 7; pos 112394 to 113103)
atatagccaaagtgttaagacgaattcaccgtggggtaatatatatttatttgataacaattataatattaaccttgtatgcatcattacatcatctatgttcatagtacacctattacaataaactactcatagcactaaagtttatcaggctgaattttctctttatttttaaattgttcaatgagattatttggtaccattaacagatcgagaagctttttctctattgaacttgttggggatggggagtttattaggtgcattacctctttctaccgtggttgagtatgaagtactaccatacccattgctgaggcaccttcagtttttaacaagtttaagtaatttgggtcctatttgtagggttatgttggaatgtaaaattgtagctaactgaaaccttttataaatcttttggtaatgaagaagggcatggctcttctataaaggatttcacataaaatcagacggatttatttgactcaccacatgcagcagtcttctgtctagcacaacctcaaatcttccaataacaagtttaagttctttttagttttgaaaatggcaatattcttactctcgggacagtttattgctgatttaatatgtcaaaatgtagcaaaaggcttgtgcaactatttctaaccctgattatgtctttcgttgtaatagggcattcacccttctatcaagggtgcagtttggga

SEQ ID NO: 65550 - DNA, 697 bp, Cucumis sativus
  Intron number 1 from transcript Cucsa.363270.1 (locus Cucs a.363270) derived from phytozome v7.0 (chr-ID scaffold0361 1; pos 869989 to 870685)
tgccttctctatccgcttcactcaatcgaagccaggtaattcggttttcactttgtttttagggctcttagttgtaaattcatcttacttttgcttttaaatttttagatttggttctttgaatttcttggcttgcatgtttttactttttttgaagtgtttttcatgatctgatttgttttgtttggaaaatgtatgcgtttgtttcatgtgattcaagttacagactgctgtttttagtttatgagatttcttgttgagattgagcgagtaatttagagattatggagtatttgagtacagctttatctattcatttgcgcgctttaacttttgtgtagtgtttttcacgattcgatttgttttcttaataacggatgttcttcttgttccatgtgattgacgttacggattaacttttaggttactgaggtttcctgcttagattaaacgagtaaatgactgaggttccatgtgattggattcagttcaaggaattttgagtgtggacgatgatagatctgattactttcattcacgttttttaattttggcgtcggatttgattgtataatcacattcttgagataacttatctagtgttttcattttttttttatgttgtatgattatttaatgcttctactggaatcttcgaacaggtgactagcggccgaatctcaggtttgaaattagt

SEQ ID NO: 65551 - DNA, 706 bp, Cucumis sativus
  Intron number 2 from transcript Cucsa.363270.1 (locus Cucs a.363270) derived from phytozome v7.0 (chr-ID scaffold0361 1; pos 870727 to 871432)
actacaggctgggaagccttcaggtttgctgtgcggtaagtgataataatttttctcttccatggttatgatgttgagagttccatgcatatttgtttctggcttttaagttcgaatcgtctaagttttttcctctgtcatttgtacatactgttttcaaaactattattgatttatgacatatgaatccatggcatgaaattatgtttctgttcgtgctcgctcaatctttgtatggttattgtccctgtttcttcgattataattgttggagattggcacctaatgacttccatattcataaaaaaaaaaaggttaaaactgctagaacaagtctgcacataagtagctgttgtttactgtagcatttcagcatcacatttgcgttgatagattctactacattccttaatccacaccatgaatataaatagtcttctgtagtgttaatattttgaccatcctcaggtgttgtttgtgagttgaagttagggcgtcgaaagtttccatgatcgatatggttttcttcttgttgtgtgtgtgtgtttctttattactattagttttgactttagattgtatttcaatggaggatgatggcttgctttcacttcgtttcatttcttgcatgaatacgataatgttagtaacatagtgaaattgttgaacaggcgaaaccagagacagtggacaaggtggttgaaat

SEQ ID NO: 65552 - DNA, 911 bp, Cucumis sativus
  Intron number 2 from transcript Cucsa.395340.1 (locus Cucs a.395340) derived from phytozome v7.0 (chr-ID scaffold0410 0; pos 916491 to 917401)
ttagtattggaagcaggtaattcttttcttttcttttttttttctccttctcccctattccatttaaattttccataaagaaaaccccaaatcatttcacaggcttaatattagggtttcggttcaaaaagggaatggaatctagctaaatatatcaactaaatgattgatctatctttttttgtttgagggtaatttaagatagcatcacaaacacttaaggttttttttctttaacctttttctgttttggtttttgaaaattaattaagactatattttttcttaattttttttacaaagatttcatcttactttaaaaaaaaaaaaattgtattctttaaaccaaattctaacaggaaaacaagttttaaaatattttgacttggtacaaaaaaaaagaaaagaaaaacaatggtaaaagtggatagaaaaggtaagaaatttagagatgactataaatagtcttaattttcaaaaattaaaaagctaaaatcaaatggttttcaaatagaggtaagtaattttattatttcctttaaattaaatcggtaatatttttcaaactttttaagtttttgagtcgaatagtaatataatattgtaaatagaaatataatctggtctgggttatgcatctcttccaattccctttgatatattattctcctttttgtactgttagacaatatcattttctcaaactacaactcttccactattggttttaacttatctgtttttttttaatcatttttttgtgtcctcttttaattttttttttactcacatacttgaataatatcgtatatttttctaaacaaaagagggttttaggtgcatatataaagagtgttttgcttgtatgaaatataggtggtctatcatagccgctcagttacccggaagaa

SEQ ID NO: 65553 - DNA, 929 bp, Cucumis sativus
  Intron number 1 from transcript Cucsa.326170.1 (locus Cucs a.326170) derived from phytozome v7.0 (chr-ID scaffold0313 2; pos 401843 to 402771)
caaagctgctaattgctacaagcttgctaaagcatgtaaatttctccgctactgctttcttcttctttttttagatctttgtatgattcgattgattccgtttttcatgcccccatgcattgatttgggtagaaacttattgtctgttgcttaaaattaaagggaattcatcgttcatcaaacagggagctgcttgttggttcttggttggaatttgacctacaaattttccttttctggaatttgaatttatttgtttatgatacttttctggcaataaatgcacttatttatggtcggtttatggatgcaactgcctatccagatagaaaatatgaacggttatctagaaatgatagatggatactgtataaaaaggtctggatgagttagttatccggatacccaaattcaatctatctgcagaagttcgtaaatgctttagccatctaatgtgtgaaggacatagctttaaatataggtgaaaaaaatgaagggaaattattcatcatatgattgtttaagacttcacatggatgatgatgggatgttgacattgataaattcaatcttatgcactctgttttttggatttttcttaatctttaaaaggattttccttttgactcagtggaggacatatatattcctaatctcaaagtcctatacagattttgcttttattcaattctgtcaaaaccagaaatggcatttgttaggtactttaaacatcttagagaaccagtccattttgcctacacattagaatcccacaacagtcacggtctcctaattttgtagtctaatgattttgttatcattcacagttactttacctcttctcactatgaaacctgttatgtggccttaatctctacgcatgctgtgttttaggggataaagctgggtcagtatacacaaagttggcg

SEQ ID NO: 65554 - DNA, 620 bp, Cucumis sativus
  Intron number 1 from transcript Cucsa.380660.1 (locus Cucs a.380660) derived from phytozome v7.0 (chr-ID scaffold0384 1; pos 178080 to 178699 reverse strand)
ggtgtttgtaacataacatttttgtaattatgagcttgataattagtttttgggtgagttcctttttcttttaatgttccaatatacttttatctctccatgaaactgcagtttcttaccaaagataaaacgaaacaaaacttaggttgttggttgtgtgaattgtacaaaggaacctttacaaactttgattgtgaagaaactaatgacttcacaacctgaactataatgaactctgctggatggaattgtctattgggtgtctgcttgaaatctaaactttaaatttttatcaatcttatttaacaatgatattgaaaattcatgtttctcaaagtattattatttttagttagttagtgtttagccctaacacaagattaatagacaccatgaatatttgttgttgattatgttgaagtttttccggattacaaacttaataacaactatattattatttcttttgaccgaacatatctctaaagtttaaacccacatgttcttccctttctttattgcaaccatttccttctgaatttcaccttccattcgactcgattctttactgatttcaatgggtaggcgtgaattgttcgatctcgagaggcattttgcat

SEQ ID NO: 65555 - DNA, 350 bp, Cucumis sativus
  Intron number 4 from transcript Cucsa.327870.2 (locus Cucs a.327870) derived from phytozome v7.0 (chr-ID scaffold0315 9; pos 187169 to 187518 reverse strand)
ggactcattgcaggtaaaagttcattttacatgtttctctccttttacatttgggagttctaatcaccatgaatttgcgccaatataaataatataaaccgttgagggaatatgttcaagcaacctctgttagttaccaaggattttacttcttaagtgttttctcgacaatcaaatgtaggcataaacagccatgagactagtcgagatatgtaaaacctggccatgatactcatagaagaaaaaataacatttgacaattttatgtttaatattgcaatattttatagttagaatagcgagttatgattttcattctttgtcagggtctatcaacatacattcggacc

SEQ ID NO: 65556 - DNA, 829 bp, Cucumis sativus
  Intron number 1 from transcript Cucsa.361030.1 (locus Cucs a.361030) derived from phytozome v7.0 (chr-ID scaffold0358 8; pos 1499749 to 1500577 reverse strand)
accagagcaataggttgtttctgacccgtagcatcatactatcctatctagtcataactagttatgattctattgatttcccgacgctaatactttgaagagtcaagttaataatgattatagttatcatcgagcaagtcttgcaagcttctttttctttttttgaaaaggtcttattaagtacaacatgggagtgaaggatttgaactcggaacctcttgtcctcgagaacatatagatttcagttgagttgaactcatgttcgcttcttgcaatcttttgaagaagagcatttatactaaccaccatttagtggtaaaatgatcaataactaactaagagatcatgggttcgatccatggtagccacctacctaggaattaattttctacgggtttctttgacactcaaatgttgtagggtcaggcgggttgtcccgtgagattagttgagatgtgcgtaagctggcccagacaatcattgatataaaaaaaaagataaaagatcatttatactagccggaagaaatatgctatgttggcctgtgattccaagttttattatgattataattagtttgaggttatgttcttgtttagcaaaattattgttcactaagctaatcttcctcgactcatttgggatctgtcaccattgtctaactttgcaattacttccttttattttagctactccactccattgtattctaatttcgagtgtgtttcttcatcaggtgatcattaggtaaaaccatggatcatatgggagccggaggtcacatttatgtcaaggactaaagtatatgagtgtttgattttggcaagtg

SEQ ID NO: 65557 - DNA, 666 bp, Cucumis sativus
  Intron number 4 from transcript Cucsa.339480.5 (locus Cucs a.339480) derived from phytozome v7.0 (chr-ID scaffold0335 6; pos 2075543 to 2076208 reverse strand)
aaaactggatctattaacgttcgaacaccttggtggtaagaatttttttcaacttcctctttatataaatattttaagtatctatcaaatttcttaaactttcaattttgttaattttaataattttaattttttagtttaataaatagttgataaatttgtaatttttaaaaattacacgatttgtgattagatataaagttaaattttgtgcaataaattttaaacttccaaagacatatatagtaaataaaagaaaaacttaagaattgaatttgtaatttcaaaacgtgcatatatcaaataaagtcttatattaaaatttagatctggttaagtaaaattttgtttttaaaatctatgtgtgttttctttccttttacattctttaaagaaacatttaaaatctggatcaaagtttaaaattttacttcttttagttaccaaaattttgatttgatttttataacgcattaatgaaaagttgaataaaaaaaataaagaagtttattattaaaagaagaatctataaatttaattttcaaaaacccaaaaaaccagttattggattggatttgttaactcaatcctaataagcaaagaaaaaaaaatacatctttctgcctactcttctgatcttcattgatctatgagctttgtttaggg

SEQ ID NO: 65558 - DNA, 533 bp, Cucumis sativus
  Intron number 1 from transcript Cucsa.339480.5 (locus Cucs a.339480) derived from phytozome v7.0 (chr-ID scaffold0335 6; pos 2077219 to 2077751 reverse strand)
actgttatcgatacctttctgtttttggtaatgatattttttcgtttttctattacgtatttcaaattttgcttttctttcagcaattatttctttgttttctaaatagtttttgagacacaattgttgtttgtctcaataatatttggccacctctttgcttttcttaatttcatactctatgtttatatgatttattttgtatctaagaaaaacgtaataattttttgttttgtttttgcttcttatgctagctagtttaattgaagacaagaaagaaaaaaagagttcttagacattctttaaatttataatgaataaatggataatcgttaaacacatttcatcccaacataagaacaagaaatgaaaaacaaaaacatgaaaccgtgctaatatttgaatcacattttttggatttgtagatcgtacattttgttgataaattgggaatttggcataaacttcctgtgattttggggttactctacctagcagttcgtcgacatcttcatcaagaatataacttgttc

SEQ ID NO: 65559 - DNA, 420 bp, Cucumis sativus
  Intron number 2 from transcript Cucsa.360760.1 (locus Cucs a.360760) derived from phytozome v7.0 (chr-ID scaffold0358 8; pos 1320642 to 1321061 reverse strand)
gcggcactccggctaccccgacgtctccgagccatgtaagatacacagaattactgcaactattcacaacccacatgtttatcactacactagtgcttgacttttttggttttttgggtatcaacctcaatgttttcttctccgaaaagttacgttggattatccttgtagtactcaaactgaaaccatatattcctagtattatgtttgatgaaaatactcagaatcaataatagaaaatgagggacagtttgatcagtgtaagccattttggaacagactgcctctctaggagccaaacatggctgaagtgcttgtcttctcacgtgcattagttctttattcattttgtgctattgattgcatgaatttttttgctccgcagtttgctggccaaaaaaggggcatcttctcatcgtc

SEQ ID NO: 65560 - DNA, 500 bp, Cucumis sativus
  Intron number 2 from transcript Cucsa.358480.2 (locus Cucs a.358480) derived from phytozome v7.0 (chr-ID scaffold0358 6; pos 12787 to 13286)
ctgcttcaaaggcaggcataaacattttgacaaaggtatatgtttatttgtatgaactagttttctctctgggtattgaaggattttgtgttaatgcagtgtggataaagatgaagatgagtttgtgtttaatttgtagatccatggagctcatgagggtgagagtttccgaaattggattagcaaactgcattaagattaacagaatctttgtaccaaacataagcacagtttcacaaatctcataccattcaagtctaacttacaagctaaaacagattgatataattgaaattaacacagtatacagtaggtcatgtgtttaagcccacaggggagggaggttataatgtgtacttttgcgtcaatgggtgatttaatacaatgatattttcactgttcatagttagtatgaatcatggctggtttgattttgagtttttgtattgtacttgcttgtagagttcatgttatatataatttgtttgaatatgcaggtt

SEQ ID NO: 65561 - DNA, 871 bp, Cucumis sativus
  Intron number 1 from transcript Cucsa.320380.1 (locus Cucs a.320380) derived from phytozome v7.0 (chr-ID scaffold0308 0; pos 229333 to 230203 reverse strand)
tcctcattgctcttcttattgtccttgtttatcaggtaaattcgaatatcctatctatttgtctcgcattatcttcatttcgagttcgtaaagtagaatcaaagacggtttatgtaaaagtttaaacgcggattcatcttactaccatttctgaacattaatttgaagtaaataacaatttctatgcgcaatttgttcatttcgaacagattagggtttagcacacttagaacttattttgtaagcacttttaaagaaaccgtaatttttctagtgcatcttggattggttttctattgaattttccaccagcggctagtaatcaatgggtttatttttggattcaattgtcaattgcatatcatgctctctagttttcttgttttcataatttgcagttttgatttcttttcctcaatttcttgacgatgtctgggttcttgctggcgttagtttgtttgaagtttatttataaatccttacgcatttggtcttgtttgttatgagcaaagtatgattaaagttaaaatttatggcatgtagtcttgaagattattgatgcaatggatcattataacatgtagactgattcttaggttggactttctaatgttgatccttagaaaatctattggtagaggctcagttttccaagaggctggcaatgactaatgagctcatatcgaaacatattaaaaagtttagatatcaatttaggacgctttttaatcaagtttttcatttgtatttatgcatatcagttgcctctctttgatcttttttagttgcaggatcaagaatcaacttcttgtttttaatttgtttctactatcatcatcatcatcatcattattatttttgtgtgtagctc

SEQ ID NO: 65562 - DNA, 911 bp, Cucumis sativus
  Intron number 1 from transcript Cucsa.365790.1 (locus Cucs a.365790) derived from phytozome v7.0 (chr-ID scaffold0361 1; pos 3693667 to 3694577 reverse strand)
aaaataaagaagagggacccatattcgccaactgggttttatgatcattaactttgttttcttaatcatataaaataaaaatcagtgtgtaattcttacaaaaatatttgtggggttagtttggtgcattttgaattttgtctactatcttccaaaattaaagaaagagaaaaatattacttgtatttatatcaaaattagctcaaaatattgcaacaattaatagcaatctttaaaactaatactaaatatacaaacatttaccaaaactcatacaaaatatgtaaaatggtattgaatctacaaacaagggcggatttaagaagggacgagggacctctcattttcacgatttttgtattttaatattaattttgaaatttaaaaatacaatatatgttaaataatgtgcagtgactatccgctttttgtaactctcacatcttgagttcctaaaagaaatataatttgattttttaaaaagaagatgatttggtttcataaaacgaagatagtttgatttcctaaaaggaaaataatattttaaaagagaaaaaaaaaacctatataagataaaaccctaccttatttcctagcactcgttatctaacaaactttcactctatcaacaatattccatgaaaaaatattgttttttaatttatattttttatgcaatttttaaattcacatatttacattacttatgtacatatttattttattttgtttcagaattaaacgatacaagataattttttttccgttcatcgttagaatataagtatcatatcaatttactagtaagtttaaattcttcttaatatttttagtttttactcttcaatctatgtgataaatcataatacttatattgtttaatactaattttgtagagtaaacatatcagt

SEQ ID NO: 65563 - DNA, 824 bp, Cucumis sativus
  Intron number 1 from transcript Cucsa.320150.1 (locus Cucs a.320150) derived from phytozome v7.0 (chr-ID scaffold0308 0; pos 47195 to 48018)
agagtgaatcctctatttggtccttcttcttccacgtgagtcttctgctctccattcggttctaaactgtccaatattgccagtgggtttctatggattttgttttgttttgctgtaactcttctacttagttcttaattgagaatgtttgacattatagccttcttttatcaattgaggttctgtggcaatgtgtttttgttggcattttctatggatgttttcaaatcactgtgttaatctttatttagttgagattccttactttcttttaaatttcttatctttgcttgtttgaggtatttgtttaggctcttgtgtaatttttagccccatgggttctagttaataatgggtcaaatgacaaatctaaatcagtggttatctaatttgtcttttggaaaggtttatcctgaggcaaagttctaatctgtgttctaattttgtgattagaaaaagtttttccttggagaagcctttttgttgaattctataaagttttcccaggtctctattttcatctcagttaaactaatcatctgagtagataattgtggaagagtagctttttttgtttcaaaatttgtcatgacgattgtcgataatgttcttgtgcgtttgtgttttgtatttgtctattgcgcaaattttgtcatttccatttgaggaagacatttttaaaatcatagaagaaacacaaatggcatagtgagtttttattttcaggacgaatgcaaagaataatttgaggctactttttggacattgagtttttacgtaattggtgttatttctttcagactacagaaactgggagccctgga

SEQ ID NO: 65564 - DNA, 688 bp, Cucumis sativus
  Intron number 3 from transcript Cucsa.357620.3 (locus Cucs a.357620) derived from phytozome v7.0 (chr-ID scaffold0357 8; pos 845886 to 846573 reverse strand)
cttgtaattttttgaagggtatttgatgccttatgatgtaagatttgtacttggttgaaacagactggttgcaataataacttattagtgtgctcactccttagattaaaagatgcatagcaccaaatatagattaaaagatgaataggcaccaaatatgtatgaatcatacccctaggctctatcaatggaaaaaaattagaatggtgctactgcaaatcattctttatcatagtatttcagttgtcaagttgaaggccatatgaaatgtcttaagcctacacttctcttctatattccttcatctaatgtgattttgtcctcctgatgatgctattgaattatcagaattgcatgttaaaatctaaagtttttctagttttattggtacatgtacttttcttaatgtttcatttgccattacataccatattcagtatttatgtttactttctctcttctttttccataaatctttgtatcttatttggtcatgcgtccaatagtcatatacggtgtattagttgtctttgattctattacttttaaatttgtgatcaataatctatttgaagagttcacgattctaaattttgttataaagtcaaaagtagtgttgtctcatttcaaatatgtttgtttcatgcttttagatcgagtttttggtcctacaacaactactcgtcat

SEQ ID NO: 65565 - DNA, 629 bp, Cucumis sativus
  Intron number 1 from transcript Cucsa.325910.2 (locus Cucs a.325910) derived from phytozome v7.0 (chr-ID scaffold0313 2; pos 196135 to 196763)
tctgtttatcaatttcgcaagtgtttggtactttggttggtgttctgttttctgtatttttttttttttttgctgttttgtttccatttctttctgaattttgaggattctgttctacccagctcatgtgtgggagatcaattagtcgttgttttagttttttgtgtctcgttcgatcagtttatggagctttctattctagtgctgattaatctgagaagtatgatggtttatgaaactagtggaattgagttttcaataaatattttttatgttgtgttaagattaaattggctgttgaaggttgactttttcttatgacttctaataaaattaattatcctaagtgatcaaataccaacttgaagttttagatttagtttgtgaaatggtttagtggagatttaaattaggcttggttgagtttgtgtaatgttattttcttcctatttaataccaattgtcagtttgttgagtttcatgctaattttgaattaaggagagtttttgagacttattatagttaacctgtccttaagctttggaatttttagtgttgatttaaaatcttttgtgtgcctgttcatagttaagtaaataacgtaatgcttatatttgactgcagattt

SEQ ID NO: 65566 - DNA, 664 bp, Cucumis sativus
  Intron number 1 from transcript Cucsa.370530.1 (locus Cucs a.370530) derived from phytozome v7.0 (chr-ID scaffold0367 8; pos 242213 to 242876)
gccataagcacaagaaacgcaagcaattgcaggtaaattttctgagccttcaatcattcttttccttcttttctttaggttattttggtctgattttgtttatgggttttttgctttaattaaacccagagagttaaggtttgattttgtttagcgttgtcatgaagtttgggacaaggattctgtggtttggtagcgttcttaagcattaaagtttcttggcacctactttttttccctttgcttttactcaacttttgactccaaagatttcatagttttagctccattaatttcgtttgtagtgtgtgtaaagtgttttttaagtttgtgatttgaattttcaaaattgtattataattaacaagcttattaggcataaattgtaagcttattaagtttttgtattattttcttcgttttagttcagtacaaactagtgaagttgtgaggatttaaaacgctcttcctctgtaccaaaaacaaggagttatttcatgatatataaatgtcagtaatttgaattcttatccatgtgttagcaacgaaaatgggtgtgatttgaataaaaagaatgtttgacaataatgtaaatggctcatcttagcttaatttggaatacttggcagacagtggagctaaaaattcgaatagactgcgaagg

SEQ ID NO: 65567 - DNA, 438 bp, Cucumis sativus
  Intron number 1 from transcript Cucsa.350780.1 (locus Cucs a.350780) derived from phytozome v7.0 (chr-ID scaffold0350 4; pos 246865 to 247302 reverse strand)
agaacattgatctagtaattaattacattcttcctcacttcaatgacgactcattcttagttgtgtaaagtgattaatgatctatctctttttaactttctgcttacgttaaaatgcagtaatatttcagtggcattgtatgttgtgatcttcgtttttctcacactttggtgaagaaaaatgaatgtcatgacaatgctatatatgactgtttctgagggatattgtgtaaaaattgtgttttgacgtaagcataatgttagatattgttggtttgtgagaacgggtcattaatcattgtttagggagttgagaatgagttgtccatatacgaactttttctaacattcttcttcttcttcttttttgagttattggtttgaattgtttatttattttgtaggaacgaattccggttgaggaagtttttgagcaact

SEQ ID NO: 65568 - DNA, 323 bp, Cucumis sativus
  Intron number 1 from transcript Cucsa.365320.1 (locus Cucs a.365320) derived from phytozome v7.0 (chr-ID scaffold0361 1; pos 2946939 to 2947261 reverse strand)
cgtttgaggccgaagaggtttgttgggatttttcttcttttcattttcttttcttttcatttttctgggttttaatctgattctttttattttgttttctgggtggtttttgcaggacttgttctggagtcaagtgctttggagcttttcatataaaacgattctcattccttctattgctctttagaaaagggggtttcacttagtttcatttattcttcttctttccttcctcaaattttggcctcttacgagttcgactaccaattttctagagttgaagtagtttttttttttcttaaattttgttttgccctctaaaa

SEQ ID NO: 65569 - DNA, 921 bp, Cucumis sativus
  Intron number 1 from transcript Cucsa.362680.2 (locus Cucs a.362680) derived from phytozome v7.0 (chr-ID scaffold0361 1; pos 465541 to 466461)
ttcgtaattgctcggttgaagtatgagaatctagcgattcttttttcttttgttttatttttgttcttgtttgcctgctagaagcttactccaagagaagattattataatgtaaatttctagagaattcttgttatttacatggaattttctttctctgctcgtctcaattacttttttgcccttgaagtcgtgctttctcaatggtttgatcaccatcttgtttcctcctacaagctcaggtttccgtttttctatatatatatatatttgatttgcagtgggagaaaatgtttgggtttttgtttaggagcacgttgaattgacacccagagcaaagtataaatgttcttttattaatttattttgtaattggtcaggcttactgcccttttgtattactctctcctaaatttcttatccgtatttcagtcttttagtttgacttggagggttttagttgattaaaaagaacggactttgagggaggcaattttaaacattatgtaatagtaattgcttatttggatagaatgattcctttggagtataacaagtaatggtggtggtagttgcgagtagaagaagtaggtgaagtaacattttttcagtaagcgcacgaattggaggctatgcagtgatttgatgaatcttaagaactgtgaagagactgtgggttcatttcttaactctgtttttgagagtgcaaaatctttagcaattaaattgaagtgttcacctattcttcagcatgatatgttcaatttacttttttccacgttgtagaatttgaattctaatttttacacttctttctaagataatgatctcagctcattaggtgcatcaagatgctcttcggcttgaattagaaattcattgcccaattttaacatacatattccccttcattttacagaa

SEQ ID NO: 65570 - DNA, 532 bp, Cucumis sativus
  Intron number 1 from transcript Cucsa.364050.1 (locus Cucs a.364050) derived from phytozome v7.0 (chr-ID scaffold0361 1; pos 1614705 to 1615236 reverse strand)
ttaattttagcagccatcagggttcgttttttctttttctttttttgttcttctattctatgtttattttgtaatttctggatgatacgcttgagttttgatttttgtggattcatattttataatgatcaaactctgtgagttttgatttcaatttgatagtggcgaaaaatattatgagaaattttatattaaaaaatgcttttaaagaccatcccatcaccaaaattgataattgttttatatctaattcaagatcaatctaaaattttgaaacagagattttttattattgaatttctctattttaatttgtttttattcgtggttctatgtaaacggtaaatgcatgttagcttatttagtttatgattatatttctttaatcctttgttatatatttcatgcattcatgcggctgtgaactttgtagtttgttatacattagttggattttttagaaaatagttttctgggacaaatttatatatttaaactattgttgcctcgtttcataaattgtcagctgtca

SEQ ID NO: 65571 - DNA, 925 bp, Cucumis sativus
  Intron number 1 from transcript Cucsa.348570.2 (locus Cucs a.348570) derived from phytozome v7.0 (chr-ID scaffold0348 7; pos 34319 to 35243 reverse strand)
ttgtcacactttagctgaatatatcaaagatcaaggtgacgcgttcaattcagtggtgtttcttacactaattcttgattcggttttgaatttacatctttatcactgcatttcttccgttctcgtaaattagcagcatcttattggattttgttcgcttgttttttttattgaacaattgattggtcgtcttgtgggttgttttatttgtgtatcttttttgcttgatttggattttggatttctgggttacttgattatagtctgacgtgtgaagtgttggttttaatttcgatattttcaatcaatttcttagtattgtggatagagtttgttcatattagttcatattttgttcaaagagacgatagtgatgagttcagtgatagagtttaggtcctactactttgatcgtataggaatttgttagggaagatggttccagaaattctgatgtaataactcactcttttttcaaaagattacaaaattgtttctatgggaagaaaaaagttctcaacttttaaaagggatagacttatcttgttcctcatgcaatttgtcgattgtgtttttcagaaaacacgtatcgtgtctttctgataagtcgtaatttgaatgcaattagtgattgttagtgctattccttttggcaacttctttttttcgcaatgtcctttattcacaagtggaaatggcttcatgactttcccacactattttgagaaacaactgtttgtaattttaaaataatgttttgtgaaaatatcttcaactgtttttagaaagtggtaaacttattttttctagtttgttttcacatacatctatttcttttagttaagttgaagatattagacacaatcctcatgcccagattcgtactgcagaattagtgtcggactgtttaaagtgttgtgccgag

SEQ ID NO: 65572 - DNA, 407 bp, Cucumis sativus
  Intron number 2 from transcript Cucsa.342130.2 (locus Cucs a.342130) derived from phytozome v7.0 (chr-ID scaffold0335 6; pos 4519480 to 4519886 reverse strand)
ggtaagtttggaatcacttttattcttgttcactggattgaataaacaacattggattgttgattcttcaaatggattagattggtgaatttcgtaagctggcatcaattaaacatagtaaaaaagcataaagaaagctagttgtcctcactttcctttcgattctgattagggcattcataattaaaacgcttgcttgtttcgggtaattgtttcattggtcctctgtagttgttgtggaatgatatactttttaggaatagtggttgagtttggtactttggattctttgctcattcaccttttgctttatttgaaatcttgttgtgtcatttattctttttctcctggcccctcccatgttttcttttcataatgcttttggtattttgatttcccagcatctg

SEQ ID NO: 65573 - DNA, 613 bp, Cucumis sativus
  Intron number 1 from transcript Cucsa.342130.2 (locus Cucs a.342130) derived from phytozome v7.0 (chr-ID scaffold0335 6; pos 4520003 to 4520615 reverse strand)
gcattggctggtatgtctctttctttaattcacttgttatttttttgtttcttttttgactgagtttaggctacattcagtcttgattgaatcaattttgagtattgattaggttttccccaattcccaattcccaattctgtttcttttttggaattttaaaaaaaaataatcatttttgttgtggtttcaagttaagattttgcatgcttaatttgtttattgcatccatttctatttttgaatttctctagaaaaaaaatttcagctttgtattgcatgttcaatttgacctatggatctggtgattattgatatggaggtttctttcacaatgtaaaattcatttattgtaattgaattcgggaaattttattgaatttgtgagttcataatttctcgaatatttttagattcttgttctgtttcctttggatattcctcctaccaagtgtaaaatttatttccgtgtttatctagatgttgtgtttcttgatgttggacttagaacagtgtgattcttcttttgaaacctgcaggtcaccatgattataaatataatataggttcagcatttaattttgaaattaaaaaaatcctcaggttctcacga

SEQ ID NO: 65574 - DNA, 526 bp, Cucumis sativus
  Intron number 1 from transcript Cucsa.385640.2 (locus Cucs a.385640) derived from phytozome v7.0 (chr-ID scaffold0390 4; pos 923936 to 924461)
tctcgtaatcgtcattctcacttgccttattgttggtatgtgagtcagttgaatttgtcttggacttgtcattcttactcattctactattactatgtgagtcaatggaattagttataccttgatcttttattggtttcgaatcttggactagagccgtctgaacagtagaaggctcaacttcctttttgagattcctcctatagtatgcatgcatcacaagataaagaagaaacatcacaagataacgtaaatagagacgaagaacaaacacaattttacatggaaaccttagtatagggagaaaaaccaagttctaataattttattattttctaatactcataaagctacaaagtggaagtatttataggcaacacttgcttaaataacataataaaaatagtgcaaagtaaattatgtaactacccttgggctttcaacatgacctaagcccattattctaaccatatacatttacatttgactttttgtgcttggccaattcagattgtgttcctttaca

SEQ ID NO: 65575 - DNA, 1012 bp, Cucumis sativus
  Intron number 2 from transcript Cucsa.317670.2 (locus Cucs a.317670) derived from phytozome v7.0 (chr-ID scaffold0305 4; pos 109160 to 110171)
ggggctttgttggttccacctcagcttactggaaggtttgttctaatgcatttccagtttccccttattttccttttgtttatgctggtttttgctttcatttttttacactgttccttgaataataaaataattggtttgatgcatttacatatatatatatataatttctgcagtccgctctaggtgatgaaaatcaaatcatttcaaaatctttgtacatactaatgagtacattggcataggtagagtagattcataaggtacttgtatccttgtgaggtgatagattgaaaaaagttccaattcattcctcagctagaaaacacaatgaataaataaatcatttcattatagcgtataggactattaagtatgcatgtgtgtattcttctagccctaaaaaattgtaataagtttatgcccctccaccgacctctctctggagtcgtatgaaaagctctgattctaagttcagtagacatgatcataatagcaatgtattacttactactaagtttggtataagataagcatggtttgtggacttctggctatgaatagtctgtaagcctatttattgtttttaatgaatattagtgtttgaaattttgttaataaacttggttctagttatattctatgaaagtaaatgcagaactatggctgttgataaacatcatttgctgccttgcaagaactctgaaaatctgatttactattgcttaaaagtaaccgtaactgctttaagatacattcactggtttaagtcagaaggaaatttgacaattaaacagcgctatgatatcaccttaagaagcaaacactagtagtgtgaaaactcaagctcaagctcgcgcgttttttattcagtttagaagtttgaaatatatgattttaggtgaattcctattgcaattttgcacctaaaatttattattttatttattctgatagctattctgcatctttggcaggagtaacattgtcaccgaagatataagcaagctgt

SEQ ID NO: 65576 - DNA, 376 bp, Cucumis sativus
  Intron number 2 from transcript Cucsa.332040.1 (locus Cucs a.332040) derived from phytozome v7.0 (chr-ID scaffold0325 6; pos 189566 to 189941)
catcaggttcgtatttgttaccaaacttgacgaggcagtagctaagttaatttagttggttggatgcccacacgacgaagcaacagggttataaatcccattttggttcccaaacttctaaattgtttattttggtttatgaactttcaaagcatccattttattttgtttttaatgttacttgcataaacttgttcatcaaatggatattcaaatatgtacaattatttcaagtatgttggccgagggaggtcttgaatggggcaaatgttgataaaataacaaggaacaaagttgctagccttaacgattattcagtatttgatgttcttaatctcgatatacgattttcttcttaggtgaggagggaagcact

SEQ ID NO: 65577 - DNA, 692 bp, Cucumis sativus
  Intron number 3 from transcript Cucsa.332040.1 (locus Cucs a.332040) derived from phytozome v7.0 (chr-ID scaffold0325 6; pos 189958 to 190649)
aagtcgaaggtatctgcctaatttttcgaagtatctgaagttgacaatgatattgcagcattgctgtactgataatataactcgataatcaatcttggttaaaattgtcaaattggattttgaccacgtctataacttaaatatctattttaagcatggaattagtgatattaaactttgcaatacgtctggaactcccgagatttgaacaaattcctctactactaggtgatcaattaacaatctgtagcaggagccaaggaattaaaagaaaacaagagaaacgaaagaagagctcaagggaaaatgtagaggattagattagagacaagatttattatttcttatagctgacacgattgctttttttgtgtcctgttatttgtttgaacttttgtagagaaaggaatctggaacttgagaatcaccatgaaaatctttatttcttgtagctgatacgatcattcccattgataaaaattatttactgatttaggaagaactataagtatagaagtagctagagagcctcacaagtgtaagaatgtgtatgaacgaaattttttgaatgaaaaaattgaatatatttttggatctgtaggcctatactaacacatacaaaaatattgatttaataatgctagtgcacgatggcaggtcataccttttgcacttcggaagttcaaacaaca

SEQ ID NO: 65578 - DNA, 969 bp, Cucumis sativus
  Intron number 1 from transcript Cucsa.336010.3 (locus Cucs a.336010) derived from phytozome v7.0 (chr-ID scaffold0333 4; pos 16068 to 17036)
agcttgaagaggaagttcgcgattctgaggcggaggtactcttaatccttcttcttctgggagttgctgtttctttaccctacttttgtagtttgactctttagttggttaggttagatagtgttggtgggtctgggtattcctttatgctgtgcaattggttggaataggatctcattgtcattatctaatgttatcaattgggcgttggagtggaggtggttgcttcttgctttgctgtttgaaaatggaatcagtttagtaagtgggaacgtggcattctggcattaactcaattcgttgtctatttctcggttcttaattactcaaccgaatgatgtctagaaagagatttaaagacaaatatgttcagagttttagacccttctcaaatctcacctttggaatatccacttaatatctcaattttttgtggtaactaaacacaatggagtatcgaagcagttttggtagttctgggcccatgattcgagtttggtttaatcattcttattgacatttttgccgtattgctctcagcaagtttatgtgaaaaataagatacctatgcttttctccaagtctaatactgaaaagtttctgattcctctatgtgccctatgcaactttgtggatactacaaaaatataatcaaatgatgggtctataagctccattcaattcaagactaaaatttagatgttgaaataacatggtccataaaacacaaattgtgttcttttagacctaaaagtataaataattgatttgatttttgttaaaattggaagatttttggatattggatgtttagagagtgtaataacttttggctatggaaaattaattcgaatggcatggatttagattgttttaattaagtttgtacagaaatcgtgcccttgcactttcttgttgctcatatatttatgtaacaggactcttctgttagttataccggtgtagaag

SEQ ID NO: 65579 - DNA, 643 bp, Cucumis sativus
  Intron number 4 from transcript Cucsa.363890.4 (locus Cucs a.363890) derived from phytozome v7.0 (chr-ID scaffold0361 1; pos 1467298 to 1467940 reverse strand)
agtcagcttgctgaagtcaaagaatttgaaccaaggtatgaaaacttcataattttaaaacccaatttatagaagaagcttgaatatagttccatgtgttctttatcatagccaatgtcccatatagcttcaatgttcatcacatcattccttctgaaaatgacatacattgttttattataatggtcacttctaacttctaactgcttggcaacctcacccactttaaagcctagtttgaatggagattgcagttctctattgtaggtgtagtttgaaaattttacaaactgtactgttttggatcttgactttatatcaaatttgtccttgtatcaaatatcaaatgcattgtatatactaattttgttcaagttaacagaaagttacattcagcacattttgtaagctttttcaaatgaaagacgtgtttttttaacccattttcagaacatggagatctaattgttactatccttatgctcccggagcctgatattaacccttgttttaatgaagtataagataaattgatgaagcacttggcttactcaaaaatcactattcaactccgttgcttggatattactgaaatacatgctatcttaagtttgtgtcttaatccctaaatgcagtgaaataa

SEQ ID NO: 65580 - DNA, 260 bp, Cucumis sativus
  Intron number 1 from transcript Cucsa.395230.3 (locus Cucs a.395230) derived from phytozome v7.0 (chr-ID scaffold0410 0; pos 842168 to 842427)
agataatcgacgggggggaatttgaatctggggtctgttttcttggctgattctgtaatcgatttttttttttaataaattcggagttgaatttttggagaagagtctttgagttttgaaggtttgataattgaaatcaattcactgtttaaggtctttgttgttctgggtttagatcttatcttctgaaattagtttctaactcttgaaattttcgttgtgcagataaatacagagcgattttagttgttcgtttgagg

SEQ ID NO: 65581 - DNA, 751 bp, Cucumis sativus
  Intron number 2 from transcript Cucsa.395230.3 (locus Cucs a.395230) derived from phytozome v7.0 (chr-ID scaffold0410 0; pos 842586 to 843336)
gggggaggagggcaaacccagatcagaaatttcaggtactgattggttatcttcttggtgtattttgtaggctctgttctttctgttctaattattttcgtccgaaatttcaggtctgattttcttcctgttcattgctaccttcagcatccaatagctatcgcttcctcctctgttcgaattcatagggtctgataatatgctttcagaatttaaaaattcgagttgcttcttccatagaaggatcttctctctctctgtgagccattgggaaatctggatcccctgtttccatgtgaaattcttcttgtttctttgagttcctcacattttcaagattttccctcaaatttcctcttaatttcagacccagcgtcttcccaatacttttcttcagaaacccagaccagttcggcttttcaaatttcgtgaattccgtcttcggatcatcgagaaaaccccatgttctggtctctgactgtttgatgttctcctctagtaaagtttttacagtgttgatggcgaaaacgtcatatttcagtgcttgaaatttctaatcacctttgctctgtccatttttcttagtaacttcgggattttcatccgaatccaattgactgcagaacctgctttttatccatttcccctttcgtttctctttgctactttaattgtagaatcttctgagtaatctttcttcagactaacccccttttgaaatgggacaggtagtgtatatataattaagcat

SEQ ID NO: 65582 - DNA, 793 bp, Cucumis sativus
  Intron number 1 from transcript Cucsa.342300.7 (locus Cucs a.342300) derived from phytozome v7.0 (chr-ID scaffold0335 6; pos 4664085 to 4664877)
gagatcttgggtagatttatgggttttctttcttttgataagtttattgatatttcttcctttatgtctaaataatttctttgaagtttgtattctttctttgacgcaagaaatttttattgatcttgtgagtattttgattgagatcagctcaaggacaagaagaataggaaagtggtaacccacttttgagggtgaaaaaaaagtgggaagaaaaaagggggaattaattaaatgaagaaaaatgtgagtattgaggaaacaagagaatgtgttttaatttcttcttcttttccactatgttccttcttggagtttatatgataatacttataaataagaggagtgttggaatgaaagaagtaaaggggaagaagaatgaaaaagaaatttgttgtagatagaagaaaaagaagaggaagaagaagatgatgaatttaataattgtagtttttagacaatggatttaatttttgagaaactacaacttttcatttaagagggagagaaatgatgaaaataaatggaaaaaacatataatcatagcatggaagggaagaaaaggaaatgtatcaaatggggaggaaattctagctttatcagggaataagtaatctttataaacaaaataaaaataaaggtatacaaaagttactagagaaagaatgaagataagtcatgaggaatgagtttgagtttagaattcatataagttcatggttggtcaatggttattgatctatttattgaaatttcaggttggactgaaatttgaatctcttttcaaccgagg

SEQ ID NO: 65583 - DNA, 958 bp, Cucumis sativus; identical to SEQ ID NO: 65443
  Intron number 1 from transcript Cucsa.342400.3 (locus Cucs a.342400) derived from phytozome v7.0 (chr-ID scaffold0335 6; pos 4719592 to 4720549)

SEQ ID NO: 65584 - DNA, 800 bp, Cucumis sativus
  Intron number 1 from transcript Cucsa.366770.1 (locus Cucs a.366770) derived from phytozome v7.0 (chr-ID scaffold0362 5; pos 284296 to 285095)
acggtacacgtgctcctcttgggtttaatcaaaaggttttacctctcctctaatttatggttcatgacacaaatttcaacctcatttgtgatctacagttctttttcaaaatttatacctcatttcaaattatataattttgaaaacacttgtaaaagttaaaatgaaatgaataacacgatgaagagaaaccattgttgcacttttatacggtcacgtttcaagtttcaagttcacaatcatctttgttaattcttttttgtgtttaagttaagttctagctccattcatgtttcatcgtataatgtaagtttgttaggttgattttattaacgataagatattttcatgtgatgtctatagtatagtatgcattattaaaaatgaagagtaatttggttggacatgtgtattgaacgacccaatttcaattccacactttttgtgctcttaactcatttcttttttaccaagacgtagccattttttttaaaaaaagtaattaatttgtaactaattaaacaacctttaaaccctaattaacttaactaaaacgggtgtttcaagtaagaaaagtattgccctctaataataacaacaactgtatttggaaagattttaaccagattgtaggaactaaagtgaaagcaagtgcaaaatatagggaaaataaagaataaattaacttcaagaactgcatttttttttcaattttgtaattaaagatgaaaaagtttatgcaacaaaaaaatcaaaatttaatattgtgttataattttttgcataggtaatccttgtga

SEQ ID NO: 65585 - DNA, 428 bp, Cucumis sativus
  Intron number 2 from transcript Cucsa.385150.1 (locus Cucs a.385150) derived from phytozome v7.0 (chr-ID scaffold0390 4; pos 518161 to 518588)
cttcacacgttgaagaggtaaacttaatctcctcttttacatattcacttaatacttgttatgcccagttactgttgtccttggttttttccccgtagaggactactagtttgtatgtttcttgcttgttggagttttgcttgataatgtgtgatgtactttatgaaacatctcggtggttggtacatttgaattaagtttatagtttgcagggtcttctatttgtgccttaaaatttaatgggtatggtgttgaattcttcatcaagagtatttgtgagtttatactcatcttggaaaataatgtacttttttggcatttcatgggatggtagattcaaattaaagacttacacatacactataactttgttcttttactgaatatgtgtatgcatattataggcagagaagattggtttggattat

SEQ ID NO: 65586 - DNA, 871 bp, Cucumis sativus
  Intron number 1 from transcript Cucsa.378600.2 (locus Cucs a.378600) derived from phytozome v7.0 (chr-ID scaffold0381 0; pos 194900 to 195770)
gagttttggggtaactttctctcttccctttcccctcccccctctttcttcagtatttatgcttcttcgtcattggcgcctctttaggtattcatacggtagaaaaacagtagaacagtgcattagcttaagcatcgggtaggttttttcatcttcttcctagaagtgtctgggtctcggttacctgttcatgctgcagtgtgcttttgctatcatatatttgttaatgccgtctttgcatttcgttgctaagtgaaatataggagcaaattcggttttaactgatattgtgttttattaagttcgtcccagttgaatttttaatgtatctggcgtgaatttgaatgttacgatactgaatggaaacagtacttgaacaattgtagagtcgcttctttttacagatacgtgatcttgaacttgggttgtttgaattttgacgtgcatggttaatttacatgggttctgtgtttaagattgcttatgtgcagccgttttggtaatctctcttattttggctaattcacgagtttctacttgatcttatcatgtgcgcgcgtgtgttttgaactaatagtttgggaaaaaggattattgcctgatgatttcgaactttccaaattgttcttaattgtttgttgttaataactatcttgctggagatgagggatcaagaaaacaatttctgctggaaaccaagagttgttttatatgttggaagtatgacttggttctattacatgtctactaacttaattgaagcatgttagtatacggtcaattatgttgtgattctatgtttttcctaaaattagtgttattgttatgttttgcaggtgctgaggttaaagttggagaacctctcttggtg

SEQ ID NO: 65587 - DNA, 491 bp, Cucumis sativus
  Intron number 1 from transcript Cucsa.342550.1 (locus Cucs a.342550) derived from phytozome v7.0 (chr-ID scaffold0335 6; pos 4839827 to 4840317 reverse strand)
ctctgctacttcacctccttccctccaatccaaaggtgcatctctttcttttattccacttccttctttaccattttctttctataattttcatttccacttagttctttccgtttcttgcttaattcacttacaagttagggtttatggactgcgtgcgatcatacaatctatattgctccatcaccgttcttatgtggtttatgagtttggattaagcatacactacataatcaaacttctctgcagccaatttatctccaatgattgtcaagatcggctctcttacttgcttgagaacagattattgtagtgtttctggatacaagttttcctcaagggatacaatttttcttcttcttttatcttttgtaaatgcatgtaattttttattaatcgacggatgtgtgctgtaaattgtctgacgtttttgctctgttgtattgtttatcacagtgaaaacagagaagaaggatttccttcacctcagc

SEQ ID NO: 65588 - DNA, 787 bp, Cucumis sativus
  Intron number 1 from transcript Cucsa.363490.1 (locus Cucs a.363490) derived from phytozome v7.0 (chr-ID scaffold0361 1; pos 1039084 to 1039870 reverse strand)
acgagcgattggccatttctttttcccttcatccagtaaggaatcaacgttcacttcaattctccccttgaaatacatttaggttttcggatgatgcttttttttcttttttttttagttttgatgttttcaccaatggaatttgcgtgttgatttgattttatgattgtattgtgtgcaattgaaaactttgattctcgtatcaagcactctggagactgaactagaataataataatacattttgtgaatttaggtcagaggataaggagaaagtaatcggcagaatggttcaattttacacagagtgattgtacgcgttgtatttaggtcattatgtgaagttatactagcgctcaagaaacagttttattcagggaggtgaaatgatttttaagttgtgtgcaacttcaaaatttaatagctactcgaatgaaattacccttgcttgtttaagttgctatcttccagatgtatagcttggcgtgacatgttctactttttgggtactaattattgttgcggcaaagaatcgttttgtttgagttctgtttgatgtattgattagtttcttcttcttttctggttgttgttgttatcacctttttttaaaaaaatctcgaggagagggtattaatttcactgcccgtccgagttgaagatttaatttaatgaaattaataaatcaaggatcaaattcaaccaaagcatcacaaagatttttgagagttttattcgaaatttttatgcagagaagaagacgtcgcaaagaagccacgcgtttgcc

SEQ ID NO: 65589 - DNA, 613 bp, Cucumis sativus
  Intron number 1 from transcript Cucsa.360260.1 (locus Cucs a.360260) derived from phytozome v7.0 (chr-ID scaffold0358 8; pos 973346 to 973958)
gagatagagcggtgattattcagcgaactcaagtggtaactcctttgagcgactgtgttgagattttgttttgttatttcggggttagaaaattgcatgattgaaaattattattcatccgtttgttagtaggttgtgcttatagaacgttgtgtggcagtattcgagtaatttgatggctccactgaaattgtcgacagagtctaaccaattaatcgactaacttgtacagatttagaattttcacattacaaggtttctagtctaggtactcggttcaagacgtagctactatacaattctatcctggatgaacctcgaaagggaagagtcatcgagtgaagtagctgtttaatttatctttataggtcttctggcttgcctgaagttgatctgtcatcatcgtgtgtgcctgtgtgtatataatgtggggattaagtagttgggaaatcttgaaactacttaatcaacacgacttctttatgttctgcaagtgtttgttttcgttccccttggttgtttaatgtgatggacatgtgcatataataattctgttctttaaactaaagcttttttggttgtattgtggctttgtttagtgcatattcaacga

SEQ ID NO: 65590 - DNA, 372 bp, Cucumis sativus
  Intron number 1 from transcript Cucsa.342330.3 (locus Cucs a.342330) derived from phytozome v7.0 (chr-ID scaffold0335 6; pos 4679391 to 4679762)
tgtttaactcagtggttcagcccttagcgccgtcggtgagatcgcacccaacgttttatttttttgtttgttaggttattgttgatttgttctctgcacccacggagaagaaaatgaagaactgtttgttctcttcattggatttcttcttcaaattagtgttaatgaaaatataaaagcaatgtatacctcacaaatttgtaacataaatagattgaaattatgaatagaaagtagcaaaatacatattagtagagatttttctctgctccagtcgatcttctgaatgtatgagttgcagttcatttgattatctcatttgtgccttttgttgcaggaaatttagggtttgttatttgctgaagaaaagaa

SEQ ID NO: 65591 - DNA, 871 bp, Cucumis sativus
  Intron number 1 from transcript Cucsa.327740.1 (locus Cucs a.327740) derived from phytozome v7.0 (chr-ID scaffold0315 9; pos 91111 to 91981)
ttcgattgaggtaatttagttttcttattattatttttttttatggtttttgatcgatgggtttttttttctttagtttgatcgttttgattgtttggtttgattttgattctgtggtttggctttgataactgtttgagtgttttgtggtgtttcataattagcttttgagtgcttcatcatgcatttgcttttggcactgaattcttgggttgtgatgttgagtgtggaaattttttgattggtaactttttggctaataacttgtttgtttgctctgttgaattgacttttttagacttgttatgtatgcttgtctcttgtctctttactgagagcagtcttgtgaaaacacaaaactctcctctgttggaatctctgaattcctgttcttcatctcccattttcaaatatatatcgcatcagctatttctatgagacttcagctttaaaagactggtctgcttttgatcggttgaagggggtgttctttggagttcatcgtctaatgttcatgacaggttccctttcatttgagtttccatttcttgacctcacagtgtgaaattgtgatggaaatctattgttcctaataaataacttttgagtgcttctttgaaggccaatgattgtggattcgtggtctttttgatgaagtacactcttgtgaactgtctttttatgggactagtggtctgagcttcctcacagtagcctaagtttacataacatgagttatttcattgtttctgtgtaaatgactttgtattagaaaattattgactgctcttcaatgggattctctagaagaaaaagtggatggttcaatgtttttcaaatctaatgtgtaaaatgtctataattttcagga

SEQ ID NO: 65592 - DNA, 985 bp, Cucumis sativus
  Intron number 2 from transcript Cucsa.316110.1 (locus Cucs a.316110) derived from phytozome v7.0 (chr-ID scaffold0304 1; pos 45474 to 46458 reverse strand)
acgggaatcaaacgcaggagaatagctacatctacgtaagtatttccggagattctacaattgatttttaccggtactttgtttagatgatacattattctgcgttggtgtttggaattagtcggcattaatatattttgatgtaaactgaactgtttggtaccgaagtatgtgaatatgagtaatttcttggaattcgtaatcaggaagtgatgtctcaggctgtgattctttcaaatacattgtcggtattttcttccttcgttttaaactgcacacttaagtaaaatatgagcatgttctttaaatttctattccggaactatcgttttatttatgtaaactgctgtttgtttttgtaataaggctgaattctcttatttgatttaagttacaccgtccagtgtctagtaccgagttatatgaatcttcgtcttgaaatctctatgctggaaccactatctcaggctttgatgttttaggttactgagtcaaatagattatatgatagatttaactataatagttttgatgatacattgcttcatttctagcattaagtttttgttttatgttgacattctcgaactttgatgcattgcagattctataccctgtttagtagtgatacaagtatgagtaaacttttgaaatttctatccgtgaactatatctcacgctttgattctatttgggaaccatactcttcaagaggatgttcctggacctggttaaagcaaattattggcttactcattggatttcgatgattagaaatccttttaagttctattctgaaaattttgcgggctcaagctcacattacttattggctaatacgaaccattcgttttttcatatcaaagcttgcagatggcaaaacttttgtttcaaattgtcttaggcagaactatctgatttcataatcttggttgatgattactgaacagattccacctaggacaaagacgcaacagcaggacaa

SEQ ID NO: 65593 - DNA, 707 bp, Cucumis sativus
  Intron number 4 from transcript Cucsa.394230.5 (locus Cucs a.394230) derived from phytozome v7.0 (chr-ID scaffold0410 0; pos 262592 to 263298 reverse strand)
tggtggacagtaacgatagagaccgtgttgttgaggcaagagatgagttgcatagaatgttgaatgaggtgtgctgaatgtctgcatcattcattaactttaattgttggaattgtagatttcatgctatccactttgtcaatagacttatcaagtttagtgttaaatacgacaatttgaactttagtggctagatgtgattatatttattgcaatgccagacgtatgaaattcttttttttttccctgtccagtgaaaaccagacaataatggtttgtacataattatagcgaatagttgtgcttctttgtgctttgtaggttttttcttctaataatctatgggatagataatttataattcaagatgactgtgaggaggtcacaattctctaatgcctcttagacgacattggttagaagttagaactacgcttagtacttaatgatacttaaagaaggatcgagcaagggtaatagcacctgaaatttgttggcatttgattaaagatactaacatttcatgcagcttggactgccaccccatttccagccagacaagtcattcctttatatttctcccgatcatttattttactcgtttgctccttgaattgaattggtcaattattttattgggttaaatacatatatgttaagattgaattgcgactgaagcttttttatttttttccaccgactacagg

SEQ ID NO: 65594 - DNA, 896 bp, Cucumis sativus
  Intron number 1 from transcript Cucsa.348560.1 (locus Cucs a.348560) derived from phytozome v7.0 (chr-ID scaffold0348 7; pos 23666 to 24561)
gattgcaccaattttctactctcttcttgttactggtattctcgaactctccaactatttcttccttctctattgaaaaatcaatttagaactttgtgtaacgaaagaatggaggacttgtattgaatttgattttttttttttgttgattaaaatcaccgaatagcaatggaaataggaaaagataaaaaaaccatcagcctcgcgtcaaaatgggatttttcgaagtgatgtatgctgttttatgccttttagtttctcgcatttgtctgtcaattgaggcttgggtaatctgtacatctcttcggtctctcccgaaaattgtgttgtttccaatctcctaaatcatccaaagcaccacccaccatgagttttccagcatttctcttcttaaccattaagtattatgtttagcaatacttggtcataccaatttatgatttgtaaaatgttcttaagtaaaattgaggctcttgtatcatacccttttgaggcttatgcctcgccttcaagaagccagcctcaaaaccacctttagcctttaaaatattgagtacttctattacattactggcattttaaaaaaaataagaagcctttgatattcattttattttaataatcaataagaagccttgctttatgttgaaaaaaccccacgacatgagggtgtcagaagctacttttgctttgcattgaaatcgtagtgttgattatagataatagtagacaatttccattttttaacgctcaattgactttctgtggaacatgattctggatactactacaacctatgttctattctactctttggatgataaaacttttgaaatttgatgccgtttatttttgttataggcttacagccagccaaaagtttgttggaggtgtct

SEQ ID NO: 65595 - DNA, 823 bp, Cucumis sativus
  Intron number 3 from transcript Cucsa.348560.1 (locus Cucs a.348560) derived from phytozome v7.0 (chr-ID scaffold0348 7; pos 24902 to 25724)
ctgagcaacctgttttcaatttagaggttcctacgctttcttttttctccttgtgaaaatctttgtcaatattctttacttccagttccaggcattctccttgtttaatgcatagttgacctgagcatttcttgtgtttggatgtacttaactaaatgaccagaattaaactgtatgtaatattattcttttacaattttggaccacaaaattttaaacaataggaagggattggggtcgtatcatttttatttcgcaagagatttaggatgagtgaggggatgtgagatggtagagctgtattttcttgagcagtgacaagaagaaatttaggtgctgtagacctctttaatcagcattagatttacttttctatatttttgtagttgtgaagtttagttttcttccctgttttctcaatattttatgcttattggaacctcattagacgttaagtaatttctctctactggtgcttctgttgtttgaatcagaaatgggtataagtagatgaccaatggggaggaatcttccctcattctgctttgttactttagatgctaagttttcattctcttaatacgtgtgatgttggaacatatgatgaaagtggggttgtgtatttggagcttgtcgaggaatcacttgagaatttggcagaaatcaaacatctttaatttctattatgcgttacaaacactgtttctgcctttctccagtgcaattactagtacaattctttcactggtccatgcaagggagtttctagttcctgctaaagtgattttaattcttgcatttgctctatcttttcagggcattg

SEQ ID NO: 65596 - DNA, 425 bp, Cucumis sativus
  Intron number 2 from transcript Cucsa.382630.1 (locus Cucs a.382630) derived from phytozome v7.0 (chr-ID scaffold0387 6; pos 770 to 1194)
cacggctttcagaatttgtgagttcccatccagaggtatgtcaccattttcttggccggaaatgtgaaaacttgtgggccctctatatgccattgctagttcttgctcttttttcaaccggacttgaagaaacaaactatgttgatgcttgctggatgttgcttttctcaaattttatagcttagaattaggaataaagttggtggtataacaatgaattgtagcattctgatcatagaagtttattgttatcatttgcatcatgcccactcgcgatggcttgatttttctcttttattttgaaactcattccttttcaaatattttggttttatgggtttttctagaccttcaaattttctatgttctaaggtatgcttctgtattcagattgacgatattccaaaggattctctgccacatcc

SEQ ID NO: 65597 - DNA, 362 bp, Cucumis sativus
  Intron number 2 from transcript Cucsa.370590.2 (locus Cucs a.370590) derived from phytozome v7.0 (chr-ID scaffold0367 8; pos 282828 to 283189)
cttcgtttggcgtatgctctctttacattgactttcattgactattttcaattattatcacgaatactcgttttatatctcttggattgttatttcatttctctatccacctcggttgattgaatgaaaatagacggacagttgacttttcttcatttagtttgttgttgttgatttctgctgtgtttgttttttttttttgctggaattgcatggatgagattattaggaattctttcatttcgctgtttttctcatttctgttgaatgaagctttgctttctctttgattttgatgatggatgattgtagcaattttgttttctaatgtttcaagcactgttctgtcttttgtagttggc

SEQ ID NO: 65598 - DNA, 828 bp, Cucumis sativus
  Intron number 1 from transcript Cucsa.360310.4 (locus Cucs a.360310) derived from phytozome v7.0 (chr-ID scaffold0358 8; pos 996943 to 997770)
aaatcgctgacccagttgtgtacaaacttgtcagggtatcttctttctcttattttgattgaactttgaagtttttgaacgttcttgattttcttctttgaaagaatttcgattcttcagttactggtgctaattctgcatttttgttcttatggtacaataatgtaaaagttatacccaagtataatctatctaccttgaaattaaatataacgtctaggttttgaactgtttttggtgcaatctatccatattattaagttactgattggtggcttcataagcccttagctgagagcatcattctgattggagtactatatgcaggttaaaggtaccgtcgttctcatagagatgtcaattgatgaaggtaccaaatggatgtctaaaagtaaatgtgtttcatattgtgaggactaagaaaggagattgaataaatttgtagctccccccttccgaaaaaaaaaaaggatcaaagaagttgaagcttcttgttatccatgttctgttttaaatagcaagcattcatatgtatcgtgagttagtaacatatcaggtagtaccataactttggtctagcgtaatgggcaaaacaaaatgttccaaaattgtttgtatagcaatatgcaacaacgcaacctaaatccgctttggtaatttttctgaaaattgtcaatatatgtggaagaagaagtgtgatccgatcatttcattggttttgtaatcgaattccagtgatagcattactttccttttctttttccttctggttccacattagtgtttgtttaagtttctcatgaagttctgtatgtcatatttaggttg

SEQ ID NO: 65599 - DNA, 631 bp, Cucumis sativus
  Intron number 1 from transcript Cucsa.388810.6 (locus Cucs a.388810) derived from phytozome v7.0 (chr-ID scaffold0396 7; pos 1222523 to 1223153)
ccgttcctcttggtggagtaagaaaactctgtgaggtaagctaatttcgagttcttatcgagcccaatctttttcacatacgttcaatctaatctttacgtgatttcgtttgagccataaaactgctgatagctatttttattcgtccatcagttactagaacaatttctgtttctacgaagtttttttcctcttttttccacgagaatttgcatttgggaattcctaaagttcaaagtactttttgttttacgaagttaatctcatcggtcgaaatgggttttggtttagggtttagggttttgtgtgattcttgttttaagacgcttcttgagttaaagttatgtattcttttattggattagaaaagttttatgcaatgtaatatattgacattgattggtggcagccatgcatgattaggattgatgcttttatgggatctgatacgtttgttaattttattttgcttaaactcataaaagaacctacatttgttttgttgaattatgtctcgtgtattctgtattacccatatgttgttctgagaaatttgtatatttgattgcacatttggattacccatatgatttggatgtactaaattattctttctctgacgctgcaagtg

SEQ ID NO: 65600 - DNA, 576 bp, Cucumis sativus
  Intron number 4 from transcript Cucsa.388810.6 (locus Cucs a.388810) derived from phytozome v7.0 (chr-ID scaffold0396 7; pos 1223836 to 1224411)
gctcaagtatgttacttttgttcttttctttcactcatcattaaatcgtgagcttccaaaaattaataaacaaataaattgttttgattctattataatcgattcataaataaataaataagaaatgatttctatgcacttattcttagataaatgttttttgattttcaagtgatagataactaaataaagaaaaatgctcttgatgcagttattctttagatagttgtaatgacttgctgtgaaggtatctattttgacgtgcttgcacatgtctttggtatgagtgaagaagaatttcaaatacgtctctcttttatttttttggaggaagctgtttatggaaaatttaaatgcagcttccagccaagccttttttctttctccagaaaagacttcaaagtaaattaaactttgcttttccttaaatcatgcatttggacgtttctggtattaccatgtggatttattacttcaaaatattaggtattctaaacacattcatcctcttaatatttttctagtactaatttctttttcctatgatcctacagggtggtgatttttcacggggaa

SEQ ID NO: 65601 - DNA, 429 bp, Cucumis sativus
  Intron number 1 from transcript Cucsa.381850.1 (locus Cucs a.381850) derived from phytozome v7.0 (chr-ID scaffold0386 6; pos 83355 to 83783)
tggagttccgatctcgacacttgacatctcccaaggttagaccaatcgatgtttcctagaattttttgtttcaatattagatggataagatggggatggagttttcaagaatctaaatctcttttgggttagggtaaggtttcttcttattcaaacaaacaaaatctcaattgggtcagcctttgaattgtctccggttgtttagtttaatgtggctgagggaaatgaaaccaaatccttctcctgcttttctttctttgtttttggtagcttctattatgtgctgttatgtggcaggcatcattcttgccttctttgaattttaattttctgggaatagtatgcttttgtttttgctgtttgattcataacttgaagtttttcaaccatgtgtttcttctgcagattgttacgatcccttggatccta

SEQ ID NO: 65602 - DNA, 656 bp, Cucumis sativus
  Intron number 2 from transcript Cucsa.381850.1 (locus Cucs a.381850) derived from phytozome v7.0 (chr-ID scaffold0386 6; pos 83838 to 84493)
tggtgagtttaatgcttctactttgccaaatggtgaaaatcatttgttgatttagtacgcttgagcttctaatttgagcaattatccaccaaactctgtaacattattagcccattagaagcaacaaatgagaacactaaccctaaactagaccttaaatccttaaccggccaggagtttatctttctttagagaaacaaattcgcccaaagattggtaaaatgtaatctgactgtttttgtgtgctttcaaggtcctttggataggtgagttctcgctggaagtgactagcaattatgtcaactatgtaaaattcaatccatcattctcgcactccatcttagaaatcttcactgcacaaaacaaacaacttgattggattcagtccaaccaatgggacaagttatcatgtctctttcttcattactattcatgtagagatctctacttttgttctttcgtagcattcttctgtagagttattggagctatgaaacccaacagagttataaattacttaaagctgtagagtgtaattgcaattttgattggttttgttcatttgggtttttttggaagataggaaagctatgaactttatggccaacttgtcattctcaggggagagttactgtccaaaactactatcagttccg

SEQ ID NO: 65603 - DNA, 707 bp, Cucumis sativus
  Intron number 3 from transcript Cucsa.381850.1 (locus Cucs a.381850) derived from phytozome v7.0 (chr-ID scaffold0386 6; pos 84889 to 85595)
gcaaaagagaagttcaggttttcagtaagtactttaaatgtcaatgcaatgctacagaaaatgttgtttttagctatggatattgcttgaaagctaaaagaatggcatggtcctgcaaattcacaaatcagagtttatgtagtatgtgggattaacaaagccaaacatacatacaaattatagattcaactcctcatatacacacttgcataccaaatataatttcaagttctagtaagttgaaacatatataaattcaaattcaaattctatgaaacacataccattgaagggatatctcgtgggtagggccgtttctcattgcttgccaagagttttctttattgttgtgaaatcttgggagaggaaccatagtgtttagaggcttgaaaaggggcaacccaagtaatgcctggtatcttactagatttcaagtgatgtgtttgttttgcaattactcattaggtgttattttatagaattggaggctcttcctttagtgatcttttcttttgtgagttatttttggaatgcacttaaaccttgtgttctccctttttttctcaataaagggtcgtttgtctttaaggtttttttttttttttttttaataaaaaagtccatatcttttttcttaagaaaaacttcacccaaaatttaaaggccaaaatttgactactgttatttgcaggaacttggaaatcaac

SEQ ID NO: 65604 - DNA, 692 bp, Cucumis sativus
  Intron number 3 from transcript Cucsa.362560.1 (locus Cucs a.362560) derived from phytozome v7.0 (chr-ID scaffold0361 1; pos 401103 to 401794)
tgaggcaatccaagaagccaaggagttagctcaaggtatttgtctcattttttcttctttgttcgctctgcttttttatatttatttgtatttgatgatccaatttagactctattggaattttgttttaaaactatcaatatgcacggattaatgtacgtaaattacagaaaattggtgcaatgaagtagattgggacaatttttcaataatacaaacagttccaatttgatcctctgcagttaaactatgtcaaggaacagacatttacttgctgaactgaaatggtggaaaaaatgccattgaatgctaatgactccataagacttgccaaaagagcattattagtcatgagtactatgcttttcagtatagtacatagcaaaacatcattcaattatgcataatttaaatcaacggcttggcattccgtgatagatcttggaagtggaaagtaaatagtaagcatattggtttgtatactaggaaaagatgggaaaatgatacgacagaattttatgtcaatgctcaactaatgttgttttcctcttcttactctttttttgctgtccttcatgaatttttgctttcatctacaaattcacagcagtcacagtgtattgcagttccttaagatggaattatctcaatctttaggtgggactttatccttgatcgggcactcagcaggc

SEQ ID NO: 65605 - DNA, 710 bp, Cucumis sativus
  Intron number 3 from transcript Cucsa.321000.2 (locus Cucs a.321000) derived from phytozome v7.0 (chr-ID scaffold0308 0; pos 846979 to 847688)
tagcaaaagaagcccacgttttgctcgtaagttgacacagatagttaccatcaatctctcttggaatttggcgtttcttttgtaattgattgttttttcttttgaatagtttattcattctgtgatctcatttcaaaactttttgatttcttgaagttggaaagctgaattttttataaaggcttgtagttaagggtttaattaataataagtactacgaagtctgtatatctgctaattcctgaggatttgttggcttgtagtggtgctgttgtccttttccttttttggtataggtcacccatgattttttttttttaactgcctgctcattttttatatctgtcgtgaacaaagaattggcatgcttctatttctatgcagaactttttcaaggaacttctcgttttaggcacttcttccaaatttcaaaccaagtggactctattaagaatttagactccttaatgcatgacatggttgtttagttgttaataattagttaagttactttgcatttaacgaacggttcttggctgtcagtattttggtgcactgcttagctgctaaaattggtacttttgaaacttctcagtctatgcttacattattcattctgtttatatttctagaatcttatgtaagcattaactccccccctccatattctgtgatttgaaattcagctgctgttagtgagaggtcatcaa

SEQ ID NO: 65606 - DNA, 938 bp, Cucumis sativus
  Intron number 2 from transcript Cucsa.318510.1 (locus Cucs a.318510) derived from phytozome v7.0 (chr-ID scaffold0307 6; pos 23024 to 23961)
gtcttaattctcataaagatcatagagcaattcaggtaccgctctgttcttcttctcttgttcttttaaattctttgatcggattgttttttttttttttttttttttcgatttcttcaattattggataatatatatattttttcttttttgaattgggaaatatttgattgttttgaatgaagggaatgtggaaattactgtttgttacctactaacagcaacaaaatgccaaatcataactatataaactgtgaagtgaagtctatctctctctttttttattttgctattttttttattctcttcttttatttcccttctaatgttaaagactaaagtgcaagtttggtgtggtttgttttgttatattttataaagttacttttcattcttaatgtaaaaagtaaaaatgttaaaatataaaatgtaaaaaaattttaattaatatactcagttaatattactatttgaaagtgaatgatactgattatttctttcttctttttaaaaagtagaaggctttcaatattgatagataactaaaagatttttttaaaaagattgaaattatagttacatttttatacataatttttactttatatcacataaatccactagatatctttattacataaatatttattgtttagttgagacatgcgggtagcgtatttagcaaccataaaattcaattacatatcaaatcgattaatattttgtgaatgatattttatggaatactttttttgagtttatttagtacaaaatatagttactgtatcctaatacaataactatattgtatttatgtatgaaaaaactaatacaatatgttattgtatttatgtatgaaaaaagaaatgaaaggatgaataattattatatatgtgtttgttaatgttattatttatagataaggagatcgtcatacc

SEQ ID NO: 65607 - DNA, 567 bp, Cucumis sativus
  Intron number 2 from transcript Cucsa.374260.1 (locus Cucs a.374260) derived from phytozome v7.0 (chr-ID scaffold0373 3; pos 152203 to 152769)
ttcttgctagaactttccagattgggactgataaggtggcagagagattaaatcaaggttttctccgtgctaagaagataagtgagaccaccgtttatatgtattagcctattataggtaaatacgtgtaacgaaaaaacaacaaaaaaacgaagagaacaaaatgggaaacaaaaaagcaaatatttcaattgagtttgatatgcatcgaagtggaaacatttgcgagtttcgaagaccaattctttccaacaaacttgaaaagagcatatgaagacttggaatcgcaggaatattaaattctcttgtatttcactcaaatcagtcaaataaaaagtataactgcaagctaattagtacaatattttggtttaatcaaagtgccatattgttttgtgtttgctctagttttgggactttttatgtagttttgagattccaaatatacttcaacattttaagtggctttggaagccaaattgatgctaattcactttagaggtaggtggataaaatgatacctttacactcaaaatttcaattaaaggtggaagtttaattccagat

SEQ ID NO: 65608 - DNA, 628 bp, Cucumis sativus
  Intron number 2 from transcript Cucsa.366900.3 (locus Cucs a.366900) derived from phytozome v7.0 (chr-ID scaffold0362 5; pos 382810 to 383437)
caagcaaatttttttgagcctgcaggtgaggtgttattgaataattttatcacaaatctattattaggaaataagttttgttgatgtgttgaactaatagtggttctttgttggagctttttccctttgaaatataattacctctatgtagttttttttttttttttaacaatgcaagcttagtttttcatattgaaaagagttggccttttctctttattatttttccgtgtattattccattgaaaggtcggctaaagttttgacggtgctttatgcatttttctaaaacttttgaagtttttaggtttgaatattattatcccttctttgttgtttccttacttcttccgtttgggaaatttaaatggcttatggttcgttcatttggcctacacacatcaagattgattgttttgattgtgatgatcatttattttttgcattgtcttcattcttctttgagcagaaagcagaaaaataaatataacaagggaatattaaggcaaccaaatgaagacaaatatcattctgtttgtgtttttgttgtactaattgttttaattttcttatatttatttatgttttggcagtaattgaatcaatcgatatacctcgcatcctttct

SEQ ID NO: 65609 - DNA, 898 bp, Cucumis sativus
  Intron number 2 from transcript Cucsa.356930.1 (locus Cucs a.356930) derived from phytozome v7.0 (chr-ID scaffold0357 7; pos 1842117 to 1843014)
cgcactagggctcaacagcttgaagatctcagacagtgagtatttgtattataactaatagcttttcctctcgtctgagacaaacctaatttaacgaattgaaaattaaacttttatgctttacctagttgtcttgcaccgtccacttttgattgttaatctcgaatttgtggttgtatacaagtcatttgtgttgactatctagaattgaacctgaagtatagataagaatttttcttaggccatcctaagattgctagtgatagttatttacttaggttcttttgcatggtttataacagcattggaagctctgcactgtcttctcggaaattgaatggaaaagagatagaattgggcatcacatcactttgtaatattcatgaaaaaggtgtagttttcatgataacgtaaggccattttcgttttcaattgaactggccttgcttgtatgcactgtatagaactccgtcaaagcttgttgattgatgtttgtggatttcattggtcgaattacttatttattgatctagtgtaacgatggtctattgtaacttggatttctttgtttttacatgttcattgtttatatcattatggaatatgaatggaaattttaaaataatttctatggtataaattaaaatttccttgaatgttctgcctagaatgtcatccaataatactccttgaatgattccttatgatttatgtcggccaaattacttattcattgatctattgtaactttggtatctgtgttgctgctgtttctttgttcatttaaacttgttgctctttctgcttctcgtgaatcatgtatattgtgcgttatatgaatacttcatccattattgacatagtaaaattcatgatagattcaagggtatatcacatt

SEQ ID NO: 65610 - DNA, 660 bp, Cucumis sativus
  Intron number 1 from transcript Cucsa.365850.2 (locus Cucs a.365850) derived from phytozome v7.0 (chr-ID scaffold0361 1; pos 3737990 to 3738649 reverse strand)
ccctcccctgcaatttgttagttcttaagtctttcttaaattttctttttctttttttctaatttttttgtcttcttggaatttattttatttttgttctttacatttgttttaaaattttcattttcatccattaagcttctttattttaaatgcttttacacgtctaaaacagatgactttatagattaattttataaaagctacggatgattttagaaaataaactaaaaggaatatagcagatgattttataatatttattttttaaagctcaaagttaaaatgggtaacatttatataaattagataaaatagaaattatacagtccaataaatttgagttcaactttccactttaatcttatctctaaactaaattataaacatgaccttaagtcaaaaggtcaaaatacatatgattaatcaaagattaggggttgctatcaaccttcctaaaaggaattaaaacatttaaaatgaaaatgaccactttcaaatttgatcatatattatttttatcaaccaaatttgactatcttttttcttgtcaaccaaaggtgaattttgtaattcttgtgtgcagttctaagagaagaaggaggttcaagttcaagtaacaccatctccgtcgtgacggcggcaacaacggcacctaca

SEQ ID NO: 65611 - DNA, 858 bp, Cucumis sativus
  Intron number 1 from transcript Cucsa.360600.1 (locus Cucs a.360600) derived from phytozome v7.0 (chr-ID scaffold0358 8; pos 1222162 to 1223019 reverse strand)
agtgtcaggaatcaaaggaattgacattggctcaggttttgtgttctttcttgtatcttatgaatcatattttctttttgttttggtagtaattttcgtttacaatatttgcttaacatcctgtaaacttcatttctgttattgtctgtgtttcaattagagagtttctgcagcagttcttctacttcaccttggctctgccattagcaactcattgtctaagatttttgtacgggtgccccaattctagtcattagcacactttaacatcgagttgccagtcaagctctcgggtgccctcccacctgcatattgtagtagccctatcgccatttttagttttcatcgattttttaggagtaggtcattttacactaacgcagatagtattaggtcatccatacaaaaatgtcccataccttctagtgcaatccttcctatatatgtgtaaaataacgcccttaaattatcttcctcgacaatagctcgaatctcctttgaaatatatgttctcatatattgaagacagattgtgaggtaagtaatgtgttgcaaggttgcctaggaacagacatacagtaatattgctaatatttcctggacttcgttgaataacaactctatctagaatgattgtagttaatcgagtttccatttgatatcagcttaattgatacgatgtgatgttttggttggactgcggtctgtgagaactcctgtttttagctgatgactatggtgtttttagaatttagacttatagagggttgagttctaaacactgaagcactgcagtttatttctgttttccttttaaatgcaggtccgtcaattcgccaactgcttaattaacgctag

SEQ ID NO: 65612 - DNA, 696 bp, Cucumis sativus
  Intron number 4 from transcript Cucsa.388630.2 (locus Cucs a.388630) derived from phytozome v7.0 (chr-ID scaffold0396 7; pos 1028517 to 1029212 reverse strand)
gttggcaaacacaattttcagctggcattaaggtatggcagcgtttcttttgctctccctcctctctctctctctctctcacacacacacacacacacaaatgcatacacccagaaaactaggaaacaattatttcatttgattggccacactttagtgactaagcgtgtatttctccattggattgtaatttacaagtttgggtgtagtgactgttgtgctactctggcaccttggatttctttttagtgagaacctttgttccttaaggataggcatgtattattacgtatactatatgattgcaataacatttgtaggtctttcaaatgaagttaacaattagtttttttcattatctatttgtcaatctaaattagcatgctttcttactcgtaacatctggtttatttcatcacccataatgtctgatgtctgggtacgacattctaaaatgctttacttttgacctgatcaaactttgtagatttattttgcttaacttggtcaaggatcaaacaatcttctttgattaaactagggtggcatgtgctgttttgatgaaaagtcagaataaatccagcttattcaagttttctttctgttaaactcttttttaaatatatttttcaaactgattacttcattgttatttatatgctctgcagacaattgttgtagtagcagtcgttccgc

SEQ ID NO: 65613 - DNA, 577 bp, Cucumis sativus
  Intron number 1 from transcript Cucsa.388630.2 (locus Cucs a.388630) derived from phytozome v7.0 (chr-ID scaffold0396 7; pos 1029902 to 1030478 reverse strand)
gctgtcttttggaaacttaaacatcgggctcgaatgtaagtcgttcttctttccactttattgtttattttgttgtgaatgttgggcatttgaatgatccttttgcgctttctggtttgcaaagaagattttaggatgaatagaaagaaaatattttcttttgttaattctgattctgggatggttaattcaaatcttcacatcatgatacgttgaactacaaaaaaggggaaatttgacgaccattcaattcaaggatgaatttactaggatttctctgtaaaagtatgcttttcattttgtggtttaattacattggatgatcccttcttttcctgtcctttcctttctcgatcagtagaagtttatataatataagctgcaatgattgtaatttttgtatggctatttctcgtgtttgttagtcagtagatgatacctatttgctgtccagcaatgcccttcccctgttttgatttttctattggtatgtaccagtcttgggcttgtaattgatataaatgtttgatctgttaacttctaattaatgtcgaattcagggtgctgacttgggagg

SEQ ID NO: 65614 - DNA, 468 bp, Cucumis sativus
  Intron number 3 from transcript Cucsa.382010.1 (locus Cucs a.382010) derived from phytozome v7.0 (chr-ID scaffold0386 6; pos 151170 to 151637)
atcaatcactcctcgacataagttcaatttgagaggtttgtttttcatgctggactgcattccaagtattttgtgtatagtatatgaagtagtttttattgtggtaagtctacaaatttgtcaaatttgtcctctgaattcttctatatgataatttgtgtttcttttccccatcaagacagcctttggtgtttttgtgtttcatcaaagcaccatttatttaagggtgaagttgaaaagaaaacaatttatttaaggactaattgcagatgaatcacttacatttttatgctatcaaaattgattacgcattcatgtcttgattttatggagtttggggcaatggaacttatattatttttctcgtttgcagataggacatcattcaagcctcgcagcttccaagatgaaacaatcaagtaagttgtgctaaattacagattgtggttaaattttggtagtgaagat

SEQ ID NO: 65615 - DNA, 844 bp, Cucumis sativus
  Intron number 3 from transcript Cucsa.322000.1 (locus Cucs a.322000) derived from phytozome v7.0 (chr-ID scaffold0308 0; pos 1814801 to 1815644)
acgcgcaaggggcagagactgctgttcttttgtccgtaagtttgctctctggacaatgtctctacttcatattaaatataagttttatacccgttggtatttaaggtttaattctcaaagattccattattagtgaagctttgtgtcaaatttgaaacatggtttgcaatctggttgttcaatattagaaatgatagtgttcttggctgttgttagttggtcaaagggcataacaaagccttgtccttaagggaggagctgatgctttaacctcattactaggaagagatcattaagggccataatatcccttcttcaattttctttagttttaccttacatccatatcttcttcaattttctttagttttgcctttcatcatttccaccttcataaaactgcactgatttcaactgatgaatgaattatcagaatgattgtgccagccctaatatctctattaggtgagtattgttgccattttacaatcaaataatgtatgatcgagtgggcattttgcccctcaatgagttaactgatgtaagggatatggccttttgttcaaacagtaggaggtcaaattttggtttgatttttcatctattattggagggtttaagatatattagctggaagtacattctgcatcaatcagattgccccttttctctttccttgagatgtattttatctgatcatttttttcgtacacatataaacagttgtatatgtaacacattaaatatcaagaacgagcaatacaagtcacttgagctagttagattaatgaaactcaacttcttatcagggagcaactatagtggatctttctgtcaacattac

SEQ ID NO: 65616 - DNA, 674 bp, Cucumis sativus
  Intron number 2 from transcript Cucsa.316870.1 (locus Cucs a.316870) derived from phytozome v7.0 (chr-ID scaffold0305 0; pos 101994 to 102667)
gatcaacaatcctatgtattgacttttagttgcaaattttgaaggaattgtatatcgtatatgttgcgaactatgtacataaatacatttatataatggaatgaataccattgttattttatggttttgaaatttttattttattctttggaaaaaaattcaagtgtgcagtatgtacaatcccataagcatcatttgagatgtggttatcttgcatttttaggggctactgctatggatcaacatcatttgggtttggttagagaaagaaatgaaaccaaccataattaattttggtgttgaagtgagagagatataattaaaaatctggtatcaaaccaacttttttggctttggctgaagaatcattttgtcagcttgttgtgtgattaagtggtaggaagtaggcacattgctgatcttttttggatcattttgccatggttccttgcactttacattttttttattcatgatcatcttttttagagacaaaaacaatagtctttttttccattttatattatgaaagttttttgctgattttttttccttttacatgttcagaaggaaacacaaccatgtttgcttttttccatgttgattttgaaattatgttagactgtcttgatgtcatagggaaaaaaaagaaaaagaaaaagaaaagaaaactc

SEQ ID NO: 65617 - DNA, 567 bp, Cucumis sativus
  Intron number 1 from transcript Cucsa.328150.2 (locus Cucs a.328150) derived from phytozome v7.0 (chr-ID scaffold0315 9; pos 534430 to 534996)
cttctccatctctccattctgcctccgattttcaggtctctctgactttattttcttttctactctataattgtcgagcaccgtgttcgtgcaatggggatgatgctacccttctttctaattttatgtttttagttccttcgtcttctcaattccttactttttggcgccttggaacgaaagggttatcagaaaaatggcgtatttatctatttaaacttcggattttgctgtttgtaacaaatcagctacatatcaaccctttaggttcatgggctttatagattattttgctgcataattaagccaatgaaacccccctttgagatggccctcaattaagattttgtatattcagttgtggcctgtggggaacttgggctactgctttgttgtgttccatgttgtctttgagtttgtagtgagatacaagtctgttggatggtttatattttgtgttttaacttcgtccttgtgattttttgatttttttttttttgggaaaaggttgtccttttgaattttgattgtaagtcattcccattttttttatttatggcagttacc

SEQ ID NO: 65618 - DNA, 373 bp, Cucumis sativus
  Intron number 1 from transcript Cucsa.395040.1 (locus Cucs a.395040) derived from phytozome v7.0 (chr-ID scaffold0410 0; pos 723035 to 723407)
gccccttctcccgtcaccattcagtcaaatcacgagtgagttcttcccgttttcttgttgtttgttttttcatcctttgtgcttgattggattttctcttttcgatgtatttcattgttttgattggttcttcctggggggttttgggtagtttgtaatttcaattcgcaaaatttttctgcaaatgggtttttgtttttatcgaaatatcttaattaggggttcaaaaggttttgattgggtgggatttgtattggttgcgggagtttttcgtgttgcttttctttcctgtacgagtttgttgtgatgaataattctttacgattatggtgatcgatttctgatgggggatttgtatctctttgatagattg

SEQ ID NO: 65619 - DNA, 655 bp, Cucumis sativus
  Intron number 2 from transcript Cucsa.395040.1 (locus Cucs a.395040) derived from phytozome v7.0 (chr-ID scaffold0410 0; pos 723879 to 724533)
ttgcacccttagaacggattaagatactcttgcaggtgattttcctgttggttactttagacactttatttaattatactgctaattttcttttatatgcatgctcctttgaattcaaagacacagttatcgaacctattttctttcatctgtatggatgaaaatcttgcaagactctgggatgggtatgaagaatgaggaaccaattcttgaactacgcctattgaccacttttttcaacctctagagggctttgcatatctcaaggtcatttcagacaaaaagggttttaagttattaagttttcaacttgaagctaaaatcgaatctttgtaggctcataatcgggccatacttgggtagtgatgaatttgtttttccaagaagtacagttcgtttttttaagttattgttcgcactttgacataagtgagcctatgatccaataccaaatggttttaggataccaaccccagtgtttaggttatgtggctaacatgaaaatgatcaagtcttgataggttttttaaatttgatcagtagacaacatgttcgagtttcaacctagataaaatatttttggctttctgttctgacctctgtgttgtgaacattgacagactagaactgaaggatttcattctcttggtgtctt

SEQ ID NO: 65620 - DNA, 432 bp, Cucumis sativus
  Intron number 1 from transcript Cucsa.340230.3 (locus Cucs a.340230) derived from phytozome v7.0 (chr-ID scaffold0335 6; pos 2720324 to 2720755 reverse strand)
gcataacgctcgattttccatcgtccaaatttcaggtgatccttcgccccttcttaatctatctattttttcttttccttgcaatgtttgaatcaaatatatagcggtttattttttttttaacttttgaattccgcaattcttgtgaaaaacctactcttctttggggaattcattcaacaaacatgcttgattcgtcaaatccccattgtctaataagttcttccatgctatggtttacatgttaaagtattttatacaaaacccattttgttgtttatggccaatcttgaataggaattgaagtagagtatgtctggaggtactgttgtggatgtagttattgtttaattgaagcaaagagagaaagttaatggggtttcacttgtgtttgcagaaacattgtttattaggcgtttgtgacatctgttc

SEQ ID NO: 65621 - DNA, 860 bp, Cucumis sativus
  Intron number 1 from transcript Cucsa.325880.2 (locus Cucs a.325880) derived from phytozome v7.0 (chr-ID scaffold0313 2; pos 177901 to 178760)
aattgttgcttgatacatttcacgtcgtgtcgaaggtattatgttttcaaattccattttgatgagatgtggcattcatgactagggcagagtgcattgtagttgttttttcgaattcaaaaatatcgataagttcacagagagtttcatggactggaatgtagagtgtcgactaccactgcacttcctaactcacaaatgtcggaaacaactttgtttaaactagtagtattaattgtgactcgtgtatacacaaataggtcgtgtgtgaattttgcagaaggtaaagtgtgccagaattgataagttttgatctcgcataggtgtttagaatattattctcatattcttctggaattgatatgtataggagcttttcatgaacttttttgtgcattttgatgccatcattgaatgcgttgtttaaacttcagaccttctaggattggcaccttctggagaatagaatgagaagagaaatgtttagcattttaaaattgtcttgttccattgttgaaagagaacttcaccctagagtaaagattgcataaggaaagtcaaatttcacaggaagtttatcaagcctctctctctctcttattgatatgcttatataatacattcaagttaggtaggaagattgtgccgtaaaatttagtttattgttatactcatcttggccattgttaagaatcaaggttattggtttgtgcctttataaagctttgattaatattagtcgatcttgttttcctagatctttgtgcaagtagcttcatacttattttctatgtttcatactcggctggatcttaatggatgcaggttgaaaaactaatcaaggagcttccaagtgcacc

SEQ ID NO: 65622 - DNA, 653 bp, Cucumis sativus
  Intron number 1 from transcript Cucsa.340740.1 (locus Cucs a.340740) derived from phytozome v7.0 (chr-ID scaffold0335 6; pos 3118459 to 3119111 reverse strand)
gcttgcagtatgtagttcatctaggctgggcccatctaggccttgggcttgtttttgcaattccatatcttttatccatgaccttaatcccatactcttatattgggaattctagattggagtttccatgacatgacacaatcaagaaatcaaattagcacttgatggtaatagttcaaacattaaaaatagaaagtaataaaatatcttaaatccaaaagagagaagaaaaaaaacgtaaattagattgagggcatgcagtagtagtagggttaagagtaaatgaaataatggaaggtgcatattgaagtttaaagttgaaagaggtttttaaaatggtattaaatttagatggttggtccatgagcggacggacatgaggaagcaaagagaattggatggattcaaaatgtgttgttccgaaatagagtagacaaatccaagcttagccaatttattatttaacgtggatcctaaaatttggcagcaatgttctattgtaatttaagagggtagtagttagaattatagagattaaatttgttgttggtagtggtggtgaaatagttaaaagagaatatatcataaaattaagaagaaataagaagatgggtgtagcggagtttgcagtggctccgcgtccagccgccacc

SEQ ID NO: 65623 - DNA, 598 bp, Cucumis sativus
  Intron number 1 from transcript Cucsa.370600.1 (locus Cucs a.370600) derived from phytozome v7.0 (chr-ID scaffold0367 8; pos 292636 to 293233)
cttatcatcaaactccatagcctccttggaaacaggtttgctttaattacttacctatttttctttacaatacaccatattgttcgtcttttaaattttgaaccttttgatttgcatttcaatttcaaagttattgcctgacgtcttttgttttctggttttttctgaaaccataaaattgagtacactaattgtttaaatgtaactattttttatttctaattttttttaactttttaaagtctaaacagtataaatattgctttagaagtaagatgttaaaattgaatagaaaaaaaagtaagagagaggatgttatatacttagttttagatgtagtagtagtagatgatttcggaagtaaaaattgatgaattagtagtgcttgattttaatttatgttctgaaaaaacgtagggggaaataataaaaaatttaggttgtttttatatttcaatttctaagaactttgatattatgaaaacaaaaacaaagaaaaagaaactattcatttttaagattcaagagtgttcaaaatctgcagaagcatttattttcttcaattgattaatgggcactttttatttcatcgacacag

SEQ ID NO: 65624 - DNA, 878 bp, Cucumis sativus
  Intron number 3 from transcript Cucsa.321200.4 (locus Cucs a.321200) derived from phytozome v7.0 (chr-ID scaffold0308 0; pos 1034073 to 1034950 reverse strand)
ttgcattacaagttacaagctaggcgaaaagagaggtaagatgttcattttctgactggaggaaaggtttaactgtggctaatggcaaggtttttttaagttgtttaattcatgaatattctctagcttttgttcactttaggaaacctcggaatttgataacagagatatctatcttagcttgagtctcgttaatatacagctaatgtatagtatattaatgatagacttcgtcatattttgtacttaattactctggaggaagtatatgaaatgacttagttactgtaagacattcctcttggcgttcttttacaaaaggattcaaggagttttctattcaagatattatttgtagttgcaagagtcttatggatcctttttgatcctttattggtctcttatcttttccttatgtttcttctgtttgttgttactgtttggatacgagctgttcttttctttcacgtgttttctttgttaactttgtgacttggaccattggtctcttttcgttcttttaacaaaattgtggtatcctttaaaagcaacttcctatttcagatttttttcctgatgtattaaacttatttagcagaaaaatttctaaaagcatttttatattataaaaacagcaattttgttttgtggtattgttgaatttattgttcatatatgatctgctgagaacaaaatgaaataatcctaaaccctaaaacctaaattgaatgagaatagaatgaaatcgttctcttgtgcctcatcctttctggtattactaatcaacgtggtttcattaacatcccatgattgtatgatagataatattggccttatgtacagggtgagcactggagttgtaattttcaactataggg

SEQ ID NO: 65625 - DNA, 293 bp, Cucumis sativus
  Intron number 1 from transcript Cucsa.360150.1 (locus Cucs a.360150) derived from phytozome v7.0 (chr-ID scaffold0358 8; pos 898622 to 898914)
taatatctgcttatctgtttttgcttcttctgttggtaagctagctttctcatcgattttttttttctcgtattccaataggtaattacgaaattttctagggttttttttttcttctttttttacgttgtttagtgaatgttttgtgatccttttgtttgtgaaacgctgtttaatttcagattctgtttgcataatcgtttataataatagggatttagaaatttgtagggttttgattttgatgttatttcgagatgttgatattcataatttatgtttgcagaatcgcc

SEQ ID NO: 65626 - DNA, 861 bp, Cucumis sativus
  Intron number 2 from transcript Cucsa.385280.3 (locus Cucs a.385280) derived from phytozome v7.0 (chr-ID scaffold0390 4; pos 637243 to 638103 reverse strand)
gcgctccaaggataggatttcatacttttgtattatttagtttgctctttccattctgcagctattcatttgacttactattgatctaatgctcaagtttttctcgattcagcttggaacacctttctctaaaattaggaaaattttcataaaatacaggtgttgtatttgcatttaaatttctgttttcttctttctttcacatctgttcatttcgatttaatcttattttgcaaaccatacaactatagcaggaaatagctcattaaaagaaccattgatttgttcattatttcttgattgtattcaactatcgtctatttctgcactgaactcatcctgatgcctattaagacattgtatatttacggaactaatgacttgattcacccattttccaggccacacttctatttcttaaaaatgtttcaaataatcttatgttctgtaaatcacaaatcaattccatttatatgttctttttacttttgttggagtttgtacatgtaaaagtagagtcatgtataattaaattcaaattaacaataagattttaggtggtcatggattaaaaattacacaactccctaaacatatgaaacaaatgccaaaacacaaggtaagatttgcataattagcaaacttatttattatttatttatttgagtacaagggggtggaggaaatttaaagcttcgtcaaagttctgtgttctgcatttatcttgattttcaattgcagactatttggaagtctagatcttagttactctttgagataaggaagtcagttgaactttagccttacataaaatatggttttgcaggggacgtgggaagtgtttactttggtccaaatcat

SEQ ID NO: 65627 - DNA, 999 bp, Cucumis sativus
  Intron number 1 from transcript Cucsa.349720.5 (locus Cucs a.349720) derived from phytozome v7.0 (chr-ID scaffold0348 7; pos 945889 to 946887)
ctttataatacccactttgccaaatctgttgtaatgtgagtttctatcgtaatggagttcttaatcctcgattctgagcgttttctgttatatttgatgcctttgagctgtctttgaatctaaaatttgtaagggtttgtaatgattttttttttatttttttatgttagatatttctaaattttgagcttcgtggagaagttttattgagattgggtggtatttttgagttccagaatcttggtgttagtaagactgctagatccttgctacctttttcttttattcttattcactattgaactatttgtttggctttcttgcattggggtttatcttaactttgtgaagaagttgtaatttggattgttctttgatagtataaaatgtgaatgatttgagcttgatttggatctggtaactctgcttattgtttttaaaatattttgttgaccttttgttgtactggaaaacaattctttaagctgaaatcaagtcattttcttactcgaaatccgtgcctttggtgattaattctttattagggaaaaagagtggaaaagtggagtttagttccttattttaattgtcattacagaatctaaaagtgccaggatggaagttctgtgcagaacaccctgggcctttttattgttattttattcttttggaaaaattttcaagtattaggtgagcacatgctttgttatttggtcgttttctctctcttaatttttcattatgaagagaaaccatggaaattaatcaaacattgacaagatgataaaaaaaaacaatatgcaatgtttccttactcgaatggacacttctataacatttgacgaataacataatttaagtagataaaggaaataccattagtgttttgattatagttcgaaattatttgctttcatttatgttgtttcttactctaaattatatgctcatcaaccaatttcagggggatcaaaataaatcttctattatcaggttgaa

SEQ ID NO: 65628 - DNA, 728 bp, Cucumis sativus
  Intron number 4 from transcript Cucsa.349720.5 (locus Cucs a.349720) derived from phytozome v7.0 (chr-ID scaffold0348 7; pos 947877 to 948604)
tcgtgcaagaattgatccaggatttacaactctgggtatacatggaacttacttgaatagtttactattatcatttcgtttttctcaattgaatataacaccttgttctttatcaaatttgcacacatgctcctaatgtatgtacctggtttcaattttgttcatatcgtcttacaaatttcaatttaatatttaactttttattgatttttaaaagcatcccttattaggaaattttgttaaaattgtaacatctattaaaagatttatgactagaattgaaattttaaagacgtctgatgcaaaattgtaacctactatatttaattagcgctaaaattgcccttatctatgacctccatttcaattttgcttgtgagaatttaaagtttctataggccttattgtagttgggtggagcctttttctttagttaggcttccttttgttagctcggttttctcgtaggcgctaaatttcttgttttctcattcattttttctcaataaaagttcggttattcatttaaaagaaaagtttagaagtttgaattgtgataaccaagattgagtgtaatgtaacaaaaagaaggaaaaaaaaaagaaattttaaatgatcatgtacgatgtaggttttagaagattcttatttgaagtttaattatctgtttgtataaatgctgcatgattttcattaaagtatataattttatatcctcttaattcagt

SEQ ID NO: 65629 - DNA, 275 bp, Cucumis sativus
  Intron number 1 from transcript Cucsa.362800.1 (locus Cucs a.362800) derived from phytozome v7.0 (chr-ID scaffold0361 1; pos 531266 to 531540)
gctttctggggtaaactcctccatcccttctattatctgcaccattcctttcttcttttgtttgtttatttatttaatttaatctttcaccttctgctctatcttttttttattatggagtttggtgattggctgacatcttgagtgtcggggtgtatttgtagggagcttttgattttatttgattttacttcctgagttttgtttgagttttctcatttctgtttgttagtttcccaggaactgaagtgaagcctgggaagccttttactcaa

SEQ ID NO: 65630 - DNA, 297 bp, Cucumis sativus
  Intron number 1 from transcript Cucsa.379790.1 (locus Cucs a.379790) derived from phytozome v7.0 (chr-ID scaffold0383 7; pos 208188 to 208484)
tgaaaacaccttctttaactcaatctcgtgatcaggtcgttaaacaacaaattttgtctttataatttggaaaaaattacataagtaatttcatttacgaacatcttatcgaaccatattacatttgtccttactttatcaaattatagaaactaaattgcatggtttttgaataatgggacaaaatttgcaattaaaatctgtttttttttttctcattactaatatgtttgtggttgatcttctttttttgagttcataggtggtggttttgaaggtttcattgaactgcagagg

SEQ ID NO: 65631 - DNA, 462 bp, Cucumis sativus
  Intron number 2 from transcript Cucsa.379790.1 (locus Cucs a.379790) derived from phytozome v7.0 (chr-ID scaffold0383 7; pos 208522 to 208983)
gaaggtaaagcttctccgcatttcaaacctaaaaagttactaaattttttggcaaatatcaatttagggattatatcaacttttgcatctatgcctgtgaagtttattattcgagtaaaatcaatttaaacctttttatatatattacgattacagaataaaatcatacatacataaaatttctttataatagtataaatacatgaagatggaagatgagaagtctaaattgataaatttatgaaagtttaagagtttaattaattgatataatcaaaagtttcatacaatttttttaacgtggaaagagtgtaaatcgatataatccttaaaatttaagggtatgaattgatattttttattattatttgaaagaagatgggttagaagtatagatttatgaaaagggtgttgatgaatcatgcaggagtgacctcatatagtgtggatttcacaacaaaa

SEQ ID NO: 65632 - DNA, 869 bp, Cucumis sativus
  Intron number 1 from transcript Cucsa.355750.1 (locus Cucs a.355750) derived from phytozome v7.0 (chr-ID scaffold0357 7; pos 278639 to 279507 reverse strand)
atttaggtaaatccgccatttcaggtttcttgttcgctccattttggttcttgctgcttgttcattcatttcaagccttttctgatgaaatggatattttttttcacttctttttctttctgatattggtcccatggaaatgtggactgcttatttctgaagttgggtctgtgcttgatgctctttttctgtctgtttctgaagtcccactgtagttgcttactggaatttggttgattacatccgattgatgacagtttggttcttggttttgaaaattatgcttcatttcttacttctttactactgtttcatatttcctaactaaacttctgaatttgagtcaaattacagatactcagaaacaagtttttgaaagttgtccttcaaaatttggcttggttttttaaaacacaccttaaaactacatagcactatagacaaatcaatagatgggtttaatgttcataagcttaattttcaaataccaaaaactaaacaccaaacggttatcaaaaaagagctaaggaatctagttttcttgatgaaatgggtttttttaccgtttctgacctgtctcacaaatctttggttccaggctactgggaatcatactggtctgtttgctgttagtacattgtttagggcttgaaaattaagggaaactctccttgggcttcaagtttagcatttatatctttcactttttttgttttcttctaaagtattcttggattaattgtttgcgaatcttttttttctgggcataaattcaacttgtttgttaagagattgactctgtctattccttgaagatttatgacttcatttgtgttggatttttttttgttcttatttctaggaacttc

SEQ ID NO: 65633 - DNA, 935 bp, Cucumis sativus
  Intron number 1 from transcript Cucsa.340250.1 (locus Cucs a.340250) derived from phytozome v7.0 (chr-ID scaffold0335 6; pos 2734732 to 2735666)
tctccatttcaggggagcttcatttctctctcgaggtttgttctccactttccttttcttcttcttatggccgagatctgattccgtggaacattctttctttttttagatctcattcctttgctacgggttttgttttattagtcttttcatgtaccagatctgtctactgctgccttttcagtttttacttttgctgattggaatttgtaattttttttttactttactcatcggatctttcgtttatgcatgcttgttggtttctctatcttcttgctgtctttgcaattctattgatgctctgtttctgctttatttttgtgacaattcgttttttcgttgatttcaacttgtgaattaactaatgctctgcattggactgcactctgggttgatccatgcattaggggttaggggatgtaccaatttactcgcggtttggaatttgagaaatgattttaaatcctgtgatttggaatttgagaaatgattttgaattaattacttagtttggagcgcgtttgaaatgaatatatttaaaactattagtttggatgtgaccatgtatttaaaattattagttcggatgtgactgtaaaagattagggatttactaatgtaggttttcatctatgatgtgttaattgaaaattagaatatgacaaggttaaaatggtaatttacgtcacatactctgaaatcagactctattagtcggggaagtttttaaaataaaaacagagtttttgaaatcactctctttcttaccataacaaataacagaattcatttgaaatccattaggacttgaaatacctcgcgaggttccatagttgaaatagatggagaatggaataataatggtgtaaaatgtataatggacgttgtttgttaattaaatacttttcgtttgtgatttgttgagcagaaca

SEQ ID NO: 65634 - DNA, 510 bp, Cucumis sativus
  Intron number 1 from transcript Cucsa.311000.1 (locus Cucs a.311000) derived from phytozome v7.0 (chr-ID scaffold0299 5; pos 675324 to 675833)
actctgttgatcttgtaagtcttttccattcctattccgattgaccgttattgtttaattgtatggttttgcatggcgttttagaattgctaaaaacttttttttaattgttctatcgtttagtttgtgtgctgaatttaatgtatgaaccgatcaatcaatctctgaggctgttttgcatatgtgacggattgatggattgaaagaaaatgaataatgtgaggatttgtgtttgttaaatgtgatggagatttgaagtctgtgacgtactttaattgttttgttgaaggaattatggtgattgataggtgataactgtgagaagagtttagagtttttttttctggttctattattattttatttttgcaaaacgaagccctttttatagcttgatgtttgagttgattgctaacagtttgttgatatttgtatcttcttcaattttattatttggatattgtatgtattaattatgatttttccttttgtaggaacatattccaattg

SEQ ID NO: 65635 - DNA, 828 bp, Cucumis sativus
  Intron number 1 from transcript Cucsa.350890.1 (locus Cucs a.350890) derived from phytozome v7.0 (chr-ID scaffold0350 4; pos 309383 to 310210 reverse strand)
ccctcctgaccagcgtcaatctgttcagcacgaaggtctctttttcgttttctatttcttgattctcgattagggttatgtttctacccttttggttgtatctctcgtagtggctttctccttttctgactgttttttgttgtttgattgctgttattgcagtttttgcttttaaatttgagtctccttttcgaaaatcaatctcataatcggaattctgtgagttttgtatgctgatcagatcataggaaagattgatagtctgtgatagtcgtgaggaatatatgattgtagattaatcgagaacgaacgggatttatgctaaccaatgaaaatcccctttccgcatttggtctagcgggttcccaatattgtatgctgttaatgttgttgtgcagttgattggatgtggttgttgcaatctgactttgtacaggggattcaatttggagtggtcatgtatgtgcaccggaattggttgaagttgaaattgaaattgaaattgaaattctagtgtaaggtttacgtagaagattcagaatttcttacccttcttttagctttcttcttgtattgtttcaatgggtgagatcaagcattttgtgtttttccccctttagatatagttgtttgaggtcggctattttactgttctgtctttctttcatgttcttttctacatttaagtcactgttaaagatcgtttgcaatgttggtttaccacttaacatctccccgcctcgagttatgaataatgttctatgttattaaattttctatgaaccttttcaaattttgtagagtacaaggtgcatagttacaatagaa

SEQ ID NO: 65636 - DNA, 490 bp, Cucumis sativus
  Intron number 1 from transcript Cucsa.372030.1 (locus Cucs a.372030) derived from phytozome v7.0 (chr-ID scaffold0370 3; pos 65658 to 66147 reverse strand)
cttggtctgaagcttttcacattcccctcacaaaggtctctgaagctgcctgctatggcgacttcatttacttaaggtatcaattctatctatcaacattcatccagctatatacttctcttaagcattatcattattacattgttagtttcaatacttaagaacactgtgcctatatcaaactatatggccttttagacttgaaaaagttttagattaatcagactatgcttttacttgttaataatatcacatttacagaagttacctaatcatcatatcccattcatattttagtttaaagttttaggaacatgattgaatgattttataaagttcgatttaaaatctaattgttcaaagacatctagcgaacttgaagagtctagctcttgtagacattttcacaaacagttagagcgcaaaaggtaacgacacttcattcttccgcagatatactaaattagcaaacaataagaaaagcccatta

SEQ ID NO: 65637 - DNA, 958 bp, Cucumis sativus
  Intron number 2 from transcript Cucsa.312460.2 (locus Cucs a.312460) derived from phytozome v7.0 (chr-ID scaffold0299 5; pos 1854524 to 1855481 reverse strand)
acaaaaggttagtcagctttatcttcttttatatcttcttttctaatcattcatatcaaactctactttttaagcgatgatatcacatgtcagttataatttgtatctccaaactattattacgtgtttcatcaatctaaacaatccaccaactttcttaaattggtttttgttaagttgaaatgaaggctagacgtttttagtgccttttctgtttaaactgtttcttgaaatcttggaaggtcgaattcaattgcagctgaagttttgtatggattatattacaagggaaaaacaggttctgatatcctaagaagcatggataacatgatatcacgaaacggacacggcgacatcctattttaataatctaggacataacacaaatacttctaaaaatatatattgtttgtactctaaaagaaaattcaaagtcaatgggttgatacatttctaagttagaaaaactttgctccatgtatttttatctactcaacgacggttctatgcatgtctaacacatttgttacactgacaagtgtcctatttgtgtcaaacaagtgtggaagtgtcaagtatccgaaaagtgtccaacagaaacacgcccagccaaacttaagtatttgtgcttctttactgatatccaagcctctatgtaactggcttaagatcacttcaaatacacaagtttgagctacaacgagttggtttcatgtagctcgggaacttgcagtggaagattctaaaagtgatctagttgataaccaactaaatattggaaataaatttcttttgctgataattagacattttctcatttcagaattagttttaacttcaaaatgcatatggcttacaagtttttcaagaaaacaagtaatgctaagttgctaattgcaaggaattcaacgtcttgtcaatagggcttcagtttcagcagccgttggttggcctccca

SEQ ID NO: 65638 - DNA, 907 bp, Cucumis sativus
  Intron number 1 from transcript Cucsa.363510.1 (locus Cucs a.363510) derived from phytozome v7.0 (chr-ID scaffold0361 1; pos 1050258 to 1051164 reverse strand)
ccttcttctgttcctctgcttcttacccctaatttgtaagttggtcattgactcatttccaaatcgttgtcgaaaggtcctggtttatctatttgttaatcggattcgttttgtttttaagttaactgggtggattcattttgtgatttcgttggatcggaatttgggatgtcgattgaggaattatggtcaccgttgttgttgttgtcttctgagatcgacgtccttatttttggtagagggtcaatttgatgatggaatgttgttgttcgtggattttaggattctttaatttggttagaagaattatttgtcgatgcaatctatgattacgttatttttaagcaagaaaagctgttggggatcctggcttgttctctgtgcaatctggtttctgcgttcgagcatggaaatgctttgaaagttcagaatggttgccaatgcaagagtacttttggtggattcgtttttgggttttgttattgtatcaagaccaataattcgtgatttacttaaccaaaagtcggttggcgcattgccttcttgaatggagacgaagctctaacagaggaacttttctttctttgaaaatgtgatgaacttttccatatatcattcttgttacttgctctatatggttttgcttagtacaatgtctatcgagatcaattccaagaaggggatgtttgattgtttctactttgcaattcccgtttcattttacttttcatcctttgttcttggttctcaacaaatggtattgctgcctgtaattccttggtctgtttttttgttcttcagtttttttgtctttctttttccatcaattttgatgatatgaataatttcttttctgagttgcattatggttcaatatcattcactaacttcaaatatttgcagtact

SEQ ID NO: 65639 - DNA, 1035 bp, Cucumis sativus
  Intron number 1 from transcript Cucsa.395540.1 (locus Cucs a.395540) derived from phytozome v7.0 (chr-ID scaffold0410 0; pos 1089753 to 1090787 reverse strand)
tcttggtttattctgaatcacaagaagataatctggtgagcatttgctttcttgggttttgattatcttttttcattaataataggtatctaaactaattgaatttcatagtttctaatgaacacactgcttacttagagaaactggaggttgatttaatggtataggtgaggggaacctaaggaataaaaattaagagtctgaattgtttgaacgttaatgttataaaacataacagtagaaagcactcagtataatataagagtttgaatgcttgtggtgactgagttgatggtgaaagtgaaccatctgtttttctagggattatgtctatggtggatgcaaagtagctaagatagcctacacatacatttgtgcctggttataattgctttagtggggcaatagtaatttgtacatgagaaggcatcctatgccacattttctccccttgtgttttgccttttgtaaatatgaggttcacagtccggtttcaagttttagttaagtttggatggatttttctatgtatgatactgctataaataataagatcgtgaatagataattttcatgtataggctgtagatagtattagttatagtgatcctctaggaaatataactatgacaatttttgttggaactagttgaaaagaagtcattgtgttgtgagatattattgtgttaaccaatgtcaaccatgcttccaagttgtaacgaggggtttgtaataagtatgtaaactgttgtttagtttatactgaacatatgtttcattgtaattcatagtccttaggcttaatttacatgatattatatattattatgtgcccttagacggtaggtaggtcacaagttcaagtcttgtatctaagcccacaactattaactgatgattgtgcttattagactaacccaacaacttatacttttcaatttagtgtgatttttaataagtatctgtgtcattcacccccctgatttttttttcttaacaggttcggaatctattcagagtaggaagagaacagac

SEQ ID NO: 65640 - DNA, 889 bp, Cucumis sativus
  Intron number 1 from transcript Cucsa.322920.12 (locus Cuc sa.322920) derived from phytozome v7.0 (chr-ID scaffold030 80; pos 2499225 to 2500113)
cagctttggcttcatttcaatcgcctccctgctcggtatcttccttgccctagttcttctcttgtcgattctatgctaatttcccttctacctcattgtgctgtatggttaatgatctctaatatgttcactaattatctgtctcctccttggaagaactattaattttttatttttattttttttttaacttgtatggcttaagggcatgtttggagtgatttcataatcactttggtcgttttcaaaatcaaaatcaatttttatgatatgaaaatgacattttaaactataaaattaaatattatattaattctgagggattaaaggcttgttttggaaacatggcaaaagtaagtccttttaacaatttcattgtgttattgtcttattatcgttttcagagatgtggggcatatgccatttggaaggactgtcttaataagtaggttgagtttcgttgttttgagtattccaatgactagtgtaccataatttaatgacattttataactttttttgaatatttttttaacaatatgtacattgaagaacctagttgggaaattttagtacattaggagtaaattaaatattttaaacggcaatggacgaattccgaattatttgggagattagagatcattattttggtatatttagccttttgttgagttatgttatttttctatggtttatcaagtgtgagagtaggatgtattgtacaatgaggatttgtgtggttgcaggttgttgaacgtatcaattcttctgtatatagtttggattacaaatgaaatgttatttttgtttgtttttcagtatttataatcacgtttttattggatttccagagcactccttccgtttttgttaagttcctgattat

SEQ ID NO: 65641 - DNA, 265 bp, Cucumis sativus
  Intron number 2 from transcript Cucsa.397180.3 (locus Cucs a.397180) derived from phytozome v7.0 (chr-ID scaffold0414 6; pos 32550 to 32814 reverse strand)
agatcgacattgttgaacaaggtgataagttggaggtaaggagaaacagggttatttgatttatttagatcatcacgttttggaatttggtatttttaattttgagaatgattcgaattgtctcaggcatgaaactaaatttttctttttgaataatgatactcaatatatgaatgaatattcaatttctttcaatttttttctacaatgtaactcattgaagattcatgtcttctcagctagtagatcagaacactgaaggaca

SEQ ID NO: 65642 - DNA, 569 bp, Cucumis sativus
  Intron number 1 from transcript Cucsa.310470.1 (locus Cucs a.310470) derived from phytozome v7.0 (chr-ID scaffold0299 5; pos 277798 to 278366 reverse strand)
cccacaggttagaccatatagaattgtccaaaagaaaattggcggtgttttaaagcagtgatatatcattaaacttaccttcatccattagcttatcttaaaattttagattcatccgtgatttaatattaagattaagaagagttcatgtgttcaaactcttagaatgttatttccactccaagtaatattaatttgtacttgttagatctttcttagaatgttatttccactccaagtaatattaatttgtacttgttagatctttcacatatttcaaagtgaaggaaaaccttaaagtattgatatattaagaaatttaccatcacccattaacttaggtttttttggtgcattggtgatcttataattttatcttaggtgagctggttgctatgaaatttgaatccttgggctcaaaatctccaaacacctttaggccaagtcgtgttttgtttttgttaacattgggataagtcactatgaaacccaaatgttatattagtatatgtttgatgtttgatgtttaaacaggttacacagcatcacatttggactggtgcattgga

SEQ ID NO: 65643 - DNA, 703 bp, Cucumis sativus
  Intron number 1 from transcript Cucsa.332340.1 (locus Cucs a.332340) derived from phytozome v7.0 (chr-ID scaffold0326 4; pos 80878 to 81580 reverse strand)
accaaccggcttctctccaggaagcaatttgtgagtttccgttaatcacaacgaaagattgctttgaactttgaagtctctcttggattagtttcgtcaagaaaaaaattcaaaattcgagcctcagatctctattacgctttttcttttgttttataaattgctttaaagtttaagattcgacaatccatattcaaattaatcaaatcccgctgtttaagttattttttgatatgattcccattggacctcagttttcatatgtagcccagtttagtcctttagttttatgtgcgttctctttgtcgaaagtatttactccgttcgtgtctgctaaccttatgttataagtagctgacaattgactatatagctggttttttttttttttacttttccttttaatcttcttcattatgtacaactttatgtgaatggtggctgccaatctatgatttcatagtctaagtatctgccaaccttgctgacaaaaaagaacaagcatattttatgaacaggccacgcttttcttttgtgcttagatgaactgtatgggtgttcgtgtccttctttacactgctggctgagaacattcggggacttctactcttaaagccacaacatcatgactatagagtccaatatttccaatttttaggctttaattcttacggttccttttccggtttgatgcaggtcattg

SEQ ID NO: 65644 - DNA, 436 bp, Cucumis sativus
  Intron number 1 from transcript Cucsa.356880.1 (locus Cucs a.356880) derived from phytozome v7.0 (chr-ID scaffold0357 7; pos 1796077 to 1796512 reverse strand)
cccactgaccccatcactcctaaacaaaacttttggtgggtttttcttaataatattccattccacccaatttccaaagccccctcttcttgaatttcccttcacaggccttaagattgtcgccgtctcttttgattcgatcccctttaaaaaattctctttgaaatttagtttcttctcctgatttctgtttctgggtcggtcagttttgatcattttttttattgggttcaaaagtcgtagtttatttgtccctttagagtcgtgaaagatcagttcgtttcacggctctttgagcttttgagaaacttttttatttttatttttattttgaggagagaggttctttctttgttttgctgatcttatttgctcgaacccagaagtttaatcgttgatttgttggaactttgtgatactcagttggatttctacc

SEQ ID NO: 65645 - DNA, 568 bp, Cucumis sativus
  Intron number 2 from transcript Cucsa.385610.1 (locus Cucs a.385610) derived from phytozome v7.0 (chr-ID scaffold0390 4; pos 891473 to 892040 reverse strand)
gccgaccattctttggttgcagggcggcccggtgagcccttttttctacttttccaattatataatttagttactaatttgaataacgtttttcatttgaatgatcttttttcttcttttttagaaaatcatgttaatcaatttgtattttctatctttttgttgagtcatatattttatattatattaagtttacaacaattaaagatgtcaataagtttcttttcaatttgaaatgataactaatattaggtataagaatgatagatcaatagaatcaaggagggtcaataagtatgttagaaaaattattttaaagaataaaattgattagccgactttgactaatcggtaatcaaaatcgtttcaaacatgcatttacttgttcataattaattaaattgtagcttatttagaaaaacggtttaggatgtgcaccactaattgatatagttagcaaaatttatgtatatatgtgtatgtaaaatgtgatcttattcttaacaaatgattttggaactatatgaaaacagggtgggtcaggaactgggtttgggaacttcctaga

SEQ ID NO: 65646 - DNA, 660 bp, Cucumis sativus
  Intron number 1 from transcript Cucsa.364870.1 (locus Cucs a.364870) derived from phytozome v7.0 (chr-ID scaffold0361 1; pos 2297789 to 2298448 reverse strand)
aagtttcaaggtatttttctttttctttttctttttctaattcattattattattataatattaatcttttcggaagggatcaaaagggggtatgaaattatgatagattctttcattgggatttgttttcatttctcttgaataactaaacttgaacttgggttttgtgaattttggccttccttgtttttttttccactttcatttggattttactatttcattaatgtttttgataaacatgtgtatactatgattatgtatcattgtaatcatattattgaaccactatgttttgtttccaatcctggtaaattcatatgaaatgagaagagagaaaaagattaaagtgaaccaatttgatctacatggcatcttctaacatgggttgtctgtttttcttttcctctctttttcatgttaaaaccttaaaatttaagtccctctctctctctttttatttttccatataataacagttttttgagatcttcgttattgtaaattatgaagaggggtgagttaaaaaggaaaacaaaaaagatttaaaaatatattgtaattaagttttcttagattgagttttttttttctttttcttaatttgaattgagataatttcaggaaattaggagagcttggattcaatcgaactccaa

SEQ ID NO: 65647 - DNA, 584 bp, Cucumis sativus
  Intron number 2 from transcript Cucsa.340620.7 (locus Cucs a.340620) derived from phytozome v7.0 (chr-ID scaffold0335 6; pos 3029034 to 3029617 reverse strand)
ctgatattcttcaggtactacttttctgttttcgcaaatttgttgttttcaatggttctaagacagtgacactcatctctttatctccttaaccaattcattaacgatgacttttgatcggtttgaagaaaagatttataactatttagataacaatttctcatcttggtccctttggattttcagttttttaaattgcatctatatgtatacttttgttatcaaattttatttgataatgacttttaaattgtactaattcatttagatgtgaatattaatagttttgaacttcatttctgaggtctaatactaaaaaaattaaaataacaattatccttttaattaaatatggtttacctacccgtttattttctgaaccgaatatattcaatttgttttatctgaataatcttttgagtttgagttaccgagaacctgtttaactaacccaaagcatttctaacctgaactatgccctgaatacttcaatttctttcatttattgtaaaatattgttgttattataatttgaaacacctctaatagtttttacgatgtcttgcaggagtctatcgttcggc

SEQ ID NO: 65648 - DNA, 764 bp, Cucumis sativus
  Intron number 1 from transcript Cucsa.340620.7 (locus Cucs a.340620) derived from phytozome v7.0 (chr-ID scaffold0335 6; pos 3029654 to 3030417 reverse strand)
tatttttggctgccgtctgcaccttccatcatcaggtgagtgaggttccttattcttttctgcctttaattttgttggcttcttctgtaattctcttgtgttcttgttgttgctcttcagctttcctctatttttggaagtgatcgtggcccagtgtgccaattgtttagttcgaatctcaaaaaaaaaaaagtgatggaatagactatttgatttagattaaagctattatgttgtggggtttacatcataatttctattgtaggattaatcgagaaactttataatggttaactcattacctctcttgtcttcagcttattattgttgttttttatatatcggtggaattccacctttcaccaactctcaacctaaaaggtgtcgtgtgaatctataggaataatctagggcgaacaggggagttgagtattttctatttgtggagttaaatctattatacacagacatttgctgaactactaaggatatgaaaacccttggctctgtcaacatggcttatagaaagtatctgaaaacgatcaccactttgcaatttcaacaataagtgtagattctttttctactgttgttatttagtcgatttgatcgttgtacaatatttgcagtaacgtgcttgatttttagctattttggagcagttcacaaggagatattgcttaagtatttgtttgttataagaatctacccgatcctttacaattgttattcaatatattgcgtactccgttgacagcaggtct

SEQ ID NO: 65649 - DNA, 645 bp, Cucumis sativus
  Intron number 2 from transcript Cucsa.332470.1 (locus Cucs a.332470) derived from phytozome v7.0 (chr-ID scaffold0326 4; pos 231674 to 232318 reverse strand)
tctcatctttctcgcgccgagctcaaacaggtatctcacttgtttttcttttagtttattgagttaatagttcgatctagcgttgacgcctcgatagatacagtattgtgatttttcttagttcccaatattttaactgatgttaagtttaatttaacttcgatgtgtttcgtggtgaatatcagtgttcaaaacttccttatctgaatgagaattcaagaaacttctttatttctttatttggtcaattattgtgtatactctgatttgtttgtggtcacagattttcatttggttttcttcttaaaaattttgtgcttattgtttttctatcttttttcctgctcacgattgataagtttctttaatggaaaacttaggggtattttaattatatatatatatatagatacacacatcaataagtcagatgcaaacactggatttattgaatttattatatgctcatgctgtctttttctttctttgtatgacacggggtttgcttatttgggtatatactatgtatttgattctgtggttacatcttttgcatttttctacgatgccacgagtaaaactaatgtgatatttcatatcatgtttaaaggtttgggctgttgcagactccaaacgacagggata

SEQ ID NO: 65650 - DNA, 869 bp, Cucumis sativus
  Intron number 1 from transcript Cucsa.377940.1 (locus Cucs a.377940) derived from phytozome v7.0 (chr-ID scaffold0380 6; pos 407625 to 408493)
ttcgcattccttctgcttcatcttctcaccccgtacttcttctatctctcttctgcgtgcagtttatcaacggttctgctgcctttttttatcgcttgattcctttgctaatttggttgtcgagactgtagtgttgttcttttagttttcacaatggtgaacgcattttacgttaactggtttcacacctgttgaatgtgctgagtacgcattgatgaactgaattgtgtgtttgttttatatatcccttccgtatattttattgagatttatgctcttgttttgattcttttgtatttttgtatttttttcatttattttcctgttattttgcttgctgatattatcgaggcggtcttctcttcaagtctgttaagcaatcgtgagtaaactggcatgttaaacgttgacgtgttgagtatagttagatgaactgaatcgagcgtttgttttatatcctggaagaatattgtgcataagtttctgcccgagtttttatttttatttcgttcttgtttggttgccgagataatcgagtgttctagttttcatatcgtttatacattttcgagttaactggtatggagaccgttggatgtgctgtgtatgcgtaggtgacctgaattgtgtatgttttaatatcatatggtaatttcttttttcatcaaggattttgcaccaccccctaattgagattacagttgtacgcaaaattatggttctcttttagatggttaactttttataatctttatattccctccgtgcatatgtgttgacagataattcaattagtaattatgggcgtggtttatttatttgacacgaagtgttatgtttttcctctcttcctctctcctttcacttag

SEQ ID NO: 65651 - DNA, 606 bp, Cucumis sativus
  Intron number 1 from transcript Cucsa.363180.2 (locus Cucs a.363180) derived from phytozome v7.0 (chr-ID scaffold0361 1; pos 779001 to 779606)
ttgcttctggtcggacttccatttcttctgatcctgtgagtttcattttcatcgttcttttttttttttttatttttttttatctctttcgttttgggaaattggagtcgaatttgaaatgctcgatccactggaatctggcaactcacctgataattacaatttacatacccttttattttgttctttcctttctttgaagctttctaattttgaactaatgtatattgtcgttttgccggtttcactttctgtcacacaagggaacaactaaattaataattctttaataatatttcgttttcatctcatatatatatatacatgatataactcttcaaagaaaataggtcacttggttcctactctttgagtttattgataaaatgggtccttcttatgaaaatcatttgatgggcttattgttgatcatcgtttaagatctatgtcgtggtgcaacattatccattctttcccttatcataattgagatacttttaatgctttgctatggtattatgatgtttaactttcatcaatttgatattttccttttgatattttttttaagggtggagattttggcataaagcgagcaaaggttga

SEQ ID NO: 65652 - DNA, 910 bp, Cucumis sativus
  Intron number 1 from transcript Cucsa.322920.6 (locus Cucs a.322920) derived from phytozome v7.0 (chr-ID scaffold0308 0; pos 2499225 to 2500134)
cagctttggcttcatttcaatcgcctccctgctcggtatcttccttgccctagttcttctcttgtcgattctatgctaatttcccttctacctcattgtgctgtatggttaatgatctctaatatgttcactaattatctgtctcctccttggaagaactattaattttttatttttattttttttttaacttgtatggcttaagggcatgtttggagtgatttcataatcactttggtcgttttcaaaatcaaaatcaatttttatgatatgaaaatgacattttaaactataaaattaaatattatattaattctgagggattaaaggcttgttttggaaacatggcaaaagtaagtccttttaacaatttcattgtgttattgtcttattatcgttttcagagatgtggggcatatgccatttggaaggactgtcttaataagtaggttgagtttcgttgttttgagtattccaatgactagtgtaccataatttaatgacattttataactttttttgaatatttttttaacaatatgtacattgaagaacctagttgggaaattttagtacattaggagtaaattaaatattttaaacggcaatggacgaattccgaattatttgggagattagagatcattattttggtatatttagccttttgttgagttatgttatttttctatggtttatcaagtgtgagagtaggatgtattgtacaatgaggatttgtgtggttgcaggttgttgaacgtatcaattcttctgtatatagtttggattacaaatgaaatgttatttttgtttgtttttcagtatttataatcacgtttttattggatttccagagcactccttccgtttttgttaagttcctgattattgctgtatagatacgcattgg

SEQ ID NO: 65653 - DNA, 580 bp, Cucumis sativus
  Intron number 1 from transcript Cucsa.385540.1 (locus Cucs a.385540) derived from phytozome v7.0 (chr-ID scaffold0390 4; pos 842283 to 842862 reverse strand)
ccactgtgtggttagcttgggacactcagaaatcggtatggtttttgttgggatttggagttctagtttctttttttctttttcttttgttagaagtgaaaattaggaaggaaagtgacatatttgagagaatgttgagtgcacattggagaattagttggtgggatctgtgagtttgattactagaatcaagagaagttcaatacaagaattctgtttgtgttaattttcaagaagtaacgttctagaaaaggattatatccctgccctcgtcacaatggaatgttttcttttgaagattcagagtcgaattcgaagctttgaacttaacctcttgctctcaatgataacttttgttggtagctgttgtgctttatgtgtccaggtcttactaattttagctagcgttctttctttatttcactgtttcttaaggtgctcagtttacagctatttagtaatctctacacggttccaatccaagcacttgctatttgcattctttatttagttatttaacaacacgagaatgttattgtttgtagcgttacgtagctttgaaagttcaaaagagcgctca

SEQ ID NO: 65654 - DNA, 529 bp, Cucumis sativus
  Intron number 2 from transcript Cucsa.311470.1 (locus Cucs a.311470) derived from phytozome v7.0 (chr-ID scaffold0299 5; pos 1065456 to 1065984)
cttcatattctggggtaagaacaagcttgtttaccttttcttttctttcttttttttttttttttttggtctttgtttttcattcctcaattataattgtattgtttcaaccttgtggtcatttttgtatgttgctgttctgttcttgtgtttaagggcttcttctttttagcaacagaattcttgtaattctatcaaaattctgtatgaactaggtagacttatggatcaatcaactcttcagatgggtgagggaaatcttataattacaatcaaaactctgtatgatcattgcataatgcatagctttagttttctatgtgtagagggaatttgtttagtttcttgttctcaagctgatgctgccacaaaaacgaatgatattttgtatggggttctgttctttggttgaataaatgttttcttttcatatcttatgtgaatcatcaacagcttataagtatgatacttttgttggtaatttggttatgtagattagatccgcattgaattacggtaaaggaagaag

SEQ ID NO: 65655 - DNA, 336 bp, Cucumis sativus
  Intron number 2 from transcript Cucsa.370330.1 (locus Cucs a.370330) derived from phytozome v7.0 (chr-ID scaffold0367 8; pos 46039 to 46374)
gtaaacggcatctctccctttctcctctttccaaggtattctctctgtatattattatattatgaaatttaatgctctctttgtttgatttctgccaatttgaaataatcagaattcatgctttgtataggtagttgattgactgtattgtattatacatacaactacttgttgtcgatacgtcgtttccaacttttttttttccgaaaaataaaaaactagtcgtagtctatgttatgaagaagtaacttggatctatggttgttttgttttccattcgatccttttaaagcttccagtaaacatttttctgtttgttttactttatacattagg

SEQ ID NO: 65656 - DNA, 523 bp, Cucumis sativus
  Intron number 1 from transcript Cucsa.313780.2 (locus Cucs a.313780) derived from phytozome v7.0 (chr-ID scaffold0299 5; pos 2974923 to 2975445 reverse strand)
agatttcgcccgccgttcaatctcatcttcagcgggtcagttcccgccaaattttttcttgtttttttcttcctatatgtttgatatatgcgcgtggatcttgatttcattctgttttattaaatccatctctctaattaacattttggacccatgctttatgttttccatgcacctggttgttattgttgaatgtgttttatactagaatttgatgggttttctttgattgctgttctagggcttttctcaatcttgtttcttaaaattagcggaaatggtatttttgggtaggcagaagcttctaaatggtttatgagttattaaacgagagtgaaatttctaatttctgatttagtttatttgtgtgaaatttctaattcttgattgaattgataaggaacctccctctgttatgtatatatctgtatttttgtatgtgtgattattgaatgggattaatggtgccaaatgcttgaaatttgcaggtttatctcactcttggttgtgctttggttgcatc

SEQ ID NO: 65657 - DNA, 909 bp, Cucumis sativus
  Intron number 1 from transcript Cucsa.340020.1 (locus Cucs a.340020) derived from phytozome v7.0 (chr-ID scaffold0335 6; pos 2538778 to 2539686)
acggcggcagtcgggaaggtacgttgaattatcactaaactctcttttacttttattattattgagaaattagatttaacattaaactcgaattttatatttttacttttcaaaataactgaaggtcacataaataatttattattattattattgtaatagaactagtgtcactatattgcaaaaataataaatttaaaagtaaataatccttacaaaaataataaatttaaaagtaaataatcctatgattatcgtttgatattactaattttgacattttcataatatgaaaaaaaaaataggattgataattttgttttctaaagcttttttatagcgtaacagttgaattagaggatttgaaccacaaatttagtacttctagctcatgtatatttttaaattatatgatttctataataataattacacagagatttataacaatcggtatttagtcgatcgttataactatgtttacaatacaaacatgctaaatttataacaaaaaactacaaaatagctggtttcaacctatatatatctaattggtgattagtgttattaccgtagcttttgaccatgatatcaaacaactgttatgatcttctccttacggtatttttaaatataacaaaaacaaacaaaaatatttatcaaatagagcaaaattcatagttttttatcaacaataaacactaatatggatagaagtgtattgacttctattggtattagaacttaaatattgttatattttgtaaatgttttaagcaatgatgccatatacgatgttttcattaaattttatttagcaaatttatgttcccaaatcactgatgaaacacacttttaatttatggtaataaaggtctccttcaattcctcaatcgccaacaaagtaat

SEQ ID NO: 65658 - DNA, 522 bp, Cucumis sativus
  Intron number 2 from transcript Cucsa.322750.1 (locus Cucs a.322750) derived from phytozome v7.0 (chr-ID scaffold0308 0; pos 2392567 to 2393088)
tccttatctcctataccagcaacaccttccccactgtcagtctctctttctttttatttctcattattacccattttgccccttttttttccattcatatgataggattcacttgtatgtttccttgttaaaactattgggtttcatttatccaatggattttgcatatgggatctgggatttttttatttttgctttcgcttctgacatttggcatcaatttcttgtcttttttttttttttttaatgtaaagagttgatttttgaatcgtggtttatgattatgttgcagaaattgaatgagcggatggatggatattttaatattttaatatttacatgttttctttattaaatatgaaatttttgatatgatcctcttttgcatgttgccttttgtttatttactttcctttagaatctttccttttttaaacaatgttttcttagatatttcttgttgtaattgtaagaaacttacattttgttgtttccttctgaaatgtggtgggatgtaggatt

SEQ ID NO: 65659 - DNA, 744 bp, Cucumis sativus
  Intron number 1 from transcript Cucsa.310730.1 (locus Cucs a.310730) derived from phytozome v7.0 (chr-ID scaffold0299 5; pos 487958 to 488701 reverse strand)
acagaagatatcggtaagctaaatccaacaactcatccttttgaattcaataccgctagataaataggagagaaatggatttaaatttacacaccatcagtattttttattttctcttaaatcccaatttaagataatataaatgactcccgacccccttatttagctaatcttcttttttagcaagagatagaacttttcattgatgagatgaaaagggagactaatgctaaatagatacagaacagaaaagtaaataatagataaaaccttaaacatcaagtagaacttaattgttataattgcatagtgttattagcgcttagcttgttccgctaatatattatgaacctaacagtcccatgatattccaactttttgtagacataactatgaaaagatacaaatctaccagagttgagatgtttagtattggaactgtttctttttttcttttcttttttttctcacttgtcatatgtgaggatgattccagtagttgtaaatgaacatattcaataaaaatagatttatagtttattggaagtatgatatggaggtgtttttgagagaaaattgatgtattaataattagaatttcaaaaactagtctaaaggaagaaattttgtcttacttgcttttggtgagagaaaatgagcggaccactttggttgggcattttggaatttaaatgatgatggaatgcaggtggtggcaaactttcctggtagtactagtggttt

SEQ ID NO: 65660 - DNA, 489 bp, Cucumis sativus
  Intron number 1 from transcript Cucsa.360700.3 (locus Cucs a.360700) derived from phytozome v7.0 (chr-ID scaffold0358 8; pos 1292062 to 1292550)
tgtgacattggttaaagaggagaagcaccctgctggtatgattgaagtgaacaattatgaatttttaatatatacgttctctttagtatgtgtaggttcaaattttatgttctttaactgataaaattatgtttttggcttatttacatttctgctacaccttgattttattttacggattcttcttgcctcctggttcatgctgcctgtgatttatatgtggctgtggcatcgttgataataccttttttccctttcatgtatcattttagaattaactttttggttcatttgatgacattattattggtcctgatgatagttgataggttcagacagtgcttgtttctctttgaattactttctgtcaaggtgttctgctgtggcatagattggaaagtttttaggttgcatttggatgatattgtactgatttttgttccccaactgtcaggtttttctcctacaaatccctcttcttcatctggt

SEQ ID NO: 65661 - DNA, 568 bp, Cucumis sativus
  Intron number 4 from transcript Cucsa.349800.3 (locus Cucs a.349800) derived from phytozome v7.0 (chr-ID scaffold0348 7; pos 993145 to 993712)
gcagagaatcgaaggttgtattttgatcaaatgtcagcattcttttttgacttttgttcatttcttagcttgtaaccttgtttggatgaattatatactctgtgacatttgatacaaaatttaattaccatgcagattattaatcaaagttttctttaattataattttttgatcggtgatacttttgaacaagagacaacttttcattcaaaagatgaaaatagattattgctcaaaggatatgaactccaaaagtagtgaaaagaaaaagtaaaaagatacaaataaatctgctgtcgcaaaccaaaatgatatacttaaaaacatatcaagaactaatatgtcaaaatgaatcaaaagaactaacatcgagctatcacagaaggtggagtagaattccaaaagctccgtcatatattagggaagaatcttaatcttattgttgagctaatttgatctggaatctctgctatcaagttcatagtatcctttagaaaggttcctgattcttcattatgtgttttatatgcagaacatattggaactaaaactgcagtccagatacga

SEQ ID NO: 65662 - DNA, 552 bp, Cucumis sativus
  Intron number 1 from transcript Cucsa.321590.9 (locus Cucs a.321590) derived from phytozome v7.0 (chr-ID scaffold0308 0; pos 1391704 to 1392255 reverse strand)
ctgaagtatgtttgcttctttttttctaacttattgttttcgtttttaattatatatcttcctttcttcttctttgaattcctagtttagcaacgtgttaactagctttaggttgtttgtttgagtttggttttagctggaaaggacgatttggctggtgtattacttataattgcgtgcaaatcatttgcatttgcttggtcctcaatttctatgtataatttgagcgtgctgaagattgtttttcttaccttaagctttgtcgtctgttctgtatctttttggtgtctagttgattataattacaattgtttatgactcgtcaagcagtcaatttaccaattcaaacattttgtttggttgattgttgctgaatgtttgagtggttaaccatttgcagacggttgttagtttttagtcggctttccggtgtttaatttatggtctttggctactttgtatacgaatagctttatgtttgcatgaatacttggactgcaagttcattaattgatcacatctgtcttttggagtgattttcaggatattaag

SEQ ID NO: 65663 - DNA, 906 bp, Cucumis sativus
  Intron number 2 from transcript Cucsa.321060.2 (locus Cucs a.321060) derived from phytozome v7.0 (chr-ID scaffold0308 0; pos 919502 to 920407 reverse strand)
gagaaaattggttggtacctaattttttttcctttttatttttatgtttttggaaacaatggttactgtctaattgttaaactcatgtggcatcctgtttttggaaatgattttaaaaaaacaccaatccatttaattcaattcttgaaaacgtgcgttctggtgtcttctttgttcataaacatagagtgtggttgaaaatagaatatcctgctgattgctttgtcaaacattgtctctctctatcgtagccttcttcctttgtgtataaacatcctctctatctctaagttcccgtctctctctatatatatacatctttttgttaaaatggattgtactaaacgtatattctatttcctatattttcatagtttagtaccaaacatagtgtattgagacatttttttcccaatccatgttaacaacaaggccagcttatgttcctgtgattacactctaaacagaggaatcaattaacaatgttatgtgtacaagcttgaaaacataaagaaaaattatgagaaacagagaggaggagaagatatatttcgaaaaaaatcatttaaagaggaaaaggcattcacacatattgactactcatctgcctgtgccgatgaaagaaacttcttctcttttacattatttcaagaggacacaatcattcctgttggtcttctctctactttctgaatttggttataacttttttctcactcttttagcatgcatggcatgttctacaaatatccttgtgcacgagtactgaattattaattttagtaattttttgaacaaggttacttggagtaggatatttgaatcgtctacaattaaacctttgatcagttagtaagaatcaattgatccttcttatatgtgtgtttggtaatgcacaggtgttcc

SEQ ID NO: 65664 - DNA, 972 bp, Cucumis sativus
  Intron number 2 from transcript Cucsa.367100.1 (locus Cucs a.367100) derived from phytozome v7.0 (chr-ID scaffold0362 5; pos 532077 to 533048)
agcttccgcatcactgaggtgtttttgttgttctcgtcgaactatttaagaatgcaagagctagccttgaataaaatcaaaacatttaaaattttgtttggtttaaattattgtgtcaaagtgatctcaaataagttctttgtttttatgtttgataaagcattggcgaacttgtggttctttataaacattgttaaagtttatgtttttccaatccttggatgtatagtaacacccaaggtctcttctaagaaagtcagatcgttacaaattacaagctgactatagaagacatgaggaaaatagacatataatagattgggagattggtgacaatgaattacaatacaaggcgggctccccataagggtgtgaaccctttccatctattgattttcttctggaatttatcaataatacgctgctagaaggaggttcttttaggataacccctagaggaagcctaaggtaaagaaaaggctagacctccctcttaaaatcaagtcttgcagaatattgtagaagcgtaggttcatccaattgaggccaattaatgctaatttttcccattttatttttttcaccaagcacctctgacaaaaatcattggtttttgaaagagttttaaacatttgatcaccatacttacaaaatagctgccatatgtttatttactagagaagctctatacacgtaggtttggttctttgatttgatctgttatagtttttttaaaggaatctcaactcttgagaagttctaaaatgaatttttctctttgaagcagtccatctctatttatttatttgttgttgttattattattattattttgtagatttacaatagactgcctcgattctatttgctatttttgtgatttggctattattttctgtcctttccaccctccctgtatacatgcattccttctctttcatcttgattgattatgatattgacgcaggtgca

SEQ ID NO: 65665 - DNA, 1009 bp, Cucumis sativus
  Intron number 1 from transcript Cucsa.322050.2 (locus Cucs a.322050) derived from phytozome v7.0 (chr-ID scaffold0308 0; pos 1876831 to 1877839)
aaagtaagcaaaagcttacactcatatctctctttctctctcttttccttttcttcttttcttccttttcatttcaatctttctttgcttaggctttaggagatgaaaatgaaaaaaaaaaaaggaaaatcagatataaaaatacttttcttttcttcccatttttctctctttctaaaaagcttacaaatttttattcctctccaatatttttcttttaatttctcttgttttggcttgggtaagagatgagattgaaaaaaacctagattttattttatttctttttattattattattattatttattccctcactaaaaagcttcaaaattttatatccttctctttctctctctctgtcattttttttctgcaaatttctctgcttaggtttgtaggagatgagattgaaaaaagaaaaacatttttttcttttttcttttttctttttccttttatttttatttttcacactctctctcactcaaaagttgatctctttgatttaggcttgtgacagatgaaatttaaagaaaaaaattcataatttcttgaagaatgatggatggaagtggtggcaaaaacctccatttcttaaagttatatttttccaatttttccttttgtaatttcacctttattttctctgtcctcttctgctcttctttttctttgtttattgtactatacaataacctgaacaaacatttttctttaaaatctcttaaatagttttccctttttttgggttcatttcatttcctttcttttcatcctttttttttccctctcagaacctttcttttcatctcttaccatcaggtaaaacaagagagataagttgaatcttagaaagaaagaaaaattatatctcaaaatatacacgaaaaatttcaactatatattttcctgattttgtatctaaaaattctaattattttttattcttactccttgtggggattttgataattaaggagcaacaccaaaatcagttcttgagctt

SEQ ID NO: 65666 - DNA, 789 bp, Cucumis sativus
  Intron number 2 from transcript Cucsa.341540.3 (locus Cucs a.341540) derived from phytozome v7.0 (chr-ID scaffold0335 6; pos 3949168 to 3949956)
ctgcttgtccttcgacactcccgtattttcttctaccttcttgtttctttcgccgtaatttctatttgttttcttcttctggaattctgatgttttctacttacatactctgtaatcgctgagtgattggttgaaaactgtttttcttagaaatgttagtgtatgtcaaggaggtagtgagtcctggtattgtcttttcgtttatatgcttgcttatttcctcttctcaattcctataatctctatctttttatgctcacaccatctttatttctttctgcctgtgcctgcatttatgttctttgtaattattgattgtttggagataggtccatgtaatgtaattcactcatttcttcacttggacaaaagatgaaaaaaaataaaaataaagcgtgatcaagaacattactagtttgcccatgaaatacccagctaagattcaagaacatgttcaacctaacattattccgtaggtattgtagcttcagtagaaaaaaacgatatgcacaccaaggattataaatgaaattcaaattttcacgtgtatgaaaacctacactcagtaacattcaacttgactacctccctggggctcttctatgcgtttgtctgcatattggttattcaaaagcaacaacattcattccatatgattttatgatgtcttcaatctctctctctcttgttgaatataagtggaagctgttcttttatgacactgtctgatgatttctttcctttcgagtttcagaggtcagaaggtggtttgttcattgatttgaatac

SEQ ID NO: 65667 - DNA, 881 bp, Cucumis sativus
  Intron number 1 from transcript Cucsa.391760.1 (locus Cucs a.391760) derived from phytozome v7.0 (chr-ID scaffold0406 2; pos 165037 to 165917)
aaagctagggaagctgctaagaggaatcgcaagaggttagttgatctcatttctaaatcaaaatcagatgagttgttcatggctgaatttggtttctgtgagattttgttgtttttgaatggtctgctttctttcattttctttgcaaccaaatagtgtatttcgatatcaacttcttaactgtctccctctgtcaaatgctgaatacaaatcttgtggttcattgatccacgaccaccactattgttcttcttgatttcattttcccctcttcctttttaaatcttccttaacattttctagaactcagaagccagcttcagattgatcaatatcaattaacattttctagaactcagaagccagcttcagattgatcaatatcaattcaaagaattagtctactcaaaatttcttccattttagtgggagagagggaaacaggggatagtgaagattgttcaattgcaggttgaagcttgagtaaaagttatcataaaaaagggaaactagaggttgaaaatatctgaaattagctgtgaagaaacagctataactgaaagatgctgcttagttacaatacaaggtgacccatgattagcattgaggttattggtaaagaaggtcacttcttgcgggttgtgttgcttgctgcaaacatcccaaattgttgtgacttgattgaatctgtctcaactctccttgggttctgtgttttaaaaaaaatgaagaatgggaaaaatgtagattatcattcagctcattctcattgtagattcagatttttgtgtttccatgttttaatgcaagcaatggtttaaagtatatgtgattctccaactgcagaaggtttaggaggcctcaatcaataactggggagc

SEQ ID NO: 65668 - DNA, 470 bp, Cucumis sativus
  Intron number 1 from transcript Cucsa.332700.2 (locus Cucs a.332700) derived from phytozome v7.0 (chr-ID scaffold0326 4; pos 449454 to 449923 reverse strand)
cttctggtgggtattgcttggattttgtttttagcttttcattttctttgatcgattctagtttcacctttctgctctgttttttttttttttgtgtctgggttggtggatttggttttgtggtgtggttgtaggaatggagattgtgaaattggtgatctgggtttttttcgttttcaatgtgattaatgtatgttttggtttgatttgtttattttttttattttgactgagctgtgttgagcttggagaaaacccagttgagtgaaggaaactggggggggaataaatattggtgttgtgggtttttcttaaatgctcattggtatttgactaatagagaagatttagcttagttactgagattttttgctgctttctgattgagtttttcttcctctgctttctgattgagtttttcttcctctgagtgttgcttttgtattggtgtagttcaagctttgcaagtt

SEQ ID NO: 65669 - DNA, 419 bp, Cucumis sativus
  Intron number 2 from transcript Cucsa.360510.1 (locus Cucs a.360510) derived from phytozome v7.0 (chr-ID scaffold0358 8; pos 1150454 to 1150872 reverse strand)
cagatccaagtaagttgctaataattcctccttaattttgttcttctttttttttctaactttttctacatttctctaccttacaaactcaatcttttttctttttaccaatatttggtgcattctatttttattttgataacttgtgagatggggataaaacctcttgtttgaaaaattttgtatacgtatttgatatcaattgagttatatatactcgttttatttggttactaatttaatttggcggaagatatcaataacagctcaagcaaccatttgttgagatcaactaatataaacaaagtattaaaataaaaatttattgagagtatttacaatttggaaaccaaagttatagtctaattccaaatatatcattattgttgtatatctaattttggaacattacaggtcca

SEQ ID NO: 65670 - DNA, 977 bp, Cucumis sativus
  Intron number 2 from transcript Cucsa.387730.3 (locus Cucs a.387730) derived from phytozome v7.0 (chr-ID scaffold0396 7; pos 97502 to 98478 reverse strand)
tcgtggaaccccgttcaagtttactcttggtcaaggttaggagaactttatttattgttgttattattattcttattttggtttggatgtgtgattgacttattgacatgtttcatttatttgttagcatttggtaattaagctaattttaatgggaatatgaagtacattgctgctgtttcgttgtatgttggccatttcttgtgatataatgaattctgtaatgggagtttggtttaacttatcattcactctctcatgagactgaattggatttattggttgaaagttactatgtttattttttgacaagtaaaagtttactgcaatcatttgtgagaggcgcagacggtgttaatgctgcgttgtctgtatagaacagtatgtcttagaaggtattattatacagcttttctaattcaggatatgtaacgttcaattgttagttgtttgaatgctcgagttgtttaataaattttggctctgcaattgaacaatggttacctgggcttctagtttggtctatatatgatcatttatgaggttcacatacaaaaggaaaaaaatttccttttgttgtttagtggtactttgacttggttcagttagttctgattaagaacaagcgcctgaaaggtagccatattctttgacattattatttttactatttccgtctattattttgttttctcaaaaattctttattggggggatacttattgctatattgagaaacttctgcggctctttgttttgctttcttccaattctggagtttgagttgcaatttattcgatgatgtctccagggaatctattttcttttatttttctttgagaggtcattcactactagcattcctatcttgggcaggccttttggtttctggctgagatgcttccatccttgaatgttcatttatgtcatcttacctttctttcttttctttttggtgcaggacaagtgatcaaagg

SEQ ID NO: 65671 - DNA, 836 bp, Cucumis sativus
  Intron number 1 from transcript Cucsa.384910.5 (locus Cucs a.384910) derived from phytozome v7.0 (chr-ID scaffold0390 4; pos 327837 to 328672)
aggtttgtacactttatttttatttttattttttatttttttttgggctttgatgttaattaatgttcgtgattatactttttcaattgatgttcttgattaagtttgttgctattgttttctgaattttacttttgaatgacttggtgcgagtaccgtatgtacagtctagaagtctattactgaatttcacagcttagaaaagtgtgtgagattcactgcttgaacaatttttggacgtggcaataggaaagtgataacgttgtgtcaaaatcaagggaccgcctacttgtttctgttgtgctgaactttctcatacgcaatgtggaaacacattgtgtatttccacaatctgcctcaggcttagcctaggacttagcttaactgttctaaaaatcagttcttcgtctcaggcttacattcagctgatgccattccacaagttctgaagaatatttgtttctcttctttctcttctgttgctaggacttcatttctttttggttttttgtttagctcctccatttaattaagtctgaacttttttcatttcatgacacctggtttcatgtcatagatatgcctatggatatataatgttgtgaattataaatggtggactagttgtttttcacatttttatttctgcgatctcccaagttgacatgtcagtcaaaattctttaccatttggtactgataactgcatcatttttttgaatcagactctgaatctgtaactattagatttattggtcatctttgttaatatgttatggtgatatatcttttttgtttgcagtggttgtttgtaacaaaagataagagtgagttggg

SEQ ID NO: 65672 - DNA, 457 bp, Cucumis sativus
  Intron number 1 from transcript Cucsa.322850.2 (locus Cucs a.322850) derived from phytozome v7.0 (chr-ID scaffold0308 0; pos 2457663 to 2458119)
ctgacccaactggccagaatagcctaattactagtgtgagttcatactgttctctgcttatttctgtcttgtatcctttcatttatttcttgttactgttggagaagagattccgtggttgatttttttttctcctgttttaatttcttttctctctgcttaaattattgactttttcatgttcttccacttcaattgtggaaatgattgaactctagaatgtggaggtagattttgttctgattcttgttcccgctgctcgtgcttgttttttattctattttctgtttgtttcctgggaatattaggcagtaaatagaaggggagatgggtttgtatttgatgaactaaggtttaaactaccagctctctctctaatctttcttgattttatggcttatctttgattgttgggtctgcagagaacaattttgaggaggattgacgctgcatccat

SEQ ID NO: 65673 - DNA, 697 bp, Cucumis sativus
  Intron number 2 from transcript Cucsa.386010.1 (locus Cucs a.386010) derived from phytozome v7.0 (chr-ID scaffold0390 4; pos 1192482 to 1193178)
ccgccctgcttgtatgtctatcttgcccatttctgtttttctcatttgctctgtcttgctgcttttcacattatatcgttatgttattgtttcatttaatgtctatttgaggttattgtttctaattgctgctagttcgaggttattgttctcgatcagtttatcataagtactaagcaccctcgcattatttctgctgtctcaatcttgtgaccacgttatcaaatttgctctgtatttgtatgcttatgatgtcttttccatgatgatggtcctgttgaggatcccacgtggagatagatgagctacttctcccactcccaatttattttgagagatggagccacgttatctaataggcttgagaatcgttgtttatctaatagccatgttatcttagtttattgatggaaaaattggttgatgccatgatcttaataaataagcgttaactgagaagtaggaaatgacatggttaagaatgtgttatcttgtctttcgacattgaagtctaactggaagattctccctttgattcgattcagttagtagttgatcatagagtccttgaggattttgaacatatgttgttttacttggtggttttgacatttctgttgttaagtcttggacaaatatcatctgtttagaaaccaaacttgtcattcctttgcagttttcaggactggagctgtaa

SEQ ID NO: 65674 - DNA, 379 bp, Cucumis sativus
  Intron number 3 from transcript Cucsa.359150.2 (locus Cucs a.359150) derived from phytozome v7.0 (chr-ID scaffold0358 8; pos 193244 to 193622)
tgttccgcgtagattcaagagcggcttcagagagggtatgatgatattttgttcattgtttattaatattagagcacagattttgttatatcaattagaacagaatagcacacttcagttccaactgatttatcaaaaactttacttatgctctaatgattaaactcgttcttccccatttactttgagcttgtttttatcaactttttgagtgtttataaactgtatgattgcacttataaacactttggaaagtcgattcaaacacactcataatttgttttgggttttgataccagttttagcagtattctgaccgaaaaatgttttgggtttgtgattaggtacggaagctgcacccaggaataaaggagctgca

SEQ ID NO: 65675 - DNA, 764 bp, Cucumis sativus; identical to SEQ ID NO: 65648
  Intron number 1 from transcript Cucsa.340620.2 (locus Cucs a.340620) derived from phytozome v7.0 (chr-ID scaffold0335 6; pos 3029654 to 3030417 reverse strand)

SEQ ID NO: 65676 - DNA, 736 bp, Cucumis sativus
  Intron number 1 from transcript Cucsa.349600.3 (locus Cucs a.349600) derived from phytozome v7.0 (chr-ID scaffold0348 7; pos 813028 to 813763)
tccttttgggaagatcaccattctcgttggagctggttcatacacagtaaacttagtattttatattttctggttactgaatgtgctacacactgtgattgattgcttgcttgatcgtggttcgggggaggggagtttgatgaataacaactgtagttttagctcagtaggaaggttgatacttggtctgtttgtgtgctttgtctgtggcgattgatttttattttttttctgtgccgaaatcctagcattgagattgtgcgttagcttgaggatcttccaaaattatcttcttatattatcggtgaaactgtggtgaagttgtgcttgtttaattttcaaattccgaatatattttttaaccctaatatgagtggaagcaatgtctgtttgacttcttgattttatggctaaagctatcccgtgttgtagtcgagtctgcataccatgaattgccaatttgtttgactggtttgagtttcaaggtagtacgagcttgagtttcagatgctgaaaacattgcaagtggagaccatcttgaatttctgttttacttgcactaaatcatgtattatgccatttggtagtactctttgaaaatgcgtaaaattgctattgcttgctataatagttcgtcttcgtcatttttaactgagttgtgaagtaaattagtgcaaatcacgcatggtctattctttcaggtattgttggctctgttctggcaaaagagggacgc

SEQ ID NO: 65677 - DNA, 510 bp, Cucumis sativus
  Intron number 4 from transcript Cucsa.360010.1 (locus Cucs a.360010) derived from phytozome v7.0 (chr-ID scaffold0358 8; pos 775307 to 775816)
ttagggagaaggtgatcggcattcaggtacatcaggtgtgtttcattttctttaattttccttgaatcttctttgtaacttttatttacaatttttgtttatagacaaagcaccttatgcatttggaacttctaatattttttttttgtatgcaagttcattacttgatagttctttgaaacttctaaatactttttaaactgctatttagaaattctaaatcaaaatttctagccgatcaggtcagtggaatttgtgtatgagagaaagagatgaaccggcttccatggcattgtttttggaaaaattccttgtgtcgtctcattgtcagctgtcatttttcttggactagcgcaatagaatctgatacatatttcaataattccttgtgaattggtttatatgaaaacagttcttagtatctgtattttctttttacaattaagatagtattctattatcaacgatgttcatttgtgtttattttttgataatttaccctaggtgggg

SEQ ID NO: 65678 - DNA, 389 bp, Cucumis sativus
  Intron number 1 from transcript Cucsa.336870.2 (locus Cucs a.336870) derived from phytozome v7.0 (chr-ID scaffold0335 6; pos 47736 to 48124)
tcgaatttagggcttgaattgagttaatctgttgggtaatgcttatttcttgttttttggtggtattttatcgtcttctttgatttacatttttttttctgctggaattgatggtatttttgggcatgctgaatttgatggtaatttgggtatcctgaattgatggtattttgatctgttgggtatgtttttggtggtattttgcatgttccatgattttattgcacgtatccgtgattatggttttctttatcattttttgttctatgaatcggtagagatctaaaattgtctaagatctgttgaatgtaatgttcgattattgactcttttttccctctcctttttttttcgtttccttttgttaataacaagttggttggaggaag

SEQ ID NO: 65679 - DNA, 954 bp, Cucumis sativus
  Intron number 2 from transcript Cucsa.322280.1 (locus Cucs a.322280) derived from phytozome v7.0 (chr-ID scaffold0308 0; pos 2059480 to 2060433 reverse strand)
gacatgttagttgttatttctacttctaatttttctttctttagcaacatgttatcttctgttccgagaatggaagctattcgtttgcttaagcggaagcaagcagtctattgaagacttagaatgcagccaacttatctgttgccaccagtaggctctactagggctaggatttgttacaaccaaggattaaatatcttcgttgtatctgttcatattttcttgtgaggaggacgttccagttgtttgtaactggtctcctcaacgagtgaactattctatagtggatttgttcataaatagcctcaaggagtgatcatggcgatcagaaagtccacagtgccatcaaaagagagagagcgagagagagagagagagagagagcatccagatgattcattaaccttttgccactggttgaagttctagttcgtgcatttttactcttttacgtaaattttttgaatgcatttccaatcttaattatttaaggcagtgtatgaggcctataatattctcattttctagtgaatgaagccaagttatggtcacctcttcttattgctggtatggcctggtagtttgggttgatcttttgggcttgtagtgttggaaaatcctgtgatataatgattttccctttgaagtagatgtttaaccaatctagtccgtgagagtatgtctcaaccttttcttctgttttctaaatgcttttttactttctgttctttctgtttcataatgtattccaattttctattagtaacgttcttaagcttgttggctgagttcagacaaatatgcttatttcatatcagatgatcaaccattaggatttttgtttcctgtattttgatttcttatcttctgtatcttgatttcacaatagtgctaacactccttacgtatgtattacttaattatctattttaattctcatttttgatgttgtag

SEQ ID NO: 65680 - DNA, 916 bp, Cucumis sativus
  Intron number 2 from transcript Cucsa.387740.1 (locus Cucs a.387740) derived from phytozome v7.0 (chr-ID scaffold0396 7; pos 101898 to 102813 reverse strand)
taactgagttacagattggtgtgacggtaatgtgcttatttattctatggtttcagaaatgagtttttgtttcttcgtacattttagtcgacgttctgtctgggactcatttcatatttgataggaagttaaagatgtttgatactatgaagggattttatgttctacaagttgtaatagtctagtaaaagctttgtggtcattgatacatatatgagactttgattttgggaaatcgttttggttaatatgagatccatatgctcaatgaaaattgtacattgggtttggatggtgttgatatcaaattatgagatggggtttccccatgtcttgatttgggtttaatttgatctgaatgtgatatgttcttcacaaaaaattgacttcgagctgtcattgcgcctgtggcctgtggggtagaaaatgaaatagaaattttttctttgagtcatctattgtctgtctctgaaatcaattaccacttttgattccattcactagcttggcattatttgaggaagtaggttaacatgcttgggaggcgatattttggaaaatgaattagggcttgggagtgatgtcaagattgggagggtccaagtgcctcgaacacttggatatatcttgtagtttgattgtctttaatatttcaatatactcaggttctataagtttcgagtgacattctatactggcatttcagacaggccaggttataattgtgagctaaatgtcagcatgtctacaagctgcattttttttccgtagcttgcaatgactaatgtttgatattgaactgctagttttaagattctggaatacgttactcttgtttactgtctcaagtttcttcttgctagttctttggatttgaagttactctttttttttttttgcagggcaggccagcatc

SEQ ID NO: 65681 - DNA, 673 bp, Cucumis sativus
  Intron number 3 from transcript Cucsa.367040.7 (locus Cucs a.367040) derived from phytozome v7.0 (chr-ID scaffold0362 5; pos 496839 to 497511 reverse strand)
tcgggtttacttaatgtactgtcagctatctacatttttgtctaagattgcgttggaacatgtgtatgttcagttgcatattgtttcttgaagttcattactgatactttcctgtggtcctcggccttttggctaagatcaagtgtattactgatactttcctgtgttacttgattctctgcggaagtcattgatctattacatatagttcaaggaacttggaattttgagaaattaagaaattaagaaattaagcctatagtttatttcatttttatttgatggtctagttaggatttcagttttaattggtttaggttttttgtttgtaagaacgtggttctttcatttgttgaaatttaattcctacccatgcctaattctcactgaatttctagtctatctaggttgatttaatcttattttcacaacaatcagctgcataatcatatgcctttgtcgggttagcatactatgacaggatcttgtgcatttatgcagaagttagtggttacacatggactcattctttgtgacaaatgatttatcttcttctccctgttatgatgaccccttataattctactgcaaaattttttgattcaagtataagattctcatgaaaatatgatttctaaattctgacgctcttgttctttgcagtcatctctta

SEQ ID NO: 65682 - DNA, 759 bp, Cucumis sativus
  Intron number 2 from transcript Cucsa.350760.1 (locus Cucs a.350760) derived from phytozome v7.0 (chr-ID scaffold0350 4; pos 232953 to 233711)
ttgctgggctttcggttacttggcatctcttgaaggtacggttctgtgggctctgtttttcaacattttgcttttgctgcatacaatgttttcttcttcaaaccctttgttttttggttgttgagttctggtttttgtgtatcaactggcaatatgaatttgttccgattaatcttttacacttttacgtgtttggtgaatgtctcttatgatttatgattggacgaagacatatacattcatgaagtatatttaattcgttccttcgattctttcaggcctccattcaatgtcctattgaatcttcgtagcccttcaaatttgatttggcgtctacatgctttatctagaggcagtgagcccaaaaaccaaaaaatgggatctcacgtaatcaaaattttattttttggaaaaagaaacatttgattgatagcatgaaataatgggcagagcccaacacacccaaaggccaaaggtgatcacataaatttagttaactgaagatatttccgagtcaatatgttcttattgtaggccacaacaaatgatcccttcacatatcgatattgtccactgtgagcttgaataactcagcttttagtttcactgaaaatgtctcttatcagttgagatgttatccatcagttatctatctatgatctttttatccagtcaattgggactttgatggcgtttccaacatttattacttaatgttgtagataatcttattgtgttcattgcagctgtgtcctaagg

SEQ ID NO: 65683 - DNA, 432 bp, Cucumis sativus
  Intron number 2 from transcript Cucsa.337250.2 (locus Cucs a.337250) derived from phytozome v7.0 (chr-ID scaffold0335 6; pos 355266 to 355697)
taccatttgagatttttgtgaaggaagaaaacaaggtttgttttttacttttttgtagtgtgatttctgttttatttgctgccatttcgatgcatatgagattaggtaacaatgtaattgctgggaagaaaattttcgcgggtgtaggaactttcggaatccgactaattttatgccctaccgactgatttctgtttgtttttggcttcaaatcattatattagtgcttttgattttgcgttgtgcgctttttatttatgttggatacgtgtgacaaacttctcgctggttggaaatctcggtcttccaatctcaccgtattttatatatattttttgatttatatactcattaaaccaactccaaatttaaaactgtcctcacgatttcttaatagtttctatttggatctccctcaaccgcctgcgcgtc

SEQ ID NO: 65684 - DNA, 873 bp, Cucumis sativus
  Intron number 1 from transcript Cucsa.322320.1 (locus Cucs a.322320) derived from phytozome v7.0 (chr-ID scaffold0308 0; pos 2102685 to 2103557 reverse strand)
cttcttcatttatcggtatcgatctttttccgatttctttttgtgttgttgtgaaaactgtgtctaggtcatcttgatgtggtttgattgacggattaattgattgaattcggtgttggggctattgggtttatttatctttcgatttatgttttttgtggttaattaatgattcgacgccggatgacggagatattgttgcggttttgtttgttcattgattgaagaaattgtcgtcgggtggacgtttgtagcgaggtggtgttcgttttgtttgcctatttgtgaatttgaagatttgcgactagtcggttggtgaattggtgaattagggtttgttcagattcgatgtcggaaatattgtgagattttgtttgcccacttattgtaaagaatctcgttggtttggagttttggggcatttctgtttgcttcgcttgcttatttgtgaataggaatttttgtggacctagttggtggattagggttttatttggatgagctcgggatgtatgtcatattgtattggttattgattggtgttttccttgataagtaattaatctttgttggagttggagttggcatttgcgttatttttcttttctaattagttttgtctcttggttttattgtaccaataattttaatattgtgatcagttttgggtatctggtacctggtgatctttggtatctgataaattgaagttttgtgtgaattatgtcatttatgacaccacctttttttgctcattcgataaaattatactgaccttcattttttatatcattcatgagtatgtgtctaatgatttggtggtattgcgaactatcaggttttcgagggcctggatataaagggatttctata

SEQ ID NO: 65685 - DNA, 622 bp, Cucumis sativus
  Intron number 1 from transcript Cucsa.360460.2 (locus Cucs a.360460) derived from phytozome v7.0 (chr-ID scaffold0358 8; pos 1123576 to 1124197 reverse strand)
gatttctttcctgattctcccaggtaccattctttatatttctcttacttctttttttttgctttctgggtttctttttttttttctgtttttttttttggcttgattcttcatgaaaatctcttcttttcgatttttttttgtgttctcgacttaggaatctggttttggtgatgattgtattcatgtttcagctctacattattggttttcagtaataattggatttaccctctttcttttttctttgtttgagccgtgatttccctcaatggggattgagatttgaggtgaattctatttgttgagctgtgtttttgcgtcttcttttgatctatttcccttttgtggtgtgggtaggattgctgggtgtaatctcgttttagaagaaaaataaattggttttgttccgagggtattagcttaattttttagagtttctcatgatttgtattggtttttcgtgatttaccttgatggttgtgagatggatttttttaatgcagctcaaatgtttgttagaatgcttacccgtctgggtattcgttttctgggggtggatttgtgtcattgtccaactggacgatttctttgttaattaatttgtatggttgttattagg

SEQ ID NO: 65686 - DNA, 353 bp, Cucumis sativus
  Intron number 1 from transcript Cucsa.340810.4 (locus Cucs a.340810) derived from phytozome v7.0 (chr-ID scaffold0335 6; pos 3188106 to 3188458)
ttcaacctccgcggatcctcgcgcagttgatcacagtgagtcaaattcaactaatttgcttccaccatttctttgtttttccggtttgatttgtagttttcttaattatccattaatatctgtagcttacggttcgttaaaccatatgattggactttaaacttgaattcgtaactatgctcttctctcttttatttttattttgttcttttggaaatttatctttcatctaagccaagactgttcgaaaattaatactccattcagacattcattgctgtcgaccaacttgcattgttttgtgttgttttcttgcaggtaaattctgttgaatcctgcttctattgtggttt

SEQ ID NO: 65687 - DNA, 693 bp, Cucumis sativus
  Intron number 3 from transcript Cucsa.340810.4 (locus Cucs a.340810) derived from phytozome v7.0 (chr-ID scaffold0335 6; pos 3188726 to 3189418)
caaagttgaggacgcagttgttagagcctccaaaagtatggatgatatctttcttttcctccattgtcttctgtttcttttctttttttttagtgtgtaagctttgcttaagtgagactcgtaagagtgcatttgtttctctcgtcgtgcagtcacttatctgattggaaattgatggcagctggtgttgctgtttaaactcttgaatttcatcatactacaagtcgttttctgaataactcattattcactcattattgacaccgagaagttaattcaaaatttcaataaatattgcctcttttataattactcgtgccatccatgttcttcttcttctttttcccaaggaagttataaatccaaatcattattatcaaatgttacatatttttcttgtacagtcactcctatcccaagcttgttctaaattcagttaatgttgaattacattttttttaatgaaatgtcatgttatcaaaccagacatttttgtacaagtgttttgatacccaagcaaaataagtttgatattattaatcagtgtgtttagaattttcatattactgatactggatatttctccctggcccccttgtatggtgggatttgtgaaaaatgactttcatatttatcatttttaacctgatgcattcagggttcaagtggaggtggagagggttttgaagttac

SEQ ID NO: 65688 - DNA, 911 bp, Cucumis sativus
  Intron number 3 from transcript Cucsa.334680.1 (locus Cucs a.334680) derived from phytozome v7.0 (chr-ID scaffold0331 2; pos 147381 to 148291 reverse strand)
caacttcttctcaagtatattcactttgcttctctgtgcatcattttccatctctgttatctaactctatgtttgttcgcttattatattgacagagaaaaccaagtgataaagcttttaactattcttatgtttagttaatttgattggtaagacttgaatttgtttctggtttttaggctccgtttggtatttgattttagaggcgttaataatgacgaattgattgtggggaaatttaatcgattttagtatttggctaaacaaattgctttgaattgtcaagtctagttaacgtagttctagagattggcttcctaaaaaaattgatgtctctctaaccaacattttgtaaataaagcaatctcaaagtaatccttagacttgctatgactctatgagtatgagcaatatgactgatcatcttatatttgccagctatgtccctaatagctttttttctcttttttataaaaccacgtctctgaattctttaggggtactaacagaggtttatggatcaagtcatatggtattagtaagggcatagccgcataagggtaattaactagagagttggtgttttttgttataaatagagggaggggtggagggaagggtggagggaaggttccaagtgcctaatacttggtttatcatgtagttcttaatcttctatattacaatatacttcagatcttgattcctgttaggtggtaccgtaacaagaaagtgttggtatcttcataaaacttcggaattgagaaacaaatataggtggactaattagaaattctatttcgtttattttcctatgatggaacaatttctatgcagatctaggagagaaaaggcacttcaaacataagtaacttactccaagtttattatcaggacggttgattcattag

SEQ ID NO: 65689 - DNA, 461 bp, Cucumis sativus
  Intron number 3 from transcript Cucsa.341270.2 (locus Cucs a.341270) derived from phytozome v7.0 (chr-ID scaffold0335 6; pos 3653351 to 3653811 reverse strand)
aactctgttggttgttgtcccttctcaaagctctggtacatttctccctttccctcattttgatttatgcaaatgctagcatttagtgatgatccaaccttggtttcctcttatattcttcatttccctgttcttggtcaatcatttgttcatcttcctctgcctgttgctctgcctttaactgttctctggcaatcttgtcacatactttctgcttcttatcaaacacgtttccagatcttagattagaaggtgttccagtattattggatcttctttctcattaatgtagtggttcgacatgttccaatggttgttcagaaagaaaaaaaagaaagttctatttaggaaaatgggatctggccactccaatagtttattatgcttaattagtagatggattaataacagcatcatatccttcaggtagaaaattctggggttttccgagatttgctggg

SEQ ID NO: 65690 - DNA, 591 bp, Cucumis sativus
  Intron number 2 from transcript Cucsa.310270.3 (locus Cucs a.310270) derived from phytozome v7.0 (chr-ID scaffold0299 5; pos 118838 to 119428 reverse strand)
gagtgtctataattggtgggaaggtaattctgttttctgttgttgctgcatttgttggcctattttgttgaatacatttgtgctttttttttcatttggaaacatcaatgaaataaaggtataaacccaacacgaataggtgtttacaataaagatctccaattagagcctaaataagataagttgaaatgggaaaaaggatgcttccttttgcatcaaatgaaagcaatagaaagcattaatttcatgaaattatcaaaagatgcaaaagagtttcttaaatgaaggtcatcatgttcgctccaaaggttccaaaagaaagactgcaccaaagccaaccaaagcatcttcatggtaggcaattattgagtgatatagggcttggattaaaatattcaagggaaatatatttcagatctcattctagtttggagggatcctaacaattttatacaagatacactaactagctccttatgtaattactctcatgtctctgacaaataccattcttatatagtaatatccctaactaggtacctttcattcaggttgctaagatgtaactgtcctttgtgtgttctttcagtt

SEQ ID NO: 65691 - DNA, 523 bp, Cucumis sativus
  Intron number 1 from transcript Cucsa.320930.2 (locus Cucs a.320930) derived from phytozome v7.0 (chr-ID scaffold0308 0; pos 778230 to 778752)
gaggtaagatgaactaattcgtgacgtgagtctgttttacgtctgagaaatgtaggatagcaagttcggtatattcatatcttcttaaattttcgaatcatatgtattctggtggtgaattctgaatgaaattgaaggataagattgcattaatcatgtgaaactggttcgatatttttgggctattctggtattcttagcgttttaagcaaaaaaaactcagcttcgttgatgaaaaatttaatagtgccatggagtaagtgcctgctgttgatttagtggtagttttgtacaaagctccgtttttttctctgcaaattttattagttttagcaatgatgaactgaataggttgagaatatcaatagagccatcattgacattaatttcaaatgggggcagaaaagaaaagaaaagagagaagaattttgaaattggaatattagacaaaggattgaatatagattgttgtaagaagtaccactgttatctaaatgcctcgctttgttttgtgcttaggtta

SEQ ID NO: 65692 - DNA, 621 bp, Cucumis sativus
  Intron number 2 from transcript Cucsa.378770.2 (locus Cucs a.378770) derived from phytozome v7.0 (chr-ID scaffold0381 0; pos 291382 to 292002 reverse strand)
aaaagtgagtggtttttctattttctgcttcctaaaactgcctacattttgctcggattatacttttttacttagcttagtctgaattctgtaggtctgatcttttagttggagccctttttctggagggtgtcttcccctttcattttattcccaatggaagtcgttgcttttttaaaaaaaacaaaaaacttagcatagcatgaatgtagcatttcctaacgtgcgtgtaattttcactggagtaatggcgaatatttggaagacaattcgatagatgggttttgacacaaatgctcaatcaaatttgttaaggtgaatacaactaaattgtcaaatagttcgatgaagtagcattcagttctaggcctttctttttgtgtctatctattttcagatagttttgattataattatcaggtatctgtaagaggattttattgctagaatttcaatataatttagtgaatttattagttcccagcattgctggatcttgattgaccagcgatttgatgtctcagaatttcaaagcaaaatagaataattgaatagttgcttttttctgtgtccacgacactccaatttgcagatttgtttggcggaagaaaattgagcgtg

SEQ ID NO: 65693 - DNA, 330 bp, Cucumis sativus
  Intron number 1 from transcript Cucsa.325210.1 (locus Cucs a.325210) derived from phytozome v7.0 (chr-ID scaffold0312 7; pos 2646 to 2975 reverse strand)
gaacgaactattgttggtgcaactacaacagatttgttttaatatttattcttattttttatcaattcaaaacgtttgaaaaaacaaggttaagggatttgaaaccctttagtcgagaattccacattgaaaaaatgtcaagtgatcgtctcactttttttttcataagatacctgaactaatttggattggaataaaatcaagaatcgaccaaaactaaaatatgatataagagtgcacataaactaaaggtttaaataaaataatgtcttttgttttcttcaaaaatggaatttaagcttaacaagtgctttcaataattaaacagcc

SEQ ID NO: 65694 - DNA, 728 bp, Cucumis sativus
  Intron number 1 from transcript Cucsa.346070.1 (locus Cucs a.346070) derived from phytozome v7.0 (chr-ID scaffold0344 3; pos 329213 to 329940 reverse strand)
atttctgtctctttcacactcaccggcctttacaggtcggactttttttcttctttgatttcatgcattttttccactctgtttctctactcactgagaatattcaagtttgttggaaagaattttagttcgtttttgcttcttacctcattatgtggcgatctacgttgtttttaatggaaatcatagtgtaattctactattatgattgtgttcatcatgttctggctctgtagctacggagaatttgttagaggtataaggtattttgtttgttgttggagatcattgttattactagcttcaggaagatctctgaaaagtcaactttttttctttattttcttagtcttgtagagagattgagaataggttgtgtcttttacactcggccgattatatgctgtatattccttgtaataatattctgtgctattggtatggttaatgcaaagtggggaatctcaaggtcgaaaccttaatggtgtggttatagttatcttattttaaatataaagggaaagatatcctaaattttttttagattctcaaacacgagtttgtaccaaaaaatggtatactgaaagaacccacagatactgaagagtggggcttttccttttatctggtacaacggtgatcatttgggtgttcgcttaatttactgctgccttttcatctagtatccggagctcttattttggttttgtctatggtaggtgggccaa

SEQ ID NO: 65695 - DNA, 486 bp, Cucumis sativus
  Intron number 1 from transcript Cucsa.312430.1 (locus Cucs a.312430) derived from phytozome v7.0 (chr-ID scaffold0299 5; pos 1838958 to 1839443)
tggcgattgctgcagagaaccaaccccaggagaaggtaaatcgatgaaaatgtgttatagcatggtttccgattgtggtttttgtggtttcgcgttcgtttgttccaagattacgattgaatcgttcaattcctttctctttctctcttcttaaccacgattcttttagattttacaatgatttttgaggtttctgttgtccttctaaacacgattaataaaccttcgcttctcaattcttgtactctctttgatatcgtggtagaaatggaatatttaagatgtcttctggttttagtttcgttttgacggaatttctcggtttttttttttttacaaacacggaccgttgatttttaatcgtttgagtttgtaaattgaataattagggtttcaaattaatttctggtagttgattgttttttaatttgtttttttttttttttgttagattaccactacggaggcctctgctgtcgagaagag

SEQ ID NO: 65696 - DNA, 810 bp, Cucumis sativus; identical to SEQ ID NO: 65441
  Intron number 2 from transcript Cucsa.311930.1 (locus Cucs a.311930) derived from phytozome v7.0 (chr-ID scaffold0299 5; pos 1438966 to 1439775 reverse strand)

SEQ ID NO: 65697 - DNA, 724 bp, Cucumis sativus
  Intron number 1 from transcript Cucsa.383140.1 (locus Cucs a.383140) derived from phytozome v7.0 (chr-ID scaffold0388 2; pos 94879 to 95602)
caccctcctctgccctaccccaccaacaggcaaaggtgatgatgggactcaaccattttttttcatgcgatttttctatttccattatctgggtgattgccctctttcttatgtcgtgcgaagatctaaatttttgttaaatcgtgggtcttcatttctgagattttaatgcgtttctccctgcccgatagttaacattgtaaatgttcgtcgagcgtaagaagtttgaataaatgtgaagttcttcatttctcttttctttccaagtgctgttttagtttcttgttttactgtactgttattttggcttggaattgttgccattgcatttggggacgggagggagcaaccagaggtgcttaaactgttactgttgttaatcgaatgctctaatttgacatggcgtgtgcatttagatgaaagacacaaccttttgattactatgtagataattcctcatctccaatgatagaaaattgagagtatggttggaagttttacaaatttctgctttgtctttagttattgtgagggtggttagtgttaccattatcgttattgggtaatggagcataaatacttgttctggctaatgggattttactctaccagtactgatgtgatatagattcagatagttcatttaatatttagagtacttggattttgaaaatctgattcttcctaagaactaaattttatctcatttttttcagagtcagta

SEQ ID NO: 65698 - DNA, 569 bp, Cucumis sativus
  Intron number 2 from transcript Cucsa.378550.1 (locus Cucs a.378550) derived from phytozome v7.0 (chr-ID scaffold0381 0; pos 150064 to 150632)
tcttctctctcaagactgactgtagtattatcctggtgagtaaagttatgaatgcttaataatctaggtgtatttggttgtttatttcgcttaatttattggagcactgcagtgagtacctctttatggtttgtatttgatagttcaacttagttttcccatcggatgcactttgtttaccttgcaatcacaacgaaccatttgatataaaattaattagagccatgtaacgcttcgctttaggtttgattcatttggatgagtgcttctagttttctttaaatgggttttagatatctcaaatgatcgaagaactaagcagttctcaaacggatgaacccatgtagataaacatagtcatgatttgcattcttttgggtaagttaagtcactaagagtttcgagaacgtcagttcaggaggtacactgctttgtttatatgcaaacaccgctacggttgggttctagctttgtttatcttttcctttgttattatgaaatagtaaacagcttcttacttctatgtctccagttgtttattgatgtaattattgcaccttttttgcagt

SEQ ID NO: 65699 - DNA, 867 bp, Cucumis sativus
  Intron number 1 from transcript Cucsa.343200.2 (locus Cucs a.343200) derived from phytozome v7.0 (chr-ID scaffold0335 6; pos 5463366 to 5464232 reverse strand)
accctacttcaggtttctttcagatgcttttttagatttttgacttttttttttcctttctttttttctcttatgctcttaattcattcgtactgtgaattccttgatgtctaacgctgtgtctctcgatggaattttctaattctgggttctgtttgcgtatctggtgtgctgatactagtaattgtgttgggtacatcgagctgtttggtacgaagaaattgtttgcttatgcgttatgtgcaattatctcagtactttgggatattttttttcattgttgtgagaaatattcccgtgttgtcatactgtggtgggatatgctctcccttgctcgggtttggtagtggaacactttggaaagttcactttggtgtaacatatgacacgccgctattaatgtatggctctaggtggtttctagcttaaaatatctttctctggggtttaatcaatctcgatattggttttcttttacacgcttcagtgtaacgagtcttcataaggcatttattttaggttatgttgcttcaaaaacttaaggcagcctcagggttttttttcttgaagagatgagttgcaagttctgtgttaaatttttttaaacaaaaggtagggatgtcatgaaagaaagccatgtagtatgaagcattatgattatgctagtgtgcaaaaagatcgtgtccgtatatttattaatcagagaaggcattgcacagctagatgaaaacaccgacatcagattcccctttttccatttttatgctaatcaatgcacggtagtatgttatgtatgacacgcacttgacattttttagttgttcataacctacccttgtttataaataatgcaggaaaaaggttcta

SEQ ID NO: 65700 - DNA, 978 bp, Cucumis sativus
  Intron number 1 from transcript Cucsa.327910.1 (locus Cucs a.327910) derived from phytozome v7.0 (chr-ID scaffold0315 9; pos 208920 to 209897 reverse strand)
attgctttgtaagatctgcttgattttgctttttggagttttcttgtgcttgattttttgatttacttgtgttctgtgttcatagggatgtccagtgttttgtagatctacttgtttgtttgattgttgcaatgagctttttatttcggggggttgttctggattttcatgttctgacttcttcatgtggttgttcaattatgcttttcctttcattcccttgattctttttttttcttttctgaatttgacaagctccgtttgttaaccctttgtttttttttaaataaagcttataaacactaatcataccatgttttcattctgttgtagtctactctttgggagtgaatattcaaaatccaagttaaggtttgacaactataaaataaaattagtttttttagattttggatgtaaattcaaatgtgttgtgaaaactagtatacttttcaaaaaccaaatagttgtcgaacaggtttcggtcttagcgattgatgacttgtgtggtcaacccggttctcttgcaaaattgttaactgctgttgaatttgtatatgcgagggagaaacagatcttgttgaaatgcttgtttgtttgaaacagttcttttgatccaacgaaacataagcttctttaaatgagtcccaagcaaccccttttatcttctggtcaatattagtagggagaatgaatttactttaatctttccgtttaagcagcaatagcatttggtttaatggttattttgtgaatgacgttggccttctataccaccctgtggtttacatcttttgttaccgatgagtggttgagaagtacctgttgctgactgagagaatgggatggaagtgatttgtttgcacctttaaatacatattctgcagctctgtcttgatctgtaggtgatcaacatttgatggtttcttgtaaatccgttattgcaggttgcaaaggacccctcagacaaagatatca

SEQ ID NO: 65701 - DNA, 969 bp, Cucumis sativus
  Intron number 2 from transcript Cucsa.365090.3 (locus Cucs a.365090) derived from phytozome v7.0 (chr-ID scaffold0361 1; pos 2596091 to 2597059)
attgtttgggaggtttgattcttcttaccctcaaattatgttggtagtatgtatggtgtcattgatttgcttgtgaactttgatggtttagtatatcatttccccttgcatattaaaatatccatctcttgtatagagtatttatatcatttcctggtgtttagttttaggtgacctttgatctcattttatcttaggctcgtctttagagatgtgacttagagtactgtttcattgaaaatcttctactgaacgatggatagcaggtaaagtcaagtttaatcttaagatatcatctctttaagttttttatttatgagtatgattaaatggttaattttgaatgtcctcaaaaaaaaaaaaaaggttaattttgacatgcactttgggttttggaatgaagaagaagaaatatgttttgttcttatttctccgccccaccccttaactgttatgaatttgtggtactgctgtattcgccttttattttcttttttgaaggaaatgctgttatttcttttcctttaaatctataagtgtacaagtgtatatacatattttttaacgtacaagttgggggtgggggcatttgaatcttgaacctcttggttctcggtatgtggaaatgtcagttgagtcaaacacttgttggcataacggtatatttttattaacttaatatcattattaaatattaagttttacattgatgctattattttaaatataaactatggttaagaaataataaatggatccagtttaaaagtgaatgtttaactctctagattttactctccaatgctcttgatatttctcaagtcaccttttgatgaatttaaatgtcaacttctgctcagtaatattttacttttctgcatttttttttaatatgtttctattttacctctgaataacagcttctccttttcagaattttggctcaaaagaagacacaatattttgtgg

SEQ ID NO: 65702 - DNA, 440 bp, Cucumis sativus
  Intron number 1 from transcript Cucsa.341040.2 (locus Cucs a.341040) derived from phytozome v7.0 (chr-ID scaffold0335 6; pos 3421126 to 3421565)
ggggccctcaggtaccatctctttaccagacagaagttatttgttctattaaagagctcctctgtttctctttgcaatgctgccattcttgtttgactgtacagtttttttctttaattttgtatatgtagaatttagcagttagttttctatcttgtattattttctcttcttgagcctagtctgtagcacagcctaaatataaatttgtagaaacctatttaggatctattctttagaaatgaggacttgaagcactggcgaaagcttcttcttcctttttattatatgcttaagttatattacactgcacaatcaagctgtttagaacttttgatgtgtcttgctagcagtagatgattctcgtgttctatgttgtattctgaaataaaggttttcatgtaggttgctgattattgtcaagaacgcatacacttggc

SEQ ID NO: 65703 - DNA, 561 bp, Cucumis sativus
  Intron number 3 from transcript Cucsa.385410.3 (locus Cucs a.385410) derived from phytozome v7.0 (chr-ID scaffold0390 4; pos 732734 to 733294)
aacaatatccttcctttcaaatttgatattttttatttgccctctagacgataatgtgaagcctttgaattgtttgataaattaacttgacttgttaccttttattgcctcgtggccaaccctaaaatttgaagtatttaattagtattttggaattgttttcttttagttgattaaaaatcttaataaatgcatctttaaatcaattatcttagtaagaaattttataattgtatcatatgatgttgaagagactataatcctatgatcatgtgttaattttataatttggtttcctagacctgtatctataaacttgatcatgtattacacctaaattttataaattttataaaagtctaaagatggcatttaagagactataatcgtatgatcatgtattaatacgtatggatagttatctaagttagtatggtcaagtattggcagtcatttagaaaaaacattgatgtttttacaatggcttgtagtatttctctattttcagtagtttgcaacttacattggtttccttgacctgctcttttctccttaccacgg

SEQ ID NO: 65704 - DNA, 713 bp, Cucumis sativus
  Intron number 1 from transcript Cucsa.333900.2 (locus Cucs a.333900) derived from phytozome v7.0 (chr-ID scaffold0329 0; pos 49600 to 50312 reverse strand)
ggtaatcacctatcagttttatctattgcctctgtttcccaatgccgggggtctctttttagcttcttgattgttgaccttggtggggattctgttttttggattccagtgttttctttttgtttccttgtagtttcttgaatctttcttcttggaaacgcagtttcttgaatctgtcttgttggattttttgtttttatcttagagtagtgtaaatggattcagtattttctcactgttctctgttcgaatcctgaattccatctttcggtgtgggtataattactgtcatttctgatttctctcgctcaagtctgaaccaacttacctttcttgcttttgcttactagtttgtattttgcacgttttttaattgagtcgctgtctctagtgttaatggtgagaggcgtcagtctttcttcctcaactgactgctgctatatattatctttggttgtgttttgggataaattgtggcttgtttgcttgctcttgtgtgcccaaaagtttgtttgtttgtttgttttctaagttgtattttctaaaggatttatcttagttttattttgattgatctgctgggacatgcgttgtagttatatatgtttatcatgtttatgctgcagtgtgggggcatttttcgctgttctcttactaggtggttctccttttctgtcacttttccctcttcaggagcgagataggaacatttt

SEQ ID NO: 65705 - DNA, 178 bp, Cucumis sativus
  Intron number 1 from transcript Cucsa.321620.1 (locus Cucs a.321620) derived from phytozome v7.0 (chr-ID scaffold0308 0; pos 1429741 to 1429918 reverse strand)
gcttcccttcaatcctttgaggatcaggtaagcaagcaagcaaacaaacatacatacatacatacatgttctcttatgaaaacaaacaaaatgaataataatgttttgatttcttttcttttttttcctttcttaattgttagagtaagctgaaagaagagattgcaacagcagaagg

SEQ ID NO: 65706 - DNA, 580 bp, Cucumis sativus
  Intron number 1 from transcript Cucsa.370450.1 (locus Cucs a.370450) derived from phytozome v7.0 (chr-ID scaffold0367 8; pos 176091 to 176670)
caaatccttcaatcaaaaccaagctcgatttcaaggttggttcattgttttctgttctttaaatctctttttctgtgaatttttttttctttcgattttgatttctgggtttctgggatttcttatgtggggtttgagtttgttttctttgaaacgatccttttttgggtatttgattagttttgctcatttaagctggattccggttttacctatgtttggttgtcaattaatgaatgtggagtttgtgtgctgttttcttcttttgttttccattttgttaagtttgttcgtcaaataatgaaggcattgaaattctcttgtgaagattgatgaattttgaatccccttttgccatccctttcattggatgatttgaggttcaattttgagtttagttaccttcctgcttggcttattcttttcgtccatctctctctctctcgtcttctttttacatggaaattttttgtttgaactgagaaaagcattgtacaaagctctgactatgctacaaaaatggtgaatctgatgctgtgaatattacaggtaattagattttagcaaagtaacaaagggg

SEQ ID NO: 65707 - DNA, 525 bp, Cucumis sativus
  Intron number 2 from transcript Cucsa.345830.1 (locus Cucs a.345830) derived from phytozome v7.0 (chr-ID scaffold0344 3; pos 130901 to 131425 reverse strand)
cttcctcctctagacgccgtggacggccaaaaagagtacgccacctcatctctcagcttcaaaccaattttctaataaacgttttttcaaaaaacacttcattaattaatattttttttacctacttgaaaaatgcttctcttgggggaaaatcaaaaatgtttttttcttcttcctaccaaatcaaatcttctattataaaaaaaaacaatttaatgtttttttagtatatataactttccacatgaggttttctttaattttagtcaataaaaagtacttttgagatgaattcattcaaaatctattaatatgattaaaaagaaccacttgagaatagattatttaacataagtataaatatttaccttttataaaaaaagattaataaattttgtttcgcagtagttttctaaaaattgacgtaaagagttggaaattagagtaaatattatattatattaacgtaaatgataaaaagaattactttggtaatgagtggtaattattacaggattatagcaa

SEQ ID NO: 65708 - DNA, 787 bp, Cucumis sativus
  Intron number 1 from transcript Cucsa.340310.2 (locus Cucs a.340310) derived from phytozome v7.0 (chr-ID scaffold0335 6; pos 2787315 to 2788101 reverse strand)
agcaatttctacttcgattcagttcttaaaataaggtaacgttccacagggtttgtgttgttgaattgaatccatgccatgttctgattgtgttctgttttgtttcggattatttgatgcatttttgccctacctcatctatgtgttggaattaatgaatttcgattttgtcatttgaatccgggttgttaatcttaatttgtgtttaggatctcattattggtgggttttttttttttttttcctcttcttgattgcttagttagggaggaatctgtctcttttttattcgtatggattttagtatagttcttgctaattgttatttcatatttgtgagatgataacgccttctgtcgtgttttgaggcatggattgtggagaatttctattttgttagtttcgtttattgtatttcctttcgacttaattttaaaaaattgaagacgaaaaactaaatggtcgctgaatggggctttcatgattcttttggattagggaaagacaggcttagacaattttttgactacttataattctgagtgcaacaggaattcaggtcgaattttctccctctatatgcttgtttataattacagatcaagaattttttgagctacttcattttatctttttctcccttcttcatgcagtttgttttgttttgctattttcagttggtgactttctctgctttctaattgtttaggtgtgtgttttctattgaaatttaaagggcatttgggaaggggatttcaaatttgaaattctagtgaaattcatcaag

SEQ ID NO: 65709 - DNA, 1010 bp, Cucumis sativus
  Intron number 3 from transcript Cucsa.311530.1 (locus Cucs a.311530) derived from phytozome v7.0 (chr-ID scaffold0299 5; pos 1111872 to 1112881)
ccgcctgcaccccccgtcgtatattcaccatacgggttagttcattttattattactattattcatttgtaaaacaataaaagtcttatacattgattaccattaaactaaaattactttagtcaaagtttatttagaagtagggtattgaaagttgaaattaaaaatcaaatattgggattattgattgtataaagagaagattatgtgagtgtatgaattgggtgtatgatgagagaaacacatggactcatgtgggactttcatgcaaccttttccttatcttaataattattataagtgcatatacatcatcagtataattcttgtttcacctcttatttataatatacacacacatataactttctaaagtaaatggtaaattttccatcaccggagaaatttaattttcagtgaaagtggtccaatccatcactagaaaattttcattattaactttgtttgttggttgtcatgaacgataacattaaaatgctgttgtttttctgaacccagataatatacagcagtttttcttttttcgtagactttgtttattcaaacacatttggaacgttgagtttgttagtatagagattaattagtgttgatcttagttaaaacaagcttagaaagaaacgaaagaacagtagtgtgagttattgatatttcatttcctgaggttgtgaggtttgaataagaaagtttgagttgttgtgagttattgatttttgagctattatcctcaatgtggtcataatgagtcaaaaactgtaatcactgtgatttgtcagccaattttttttacctgaactactgacaatgtagaaagaaaccaaacagctcctcccccacccaccaatcaacaaacccaaaaccactacacatctgtacaactgacccaccaaacagaaatcatgcacatacttcaatattattttactaatcaatttgggttttgttttgttttgttttgttttgcagatacccagcttacagtccagatt

SEQ ID NO: 65710 - DNA, 1033 bp, Cucumis sativus
  Intron number 1 from transcript Cucsa.359580.2 (locus Cucs a.359580) derived from phytozome v7.0 (chr-ID scaffold0358 8; pos 460042 to 461074)
aggtactgtttgagttttgggtattgcttaattttcaatcgtagaacttacgtaaatgttgctttgaattttgggggatttatgaggactttttgtgaaggggccgtgtaagttgggttgcctttatcttcagaactgtggaatatgagaaaaatgcaaacagtttagattctgaatttggcacttcaatgtttgaatgggtcctctcctcctcatttccacttcctggtaaacggcgacttgttgggtagaatttatcgacaaataagaatctcagtagctcgttttgtccctctcgcgataacagttagttttgtcttgtcaagtccacgtcgcaactcacccaacccacgttgtcgaaactgataattcttcatgtttgcccaactatttcaatatattgctaccaatggattttaaattacatgtctgagaattaaagaataaatatgctcgaccaactatcgagtatggatgataatgccggttggctgggtcctcattcaaagagagaaattttcacttttgcgtttgttagttcatcttcgtttttcccctgtcattcaacaacttatactatttcctactcacgagtgactacacaatatcagttataaccgtgcgtagttattattgtccttcgcaatcataatttataaccaaacttctctggattagctgtactatctaatctatccacggatacattttggaagtgatatccaggtcgagggaaatggccacaatacttataattttatgtttaccaaatcacttttgtcatcgaccttacttgaacaaaatctattctattgggtataccaatgtgtcctgtcacatagtgtattcaaaaccttgattctgttttgaattttggggtaatccctgcacactgatgttcggacaattttcaatgtagttccatcagcctaagagtattttccttcatggaatttttcattgccatcttttgatgtgtattcaatactcttgtgtaggacgagcttgcaaagttaaaatctgaggtggtacg

SEQ ID NO: 65711 - DNA, 848 bp, Cucumis sativus
  Intron number 1 from transcript Cucsa.360370.2 (locus Cucs a.360370) derived from phytozome v7.0 (chr-ID scaffold0358 8; pos 1047106 to 1047953)
gcgtcatcaaagccctcaccgtaggtattcttctttccctttctctcgttgactctctccaggactcggaatttcgaaactacgcgtgattgcgaattcattgtatgttcttgctctttttatcgctttaatactaagtattttacgttcttcacctttcttttcggaatcgaatcttttctccttcgttgtttatggtttattttggctgattttttgcgtttttcctcgtgatgttgctgttcgatttttattagaaaacttggatgaaggaacttgtgttgtctaatgtgctactcttcgctttacatgactgtcgccgtgaaattttgaatctcagtctagttttctcctgtacaagcattgaaatgtgttatgaattttgttcctgaatgcggatcgatttttgtgtacatgcggggctgtcgaaataagagagagtattggtattgtagccgaagagctctcttcctttgcctgtaattcttaaattgttgcgacttatttttgcagtatgaattttgggtgatttgctgcaaaaacttacgagtgtatgtttctttatagtttgttcacgacttttataacaatggactaatttgtgtttggatgaagtacttgataaatgtagaatgtaaactccattacttgcgttgttcaggtagtggagagttctttattagttttatgctgtccatattttatgtcttgctgatttttttgttcaagaaaggtgatggctcgaggctttattcatgtaaatttgattgagagctagaaacgcttggttgttttggttacatttgggagttgtgaatgtctaattcttttcagttttatcattgcag

SEQ ID NO: 65712 - DNA, 899 bp, Cucumis sativus
  Intron number 1 from transcript Cucsa.352120.1 (locus Cucs a.352120) derived from phytozome v7.0 (chr-ID scaffold0353 3; pos 78782 to 79680)
gttgccacgcataatcaagctgctgttctgtcattttcaaggctaggctatggctaggtagggttgacatgccaactggtgtgttgaagtgtgtcagtgttggaaatgtgtctgacactgacacttggccatcttaggtgtgttggtgcttcttagcttgtaagagatgctaagttgatattggctagatatcaactacaattggttggcctaaaggttgaggggaaagttgaaaaaggtaaaatgattatggagccataagttcaaatcttgtggtggtcacgtactggagagtggagacgttaatatccttagtctattttttctctttttacaatcaaaccaaaattttaagcttcatattgtctcaacattaacgtgtgtcactaacaatacacacaagcacacacttattattagttggatacctttggggtttaagaaatcgacaatcaaagaaacctagtaaacgtaaaccatagagaaaacaacattgagatttacttggtttgctaatgatatgttagctacgttcataggcaaacagggagaaacattttattaatagagaaaatatcaaatattacaggttcaaggcgccagggagaccccttgcttagttgtttggagtgccaaataaccgatttgcttcattccaatatgttagaactttctcatgcaatagagttgaactttcttatgaccatcttgtaattgatatttaagatgccttgacatttcaattcgatatataagatgttacttacatttgactagtaataaaacatttacaaactcaaacatttcaaatatactatatttttgttgacctgaaaattgacccataattgtatctttgtatttgtagcttaaagcatcagagactggaagcagttttg

SEQ ID NO: 65713 - DNA, 594 bp, Cucumis sativus
  Intron number 1 from transcript Cucsa.366680.1 (locus Cucs a.366680) derived from phytozome v7.0 (chr-ID scaffold0362 5; pos 221058 to 221651 reverse strand)
ttgcaattacggtacgatttcatctcttttttcattttactaactatcttctttttatataatcattataacatgatattaatttttaataagctactcaaactatatttagtaaatataacacaatgcaaatgaatttgggaatatgttaatatttatactcgactcttattcatggtctattgatcatgcatgatagaccataccactaataagagcttattacttctttattttattatatttgcaactctttcatatcgttgttagacacttaatttatcttcatcctaaaagtgctacccattttaattactttattaaatttgcctttacctataaacttaagcttatctagtaagtaaatgatttataaaattgctttggaatcttctttgaaagctacacagaaatggtctttaaaaactagaaatttgacaccttcaatatccaaatcatagataagaattcgtgtgaacaaatagactacaatttcaaaaataaaaagcgaaaaaacaaaatgattatcaaactaaaatttgattgcatggtatatatgcaggaggcaagcatagttggccagaagttgtaggt

SEQ ID NO: 65714 - DNA, 376 bp, Cucumis sativus
  Intron number 2 from transcript Cucsa.327720.1 (locus Cucs a.327720) derived from phytozome v7.0 (chr-ID scaffold0315 9; pos 73674 to 74049 reverse strand)
tctctgggattgttaaaccttctcggtactctccattttcttcccacccaaattcttcgttcaattaaaacaatttacgtttagtttttttttaaaaaaatagttttagaagaaaaaatatcgaagaacttccaaatttattttttttaaaaataaattgactctttttataaatatttttttctatagtttttttataggcaaataattcatgtttgaacttgtttacttatatcaacttgagtataaaattttaatttttatcatttttgtaaatgttgctaatttcaaagaattagaacacgtttataaaataggttgtacgcacatttgtatggaataggaattgagtttgtatgtttgaattgttgaaagg

SEQ ID NO: 65715 - DNA, 434 bp, Cucumis sativus
  Intron number 1 from transcript Cucsa.383220.1 (locus Cucs a.383220) derived from phytozome v7.0 (chr-ID scaffold0388 2; pos 209108 to 209541)
atctcgaaggaggtttgtacttgtttgttcgttcttctgtatgctttgctttagaggttttcgttatatttgtgtgcattctaaaccaatactgttgtgtctgtgaccattactttctgcagtcttcaaatgtatgtatctacatcgtttgtttattgttacatgacctgaacaggtttcttcatcttgtcaagttattattcagtttatagttttatgcatttttttttatcggcagtgctgaaaaataattgggatgggcattgaatatatatatatttttattggcttgacacatattattgatgctgaacgagaatttatgtttgtggggttttggggttttactgttcaatcaaatcctttagtaatcagtacaaatattgcaatatactataggatttctttcccttgaggagattgacgaagctgag

SEQ ID NO: 65716 - DNA, 1028 bp, Cucumis sativus
  Intron number 2 from transcript Cucsa.310510.1 (locus Cucs a.310510) derived from phytozome v7.0 (chr-ID scaffold0299 5; pos 306763 to 307790 reverse strand)
caaagacacaacctccatatacttgcggtgatttgattttcccttccttctgttgagatgaatttgtaagaggaacttgacgcatttgttatcgttgtcaaacatttcagtgcgttatttgctggaagtcggtagtaatcgtaaggaaggggagatggagatagaactggtggagtgctggacacttttcacaccagtacttcacttaacggtttaagggtagaccatcggattattattattttataaattacgcaaattgaatccgttggcttaatcgaaatgaaaggaacaaagtatgattgatttgttgtgtgaatcggagcataaaattggactcttgttcgtttgatttaaatgctaagagaagtcgtttccatgtctgagagcaaggcaatggatatttttggttcattgcaagtctttggctgcatcttccgaaccctgaacaatggatggtttagaaaagtttttagaggtttcaaatttcaatttcaaggacttgcgtgtcactttaccatgggtagtttattgcttgaaatttgatttataggacggtcttattgatgtcccgatcatgcatcaaataatagagagatttaccttgagatatattaaaatagtttagatctttttttctttcttttcgttggagggtgggatgtcattgggcatcctcctgacctagccaaaaaaattacgagagtgaaaagaaagaaaaagaaatggccttacctggaacacttcaatagaaggccagaaacctaatgctatattggatcattacaaacttactcggccactcaaataatcctcttctcattagccatatattagaaaagttgttcctgtgccactcattagcccataaaatatttggtttccctagaatgaatgaccatgcaaccaaaattaccaaatagttgatgtgatgggaaagaaccaaattattctgctatagttatttactcatttttgttttgtgttgtacagagcggttttcaattctttcatacaacatcttagct

SEQ ID NO: 65717 - DNA, 935 bp, Cucumis sativus
  Intron number 1 from transcript Cucsa.363190.1 (locus Cucs a.363190) derived from phytozome v7.0 (chr-ID scaffold0361 1; pos 785989 to 786923)
tggatattcttctttaaatctaaaatcacttccaggtacagttggtcgactaattttttatttgggtcttttcgattttgatttgttcaacttcgattttgatttgttcaacttaccatctcattcctattgttgtgttggctccaaataaactggagggttggcagggaaggaaaaaagatcggctttattgtcgataaatgctctaaactgttgttgctgtttaagatttttacctaaatttccatcaacttctctttctcgccagccaacttctcggtcggttgggttgtcgatgtttcatagttttggcctttgggaatttagaaattcgtcccatcttcgcagtaaaacgttagatgtttactacgatctttagatgatctcaaactctgatttctgtcattcaagcattcagtagcgagggagtgtcacctggattgcaatttcaatataaaaactattgaaactcatgggatttgaatataaaaactattctttaggtgaaggatcagtttgtctataaatataaaaactatgtctgttagagtatttatataatattaaatctactttcgcttgtccttttaaattcagtggtgatttaagatcctatagaaccaggaattcttgtattctaactcctgtaaatttggctttcattctctcacatcaccttaagcttatgggtttattggtgatttaataaggttgtttacataggtttgatgagatttttcacgttaaagttgaagcactaaattattacaaattttaaaatatattgatcaaatcactccaaagaaaagattagagattaaattgttactttaatggaaatgttaaattgttactttaatggaaatggaagtgtagggatcaaatgtgattttaacctattgaatcttacttccatttgtttagttcttgaagaa

SEQ ID NO: 65718 - DNA, 956 bp, Cucumis sativus
  Intron number 1 from transcript Cucsa.322290.3 (locus Cucs a.322290) derived from phytozome v7.0 (chr-ID scaffold0308 0; pos 2066064 to 2067019)
tttggagtcatcgctttgctctctgaaaaatccaggtaattcattcttgtttcatgaacaaatcatttgagagtgttaactttttcattacttttgtttagatcagttgggtttagttaattcagttactttgcttgagttagttttgagaagtatttttgaaaacgtgcataacaaattaaacagactataacttagtttttgagttgagtggtgggtttaatagaaatatcaaattgatggtggaaagtatgaggattttcttttaaggaggagtttaagccggcaaggacgagtaaacatggcgtgtatagatgtatctttgctgaattggttgaataaaagtacacgaacttttgctcttgatcttgtagtagtttgtttacatcaggaaagtgaataagtgatcatagattcaagatgaagatatcatggtttaggtctgtgaaggatcagtgtagctttcgttctgttttcatacaatcaacttcacatattagtaaagtaacgcatgcatgtggagcaattgatatgaagatatagcctacagatcatataagatggaagttctgggatgagagcaatagcaatttctatcacatcatattttaagttgtgaccgttcccaaacctcgttggaacgacacgtttttcgtccctggtttctagtatttttcagttcataagagattatcatccagaatttgaagtgaaatgtggacaaataaatggttatactgtatagaaggggacatgtctaatttgcataatcttttaatctagtattcaaatattgaattgagttgttaactatctgtttctaaatttatgtgcagtttatcttttactgttttaaattttaattactagtttttttcttaaaaagagctgattattcaactctcacctctttctgtttagatttgttcgtctaccagacgaagcgctttgtctga

SEQ ID NO: 65719 - DNA, 532 bp, Cucumis sativus
  Intron number 3 from transcript Cucsa.391810.4 (locus Cucs a.391810) derived from phytozome v7.0 (chr-ID scaffold0406 2; pos 187370 to 187901 reverse strand)
ctccaaggagttggctgaggtttgtcattctccataatgtttttgaagttccttggagaattttatttttcttctaatttaggctacttgaataagttcaaaatattttgagagtgattttgtaatggtgaaattacttttgtcatgttcaaaagtgctcaaaatttggttttaataattcaaagtctgttttgattgtatgaaaatcacatttaaaagtgtaaaatcaaattctaagctgattttgagtgaataaagacatatttcctggtgattttaaatacgaaaaaagtgatttaaactatttcataatccctcccaagcatgcacttaaagcattatagttatacttaatttctatataaacaactcgaaagaattttccataagccaattgattgtttgaagctttaattacacattctccttttgatatctttctcacccatggttatgtcttgttgtttctctattaaactaagcttatattattacaggaacactataaagatcttaagggaaagtcattttt

SEQ ID NO: 65720 - DNA, 813 bp, Cucumis sativus
  Intron number 1 from transcript Cucsa.340100.2 (locus Cucs a.340100) derived from phytozome v7.0 (chr-ID scaffold0335 6; pos 2613123 to 2613935 reverse strand)
gtggacgatcttctctctcaggtaaattggtgttctggtattgtgtcgtaatttaagataaaggtgcaaggaatagaaattttacggattcagtcgttgagttgcttatgaatttcctcaaattgctcataattcatcattcgttggttagttttcatgttgcgagggatggtttttgcagttcagttttccctttgtttgtagattgggtggaactgtgtgtcgaactaattattccttcacttgcttgagaaattcattggttatatggctttagtctttcagtgtaaggtctaggtttggcaaatcaatcaaaatgctcactattaatgatgtcgaagatttagagaatatacaaatctgatattgctatcattgcattgccaagtttgccctaactgctatgctactttacatccaatttgttactcttaccgaaagatcaggagaggaaattgtcatttccgctaatgttagtatttctcaaccattttactccaccgactgctaaaaaatctgaaccattatacttataatcgagagccctatagtttcagtttcaaggtaagggctcgagagttgagggagggtagacatatccgcaaactgaaactgtagggctttagattatgagtagaaacttcataattgaaaattttagaaccttcttgtctcgaggaattgggcggtagaataggaaaattgaaggtgtcttgttgtgggtgaaacctcttttgaacctttttgctggtcactgcctacttttttcgcctatggctgctgaagtggttagcgatgtctgaagtgtaaact

SEQ ID NO: 65721 - DNA, 676 bp, Cucumis sativus
  Intron number 3 from transcript Cucsa.363950.7 (locus Cucs a.363950) derived from phytozome v7.0 (chr-ID scaffold0361 1; pos 1551426 to 1552101 reverse strand)
ctagtaaattttgaagcacactttacatttttctaaattacaataaatgtacatgaagtatgtgccaaaagattggcattctgggaatctgacaggaagatgagctttaatttacctaagaaggtgtttgagaatagaaattgatttagggataagatacagtgcgaaaaatccattctccctacgaagagtaatgaattaaatctgatatttctctaaaattttgaaataaattcataattgttcttattttcaatttgattatcttcaaacgaaggaaatggcctttctggaggttcattgcgagtgtttggacacccccgtttcttctattcaattactgtcagatttcagctacatacctttttgtttgactagtttaacctcaacttctcatcatctccctattttaattcaagccatttctacgttcaagagatttgtttccttaaatatacaagtatatctttctgagaaaaaaaagctctatttgaccgtcaaatccaatatccaaattccagagtcccattctctcagtctctttacctacgatgcataacgttatgcttctctcctaatatgagggtagctttcagctgtataaattgatgccaaaattctatttgtttgtgtacttcaattcatcgacttatcattaagttgcttcaaactttag

SEQ ID NO: 65722 - DNA, 617 bp, Cucumis sativus
  Intron number 5 from transcript Cucsa.348920.3 (locus Cucs a.348920) derived from phytozome v7.0 (chr-ID scaffold0348 7; pos 323798 to 324414)
agttgcctattgctgcgattcatccaggtcaatagatactttctttagatatacattaacatcacttgcctcggcgttacattatgatgttgtttggttgaacatacttgttctaatttgaggcaagaattgatattcaataggtgcttggtagttatttgttctcaaatccaattggttcaaaattcaaatcaagcgttggaattcaacattgaagttcatttgaagacagccattgtgaaatacatctgaaattttagatgattacttcattgttgtaaattgtaattaatataagttagaaatagaaatgttaattttaaggtattacgtaaagataaaaaaaccagttgagtaaatggtaaaaattacttccaagaatgaatgaaaaacttgaactattgaagtatgaagagtgctagaaatgaattgtcatttaccagtttgaatcccctataaggatgaactcatttttctaatgcaatcaatcattcagaagtaatattctgttgaatcttcaacctgcaggttgtttctaaattctaactgctgaattattttcctttgtgaaaactttaacagattcttcaagaaaagaagattattccattgcgaat

SEQ ID NO: 65723 - DNA, 381 bp, Cucumis sativus
  Intron number 2 from transcript Cucsa.391930.1 (locus Cucs a.391930) derived from phytozome v7.0 (chr-ID scaffold0406 2; pos 265133 to 265513)
ttgcagcttctcttgttgatcgtaaattcgaccctgtacgtttctttatttattgattcttttcaaatctttcattaactagcataccctctcgtgaagaattttttgtcgttgtttgttgccatctaaattgttaaaaaatttgagttgttgtggattcatagtcattgggagttcttcgttcacaatattttcttttactggccttacaatttcttcttttttgctatatctctactgggttgatgttttcctgttgggagtttatgtattttacttctcatttaaggtcaacttaaaccctacatcactttaagtgcactaaatcacttcctttcctttttttttcataattgcagttattagctgttgcccgaaaaa

SEQ ID NO: 65724 - DNA, 584 bp, Cucumis sativus
  Intron number 2 from transcript Cucsa.339400.2 (locus Cucs a.339400) derived from phytozome v7.0 (chr-ID scaffold0335 6; pos 2016256 to 2016839 reverse strand)
tctttcgccgcttctaccctgtttacgagcaagaggtattcttcaatccctttttctgtttcctctattatttttaaatggtttaatattttttcaattttataaataaaatgtttaaatcttaggttaaattatgtttgcgtaattttacttttaataaatcttagcatggacgtgttaattaacatttttactataaattaatgattttggacttaaaggtccataggaaaaggaaacagtcttgaggtggtaattgttccacgttggaagatttgatgtttagcaaaggtatatatatatattttcattactttttaaaggtatgcctactcgagattgatacaaaccatattaagaaaataaaagaaaacaagcttagttttcaaaatctaaaaacaaaaagaaattgcatagttacaaagggtacctaagatttttccttattaagcttaaatgcaaaattgtagtaatgtattgtgtatgtactcttttttcttcttcttttacatatttcaattttaactatactttctcttcttcatgtagtacctataaaggacacctcacaacaggaaaaacat

SEQ ID NO: 65725 - DNA, 600 bp, Cucumis sativus
  Intron number 1 from transcript Cucsa.341110.1 (locus Cucs a.341110) derived from phytozome v7.0 (chr-ID scaffold0335 6; pos 3494601 to 3495200 reverse strand)
tttcatccattgggctgccaccacccttcgatcaggtaacctaacattatagaaaattgaaacaaaaaatttcaagtgaatagaagttgtttgttagcgtagcagctctttgagttttatttggcggttatcgaaactccactactcgtctgattaataatcggcagcggtgacagaaaaattcagcctttagttttttattctggctaatttcgtgttcatagcttaattttgggtagttttttgtttgtttgttcgtaatattgagtgtcttctttccaatggtggctacttttacattacatatttggcttgtgtcgttcgtccctaagaaacatttgggttggggaaagtttaagaactccaggcactgactgcagttgtttggtgaactatttctcctcaattttgttccgagaaccgctcggcaggattatttttgtaattttaagtgcttctttttactgttagatgtcatattcacataaatttattgtagtttctaaatgctattgaatcattcattacgtttatgttcttaaatttgttattgtttcttgctcagaatttttttttcaagagtttccagtaacctgcatt

SEQ ID NO: 65726 - DNA, 888 bp, Cucumis sativus
  Intron number 1 from transcript Cucsa.322860.2 (locus Cucs a.322860) derived from phytozome v7.0 (chr-ID scaffold0308 0; pos 2465286 to 2466173 reverse strand)
tgtggaggagggagacgaaaacgaagggccaattggtatggggatctcatcaaattcaatttgttttttaaactcattttaaagatgaatctggaaaaatccttctgcaaattgcttcaatttgttgtggaccaattaattaccctgaaccacacgacgttgaatcgaaaggttcgtcataagaaatgatacgaaccccaaccaacactttttgcttcttcttcttcttcttcttcttcttcctttttaccttttctttctccatcattttcaacccaatccccctatttgatttactttccctaaaccctttttaatttgtagcgataaaacaaaaaaaaaaaaaaaaactaacttccaaacatagctttaaatgcgagttggttgatctccttcttcttcttcttaagcgctaagttttttcccttttctttgaaaacccattttggattctccattttggaccgacccttctcatttccatggatttcatagcgaacccgtttcgcttttcttcatcttcctccccttcctttgggaatctctttgagagagttagagaaatttgttgctatgcggtttctgcgattcttggcaatatcttgtctgcgatcttcactttcttcttcgccctaggtttgtttcttattgatcttgtgttattctttgcatcatttttgagtttttgaattctgtgtttgtgttcttcttgttaattccttcaatttcatgatattcatatgaatggtaacaaattggggaattgggtttgcctcaaaagagaagaagagaaaacattcaaacaaggggttttgataattatttgggtttggaggaaaataaaattgttctttgttgcttttggcagttgggactttgcttggagcc

SEQ ID NO: 65727 - DNA, 804 bp, Cucumis sativus
  Intron number 2 from transcript Cucsa.320570.1 (locus Cucs a.320570) derived from phytozome v7.0 (chr-ID scaffold0308 0; pos 345406 to 346209)
agaggaggggatctcgtttggttagctggcaagttgttgagttccctgtgaatcaaggagggctggaaattggtaacttaaggttgtgtaacaaagctttgtggttaggtagcattggttttgcccttgagtctgattcgatcatcgtgaggtagcatggctctggtccctttgttggaaggatatctcacttgagatcccttctttctcttcttgggttaggtgctgggggtagatgataaaaaaacattcttttgggaagatcaatgggttggggttagccccctttgttcggtctatcctcatctttattagttgttctatcctaaaaaccattggatatttgacttcttggtttgagcaggaagttcagtgtctttttctttcgagttcccttgtaacttatctaatagggagatgacagaaatggcttctctgctttctttctttccttgatgagtgtgactttagggaggggaggagggatgttcgtgtttggaagcccaatccttcggaaggttttgtttgcaaatcattgttcatgttgtgttagacccctcccttgatagtacgtctgtttttagtgaggtttggaggataaagattccagaggaaattaagttctttatttggcaggttttgttaggccatgtgaatatgatgtgatactaaataactacttctacaactacttttctgttgaaagtagttctttttgtaattcgtgtaaataaatacaaagattctatcggttacagatggtatgtggtatgataacattatgaattttcatttgcaggtgga

SEQ ID NO: 65728 - DNA, 868 bp, Cucumis sativus
  Intron number 1 from transcript Cucsa.342300.11 (locus Cuc sa.342300) derived from phytozome v7.0 (chr-ID scaffold033 56; pos 4664010 to 4664877)
ggtttgaagaagcttttacagagggatccaacttggtaagccattttcttatcaggtgaagcttggaaaatggagatcttggatggtagatttatgggttttctttcttttgataagtttattgatatttcttcctttatgtctaaataatttctttgaagtttgtattctttctttgacgcaagaaatttttattgatcttgtgagtattttgattgagatcagctcaaggacaagaagaataggaaagtggtaacccacttttgagggtgaaaaaaaagtgggaagaaaaaagggggaattaattaaatgaagaaaaatgtgagtattgaggaaacaagagaatgtgttttaatttcttcttcttttccactatgttccttcttggagtttatatgataatacttataaataagaggagtgttggaatgaaagaagtaaaggggaagaagaatgaaaaagaaatttgttgtagatagaagaaaaagaagaggaagaagaagatgatgaatttaataattgtagtttttagacaatggatttaatttttgagaaactacaacttttcatttaagagggagagaaatgatgaaaataaatggaaaaaacatataatcatagcatggaagggaagaaaaggaaatgtatcaaatggggaggaaattctagctttatcagggaataagtaatctttataaacaaaataaaaataaaggtatacaaaagttactagagaaagaatgaagataagtcatgaggaatgagtttgagtttagaattcatataagttcatggttggtcaatggttattgatctatttattgaaatttcaggttggactgaaatttgaatctcttttcaaccgagg

SEQ ID NO: 65729 - DNA, 506 bp, Cucumis sativus
  Intron number 1 from transcript Cucsa.339200.1 (locus Cucs a.339200) derived from phytozome v7.0 (chr-ID scaffold0335 6; pos 1897922 to 1898427)
aaagtgagttaaattaaagttagaattcaaaattttaaatgaataaacatttcaaattaaatgagtaaactaacgtagtatatataaatgtaaagtttaaatatttcaaattttatgtttagatgtgttttgtacatgtacatagtaagatggtgacatataaaatagagagtggaaaacaattagagatgtatttggcacaaaatttgaaagttgagtaccatatcagtccattaatttttaaaggaatcaaataaacataagattggaagtattaaaacttatttagatagacaaaaagaaaagaaaaaagaggttttaggcattatttgataacagtttcctcttttgttttcaatgtttgaaaatggtaattattttaatactatttctgtctcgtggttttcgttaggaaaaatatatttataaataaacgaaatataacaaaaatcttttccctttgtatcaaaggtttccgacatcgaatccgtggcgcgtgcagttct

SEQ ID NO: 65730 - DNA, 335 bp, Cucumis sativus
  Intron number 1 from transcript Cucsa.356600.3 (locus Cucs a.356600) derived from phytozome v7.0 (chr-ID scaffold0357 7; pos 1414069 to 1414403)
ttcctcgaaggtcccttcaattcttccactgtaaggtcctttttctcattggttgtttgtttaactttttgattttctgatgatcttctcaataatttcattccctcaactgtactcgaatgcccatgtgaatttatttgcttcttgttctctctgatttttcccttctgtttctgtttgatgctccttggttcttcgttttcagtttaaatctgtttctgggttagtggggttttcagttttcatcggcagtatgcgtttttggtttgggtacctgcattggttcttttttgtgataaacaatgtgtttacatttctgcagttaagaacacggg

SEQ ID NO: 65731 - DNA, 869 bp, Cucumis sativus
  Intron number 3 from transcript Cucsa.356600.3 (locus Cucs a.356600) derived from phytozome v7.0 (chr-ID scaffold0357 7; pos 1414764 to 1415632)
ttttcttagttccacaagtcgttttggttactcaagtatgaacagattctctccctctctatgttttacaagggaagctaaacaataacttccattaataatcaaagagatcacagatggcgtggtcaacttggaaactaaagaaatcatccgaattttggtttgcataatatatggagtagttacatgagagcttattaagaacagtccaacaagtggatgtatattgttgaagatcaaaaaatgacaatgacctatagtgcacttatcacacaaaatcctgttctttctctccaaccaaatggattgatctgttagggttttgtggagccagagtgatgtagttacatctttagaaaacatcaaatgaaatggaatccattccaacggaagctctagcagttcaggtttctgatgtccaactgtaattcaataaaaagcagtctagagtattttgttctctcttcttcacagatgcagttttttctatgtttagattctatttttaacataacttaattttataatacttatctatggatgtaggacaatttggcctggtgaaatttaactcatattcttactatttgattcagtaggtttctcgagtttattgaaagaatgaagaaaatatcttttaattgcgaattagatgttggtaatgatccagtgattcttgttgttaattagagatactaattttgaacatgattaattattttttcaacaaaaaggtagagattccggaaggattttaaggaacactaagcaaacattatgattattgttttagtttggaggctcatttttccaccactcacagttttgtccattatgttttgtaattttagcaagctgaagctttgaag

SEQ ID NO: 65732 - DNA, 927 bp, Cucumis sativus
  Intron number 1 from transcript Cucsa.337610.1 (locus Cucs a.337610) derived from phytozome v7.0 (chr-ID scaffold0335 6; pos 667427 to 668353)
ttttcaacaactgcactaatcctggtaaatttctttaattatttcttcagaaatctttttattaatttatttatttggacttttgaaggttgtagaaattagaagcaaaacagaattaaatacatatatatgtgtaataagtagtaagtatgatttagttttgtgtttttgttaaggagtagctcacctaccattggccattttataaggtgttagactctaatgtttggtcaatttatgtttgtaaatacatttttaccattcacataaaaatatcaaatgacaagttatagttaaacaaaaaagttatagaattagagaatatattgttctatttacaattatatataatgataatcttaatctatataaaattaattttggtaccataaaaggtgattaaatttctaccaaaaaaagagaagcgtaaagatgtttattataagataattagaagttactttacttaaattatgaaaaattcaaaggagaaaatgtccaacaagaaaaatgagagaagtgaatgattagggtcaactctcccacttgaatattccacttcgtattttaattctattctttttaatatttaactttttttgtttaatttatttaagatgactattatctttattttcttccttaaatatatatataaaaaaatgaaaattgaaatataaggttcttaattgtaaaaatagggtggaaacatatttttaaaataaaatatataacgaaaaaaaagataattaagttgttgactttgttgttaaacaatttcttatataataattattttgaattaagaaaaaatttccagtgcattaaaaaattgaattgatagaaggtatagtataagattataaattgaaaattttgattttaccattttgtttgacattttttatttttgttaatcagagaagt

SEQ ID NO: 65733 - DNA, 583 bp, Cucumis sativus
  Intron number 3 from transcript Cucsa.363260.1 (locus Cucs a.363260) derived from phytozome v7.0 (chr-ID scaffold0361 1; pos 858108 to 858690)
ccgggtgagtatgatattcactttcctccaaacttccaataattttttcagatgtatgctgtaatcatatgttgtattttcatcatcattgtgttctaaaccttatgccttgaatcttgttatctggtgttccaaatgaccaaacatagatctcccttgtggaggcatgggaatgtaaattaaacattgttaatggaccacataaattttttaatcaatttttactatttacttaatcactttctttatttgtctatttcttgtctatttcgtaacatatattattgtgatcgtgaatcatctgttagagatgcaaattttttaatcatgttatttgtttgtggaagttgtcaagttcttgattatcagttcatttttgctcttatcatagaacagtgaacactcaaggaagctttttaaacagattcattatctaagccatccgatggcgtgatcacatttagcttcgaaatttgcaaattaaccacaattttgatgatttggtaataccctttcttaattaacatggcatgtttttctttcctcagtttccaagtcaagaagaagcagtttttccgcaaca

SEQ ID NO: 65734 - DNA, 923 bp, Cucumis sativus
  Intron number 1 from transcript Cucsa.395220.9 (locus Cucs a.395220) derived from phytozome v7.0 (chr-ID scaffold0410 0; pos 833554 to 834476)
gatactggaattacaggcatcaggttttttttttctacgattgataagttgcactgactttaattcatttgataagtttgtgttgtgttatgatgttgacctttgtgatggattggcgttttcgtgttcgtatttcatactttttacccaaaatgtctgttgtgcattatatctgttgctgatacttgtctgatccattttctcactgctttttatttttaacctaaactttatcatcggtgattcttcttggcgtgagatcgatttttttttttttccagttaaactaagtctgcattcttttgatctttactcttcgtcgtctgattttttgatcgattgactttttgctgtttttcgattaagaaattgtagtagttctgttcttatccgtttcatttttttcaatacatatgttcttagtttattttaaaagaaaaaaataattaagccttctaattaattaaatatttgttgctgttaataattcttaaaaattgagctgaaattctcgaagaacatggttttttcaacgcccttccatttgtcgttgctaccatgtgatcgatataacttttcgattttgctccaaaataaccacgttacctgtagctactctcaaacaaagtttccttgtttataattgtcatgttgaacgagtaactgagcgtttaaggcctaactgcaaaagtttatttcaaggcacttctgaaaagttttatttcttgtgtttgtagtgactttttttttaaattttaacaagtaacagttattttcagtgctctatttgggttgcaaaatttcaactccatactagccatagtttaaatttcttggtactaaactggagtaatcttttatacttcctatgtataatatatatgtatatatattcatgaatatctgggctagctgaggcacac

SEQ ID NO: 65735 - DNA, 658 bp, Cucumis sativus
  Intron number 1 from transcript Cucsa.313840.1 (locus Cucs a.313840) derived from phytozome v7.0 (chr-ID scaffold0299 5; pos 3005128 to 3005785 reverse strand)
ttccaccaacgatttccacctgcttgacgctgccggtgagttctctaccccttccttatttcttttctttcgaaattctatttctcctctgcctctctccctctcattcacttctccgcttcttgtccccccagcagtcacaaaatcaaatctcatccatttttatttttccttcatcaatttggaaactcctccttctcccagctcttttgggaaaattttgatgtttcttcttcctctttcagacctctgtgtaaaaatatgaaacttttaggatttttaatttcctccagtttacctcttttttttcagttccccccattttcgctctttcattttatttttttcctttccatacacattctttcacaaaaccatttatagggttattctgtatagtcttcgagttcgaattgtaaatgcaccaagtgaatttttctatacagcacatgtttgtaagcaatttttaatttttaattttttttttattgaattcattgtgtagcttttgtataactaatcgaagaagttctctaacagatactaagttctttttgtttatttattctactagtctcgtgttctgaggtagttaatcattgtttcctgctcttgaatttcagatttttacaggaatttctcaacctttcttatccaa

SEQ ID NO: 65736 - DNA, 858 bp, Cucumis sativus
  Intron number 2 from transcript Cucsa.360580.1 (locus Cucs a.360580) derived from phytozome v7.0 (chr-ID scaffold0358 8; pos 1211466 to 1212323 reverse strand)
ggtacgttttttctgtttaatctatttcctatccagcttgtgtaatctgcatggagatgatccatttgtatttccttcagcttaatctgagcgttttgtttgatttgcgttacgttgaagcatcatcagtgtaattaatttcgttttttttcttttccaattcaattgggcgtgaggtataacgtatggatatagtttgattatacatttcctgcgcctgtttttttaattattgttattgctaatagaaggattcgagctacctctattagagcgtgattgatttgctccaaatctgttacggatgatcattctattcgggagtgttagatcgctgaattctattcactatctggtctcaaagagcgtaggaggattccaaaatgagacgtttgtgcttttgttttgtcttgttctctttatggttttagccaatactcctggctgacgggatttatggattgtgaaacttgggtgtctggctggcaagttctctcggttgagttgagtataacttttagatgcgtcctgaactgtgtggttgcggctaacagaaatgattcttttcaagactaacttatttaaatttgttgagaaaagaagttcctctttgctgtagtcacacttataaagcgacagtgagtgagttttggttagtttcttctggaaattggagagcattattgattcttatgttggtcactccttcaagagtaatatttttggcatcatagtgacatcgcaacaaaacacttaagtttatgagcttttcttgcttgatttatcagtctttttatagttctacaactacaaggttctaataagcaaaatattttcgtattttggcagctaagagcg

SEQ ID NO: 65737 - DNA, 496 bp, Cucumis sativus
  Intron number 5 from transcript Cucsa.370430.2 (locus Cucs a.370430) derived from phytozome v7.0 (chr-ID scaffold0367 8; pos 156072 to 156567)
agctcaccggtgatcttgctgaaatcagagggtaggtttttaacttaagattttagtagagatatttttttcttttttatagaaacaattgctttccttgaggggaagaaaatgacaggacacaaggatttacaaaaccctagggaaagtgttttcaactaagtaagatatttcctaggaaataattccaaagtcttcaaaaccaaagcccaaaagaaaacatgaaacctctcgccatgaaacactcttattgtttcttccaccccgcagatcccacagtacccctgcaaataaataaaaaaaaagacccttccctttgaaatgcgggtggagctcctccccaaacaatagagttatgttagttaagccttttgaatttgtttgattccagagtaaaggagcgcacaacttttgttattatgtattgatattcatcatgtaacatgaactttgattgacagtaacctcctagctttgcatcggatagcaaccttgc

SEQ ID NO: 65738 - DNA, 739 bp, Cucumis sativus
  Intron number 3 from transcript Cucsa.385130.1 (locus Cucs a.385130) derived from phytozome v7.0 (chr-ID scaffold0390 4; pos 507892 to 508630 reverse strand)
aataaactcgatcattacgaacctaaacaaagtatgtgtttttccttttttttagttatgtgtaagattatcagtcacattatttcgataaaaaaaaattaatgacatagggacagagaataagaattataaccaactagagagagaaagagggatacatttgctgttttgatgaaaataataatttggaagaagtgagttgaatgggatgagtgtacaaacaaggaaacttgtaatctgcttactgacttctcaataacttcaccaaaataacaaaacaaacaaaagcaggaataggctttctttggctcctcaatattttataactccatctatccaggtttacacatttgttaaaaaactctacgtagttaattactgtctctctttactccatttgattgtatttggtaacactctctaataaaaatatatttcctctgtttcatgctctttgtaaacacactgtgttattgaatcatttccctactgtaagattttctttaacattaataggtgtattggagcttgctgtatttacacttcacagtctggttacgtttatgtttatgtcttccattactcacacttttcaccacagtcttactttactcagttaaaaattcttcatttattatagaagtgcataaaataagaaaattgggtatgattttgtgagatttggtttttatgatacttggcaggctttttgtcagggaagcctgcagcaacactggaa

SEQ ID NO: 65739 - DNA, 274 bp, Cucumis sativus
  Intron number 1 from transcript Cucsa.385130.1 (locus Cucs a.385130) derived from phytozome v7.0 (chr-ID scaffold0390 4; pos 508899 to 509172 reverse strand)
agaagaagagaagaagaagatcatcaaaaactcaggtttttatttttaatgcaacttttttagcacatgggcagttcataaatcccattaaaaatcataacccttttctaagaacttctcctttctctgttctctcgtgtctttccagaagatcatttgttgaagttttctaacagaaattggggttttttttttaaaaaaaagactgtttgttttagtttccgtttgattttgaagtgattttttgcagaagaagaagaagaagaagaaacca

SEQ ID NO: 65740 - DNA, 609 bp, Cucumis sativus
  Intron number 1 from transcript Cucsa.366980.1 (locus Cucs a.366980) derived from phytozome v7.0 (chr-ID scaffold0362 5; pos 440258 to 440866 reverse strand)
tttgtgctcagccgcccaagcaatatcaaatcaaggtcggtaccatcacctttccttttccgaccatcaatcgtctttgtattgttttgcttttttttttttacttactttgaattacattttgcggctcttttgagttgaagctcttggaataggaaatgattgagatgtaatgttatttagattttcaattctttatcgaagctagaataatgggtttgtttatttgtgattactatgttttctgtcttgccgtgaaggctgggagctatgtggagttccataaatttaaaaacactcaattatgttggctaaaacatttgacacgataactttattgcccggaactagatatgtctcatccacttggagagatttctggcaagacactccgttaatcatagaaacacaacacttctaacaagtatttgtctttactacgaagcattcttttggtgtaaatatggatgttacttattgtcttctaccctttctcctccttttgcctgcattaagaaagtgtctacattgtcatttctttcaatatctgactgatgggctccttgacttgcaggcacaaaaactattggataatattttggaaactac

SEQ ID NO: 65741 - DNA, 777 bp, Cucumis sativus
  Intron number 1 from transcript Cucsa.397230.1 (locus Cucs a.397230) derived from phytozome v7.0 (chr-ID scaffold0414 6; pos 59820 to 60596 reverse strand)
ggaggtttgatctttttctctatttgtttctatcttcaaattttggtgggttcccttcttggttacagaaatgagcttaaatttgaagctaccgctttcttttagggtaataattatgtatcagcttcggttggtgttttcgtttgaccatccaagactcttgctttccatttgtgttttcactagtgatacccaagcaaagtttcacatccgcgctagataaatagatgatcataagtcgttctgagtgaaactaaagtcaccatggagatatgcgaagattcgttgggacaacgagtgacttgcttgttattagtagtaaccgaagtggtgcctctttggggagcctcggattgatgttccttggattgttggtttttgtttggatttgctcttttgtttcacaagatatttgagggcttctcacatcctcaatctagcttgcatctttctgtttctctctttttttgtcttctccttccaccttgttttttgttgtaactatttaatccgcggttgtccctctggttcttaatacatctctttatggatttttactgctatactctcttgatatttcatatatcaatgaaattgtttcttattcaaaaaaaaaaaaaacgccaaagcagtgcctcgtgtaggcatcataaccaaacttaaggaacatgttgatgggatttcttggggctgtttactcttttccatattcctcaatgcgttgcttgttgtgatgcctcagattcttgttgcctcttctgattgggaagactattc

SEQ ID NO: 65742 - DNA, 598 bp, Cucumis sativus
  Intron number 2 from transcript Cucsa.364100.2 (locus Cucs a.364100) derived from phytozome v7.0 (chr-ID scaffold0361 1; pos 1661457 to 1662054)
ccgatctgctttcccaggttgaccagcctcttcaggtgatgctgtttcttctgtttccttttttgttattttcaaaattctttttatcagccttctgtttttgttctttctcacatttttggctatttattcgggttttagggttctaatttgatttttttttaaaaaaatagttcgattggttttatcgtgtttggattcaacccaaatttccctaactactatatttgtaattatggttgctggttttaattagcttgggtttgaaggatgaatgtttttgcggtggcatggttgaataatcaagagtggttctttaattttctttggagttatctttgacttcatttacaaggttttggttgtttaaataatgaggtaataggagttccccacttattgttactcatggctctttcctgggttattttattactactctgctgattgctgatcaccttttttcctaatcgcctttggtgtatgaaaacttacatttcttcaaccctcttccccgcattggcagtgcttcaacttgttaaaataaacttaagttccctagttttctgaatgagaaatcacaacatttacaggttat

SEQ ID NO: 65743 - DNA, 675 bp, Cucumis sativus
  Intron number 4 from transcript Cucsa.361090.2 (locus Cucs a.361090) derived from phytozome v7.0 (chr-ID scaffold0358 8; pos 1518812 to 1519486)
tcacgcgccttcatctggaccacctgaattcaaaggtaaatttcgcgtcattaactgatgaattctggaaacgctatctgaaattctcctttccactgctaatgcagcaaccaatcgctgcggttattggtatatacgtaattctatatgttttggctctgcgacggttttcttttattctgttgcacaatatttggatggtagagggaggggctgcacagtgtttggtaactcattcgtgcctagaattattcaagtaccgcgtgcacgatgattgaagatttagtcatgcttatataaccaaatcttttatcaaggaattttaagtggaaagatgcctaggcgatgaaacttgaaactcatgatcttagttccaaagcatgttagtctaagcttaacaaacaagtacggatggctgtaaacttggttagtactctgtgcattgcacatctagagcttcattgtgaattgaaatctgccgtgtgtccttgcatgatttgatctttggccaaggtaggatactaagatttgcaacttcagcaattatcactttttatacgttttggcaaacttgaaatctgtccatttccaaaacaaactgttgacttttttaatatcattacttgaaaatttaacgcaggcaaggcaactgatctttcagagttagcatttgag

SEQ ID NO: 65744 - DNA, 1039 bp, Cucumis sativus
  Intron number 1 from transcript Cucsa.364380.2 (locus Cucs a.364380) derived from phytozome v7.0 (chr-ID scaffold0361 1; pos 1847870 to 1848908 reverse strand)
atcgtactcctctccttgctcgtctttttcttcaggtatcacttcaattccttttccttcttcttttttctcccttccctttttctttttatgcattacccatttgggatttctctccctcttcacgtttcctttgcttactttctttgtttttctctccaattttgtgttttggctacttgggttcagcccagaatgttgttttttttgtttaccccatttttcttttctttcaatttttcactttttttagtgctactcactcatatctttgcatgcactcctctttttgttctgtttattatcttcttctcgtgtttttgtttctggtgtcactttgttgatccatttgattctcgttggtttagaggtttaaccgttttctttccctttttagtttgatcagagcttttgaaaactttcccgggttgattttttcccctctccaaatttcgttagttttgcactccccttgagagttgtgggtttcggttgttgttctaaagcatctcatctagctggaaaatgtttttgttgtgctcaacatagttggattatgggtttgggtttagggttttcttagttattgatcactggggctattggctctgcattttatgcctgcatgcagggttttacctgccattaactctgtacaatgtttgcattggtcatcaatttctgggttttaatggcactaactatgttcttatctttttatcttctttcatttccttgtgatcagattactgattacttctgaaaccctttaactctaagatgttagtgaaagttgttggcgtcttggactttacttttccgtcactacttgttagttgtgttacagatcatgtttcatgggagattgtactttcgtcctgtgcattgctggatattgtcctttctggatctgatctaatgatcaacctaaacatgcttctctcttctagcttttaatatgcatgtatatatttgattatgtacttgctttatgtctttttcagaacttcattggattgcttcacgtcatatctgcttg

SEQ ID NO: 65745 - DNA, 378 bp, Cucumis sativus
  Intron number 1 from transcript Cucsa.310910.2 (locus Cucs a.310910) derived from phytozome v7.0 (chr-ID scaffold0299 5; pos 625311 to 625688 reverse strand)
actcctcttcagcgaaggtaagtcgctgcttcaacttctaaatttctgcttgatccagagagatttttttttttaattaatgaatagaattggggtttaaggaaccgatactccttataaagtcgttggatggctagaatccagcgagagcaaaactgaaagcgtaaacctaaatcgtttttagttcaccggaacgatgatcggaacggtgttgaaatttcaagaaatggggtttgaattcattttatttatgtcggattaatcttgagagaatcgtgaataaaatgctaattgtcggatgtttgttacattttcttcatatctttttaattattccatgcagagtcgagaatccccgggcttgattccggtaactgt

SEQ ID NO: 65746 - DNA, 921 bp, Cucumis sativus
  Intron number 1 from transcript Cucsa.367140.1 (locus Cucs a.367140) derived from phytozome v7.0 (chr-ID scaffold0362 5; pos 569484 to 570404 reverse strand)
actagtagcagtagcagtagaagccattattcaaggtacgtactttaacctttcatcaaactcatcaaattatttatattaatacactcttttatggccaacttgtgaaaattattgccttaaattaggccggtaaattgcaattattacctccaactttcatgaaaaaaaaaaaaaaagagtattcacctaattgttgaaattgaaccgttgcatagaattgaaagtttaaaggtgtttgtaatttggtatttgttaataaaaattgttagtaagtaattagaatttggttatgttagagtttaatttgttaaactttctaaataatcaatatgcatgtcttttagaaaaaaaaaatattttgacaaataatactaaaattttaacaaatttaattagataaatttgaatgatgtattagaggttaaattctaacttttttataataggatcgttttaatggaagtttttattgttaatgttacttttcatagatttttatcatgcattcattaatcgatcatttcttcaaacttttgtttttatctctaattaaacggttagaaacgacgatatttcaaaatattgcaaaaaagaaaaaaaagacctttaatgaagtagacggccatctaagtgatcaatcgtaaatttatagtttttttcttttcaaaaagttaatttttttcttatttgtagttcacgaagatagactacgattgatgtagaaaaacttgtagatagtccaaacgtggagatttgaaattttttatatcaaattaaagaataatacaaatggatgttatgtgaagaagtaacaaatttagaaaaattgtagcaatttttgtttagaaaaaatattgatgtgaacttgtttatgttgttgcaggtcatcaagtctaagtaacaattccatttccattc

SEQ ID NO: 65747 - DNA, 932 bp, Cucumis sativus
  Intron number 2 from transcript Cucsa.386610.1 (locus Cucs a.386610) derived from phytozome v7.0 (chr-ID scaffold0391 8; pos 88821 to 89752 reverse strand)
aggtaagttttccttttttttttaattttttctcttctatattactactctctcaaattggtcttgctttaatgcttgaaagggatattttcatcttaatgcatagaggaacgaactttatatgatgggttaattaagggaggagaggactttctttcttcttcactcattaactgtctatgtctcttcttgtttgcctgctgtttattaatattggtcaacatgaattttacagccagttttgttaattgaaggtgtaacggtagtatgtctgtttaagttgactaacgtgttgatccctgctaatttgtatcttagaaagatatcctatggggggtttcattaatttggcttgtgggaataggatcatcaattggtgttgatttacccgtagaccaattacttaagttgatagattaggtgaacattagttgactttaatattaaggtgatataaatgggtgtaatgaaagagtgattttttttttgggagtatgagcttgagactagttgcacttatactatgttgaaattaaaatttaaacggataggttatggttaattttatattattctcttaacccaccaagtaaatttgggattttgtttttgtttttatttttaaaaataagcacacgaaaactaattgtatgcatattttatttgcttaccttttcactttataggatcacacaaacgaaaattttgtttctaaaaactactatttttttcacctttgtttgagtagaatttaaaaaatgtaaactatagatagattgcaaaacaaagtaatatgttagtaaatttgtggttgttggaaactggaatcaaaactattatccaacaattccctttaagctttgtactaataaaaagaaaactgactctattaattcgttgtcatggataggttttgcttagagatccgacag

SEQ ID NO: 65748 - DNA, 594 bp, Cucumis sativus
  Intron number 2 from transcript Cucsa.310530.1 (locus Cucs a.310530) derived from phytozome v7.0 (chr-ID scaffold0299 5; pos 313544 to 314137 reverse strand)
aaagctccgcgtattacctccaagaatttaattaggtaacaaatctcaatcccgagtttatgtttccttattggatgtacgtggagtttgatggagtttaaactaattctaattgctgagttctgatttcactcttcgtagtgttgttttttgacttgttccgagaagattgatcaactgaaaatgggaggaaactttctgttgctttatggtgcctcattgcttgagattatactcatgcttttgaatctcaaatttattttccatggttgggctttgttatgatattatcatttgttgattcgagcggtgcttttcacaatgattgctacttttcaacccgtgcaatatgttaaatgtctttgctatctatagtgttgacaagaaacaagtaacaagtatctagaggtggtttagaatgtcgtcaagattgaagtgtctttctgctcgtcaatcactagacctttttgtaactatggtattggtcttgtttgatgatttgagtcttttgtaattaatatgaagttttgactgtcctaatgaatgattcttttctctctttcagtgtaattttctgtgaagctgtggctatat

SEQ ID NO: 65749 - DNA, 836 bp, Cucumis sativus
  Intron number 2 from transcript Cucsa.337740.5 (locus Cucs a.337740) derived from phytozome v7.0 (chr-ID scaffold0335 6; pos 740670 to 741505 reverse strand)
tagatcttactagaagtatgtaacactattttatttggttattgaactgaaggccttttgatcacttgtctacttccaaagtagtttcagtgacaatctatttatctcatttcacttttgatgttgcataattgagcacactgtcagtgtattcagaacttgtgattttgactaagctatcttgataattcctctgctatgtttctaacgtgtctaagaagtgttttaaatagttaaaccctaaaaaacatgcccaagaagaacacaccttctaacttttgttccattgcgttcccagattttcattgctggctttatttgttgatcatattcctttgccatctctttccattccatcggcaatctgtctgttatttctcaatttgactagatgtctaaagctttcttgtgcaattgtgattttccttaccatatgatactgaaagttgcttacattcttccaatgatatatttgtactattatgtgtaataatatagaagagcaataactggattttctcttgtttataaaatctaaacccctgaaagtctgaatgctcttgtcttctctgtttttcttctgttcctgtcgctcttctactaatatcttttcttaccaaatatacttgctttagatcctttgtataatcagataaagtcaaatagttcaaccatgaacaacaacatccaatttggttctttaattaaggtactgttttacctgttctcaacttttgtctttaatagaaaggtttatttggttttgctttgcatgtgatgaaacttaacatcctcctgacataactataatggaattcagccacttgcatccactg

SEQ ID NO: 65750 - DNA, 669 bp, Cucumis sativus
  Intron number 1 from transcript Cucsa.360640.5 (locus Cucs a.360640) derived from phytozome v7.0 (chr-ID scaffold0358 8; pos 1235624 to 1236292)
cttgccagctcaagtacactggacgcggcaatcaggttttcttttcgtttccatttctttccgttttggctgtaggaagctatacattatgaggaataggaagaggaaagtattgaagtgcaaaaaagatgggacaatttttaggtctgggttggattgagtatgattttaatttgtgattctagtagttttcagttttctcgaatttggataggatacaaaatgattggagattttgagcttcttctgagcttttgtacgacaaggaagcctaattttcttcaatttgttagaagaacgtttactattttgctacttcaaaggaaatcggttgtcctgccattggttgccgtttttataccgatccttttgttttctcaggttgtggcatttgccactttttacaatcaccaatcggctgtgacagcgcttcatgcattaaatgtaagatcatgtattatagatagttccatatttgagtcaatctgatttctaattcgttgtgaagcttagttgattttgtttatttttcttttgcatgttgcattctgtttctctagcaggttctgatagtagaattttggtcagtattgtgaatttttaatgttgaaacattacgatggtgctgtatcagggtgtcaaatttgatccacaaagtggatcggttct

SEQ ID NO: 65751 - DNA, 414 bp, Cucumis sativus
  Intron number 1 from transcript Cucsa.388390.3 (locus Cucs a.388390) derived from phytozome v7.0 (chr-ID scaffold0396 7; pos 811966 to 812379)
agtttgaaccctaattttcttgttgaaactggaaggtatttttgtttttctttttatggattttctgagatttgtttcttctgctggcttcctttgtttaatctatgattaaaagttttttttttccttttgtttcttctgatcgttgactatttcttttttggtggggattcttggaattgaatgttggaatgataaactctttttacctttactcaaataggctgtattttttgtaatattgttgttgtgatatctgacccacgacagtggctttatcttaatgtttgaatctgtgttcgaaccaaactgtttggacttatttaccgtacaagaggaatacccagtttaatatagaagaaaaagaaacaatttctcacttgtctctaagttattgcctgctatattctaggt

SEQ ID NO: 65752 - DNA, 464 bp, Cucumis sativus
  Intron number 1 from transcript Cucsa.388390.2 (locus Cucs a.388390) derived from phytozome v7.0 (chr-ID scaffold0396 7; pos 811916 to 812379)
acggatttggggattccacttagtcagaagactcggttagcacttttttcagtttgaaccctaattttcttgttgaaactggaaggtatttttgtttttctttttatggattttctgagatttgtttcttctgctggcttcctttgtttaatctatgattaaaagttttttttttccttttgtttcttctgatcgttgactatttcttttttggtggggattcttggaattgaatgttggaatgataaactctttttacctttactcaaataggctgtattttttgtaatattgttgttgtgatatctgacccacgacagtggctttatcttaatgtttgaatctgtgttcgaaccaaactgtttggacttatttaccgtacaagaggaatacccagtttaatatagaagaaaaagaaacaatttctcacttgtctctaagttattgcctgctatattctaggt

SEQ ID NO: 65753 - DNA, 577 bp, Cucumis sativus
  Intron number 1 from transcript Cucsa.323770.1 (locus Cucs a.323770) derived from phytozome v7.0 (chr-ID scaffold0309 0; pos 32284 to 32860)
cggaagccgaaatcaagaaagcttattacatcaaggtgctttccctttacataatttccacccaatttctgtgatattcgccttaattttatttcctttcctcagttatccttttttttttgtttgttggttgtcgtcgcgtcttgttacggcggaaatcgtgagattcggacctgattgtccatatttcagattagtttgaagatatttgacattcatccctcatttattatatgtgagcaataatttgcagcttgatctcttcggtattattgatgtatagaccctacctctagttgcctgccacttatttctcctattattgatcgaatctgctttattgtacatccttatgacctaaaatttgaaatctaattctgaaatgaccttgctcatactgttttcattttgtattgtcctcatgctttaatgaattattttaatcttaccctgtattgtaactgtgccctacttcttctcctttgcgatagatagattctttgatttttgtaaataaatcatttttcttttatggattttaggcacggcaggttcatccagataaaaacccaagtga

SEQ ID NO: 65754 - DNA, 940 bp, Cucumis sativus
  Intron number 3 from transcript Cucsa.350900.1 (locus Cucs a.350900) derived from phytozome v7.0 (chr-ID scaffold0350 4; pos 316437 to 317376 reverse strand)
aggcaatacccctgcttactccgcccagaatttgggtattgttgaagaaaggtaggaatcctttgttaaactttaatcgttcaccaccaagtcaaactgactagattatagtgtttaaatgtcacacactacttaagaaggtctgtccttttatcatgttttacaactccgaatgtttgacctgtgttttgagttaggcacactcgatgcatatctcatcttatcagagcttggattgtatgaatttccaagttggagtgcttttagatgacagtatatgccatttcaccttactgattgaatagttttgttcaagatcattgttcataccataaatagttttgtgggcattttttatgtgcttgtatattctttcgttttttaataataataataataaaataatacaaattcaagatcttaataataataaataaataaataagtaaatgaaaattcaacttacattgaagtaaaacttaaaaagaaaaggaaaaagagagagagagtaaaggttaagaaaaactgatccaattttcatgcttttattgaaggagctcaaggcagaactgaaccaaatttctcacgcttttgttgaagggttttcacaaaataatttaggccccacttagtcttttaaaattgtgttttttttttcttttcaaaatttctttatcacggttttcgtttttcctaggtacacttgaatttctaactagaaacgaaaactaattttttcaaaacctatcttatggcttgggtgttctcaagtggtgttgaaagactcaaaataaaaaaccaaacatcaattcattatcaaataacctttcctttttctgtgtattttgtagctcagcattgacaatctgattgaatttcttttctctcttcttttttgagtacaggcggtcacaaggtagaacatataataagtcccctc

SEQ ID NO: 65755 - DNA, 939 bp, Cucumis sativus
  Intron number 1 from transcript Cucsa.395080.1 (locus Cucs a.395080) derived from phytozome v7.0 (chr-ID scaffold0410 0; pos 742028 to 742966 reverse strand)
attatccttcagttgctctcaatttttctctcaaggtatcatcaatttcttttcattttgggagtttcttgttcttgttttctgattttatttgccattaggttcggtatttagacaatcgggttctttctgaatgtctggtgaatgtgaaaggggggttaatttgtttcttggctaatgttctttttatcgatttttatatgccaaaagtcttgagagaatgagatgaagtaatggctagtggcaacccccgttttttacctgataggaaatgtgatgaacacaacctctactgttaacttgggagtgttgtagtttttcattgcctgtaagaattgatgaatcagttcatgctagaagttataaattagtaatgctgtgaggaaagaaatcaaatgtagtaaattttagttttgttcagattttccaaattctgattatgataggacatgagaaatcaagagaatgaatggctgatgattgtacattaatatgcttgttctaggccataaactatcagttggtgaagagggaaaattatagaaatggagaatagaatacatatgcacatacttcttttattatgatttaaccgagacatgtcttaaaatcttagttgcaatcttatctggccagaaattgctgtgtggaaaaacgggaaaattaataaagattattaaggttttctgtcaaattttctacatttagtgtcagaattctttctgttttgtatgccatttattttcaatgtagaacttgggatgcaccaaattagggtggagacgtggctttttttgtagacttgaggatgcaccaaatagaatgttttggatctttttgatggggaattggttttttttttcagttttggaaattgattcatgacttgagttcatggtttctaaatattatttccatatacaggatctatataaagaa

SEQ ID NO: 65756 - DNA, 477 bp, Cucumis sativus
  Intron number 1 from transcript Cucsa.362700.1 (locus Cucs a.362700) derived from phytozome v7.0 (chr-ID scaffold0361 1; pos 480743 to 481219)
atagtgttaaggtagcctttgtctgagttgttctttacccatctcgttttgtcgatttgtttgagtttgatctgccttattcttctgttcggatgttatttgaattttgtgattcccgattgcaattggatctccaaggctggttctgatttttgttatttatcgttcggttcctattcgatcatggtactcgaacgggcgattgaaacttgttatactgtttttttagaagtttgcctatggaaactatatggcccgtgatataaactagtgtttttcttcattgtgagctgacttctttccttctttctttttttaagaatttaacttcaattttttgttaaggttttgggttttgggtttattgtttgtcaagcacggtcaatttaccctgtaaaaggccaatttttattctcgctggctgatgactttagatttggttaatgatcaggaagaggacttaaagaatttccgtca

SEQ ID NO: 65757 - DNA, 595 bp, Cucumis sativus
  Intron number 1 from transcript Cucsa.340720.6 (locus Cucs a.340720) derived from phytozome v7.0 (chr-ID scaffold0335 6; pos 3104571 to 3105165)
ggggtgcttcatacagtttttggtggaaggaagttaggaagtatgcgattctagttttctagacataatttcaattttgagattcttttttgaaagaatgaaatttgagtcttgtgaataataaaaaatagaagaagagagatttggagtttgacgtagcaaatgacgtttgtttgttaagaaacatattaattgttagtagttattagcttagcttctaattatagattgtgataaacacattgattaacctaagctcaacaagttgactttgtttttaattatatctgttgaatgaggtatgaaaatattcagtgggaaaggaaacaaaagtaatggatccttgttgtggtttatattacgcgatcagtgaacttacaagtcttaatttttttctagtgctgacgataatttgaagcttctgatttgcatcttgaaaaataatgcgatgacttaaaagaagaaatgttctacgaatgattgttattatgtaaacttaatttaatatattaattgtagacatggaaggactcaaccaagtccaataaaaaggaaattaattgcttcattttatcctcttatttgtttgcagcta

SEQ ID NO: 65758 - DNA, 754 bp, Cucumis sativus
  Intron number 1 from transcript Cucsa.327970.2 (locus Cucs a.327970) derived from phytozome v7.0 (chr-ID scaffold0315 9; pos 257127 to 257880)
aattctcaagctctcccaggcatgttttcaatctttttctttcttttctttttattgatctcttttatctcgtttttgtcctttcctacgtctcaggatggagtgaaacagatgagaggatgattaattattgaaaatgatcctttgtcctttcttgttaaaatttctgacttcgtttctgcgtttcatcgttttctctctgatccatctcaattcaagatttcatttcacttataactattttgtttttttatttgagagtgttttcaaattcaaccaaatataaagtttcaaaaagttccatttttcaaaaaaaaaggaaaacaccggttggattgctccagacatcccactatcgtacacttccttaacaccctaatcatctcactttcatatatatttcataaaaccagaaaagtacagaatgatgttaaaaaagggactagactagagataaagcacaaaagaaaacagaaagccaaccgaactaagaaaaagcattaacagttgagagttacagtagtcgattgtagtagaagaaaagataatgtctagtagaccaacacatccagtttaaatatttccattataattgttatgtttgcaaaatttgacaaataattcaaatctttattaaatagatgatatgagaattaccgttataaagaaaaaacaagttaatttaatttatagaattaaagctttgatggatttttgggtaattattacagtatagccaagacactggagaggt

SEQ ID NO: 65759 - DNA, 285 bp, Cucumis sativus
  Intron number 2 from transcript Cucsa.383350.1 (locus Cucs a.383350) derived from phytozome v7.0 (chr-ID scaffold0388 2; pos 327417 to 327701 reverse strand)
ttggtaattttcttctttcttcttgttattgtagttgatttaatagtatttaatcaaaaatctgggttgaaaatatgaatttcgaaatctatgtcaagtttaaacaaagcttgcatgcaaactttttttttttttgtctttttcttatttataactaattctatgagttcaacctccagtggcccaacctccaccttcaaatttctttttgtttaattgaataacaatattattatgtttctatcattgttttttctttcagggctaagagcgattggattcaac

SEQ ID NO: 65760 - DNA, 793 bp, Cucumis sativus
  Intron number 1 from transcript Cucsa.358470.1 (locus Cucs a.358470) derived from phytozome v7.0 (chr-ID scaffold0358 6; pos 1213 to 2005)
ttgagtaaaatttccaataatatattaaaggtacctttggtggagtattgatgatgagttttcaatagaagggaaaacttcttaacgtatgggatatttcattagcttcttcgacatttcatccttatactatatttgttaagaaatatattttcttattttcatccttatacttttcatcatcgctaaaatcaaaaagaaatatattttataaaatattatactatatttgttaagaatgacttgatatgagttttttatcttttgaaaaattctaccttctttgttattattattatttattacaacaacaaccaactatttacattattttagattcatatttcaaaatttgccgtttcccgtatatttcaaataatataataaatagagaaacaattgtaattgtatttgataaaattacttaaaacaacgtaattttagattttatcgattatagacatctgctagacttttatcaatgtacgagctagtggacattaataaatgtctattagtgtctatcatgaatataatttgaagttttgctatattttataaatattttggtttggttcgatattcttcatttgaaaatatcccaagataaatactaatgcataatttaccgatagttataataaataaataactagttgtgcataaaatactaaaaaaattcccatctccttttttctccccttcctatatatatttaggttcacaacttaagttcccaaaaacaagtaaatagtatggcaatccagcaacattcgcctcttaagctggaacc

SEQ ID NO: 65761 - DNA, 952 bp, Cucumis sativus
  Intron number 4 from transcript Cucsa.332770.1 (locus Cucs a.332770) derived from phytozome v7.0 (chr-ID scaffold0326 4; pos 594482 to 595433 reverse strand)
tactggatattagtagtacagtcataactttattggtgagtcttaaagatagtcatgttaaaatgtaggtgatgttcgctgggcagaatgatatttatggatgtgaaattcggtttgtaaattgtattgtttttcctttaaaaggaataaccctgaatgaaactaacaaacgcatgtagtagaaggctcttttatagtttcacttgttgaacattccagaaagaaggggaaaagaagaaaagaagaaaagactatgggacctagtcataaccatttccttagtaatggaattaggctttttccagatgatcacagaccaaattatgagatggctttctgaatctctcactgtggcctccctaaggaagttcctcatcactttttctggaacttagccacccttatgggcagcttagaaataaacaaaatagactagaaaaataaccagaaatttgcgcttaggttcaatacccgttcttttgaaatcttcaatatttcttttgatctttcataaaggcttaaaaaataccatcagagtcgaatttgttagaatgttggacaaaagttgggatacggaatgagaattaggacttggacaccaccacactgttccaagtcactgccatatcttttccaggtccccattttttccattggatttctagttcaagaataactctgaaataattatgaaaaatcaaggataatattgcagcttttgaaagaatagatatttttgaaataattttcaggctttggctttagtctcatccatataatgttgatatcatggagagagtaaataaaacttggtaattgtagtttcaccacttttttttatcatactttcgggtgtatttattgtttggatcacagtggcaatgattctgtatgttatctctaataacttgtgacagtattttgcagccccatcaaaattcagtgattctgc

SEQ ID NO: 65762 - DNA, 496 bp, Cucumis sativus
  Intron number 1 from transcript Cucsa.332770.1 (locus Cucs a.332770) derived from phytozome v7.0 (chr-ID scaffold0326 4; pos 596377 to 596872 reverse strand)
cctcaccttcattctcacttcagcttcttaacaaggtatgtatttctctgttttgctcttctcttctccgctcccattctaattttgttgtttcaatcgcgggagattaatatgattgttgattctgtttttttttcctttcccaatttagttccatctgagtacgattattgtacctttttaactgttttcatggaattcaacattcagcttctcaattattgaacgaagcttctgtcctgaacaacaacattttggttttacttttacacaaggctaggatgcttagttgcttagcttcaattttctactattgactcttggagctggaataaccagcactagccaactagtctcgttttttctttcatcatttatctcttctcgtgtttacagaatgaatgttgaattgtgttgttcttctacttaatattcagttttcaactaccccatactcaaattgcacattttttaggattgaagaagttattaatca

SEQ ID NO: 65763 - DNA, 896 bp, Cucumis sativus
  Intron number 1 from transcript Cucsa.367060.2 (locus Cucs a.367060) derived from phytozome v7.0 (chr-ID scaffold0362 5; pos 517506 to 518401 reverse strand)
gagtttctggaaattggtatgctgcttttttatgaaaattttctgtctcttttgattgattgttcttgaatcttttgattcctttcactatcccaaattggacctacttttcaaaagctggatcataacaacaactgagaaagataatgatatgttgtactgtgtaagaatttttgtgtgcttgaagttattgcttagtgtatacttagagtatgtggatgaaatgaagggctaaagttgtttgggtctttaaagttttatggcatctttgacttctagtgaaaggagctaatctggctatcgtcggttatggaatagaatcaacaaaaaggttaactaggttaaagtggttcaaatcttcacctgaactcaagaaaatagaaatagaaagaagtcaaaagaggaatcaggaaagttcttaagattagctttttgtgatattgtacattttctgcctcctcttctatttttttttatgctttttgaataataccgttttctgatatttcttgatcggaaagtggttttgtaatccatgtttttggtagggattacctttagtctgaccctaggatggtctctcttattaatttttgttaagctgtgccactatccatgaggttacattaatatctgagacagaggtaagagcaagatagtactgttcattttgataaatttggaatataagccaaaaaggcatagggattgaataggataatcttcaaacaaatggaatttatcagacaatctcgctttctttactctgtcttctgggattattgttgtgttttgtttgttacatgaaggatatgtaactcgttaccaggtacatcaagtttgacacgttcactcctgcagcagaacgtggacttccagtcactagggtaatcagt

SEQ ID NO: 65764 - DNA, 861 bp, Cucumis sativus
  Intron number 2 from transcript Cucsa.338680.1 (locus Cucs a.338680) derived from phytozome v7.0 (chr-ID scaffold0335 6; pos 1463581 to 1464441 reverse strand)
aacaaggaattaacgcacaggtaatttccatgtattcctgtttttctggatgagagtcattcacatacctatacattctgtatgctttctttgatttttcactctgaagtttgagtttagagtttgccatagaaactctctaagggagcttggatagattagacaggcaaactatggagaatcttgtggataagaattgatatttaccttttttattctggcatgaatcttatacaatagggacgagtatctcattaggtctcatcccaaaggctttcctaaagaagtaatgggtcaatttccgatcttgctattgagaaaaacagttttggattgaattgcagtaacacaagttaccaaattgtttgtttttagaatcatgtatgtattttctcaagatcatatgtcataattatctatcattacttaaagtgcaaagaaagttgatttgactctcaaggttatactctaattttatttacgatagcagcatttcttgtttgtttgagtgctgcaaaagaggtggaaattgatacttttgagcacttcttcttgccggctcgcagtttctttattattttttttgtttcgtatcttttttccattttgaattctccagattttcagttgcctgttaacagtaatatacataaacaggtggaatattattctgcaactccggctaaataatgctatataatctttgaacctcaaacaccaagatcaaatgcctacgaggctagttttactttctcaatccattgtgattgttaaccatctcttatttattttctactcattagtgttttgctttgatgctaatcatataattgttggttcagtacagtgggccatcgaaac

SEQ ID NO: 65765 - DNA, 722 bp, Cucumis sativus
  Intron number 1 from transcript Cucsa.362490.1 (locus Cucs a.362490) derived from phytozome v7.0 (chr-ID scaffold0361 1; pos 351339 to 352060 reverse strand)
atttgtaagtttaaatttctattttttttctcatttataacaagttttgatcagttcgtcacatctaacaaagcaatacttttacaaggagtggaaaagtcatttttttcttggggaattgtattctttattgtaataattgggtgttaggaagtactttcactccttacattatacatgcacatggcccacttctcactaatcttgggagtgtggagaagattctcccattctaaagagtttttaagttattgagctttttgtttgaagactatcaatttatattcctaaatttgtatatgagatttataaaaagctctaaacttttagatgtgaatcaatttagattttaattttcattaaagtctactttcaataattataagtgtttgttttgttacttgctcatataagagttatggacaatttttatggtaagtttaataaacaaaaggtctaaatttattcactcatgacaaacttgacgtttaattcatacaattaattataagtgtgacaatgatgtttttctaataaaatttgaaggaggccataaatgaataataatactcttagaaattagaagtgtatgtttcattggataatggatacaaaagtctatcttttaacttggaagtggatggtttaagtacaatatgtgaattgaaaagaaaagaaaagatatatactgatatttgtagtgtttctcaggtgttacaaca

SEQ ID NO: 65766 - DNA, 1024 bp, Cucumis sativus
  Intron number 1 from transcript Cucsa.323050.1 (locus Cucs a.323050) derived from phytozome v7.0 (chr-ID scaffold0308 0; pos 2588008 to 2589031 reverse strand)
cgtcgtcatttcctaatctcttctctctctacgtgcgatctccattccgctgctttctaatttctctctttcatgttctttgaatttcactttttgtaaacttttctatgcaatgctgtgcagttagctttgttcttgatcttctgtttgatttccttcgagaatttcaatcgagctaattgtttaaccaagcaggtgttgattctgagactgcgttttgttttctgttttgagaaagaattttgtgttctgatcgcggacttgaattgttcaggtcatgatatattcatgtttcaccactctggatagccttcttttttttttttttgttttcttgtctctgtgatgattgtgtgaaatctttgattctcacgttatgttttaggtggatggttttgatgaaattaagcgattcatgattcctctttttgataaatttgctttgctctgtagtttgtgccatcgatttccttgaagcctttttaaaaatatatgacatgtgacttgttctttcttctatggatcttgctctggtctttctccgagttctggaatagttgggcttgttgtggttcctcctgatgttttcctacataattgagctgttgaatttctccactcgctgatttcggaaaaccaaaatcacaagaaaaggagaagagattttcattatttggattttctgtttagggtgtcctgctgattctgtagctccaaatgcatacaagacattcatttatccaggatgtggctcgaatgcttataaactattgttgtttcttggaagaatatttcgaactaatgatgtctataagaagatattgtaaccagggtaccattgccgcgcagtactgtactaattagcaattagcataatataatccgcggttctgtttatatttatttttgttggttgcactttgccagtttaatattttcgtggacttatatttttgcctttttttttcttttgcttttcccttttcaagttaaaacaagaacattgagatcgatttatacagaa

SEQ ID NO: 65767 - DNA, 973 bp, Cucumis sativus
  Intron number 4 from transcript Cucsa.363210.1 (locus Cucs a.363210) derived from phytozome v7.0 (chr-ID scaffold0361 1; pos 807358 to 808330 reverse strand)
ctgcaagaagtcaattttttctaatagataaagatgtaaaactctttttcaaactttaatttctcaatttctgcatcagtctggccaagtttttccttccatgagagttattgatttcatgaatttagcatgatccgtgttcatgctgcagattaacctcatctatttgaccaattgtctttgtagattacaaattacatattaaatgaaaaagaaaattatcatttcttttagcactatgtaatggttgtcaggtatagtagtcatgtctctgctctagcttatatattcatgtctatgttactttaacacttctatttattaatttcatgaagtcattgagttgattttaattatcatgatcaacctgctggggaagcttaacattaagcttgttttgtttacgtttgaactactcaaatttctagcacgtaaaaattatcattcatgaacatgataaagcatattttaaagatgtggaaaactttttgtttaatgtttgattgaacgggaaatgaattgtttgtcattattgttgtcttgcctttcctactaccgtatcttttgggtaaagctctttcttgtactacttcttgactttgattttaatttttttctgtgaagaatgctcctccttccttgttctcaatttttatctacatcatatttgttttcttacatctgatcccaaaaaggtcaactattgtgcaagtgttatatttatagaatattgatttcttatgaaattgacattgatcttaacttttcagatctattgttggttttttaatctctatgaagtgtatttaattgttatatgctcttcacaccttattatcatgattgtgatgcaatgattttagcaaggttatgctgctagatttttaactccatgttacatatgtcatcagagcaaaataaattatttctttgtacagggccttatcacaaaagaaagaacaaacattgatcc

SEQ ID NO: 65768 - DNA, 611 bp, Cucumis sativus
  Intron number 2 from transcript Cucsa.339110.1 (locus Cucs a.339110) derived from phytozome v7.0 (chr-ID scaffold0335 6; pos 1837940 to 1838550)
ttgagtttgctaaaatcgacgtcgacgagttatctgtacgtctctctccttcttccaattttggattctcttatttctgtttgattctgctattgtagctacttgtacatctttgtggataatgtgtaatttaatcttcccgttgctcaatcttcaactggggtgattttaaacaatacttggtgagttatcataagtttagaaaaggaattacgaattgggcatataagagaacaaaaagttgtattttttgccaacttcttagaaagttgaaggagaagtatcaatataaggagaaatctcccatcgtaggagataccatttaagtttagtttgtcatgagccaatatcaatattgacttgtggaaatgatgttatcgaacattttcaaaatgtgcaaacatggtcatagctattctcacctaaaggtatctctagtctcacttgttgttgcactcaaagaacaaaaaatgttgaaatttagagattttattggaactttttgaacgacatgaagtaaattttaaaagaacactagaatattggaaactaaaacatatatttagctgagatttaattgcaagattgacgcggttatttgtggaatcagg

SEQ ID NO: 65769 - DNA, 763 bp, Cucumis sativus
  Intron number 2 from transcript Cucsa.349330.1 (locus Cucs a.349330) derived from phytozome v7.0 (chr-ID scaffold0348 7; pos 607807 to 608569 reverse strand)
ttctgcagctgccgctacagaaaacagtgcttacggtaagttttttggatcaaccaatgttctaacttatccagtttcagttagccctcttctatctctcttatcagctgcttaaatcaagaggctattatgatgatggcttacttcatttgcatcttctctgcaaataaaaatcaataagatttcaatgttatgctcgcaactatcttatttgattgtagatttaaggaaaaagttgatattggtatacatgcaattgcaaatgaatgtatgatctaaatgggatgctctaacacacaatgctcaatgacgcaaactctatggctcttttagtcaatgttgttgcattgttaactgttatttggggaggccaattttcaatgctcacgtaaagtggccctgcggattttattttttgttccaacattttcccctgtggatttccttaacagtatcttaatgcttcttgcttttgtactcaccagctttggatgtatctgactatctgtatatgaacgcaagagctaaagttttgctatcactaggagattctgctataattaaatttatttctttgaatgcataatgctccatggatcttgtattttcatgatacgtaagtttgaatttgagcctttctaaatctatggggatgtcaggtcttaagatctctaacaccgttggtatatttggttctgcaacatcatcatctaactgctgttcttatcccttacttttagaattctcagtctcgttacaagaa

SEQ ID NO: 65770 - DNA, 548 bp, Cucumis sativus
  Intron number 1 from transcript Cucsa.385940.3 (locus Cucs a.385940) derived from phytozome v7.0 (chr-ID scaffold0390 4; pos 1124780 to 1125327 reverse strand)
ccacaatttggttcggaacacgatacactgactgtgtgttacttctattatcttttatcgtcttttttttttcttcttaaaattttgcattcgttttcgttgttcttatcggttgttgattagtttaattcggtttatttatcgttatttggttaatttatacttttctaattcttactgatgaatttctgtgagctttggcttactatttcgattctgtttgtcatttcacaatgtatgaaggtgttggggtatttgtttatttctagctgttatagacgtaatcctataatggttctttatttaatttattttttcaatgaatattcgaagcgtatagattgttaagattgatggagataatgttactgttcacttacgcattattcaaatcattaatcgaattgcctgttagttggagttggataaacgggtttcatctatgttagtagattgaattttgagttatttcatttgcttttggcatggaatattaacgatgacttcctgcaggttaaaggctaccttaaaatttctgctacaacaaa

SEQ ID NO: 65771 - DNA, 150 bp, Cucumis sativus
  Intron number 1 from transcript Cucsa.313040.1 (locus Cucs a.313040) derived from phytozome v7.0 (chr-ID scaffold0299 5; pos 2312857 to 2313006 reverse strand)
attcaagtctccctcaaatcaatccaactctcgtaattcctcttctgggttcttcactaaatctcaaaccattcattattcttaatccctgattttgattttcttttttctgtttgtttcaaaaacagggtctcgccggaagtcctgtag

SEQ ID NO: 65772 - DNA, 613 bp, Cucumis sativus
  Intron number 1 from transcript Cucsa.385630.1 (locus Cucs a.385630) derived from phytozome v7.0 (chr-ID scaffold0390 4; pos 900798 to 901410 reverse strand)
tctgcatttcatctctttccagatcaccacaaaccgtaagtcttagttttcgaatcgattacatatttctacctttgcgttttcaccacttcttcttttttctttttattattattctgatggtgatgattatgattatgatgtttattgtttggttgagattgttgatctttttgtgtggatttgtttatttgagttgtttgtgaaattgaatgtggattcgattttgtgttttggtcgacaaggaaggcgcggaaatgaatgtaaaggaaggttggaatctattggtttcgataattggattagaagaaatggtgtttcagtgatggagtgtgtttgtatttggattttatttttaatcgtttgaagactagtgtgtgtgtgtgtgtgtaatggtggaaaatttgggagtcaaacaccgtgttttatttgtatggttctttgaaatttctaggtaattgttagggctgtgatgatagattgattgattagacttcaatttaccataatgtttctgtggtgttcagtttgtggctatgtcttatctcgttgagattgaaaaattagagtaacgaatctttatggtttttgatgcagcaaaattgaggaatcg

SEQ ID NO: 65773 - DNA, 680 bp, Cucumis sativus
  Intron number 2 from transcript Cucsa.342210.2 (locus Cucs a.342210) derived from phytozome v7.0 (chr-ID scaffold0335 6; pos 4584177 to 4584856 reverse strand)
cctagacgtttggaaactgtaagtacgaaagatatataattagtttcttcttcctactattggttctaacggaagccagaagattgtatttattagtacgtaatgagtttcaagtttgtggattattttttcttgggggtgggggtgggtttggggagcttagggcgatgccaccacaaaattgtatgagttattgaaattctaattcttttttggagactgtttacattctgaatcctacagactatttgttcattaactatttcactagttgacaaatttagtcttagttaatgaacattcttaattcacgggataatgtctttgttaatccaactaataaaacagaaactagtaattgaaatttgatgctagtattcacttgttttcctataactataatacagaggaacttgaaacatctcgtttgcttatttcttatcaactgattggatctgacaactggtaattctgacaactgcttattgtgaggatttgaccttaagatgtggcattgtgattgcgagtattaaaatatttgaatgttctaacatttgaacgttctttggagtttttttttatcatgatgttgtatgaaatattttactacttcttgtgcatcaatcatggaattttaagtttagtcttatcttttcagataaatcttttggcagctagaa

SEQ ID NO: 65774 - DNA, 730 bp, Cucumis sativus
  Intron number 1 from transcript Cucsa.342210.2 (locus Cucs a.342210) derived from phytozome v7.0 (chr-ID scaffold0335 6; pos 4585016 to 4585745 reverse strand)
gacaacaccggttagtaataaccattgccttcacttccctcttgaatatgatctatgcgggtttacttaatcctgtgcttttatgaattcctttccccatttacgatccgcgtcgatctcgacataaactgaactaagagaatggcagaaagagagatgagaaaattaggattaggatgtccaccattgtttttggcaaggaaggtttgattatcgatttatctgccatgagtttagggtgtcatgtgcttgtttctgcctttactagaatatattcctcacttcatgctctcaatcgagtgaatttttaaggcggtttatcttcttcagcttatagcctagccacatacatatagtggcgtatgttaacttcactatcagtttgttggaatatcgtccagttattggaaaattgcttgttagacattatatttagtttggaactagtttttgatatttggcaattaaattggtgattttcttttacatatgaactgtaaagtagtcagattctgtagaattctcaagttttctggtttttggtagtgtcaaaacttgatgaaggatttctgatgcctcttagagttccatttctacaatgaatgctctagtattggcgttctgaaacaaaaatgttatggttattgccttatattttggttgtttgagaccatgattgtttattccgctatcagggaatcctcagggtattattgtgcccccagtcgag

SEQ ID NO: 65775 - DNA, 276 bp, Cucumis sativus
  Intron number 1 from transcript Cucsa.383620.1 (locus Cucs a.383620) derived from phytozome v7.0 (chr-ID scaffold0388 2; pos 619742 to 620017 reverse strand)
ccatagcaattggcgagctcttcctaaacaagctggtgagtttttcttattattacaactcatttgtcattaaaaaggttccatttttatttgattttcttttatttaatttatttttaaatatctacacagaaaaacttaaacccagaaaaaccgatttactaatttcatccaattttggaaaagaataaagttcggattttttaaacttaatttgcatctttttctcttcctaaccttttgcttttgtaatttatcgtgtttaggtcttttaag

SEQ ID NO: 65776 - DNA, 782 bp, Cucumis sativus
  Intron number 2 from transcript Cucsa.360480.1 (locus Cucs a.360480) derived from phytozome v7.0 (chr-ID scaffold0358 8; pos 1133631 to 1134412)
ccgttcgaatccagacgacttttcgtggctttttggtatatagtactcttacccacttctctaaatctgtaagcatggatttggaaatctggatttttaggattccttcatttattgtgtgcagtttgttttattttcttctcctcttcataatgggcacatggttgactctatattcttcattttcgtcaattggactttgggctaggagaagtgatgcaatctttcacttaaacttcactaattgccgctatttttgctttcaattacattttcacttttcagggaaattgttggaagacaggtcttctcacatacgttagagacttctgtgtgagctaatgagtgtgcctttcccccccaaggaggatctgcgcttgggacctggatgtgatacgatttgagtagaactattctgtgactctccttaggagtcgccattttttgacccactagttatttcataatttactactcttacaccatgacttaagtttttggatttagttgcgattaagtggagttggttaccatgtgatctggtctgcctataactgttggaaatgccttgattccagtaggtttgcagggaaattgttggattttttttttctgtaataaaactgttcttccttcgttggtgtaggtgtagctaacatattggtagtaaactactgtctcaccgcttccgagatgtgcatttttttcgaagtgttttgataacattctttggtttgtgttctgcaggcaagacgggctctgagggcattgaaggcagtggt

SEQ ID NO: 65777 - DNA, 434 bp, Cucumis sativus
  Intron number 1 from transcript Cucsa.342730.10 (locus Cuc sa.342730) derived from phytozome v7.0 (chr-ID scaffold033 56; pos 5000410 to 5000843)
gcaaaaagaaaaagttggtgaaatttctctctttctaattgggaattctgatactgttttttgtgtgcgaatatagatctacatctaattgccaaattgcccaaccctctcaaatgaactgaataatttagatttagtcgtttgcctctcagtacatggactcttctggtatgaattgtgatttattttagaactctcttgtaaggaataatgatctatttccactgtcttacgtgtccccaagttgaggaataaattcatgcaaaggaacgcagcctggacactgaattccatcaaacaatctgaatgatatgcattttataatatttgagctctgtgttaatttaaatttgtttgtgtgcactacatctgcttttatattcccgaaaaattcaatccaactttccttaatctttttgttctttcaggaattt

SEQ ID NO: 65778 - DNA, 514 bp, Cucumis sativus
  Intron number 3 from transcript Cucsa.321930.2 (locus Cucs a.321930) derived from phytozome v7.0 (chr-ID scaffold0308 0; pos 1766936 to 1767449 reverse strand)
tggttggtatgtttctcacttaatgggtttttctttttgttccaatttatttgaattttggattggcgttaggggagttgcactttctaactctccactcctgagctaatacgggctcatgcttcccgccaccaccaccctccatgaatcagccatgagtgtcttctactttgctttagatttttacttcattggaacattttcggtgtaagacggtttcttttattcctccctctgcccattatctttcgtggttgaatgagagaagatagagagagagataagttttgatatgggttggccttatgatgacactgtgatcaaaatgttgggtctgaactgagtgattatcatctaatattgttgctttcttatcactcttgtttgtaaaggctcgaataggttgatagagcctctagaaatataataaaatgaatgtctccggacttctgtttccattcttgatcacgtggttaatcttaaatctcgttgtttgcagatcatactgctgcaa

SEQ ID NO: 65779 - DNA, 803 bp, Cucumis sativus
  Intron number 1 from transcript Cucsa.362670.1 (locus Cucs a.362670) derived from phytozome v7.0 (chr-ID scaffold0361 1; pos 462562 to 463364)
tacgtgaccaaaccttcagtgctgaagaacttcaagtaagtcataccacgatggtggacattctattatttacttaaggtagttgtagttgctaggttgtatgttagttatgctattcttttatggcgttatgaactttttattcccctcaatgtcaatttgttaaagaaatgaaaattattaagtcagtcaagtagctacttgttttgtgccttttctgccctctctcaatcattgtatttgtaccattcaacttgtactatagtttccaaacttggtagaacagtttgatttcataatttcgtagcgaagggtataataaaattgtcctttggctcttcccttggtaacacaagggaaataatgattgtatatctcaaggggaaacaactatatgctattcatgaaagacaaaaggatggcatgatgtcgaacaaatattctcataatttcgctggccttcaaagtgttaaagattgagtctttcagggtagggagagggagcatagtgagatttggtttttgactagatttcacatatctatttggacttcgatttcaaagaactactgtaattattccattagtaacactttacttaattggtctcccttcttttagtaggggtgttttggtggattagtttttttgatgcccttgtattctacccttttttctcaatgaaagttgtcgatctcataaaaaaaaaaaaaaccattctggacaatacttgaaaaaagtcatcattgtacatttcgtctgacatatttgtaatttgttgttattctttttggtacaggaag

SEQ ID NO: 65780 - DNA, 539 bp, Cucumis sativus
  Intron number 1 from transcript Cucsa.319540.1 (locus Cucs a.319540) derived from phytozome v7.0 (chr-ID scaffold0307 8; pos 236161 to 236699)
accattcaaacaatcgctaatcctatcagtcaaaggtaatttctctctgttcattcatacgcccttcaactatcaatcaaatcgaattctccttcatcactgttttcttcattctcccccctaatttctctttcacgtcctctgccttccaaacttcactcctactaactttcatcaatcttttctcgatttaacattatcattcagtttctactctctcatcaatgtttaacttctccattcttatgaccctagttgcaccaattcttgcaactctaacttttccccttcctcgtttttaaaaccctttgccggtattttttttttttttttatgttagatccgtgactattgttcacttgtcacttcagtgatgcgtacatttctgattattgtatgcttatttgcagttgcgtgttgtcttctgatgcagttacactttgaatgaggttctgtaggaaaataattcaagactagagttgatgatgattcatgtcttcttctttcagtgaaattttgtgcggaccatttgaagttcg

SEQ ID NO: 65781 - DNA, 709 bp, Cucumis sativus
  Intron number 2 from transcript Cucsa.309030.1 (locus Cucs a.309030) derived from phytozome v7.0 (chr-ID scaffold0297 8; pos 1003107 to 1003815 reverse strand)
aggagaaggttgaagagaaggaagaatcagacgatgtaagcttccttcgtttcttggaattgcattttaaacagttgaaatttttgcacctaaatatattgtagaaaatgctaaaagattctccaccttaaaaaacacccaatgtaggtttttaattgattctgtgatatgttcagcttctaaacactacttcccttaggtttttttaagaatgaactgctcacgatttataatcactaaagaaacttgtttttcaaaaattgtttttgctttttgaattttgtttgatagtatggggttcattttaaaactactagggtagagtagttgtccatctatcttataaacagtttgattcttgttagttttttctagggattctcaacatgccccatcaagatcttcctcatcttgattgggtctcaatttaggaccgaatgcttgtttggatattgtgtgctgggataccatatttgatagctagcattagtcgatgtaaccttataaaatgaactggtaatgtggaaagccacatttcaaaattttgaatggcaattcacataaactttaaattaatgaagtgtttgaaatggctatcatgaatcaatcaaaattttctcatctagttttctttatttgtatctttgagaatcatttttaagttcatgtaatttcttctaattccttgtttaatttttgtttgcaggat

SEQ ID NO: 65782 - DNA, 652 bp, Cucumis sativus
  Intron number 1 from transcript Cucsa.309030.1 (locus Cucs a.309030) derived from phytozome v7.0 (chr-ID scaffold0297 8; pos 1003996 to 1004647 reverse strand)
atcagctaaagatttgaaggatattctcggatctggtaaattttcatctccctctcattttccctttatgttttcttcgattctatagttttttgtggacttctggagaatttatgtgctgatgtctagtttttggtgtttatttggttagtatgtattgttagttttatagtaatgtttcttatttggtatcttgttattttacttgcttcgttgctattctctgccatttcgaactatgcagtttcgtctttaatagttttgttatagctatagttaattgttctacctcatttttgggattgggtaacaataagaagaatgtttgttatttgtggctggacatcattagattttaattatatgaaacctctaattattgtacttttctcgatggtttaagagattggagctgcaatacgttatgttaaattacatatgtcagactattatttggttttgatcttatatttgtatgaaatgttaaatcttaatgactcttatgctttattcccagtcctgaagtcatgttatacttctgaattttatttctcacatttgcattgaatatggagttacattgtagtcaaatatgttgaatggggtcataatttatctttcccgaaccgttttgcagttggagctgaagttg

SEQ ID NO: 65783 - DNA, 698 bp, Cucumis sativus
  Intron number 1 from transcript Cucsa.313490.2 (locus Cucs a.313490) derived from phytozome v7.0 (chr-ID scaffold0299 5; pos 2666353 to 2667050 reverse strand)
tgacaccgacgctgattcttcggattttatttctggtaagtcttggcattgttttgtttcttgtgtttgtgtgtttagtgttttagaaaatcgtagatgaggaaattggaaatgaaaatttcaacgatgtgtagtatatgttcgttatttatgaagtaatgttattcataattaagatacatcttttcgctcacttttacacatttgtatttagtttttctttctttcttttgccaacaatgatttccagtcgcatgaaatgaatgtttttaaggacaatgtcggcatgaggtagtacattttgttatgctggaacttggaagtaattggcttgggcggctatagaatcaaattgccgctgcttgtttatgtctatctttagccgttttatcgtggaaaggaaattaaatgttcatctgtcatgttatcttgaggtgatatacaattagaagttattctgtctcttctttgttctgatttcatcgattgtttttctgtaaatacttaaaggccctttttcttttaccctaatgtttgcttttcataacattctgtttttgttatttatattctccgagttgaatgtaaaagcgatgtaactagtttcatttggagcgatctgttggtattcattattttggttcccatttgatggttccatacttcttaccaaaatcatgtaatgtaactaatttcag

SEQ ID NO: 65784 - DNA, 599 bp, Cucumis sativus
  Intron number 1 from transcript Cucsa.339670.3 (locus Cucs a.339670) derived from phytozome v7.0 (chr-ID scaffold0335 6; pos 2255280 to 2255878 reverse strand)
acaaggaaggacttgattctggtaagcatctgatctgtcaaaacattttacctgattcgtctgtctgtattccctattttacaaagggcgggtttgttcccgctaagacccgatagattaggaagacgaagaactttccgggccagacagaaccaatggcatttttaggctgaaatatactttatgttaaataatcaaatatttaaatataaattttttagcgttttataaactttatttaaatgataatattctaaatgttaacttttcatttcaactttggcagtcaacattttagatatgttattccatattaatattgtttaaataaaaaaaaatcaatatgtgattattaaatagactttgtcactcaactatttcatttcattttttacgactcaaatggaaaactatttaagtgtcttttgaagcataattttcaaataaaccatcaatccttttttggactaaaggtatctacttttgttagtgaaaatactagacagttcatttagttacataccaactgtgttctaattggacccatttggttttgttcatttttgtttcagaacttgaaaagcacattccagatctcc

SEQ ID NO: 65785 - DNA, 674 bp, Cucumis sativus
  Intron number 2 from transcript Cucsa.365360.1 (locus Cucs a.365360) derived from phytozome v7.0 (chr-ID scaffold0361 1; pos 3083121 to 3083794)
ggaccatcaccgtcgcctctatcctttaccagattgtatattatttctctctaccccataccaatttccatttttttattacttttatataatactcccaccaaaactgcccatactctcatctctgtttttctaagtataaacaattaaccaaatgagattttcaatatcttataacttcaaaacaaatagtgcatactaattattcatgacctggcatgttcaatttggtaaaaataaaacacatgacttagagcaaaaaaaattgtataatctcaacctcttaggacaataattaaataaaacataatacgaagagaaaagagattatagaatctttttaattgtaataactaagcacacaaaaattcctccaatttcaaattcaacaaaatattttttttctttttctttttcttttttgttttatacccccttccaatttcaaattcaacagaagaaattggtatggggtaataaatatatatatgttattgatgaaagtatcccatctttaaattatttttttttaaaaaaaaagtaatattttagtggaggaatatgaggaatcaaacaacaacgttagataagagggggggaaattaatgattagtggaagaataataattaattaagcctattattaataattttaatattggttattataggga

SEQ ID NO: 65786 - DNA, 870 bp, Cucumis sativus
  Intron number 3 from transcript Cucsa.312780.1 (locus Cucs a.312780) derived from phytozome v7.0 (chr-ID scaffold0299 5; pos 2083036 to 2083905 reverse strand)
aggagcctcccttctcggtacaaggtactgatcttgaatctttatcacgtactattggccaagcatccatcattacttatgcattggtgggtgggttaattaatagtgatttttcattttcagtatgtaaaggtagaatcaaaagtagaataaaaatcaattatggtatatctggttaaaataacacttgtgaatcagagaaattgacgataaggattgcacttctcttaggggacccaagattgtcgtagaaaggatcagagtttctaaacaaatggatgctagtactacatataggaagtctagattttgaagttgaattaaattgtatgttatttgggttaaggagtgaggagctaagaagtgaggactactgatagggaaacagtggacgctgtctctctcttgtcattcttgggggagagatcagttttaggtttggaagaagggattttcatgtctggatcccgaccctctgaatggtttctcctgtaaattgtatttttgttctttgatggatccctctctctgaagtgagtttgttttctcgatcctttggaggattgagattcttattgttgtggaggtcctcatcgatctagcatttcttgggaggggtggtttcttatggttttcccaacacactgtgcactatcatgtggatctttgtttctttgggaggggggaggaataatcgactatttagaggattggaaagggagcgtagtgatgtttctgctcttattaggtttcattttttctccccatttttatttttgagatagtttgattccacatttcagttttgttcttgacttaagatccattctccattgttttaggtggacattagggtagctcctggatctc

SEQ ID NO: 65787 - DNA, 510 bp, Cucumis sativus
  Intron number 1 from transcript Cucsa.312780.1 (locus Cucs a.312780) derived from phytozome v7.0 (chr-ID scaffold0299 5; pos 2084161 to 2084670 reverse strand)
cagttggaaatttttgatatcctttcattatttttgtaattctctgtttgtttcttcatttcacttttgtgttttggtccagtattcgccatttctgaacaaaactaaatgttgtcagcccaaaacacaacaaaactcttgtgattatttgtagcatcgactacttaatatactttctgtggtacgtaaggaatcttgtgcttttctacatttgctttatacgccaaagataagtaattgtgacttttcagatacatgcgttctgaaaaatttgtgcatgtttgttttcattgttgtttcacgcttggtataagtttagtcctattcttttttatgttagcaatcttaatgaaaatgtatttgaagaggcatttttatttgtccgttatatggaattcaaagggtgtgtgaaacaaattgatgttggtgttcccactgtataagtccttccttaacaattcttaaatcatattagagatataaaagatcctgagcacccttactctttag

SEQ ID NO: 65788 - DNA, 947 bp, Cucumis sativus
  Intron number 1 from transcript Cucsa.359580.9 (locus Cucs a.359580) derived from phytozome v7.0 (chr-ID scaffold0358 8; pos 460042 to 460988)
aggtactgtttgagttttgggtattgcttaattttcaatcgtagaacttacgtaaatgttgctttgaattttgggggatttatgaggactttttgtgaaggggccgtgtaagttgggttgcctttatcttcagaactgtggaatatgagaaaaatgcaaacagtttagattctgaatttggcacttcaatgtttgaatgggtcctctcctcctcatttccacttcctggtaaacggcgacttgttgggtagaatttatcgacaaataagaatctcagtagctcgttttgtccctctcgcgataacagttagttttgtcttgtcaagtccacgtcgcaactcacccaacccacgttgtcgaaactgataattcttcatgtttgcccaactatttcaatatattgctaccaatggattttaaattacatgtctgagaattaaagaataaatatgctcgaccaactatcgagtatggatgataatgccggttggctgggtcctcattcaaagagagaaattttcacttttgcgtttgttagttcatcttcgtttttcccctgtcattcaacaacttatactatttcctactcacgagtgactacacaatatcagttataaccgtgcgtagttattattgtccttcgcaatcataatttataaccaaacttctctggattagctgtactatctaatctatccacggatacattttggaagtgatatccaggtcgagggaaatggccacaatacttataattttatgtttaccaaatcacttttgtcatcgaccttacttgaacaaaatctattctattgggtataccaatgtgtcctgtcacatagtgtattcaaaaccttgattctgttttgaattttggggtaatccctgcacactgatgttcggacaattttcaatgtagttccatcagcctaagagtattttccttc

SEQ ID NO: 65789 - DNA, 1016 bp, Cucumis sativus
  Intron number 1 from transcript Cucsa.388370.1 (locus Cucs a.388370) derived from phytozome v7.0 (chr-ID scaffold0396 7; pos 794709 to 795724)
gggtttaagggtttccatcttcttcagttctctcggtgagatttcctctgattttccctgaaaatcccagattctttttgtttttctccatttcttaatgtttgaatttgcatatgctttctctttcttcctcaaacttgttactctttctcactgttgtagcctctgtttgaagtttcaattggaagggttttcggcttcttcgtaccattttgtgtagtgggaataaacccagtttattttgtggctaaactgggctttttttgggtgtaatttttattaactccttttcgtttaagaacaaattttctttctggcggtttgaaatgaattcttgttaattcatctttctggggaatactggtttctattgagagattgtctgcacgaatcagtgaaggattttgcatttgaagatgcattttcaggaactttttttaattagagagaaactaattagaagaacagttattttcggggaaatttgggtgtggtatatttttctttggggcagtgtttctttttgttgatttcgtttaggggctgcctctgttcttgtgtcttcgtgtgtgtgaaatctcatttgttatccttgctggttttttaattgttggtttcttttggcatatgtatcttgtttctcattgatttgagggatatcatttagctgaatgattcagtttcaaacgtcttttccattgaactttttggcaattgagctgctaccagtttttgaacatttggttagctttgccggcatgctccgtttatgataagtctctcgttttatttatttttttcttcatgaattgaaatggaggtttttcccgctcctataatgatgtatgtaatcgcttgtttgtttgtttttttattttaccaatcttgcttctgtctttacagtgtttatggcccactctgacttactgaatttgctattcgcggtgggtgtttggtgttctgcatatattgttgttgcagttattgcatcattgcggatcatctcctgtctttgt

SEQ ID NO: 65790 - DNA, 906 bp, Cucumis sativus
  Intron number 1 from transcript Cucsa.349300.1 (locus Cucs a.349300) derived from phytozome v7.0 (chr-ID scaffold0348 7; pos 589777 to 590682)
gtctattgtggaaattccggcctcactaccatcaggtcccttttctaccttctctcttctcttatatcttcctttcttttgatctgatttttcaatttctgtgtctgattattctcttttcctatttttgtccgatgcctcggtatcccttcgtttaatttgttgttaattgatttgtgaaattcaggtacagtctttgaccattgatattttggatttcgtttgttgaaacatgtatttgattgatcaatcatcaatgggacttccttcccttttttgtctttgacctaattttcttctttaggactagaatcacttgtacgcgataaaatttcttgggcaatgaaaccctgcttacaggagataagcaggaattgtctttgctctaacaatggattgaaatgaaatgatttggagtgacgtttacccaatttactcgagatgtcttttatagtggattcaaattttttacttttacataagattctctcccttctttacaaatataatttacgagcaatttgaaactttatcatgttgggcttgtcaattaaatctaatctgttggtgtcgcattgaaatttattttctgtttatcaacaaaaactaagaaaattacaatagtagcataaacaataggttgtgatgttacaatgttagtttttagtgagagcttcattttaaatatagacccaaatagtacgactgtattcactcaaacaagaatgtcttgcttataagctcaagacttgttgtagcagggtattgctatgatttatcatggttagggagcagaagtttttatgtaattgtttgtttaaacagttgaataattatgcgtcctcttcatctggttttggtgatctcccagatcaaagataagttcagctgctgtcgttggttgta

SEQ ID NO: 65791 - DNA, 659 bp, Cucumis sativus
  Intron number 2 from transcript Cucsa.398750.2 (locus Cucs a.398750) derived from phytozome v7.0 (chr-ID scaffold0417 0; pos 3440 to 4098)
atcagggtactccacagaaatccgttcctcggaaggtaagctgtccaatttttggtactagattttgtgtgaccttaaaaaaggaccaacttgtgattgttctttttaaggaacaaactggccatgtgttcggtagaaatttccaagacattgtagctgttgttttttttaaaaaagccgtataatcatttccttttctactaaaaattacaattttgaggtttcaactccatacttatattctaaccaaaaaatcaaaaaacacctgttacacgtggtttcctactttccagtgagagaataaactcttagtaccatcaatattccaaccatttttggcaattgagcttcctttttttatattttcatttctttttaatgaagccaatttttttcagatttttatggtttcagctattgtgcttgcaagattttcatatcaatttagttgacatcttgagaatatttatttccgatgtctacattagcggggagatttcattgttcataaattgtggaatgttactatgcttagtttataattttcaaatgttacgacataaatgtttggttaaactactaattatatggactacactagacgaaagtacaggagtgtttgatatatcttctctgacttgctagatttatgcagagaa

SEQ ID NO: 65792 - DNA, 725 bp, Cucumis sativus
  Intron number 1 from transcript Cucsa.321430.2 (locus Cucs a.321430) derived from phytozome v7.0 (chr-ID scaffold0308 0; pos 1208955 to 1209679)
gactgggtcactaccattttaggtatgttttttgtggttctgaatcttgagaatcatttcgtggtatgtttttgttggaagttttgtgtctattccgtttgtgatcttgttggttatgcctgtttttcttatttgatgatgggatgttagagtgggtagtgttgatatcattatcaaattgtttctagcttgttattgatgagtcttatgacttgattttgctttgttttattttccttgttagcttagttagtcaaatacattcaaatggaacttattaggaaactatagtcgaccttttcaagttaagaagtaatcataacttctcctttgattgtgcactttcactagtcgtaatttgaatccatttctttccttcaaaaggcaagctcgtgttttattataattattattttcatgatgagttatctctcttctctagtttgaaaaaatggtatttggaattgccgagatgagatcgataataatgtgcagttatggatggtggatttgtctcttgaatagatgagccttatgctatgcttattattaagaagacttgtctattctatcgagtttgaagatggtgaatggaagtggcgtactgttaacagattctatttgagtttccttcagtggtttatgcatctgatatacaagaaatttgaatttacaaagggttgatgaatgttataatatctcacaatacagaaacggagacacat

SEQ ID NO: 65793 - DNA, 650 bp, Cucumis sativus
  Intron number 2 from transcript Cucsa.386850.1 (locus Cucs a.386850) derived from phytozome v7.0 (chr-ID scaffold0391 8; pos 366794 to 367443)
cttttccgttggaatatcttgtgcattcaccaaaggtaattctttttctctttaattcttaattttttaatctctttttttcttacaaatatactaattaggttcaaagtataaaatttgttagagatatcgcaaaatttggtctcttcagttggttaactttgctattcattataattatttgtttttctcataattagtctatcggtttagcggtttctttgctaaatctgtcgaagtatgatcgatttagccttttttgcgtttttcttttacaatttttgaatggtagattacgtttcaaaataattaaaatcgaagttttcatttttctaaaatcattggatttggtttattaacatctagggctttgttcttagaaaaaagggttttaccaagattccttttgttgaatgcttgaattaattaatatggtttttagttgtaggaattggaatttttcatctctaaacttttaatcagtgcggattattttctccaatttgggcgagccaatagattgaagttggttatagagtttgtgttctatattgttgaattcatagttttaattaattaaaaatccaaaaactttctgtcacaaatataaaacaggggagataatactagaggcagcgggtctaacatcc

SEQ ID NO: 65794 - DNA, 472 bp, Cucumis sativus
  Intron number 2 from transcript Cucsa.313950.1 (locus Cucs a.313950) derived from phytozome v7.0 (chr-ID scaffold0299 5; pos 3092128 to 3092599 reverse strand)
cttggaaacaagtctgtcttttttactaaaccctattatataatatatcatttttaatcttctctttacaaatttcactaatgtgtaaatcctcaaatatcaaattttgtataccaaacattgcacccttcttcaaatagcatcaacttttctatgtatttttacagtttttttctttcttttccgcttggagttgttgaattaatttaagaatccggctttaattttattgaattttatattaaagtctttgtaattgagaatttatttatttgttttttttgaaaaggtcatggagaaatattaaaagtatgaagtatgataatagcatttgtactgtggtgtgtatatatatattacccaatgttaatgttataattaagaattagaaaagggtaactagttaattaactacttaataagctaagcgatgtatttaagtgtaatattgttttgttttgatgtatatcag

SEQ ID NO: 65795 - DNA, 836 bp, Cucumis sativus
  Intron number 1 from transcript Cucsa.311470.3 (locus Cucs a.311470) derived from phytozome v7.0 (chr-ID scaffold0299 5; pos 1065149 to 1065984)
tttgatcattcaaccggaaattcagatactttctggtaccccttttcctttccttttcttcttttttttttacttattttctttggtttttacagggttttagggttgtgttttaaggggtttctttgttgttcttcgtatggattgctaattttagggaatttgatggtgcagtttgctgaattttggaagtgggtttgattcggattatctatttggattggattgttggagaggatagatgtttagaaattagcagaaggggattttggaatttgacttatggataaactgtgctgttttaatgcttcatattctggggtaagaacaagcttgtttaccttttcttttctttcttttttttttttttttttggtctttgtttttcattcctcaattataattgtattgtttcaaccttgtggtcatttttgtatgttgctgttctgttcttgtgtttaagggcttcttctttttagcaacagaattcttgtaattctatcaaaattctgtatgaactaggtagacttatggatcaatcaactcttcagatgggtgagggaaatcttataattacaatcaaaactctgtatgatcattgcataatgcatagctttagttttctatgtgtagagggaatttgtttagtttcttgttctcaagctgatgctgccacaaaaacgaatgatattttgtatggggttctgttctttggttgaataaatgttttcttttcatatcttatgtgaatcatcaacagcttataagtatgatacttttgttggtaatttggttatgtagattagatccgcattgaattacggtaaaggaagaag

SEQ ID NO: 65796 - DNA, 894 bp, Cucumis sativus
  Intron number 2 from transcript Cucsa.381860.2 (locus Cucs a.381860) derived from phytozome v7.0 (chr-ID scaffold0386 6; pos 91209 to 92102)
caatttaatttggcctggaaaggatttagccttgggtatggaactatgagtaatttgtcactttgttactttttttttcttctggatgatctctatagattattaatgacaatgatttgtcatgcatttcaaaaccgagctttagcattcccactggttctgttcaagctatgtataatattttctctaagaccagtatttttgtattcatctgattgcagcttatttttgcatgtcttctttcttttttgtttctttcttgtaagtaaacgaaacatgactcttagtgttacatgatttggatcagattggctagctatggctgtaactgagttgcttattatgactttgcccatgaagttcagataccacgcttaatttcgttacatgtttgtgtcctacattacttactgattacctgaactatatgtccggtactagagcattaagtttttcgagaatgattctgtcattttggatataatttggaaaaagtttgacagaaataatgaaaagtgaatggaactcatctaacttttttcccctgtaatgttagatcattagatgttctatttctaataacatatcaaatgattgagttggttatcattagcatcatacagcctgattcgtttctttcatccttttgaaaagtcctctgttgctacatccttgtggcttgtgttttgtccatttttcccagttctatgttcttctttcagcatttgtagacagatattttggctggtgtctggtgtatttcttggttctgcacctttttgataagtgggttcaaaacagaagctaagttacaaagtaagctgtttctgaattttgaattcctccaattatctctcaggagttgatagcgtgggcacgatttctgcatcgctt

SEQ ID NO: 65797 - DNA, 900 bp, Cucumis sativus
  Intron number 1 from transcript Cucsa.342970.2 (locus Cucs a.342970) derived from phytozome v7.0 (chr-ID scaffold0335 6; pos 5258070 to 5258969)
attccttgattttgtctcaaggtaataattattaggtacttatatttgtctctcgcatttcctttcttcaacctaagcctttgttgtgtttttctttatttctggcattcagtggtatttagtcttcagattgctcggttgagatgcttcatgttttgtgtattagatctctctcactatcttattcttgtttttctcggtcttgctggtcttaggctgataatgtttggagattttactttattttttggaatttggatacggtttctttgtggttgtttggcagatgctcctgacgttttgttattccctaaatttgaagttgtttcgagttcttttctcttggagttttttgttcgatcgccgttgatgaaattaagttgcgatttcattatgtggaaggctagaatcgctccatttggtttgtagtagcctgataatggccaaggaatacaacattttacgcattgtattggccaatttatcttctcattttttgctttatagtttcttttgattgcttattcacaattttagcctgtttctgtgatacgagaaatgtggttaaaaactgtgtggcgcagtaatgtgtctagtactgttacgaatttctgattgaggaaagttgtggtactgtctatctttttttttctttgtgctatttcttgcaattcggttaagttgattgtttagaagagtgagaacatacattaactgttccttttgcatcaaacagcaattattatgtaactcttcaatttttttattccttgttactcgttgtgatctcctacttcttataagaataaacgattttctcattgttagcttcattgatatctatctatggcgtttttaatttaaccataactgatctctaaattttgttaggcattcaag

SEQ ID NO: 65798 - DNA, 524 bp, Cucumis sativus
  Intron number 6 from transcript Cucsa.342970.2 (locus Cucs a.342970) derived from phytozome v7.0 (chr-ID scaffold0335 6; pos 5259828 to 5260351)
ctgcacaatcaacagcaaggcctcgccagtctcaggtatagtcttgtagataagttcagttgagtcgggattgtcttaatgttcttcatctcttggttttgaaatggtatttacatcaagtggcgtggaaatagttatactgcaaatgcaatgctgttgtgtgttattttaaccattgctgttgtatgcatttgaagtttcgcgtagacctgggatttgccaacgtgtaatgatttctctccttttgttctcagattctgaaatgtgcaaatgatttttcagcaattcatgcctactccactttgactcgatatttttctttttctttggaatctagtggagaaggagttcaagtatcactttcgttgcatgcatatctgacatttgtttatacagtgcatgtggctgattttttttttaaaatacattataaactgatcgtggcatttatggcacttatctccgacttatttccataaacctgcacagcgacagcaagggtcaagagttccagcagacaacgt

SEQ ID NO: 65799 - DNA, 869 bp, Cucumis sativus
  Intron number 3 from transcript Cucsa.366910.1 (locus Cucs a.366910) derived from phytozome v7.0 (chr-ID scaffold0362 5; pos 398206 to 399074)
ctttgcctcgtctaccttcttatcttcctccatctgtaactctctttctctctaccattacaaatctcattgcaagtctgttgatttttttcaaatgcacgttgagattatgtctctttcagttcaccattagataaatgacatcagtttagacttcatatactttttatattgtattaaatatgaccaagtttgtctctttcgcttttcacagcattaaggttttttcttttttcttttttacattacattgcatcatcctaaagtgaaattaatgtactaacaccttgaattagcacatctggtggccctttgatgatcaattattgctactaaccccgcttcactctcgatgactcaacacttactctcactgtcaaggtcattactcattctcaagagttagagtgaatatcaaaaagaaatgaaatgaaacgatacaagaaagaagaaattaattaatgttttgctcaaatttaatatatattgaagcgagaagtgagaataagtaatgaggctaagggggcaacatcaagtgttgagttattgaaagtgagaatcaatatcgagaattgagtgtcagtggccatcatgcatgcttcgaagggtttgctacgataatttaggtgatgatgcaagcaagcataaggttaaaaaacttatttttctaagtagttggccctttttcacttgaactccaaaagaaggtcgtctgtacaaaagtctcgaagcataaggttacaaaagtcttgatctttttcaatgtaggatcctcaccatgttacaatattgatgtatgtccatgatgttgcattgcattttttttgcttgtagacacttgagcttcttgctgaagtagctgttcttga

SEQ ID NO: 65800 - DNA, 417 bp, Cucumis sativus
  Intron number 2 from transcript Cucsa.313190.1 (locus Cucs a.313190) derived from phytozome v7.0 (chr-ID scaffold0299 5; pos 2396663 to 2397079 reverse strand)
caggtttgtacaaccttttcttgaatgtcctctattttgtgactctacctccaaatagtctattgtcaccgatagttattttgataactcaccatgaaatgaactttgattctgatataaaaacgaggaaagatatacttacgatcttcattgtttgatgctgcatttggtttctcatctagtgcatgtttagagaaagggagaattaaattgcggttatattaattttttctgaaaaagatatagatataggcatctctgttctcttattgaaacgatgcatgcatattattacaagttagacatttgaaaagtatttgacttcacgactatagagagtttagaagaaattacaaccttgacttttcttgttaatgaatagactgcaagctcagagtgcactagcaacatccggtt

SEQ ID NO: 65801 - DNA, 800 bp, Cucumis sativus
  Intron number 1 from transcript Cucsa.373460.4 (locus Cucs a.373460) derived from phytozome v7.0 (chr-ID scaffold0372 6; pos 365306 to 366105)
tccttcgcaatattcactattcaagccttactgaggtttgaggagttttcatttcatagacccactgatgctatgatttagtttgaccccttgtttttttttttttttttttttttaaatattctttgtttttatttttgtgtcaaaattatattatttgatcaatgacatgctaatctattattagtaataagaagtaaactgttgtttatctaatttttttagtttggatgtattactattttgttggaaggcttgaatgaattctagaaataatttgtttcaggcgtgcgccttttcttcttaataaagttttcattaggaatgggtgtatttactttcaggtgaatttgtttctttttcattgcctttataatttctttatggaaaaaatgtatttgccaatttgaatcaatagagtcactgatccttcctatcatttggttttttgggatttctctctggcttggtgtgatagatgggtgactgagggaacatcctttattggaaatgctcttattcttcatagtttgtttctcattttctcacctttacactttgctgctgctctcattgacagtcaactcgttttggaatttgtgatattgtgtgtattttggggtgaaagttgtatttaataagactagtgacagttcattattgattgtggagaaattcatgaccatctaattttaatttgaacaagggagaatgaaactgattgggcaattggatacccattgcatgtttttatccaactggtactcattttttctttgttctgatattcttcaggaaca

SEQ ID NO: 65802 - DNA, 537 bp, Cucumis sativus
  Intron number 1 from transcript Cucsa.327700.2 (locus Cucs a.327700) derived from phytozome v7.0 (chr-ID scaffold0315 9; pos 53484 to 54020)
ctcttgccaaagctggtggccttcgctttgctgtggtcatttctcttttctcttttctttttgttgtttttttctccctcttcttctaattcatgatgttttgttcgttctctagggtacttagccgtttttgttcatcattttgaactctcaagttgtttttccttatcgtttacctaaaaacgtgtagtaaatataatgacgtctcgtctgaggatttattcgcttctaagcaccgttctattgatttgttgcctgcattcaattcaaagattatgcgacaatgattaatatctgtgatgtattaaattgaacttcttacaatttttgtccattcggctgttcttgtgacttctgttatcatgaatctaaactgtagtttttttttttttttgtttactcccttgtcatttctgtgtgtggactcgtgggatttaatcataacatcaatgtttattcatgtttgcatatcttgttaatgggtttttgattattgaaagaattgttttgctttgatgaaggttgtggggcggttca

SEQ ID NO: 65803 - DNA, 904 bp, Cucumis sativus
  Intron number 2 from transcript Cucsa.327700.2 (locus Cucs a.327700) derived from phytozome v7.0 (chr-ID scaffold0315 9; pos 54066 to 54969)
tcaaaagttattcagttcaagacgaggatattgatgtaagtgtttcattatacaacatgtgaaactcgcatcctctagtgttttgctagtgttggaaactgagattcatttattttaattaatcaaaacagaaaacaggttcatgaccccgttaagcatatgccaagcaaagcaagcttgtgaataaatatgtttggaactagcattgttttaaaagactactgagactcacgcctcgaggcccaccttgaggcatgactctaacttgtagccttgagacaaacaccttctttgaataaaaagagggaagccacttgtggaaacacaccgttgatctaagtctctacacgtctagtgatttgaagaataatatgaatttctctctcttatgaaatttgaatgttgagttctgataatttgaacattttatatttttaatgatattaacagtgatgctaaagatgtcctaaaatttttgtttaagtgggaattgacgagagtggtttttttaatatacttttatatgactattatgtttagctatactttgtcgaatcagttcaagatttgtaaaatgtttttagttaaattagaagttgcctccttgcctcttaggaagggtctaaagttggctttttaaaacattggaaactagattttgtgcttgtcaggagtataagtaaacaaatttaactacatattgtgggtacaagtaaaatagggtggctgaatttcattggcagacaagtagaatacacctttcatcagatttgcattgagagagaacgtgtatctgaccttgctagttgacaaacagcttaactttgcttgacatattgactttattatttacctcgctatcatattaggttgtctgggtcccagggagctttgatattcctgt

SEQ ID NO: 65804 - DNA, 960 bp, Cucumis sativus
  Intron number 2 from transcript Cucsa.319410.3 (locus Cucs a.319410) derived from phytozome v7.0 (chr-ID scaffold0307 8; pos 135427 to 136386)
cacttttcaggtttgcattctctttatcctctgtttttgggtccgatctgtatgttttctaccattttcaacttccaactgcttcattgttgcttttgttcttattcttttttagttttgtttttcttgttcttgaagtgggtttctgggttttgcccataattccatgtttttgaagatggggaaggttaaatcttcttttctggactctctttgttgaccccaagttacaatcgtcactggttgggatttattgttttgagggattagtgagttaaaacttggaaaatatttggatggttctggtaaaatggaatacaataagctaatttaccgatatgtaagatgtttgaagctacatggtgaggaggagacctgtcggctggttctattcagcaatttgctgaccttgttgacatttgattcgggattgttttggctactaatggaattcattgatctctttccaattgattctgagtagattaaagctaagttttggagtgcaacaatatttgagggtgagaatttgaatctctgatctcttggtcaaatgtctattcctaaactagttgagctttgcttagttggtgagtggcttaatgcagctagaaatgaatttgcttcgtggaactaatataagttattcatgtgaaagaaagggaaattggggtttgggtgtattattggatcgaactcagactgctaacgattctgatgaacttatccagttttcgatggatttaatatgtgattagctttttcttcctctctcatatttttttatttctcaggatgaatagtgtgtgaacttatccagttttcgatggatttaatatgtgattagctttttcttcctctctcatatttttttatttctcaggatgaatagtgtgtgcttatttagctatttttattcactaccaacagctcttgatgatctctctgtatggttgcaga

SEQ ID NO: 65805 - DNA, 338 bp, Cucumis sativus
  Intron number 1 from transcript Cucsa.338650.1 (locus Cucs a.338650) derived from phytozome v7.0 (chr-ID scaffold0335 6; pos 1450719 to 1451056 reverse strand)
ggtatttattgattccttcctttctttcaagttttgaatgttaattagcatatagaagtttctaaatagcccttttggttttttgaaattaagcttgggaatacttggttaaattgcaaatttggtccaagaaagttatagtttagtttctatgataacttataaaaatctgataaaacaccagttttagaaaacatgttctttgtttttggaaattgaactcacaactcatatggactgaaaaattcacattaacatatcatatacccaaccattatatttgagtcttctcctaagtttcgatgagtaacttatctaaatcttgctatatggcagac

SEQ ID NO: 65806 - DNA, 701 bp, Cucumis sativus
  Intron number 1 from transcript Cucsa.375240.1 (locus Cucs a.375240) derived from phytozome v7.0 (chr-ID scaffold0374 6; pos 151020 to 151720)
acttccttcaatcttccagtaagtactttattgattcttttttctttttggataagatgtaagtaacttattaattatcttgtaaatcaaagtggttaaactgattggccgaaagtcttcgaggctttgacaaatgaaacatcttctggactagcaagtaaagttctctttgatgcaagcattaagccttctattcttataacattcagcaaaaaggagcctggaaatcagatgtcaataagctccgaaagaaaatttctgcaagtaccttggaggcatgatttttgcgcagttgtgctatattttcttttgtttataactctccattttcttctatttccctgccaactcctcgaaagaagctatctgagtgaaaataaaagccacatctttcttctatgagaaagaagttctgttattgaacataatatgaaagagtgaaattaaaaacagtggtagttagtgatgtctatgatttataaattactgtggcttccacgggttggtgataaccgtgtcatgattcttaatatatgatggttgctcagtttttctgctgaattaatttatgttttctatacttacctggatttttttttcatcaacttctccatttctctgcctattattttaacttatatagacattgaaagtgaagtaattgttggcgatccatctgcagtcagctgtgagtgtaaata

SEQ ID NO: 65807 - DNA, 460 bp, Cucumis sativus
  Intron number 1 from transcript Cucsa.339480.2 (locus Cucs a.339480) derived from phytozome v7.0 (chr-ID scaffold0335 6; pos 2077292 to 2077751 reverse strand)
actgttatcgatacctttctgtttttggtaatgatattttttcgtttttctattacgtatttcaaattttgcttttctttcagcaattatttctttgttttctaaatagtttttgagacacaattgttgtttgtctcaataatatttggccacctctttgcttttcttaatttcatactctatgtttatatgatttattttgtatctaagaaaaacgtaataattttttgttttgtttttgcttcttatgctagctagtttaattgaagacaagaaagaaaaaaagagttcttagacattctttaaatttataatgaataaatggataatcgttaaacacatttcatcccaacataagaacaagaaatgaaaaacaaaaacatgaaaccgtgctaatatttgaatcacattttttggatttgtagatcgtacattttgttgataaattgggaatttggca

SEQ ID NO: 65808 - DNA, 1035 bp, Cucumis sativus
  Intron number 2 from transcript Cucsa.370390.4 (locus Cucs a.370390) derived from phytozome v7.0 (chr-ID scaffold0367 8; pos 124103 to 125137 reverse strand)
gattttggattgagaacaataaattttccgtccaggtaagcagtttccacatacctttcaaaatataaaattgataaaattgtgttttcaaaaatgttggaagtatgttgtgaacatttgaaaatacgtttgtatgatttgaggattgaccaaaattgttttgtttgtttctaatggtttttgctaaatgaaagtatagactatttcaaacgactttttttggaagcgttttgaaattaaaagtatgtttcagttcagtccacttatgaaagtttgaatggttagatttgatgaattttcaaatgaaattgctaattgaaactaaatgctttgtttcaaatgcttgtttaagatttctgattgatacaaaatggttattcggatacgccaagattttgttttgaaaattgtttgcttctttttgtagtcatagcaaattgattgattgaaattatgtgagacgacacattttgtggtttggcattcctttggaatgaagattcatgtgtgttgcactcatgactcatatgacctcacatataagtaattgaatgttttggtctattgctaatggacttctctaattgaatgaatgaataactggtgttactaatgagtaaccacatatgtctcaattatgcatctttttctactctgataatcaaaagtattgattgattgaaaattccgtctagtcgaaagtattgaaagtattgaaatatttgctgttttatttaagggctgaacaaagttttgcttgtttaaaggtattacaagtttattcgaatgttttggttttattggaactactatatgaaaattttagatcgagacatttagttttaaaagcttatttgattgaaggattttggttttaaaagcattttctgtaacaaagttttcactgaaagtttagcaaggatttatatttttgttacaaaaatttgaaaaaaaaaaaagaattttgaagcttggtattggaattgcttgttaagtatttttttactcatttctgtttctccaaaatgttttcag

SEQ ID NO: 65809 - DNA, 790 bp, Cucumis sativus
  Intron number 1 from transcript Cucsa.337060.1 (locus Cucs a.337060) derived from phytozome v7.0 (chr-ID scaffold0335 6; pos 189017 to 189806 reverse strand)
ggatccttccatttttgctcattttgatgtatgttatgttatatgtatgtatacatcttccaacgcagtttttttgttttaaattttgataaactgttgtacgtaattaatatcactatctcaatacgataggggtgttattggattaatttacgggtcaagtaatttctttgtagagaaggctttcatatttctccatattaacaacttacattgtgggttaaattccattgtaacggtttgaaagaaaggaaaaaaaaaaaaaacttttgaaaagctttttttttgtgatgaaaacgtttcaaaactttaaagatttagggtttagtaggaaacctttttttttttttgagacgtagtatcgttctaattatgtttgagacttttttttattctttatatcaaactatgataatacgaacttatgagcatttgagtttagtgttcattttaattatttatttatttatttatatgttctttatatatttaatttttgtagttatgtcaatttcttaaaatcgtacacttgcactgaattcacactttttttagttaattcgagaaacagtcaattttatattcattcaatttcaaccttacgatgaaaatgaaaattttgaccaaaacaccctttacttgacctaatttataacatatgttagtgactaaataatttgtagttcaattcttcgacgagtaaattttacgataaaatataaattcaaatgcatgatatatataataagagtaatagtaataatttgtacatttaaacaggaatttccag

SEQ ID NO: 65810 - DNA, 790 bp, Cucumis sativus
  Intron number 1 from transcript Cucsa.332420.1 (locus Cucs a.332420) derived from phytozome v7.0 (chr-ID scaffold0326 4; pos 146162 to 146951 reverse strand)
gaattggcacttgcaggtaagcaaatcttctcaatggacaagggaaaaactcaaactaatgtctttacgaaccaacttccattcgaatcctatcaagatttcatgagaaaagtggattttctgaaattttccaacttcagtattgttgatacatagacagacatttgaagacaacctttgaaacaatgttggtaccaaccagaaaagatcttccctatcgatggaactcctgaaatcagacagcagcatatttttttgggtttctgtggacaaactctaattttcaatacttgtctgcctaatctcattatctccataagaattgaaacaatcatgtcccgagttttgatgtagataagttaagttttggaagtaatcagattaactaaacttgattgaccctataaaaagggacaaggagagagcataacaacctaacagttgaagattgtaaagctctctctaatttgcaagttttgaaaattccatattccatgagagtccaaaacagaatcactgtgtgttttaatataaaaggtaagagtacaagtttataaaagcattggaggcacttgaaacttctttcttgagtatctgaggcaggcctaaaacaatccaaattcaacaacttccccaacttattactaatacattaatactgttataataacctaatagcatttccatcattcgatcaagcaaacaggatctgcgtaagaatcttatgtttgaagatacatttttcatgattgtagcgattgaagttggaagggtgtctgagttcaacaaa

SEQ ID NO: 65811 - DNA, 717 bp, Cucumis sativus
  Intron number 1 from transcript Cucsa.364630.2 (locus Cucs a.364630) derived from phytozome v7.0 (chr-ID scaffold0361 1; pos 2044162 to 2044878)
cttacgtcaagttgactacagatttccagtttaaggttcgtgatttcccctttgttcttccgattttttcattttctgattcgatcctcggttttaattttctttttctgaatcttttttgaacaatctgtttagggtttgatttcctcgtccttcctcctaatttacaatccttgttttctttttcatttcgtgttattcattatctgaagaaatgttggggtttatttgatgcaattgtgtattgggtactgtcatttgataaattagttgtgtttcattaaaattttactgccatacaaaacaaagtctacaactacctcctggttcttggactggttgttgctacatactcaaacattcgtggcctttgttagtttgggctcaatttgtctagacggctagtatggaaactataggaattaacaaagctgaacaaccttcagccgagacctaggaatttaaatgatgaatgttcatacgtgatttcaaaaagagtagtcccaacaggcaacattgactgataactgagcttagttacaaaccgaacgagaatagaatagcggaaaggatgacctcatatcatgttattaactagattttttgggattttttccatgtttcataccaccgggttgtgaatgaatttcaattaattatatccattttttattttttgtagggtactgctgcagtttgtgactgctactactttga

SEQ ID NO: 65812 - DNA, 643 bp, Cucumis sativus
  Intron number 1 from transcript Cucsa.377790.1 (locus Cucs a.377790) derived from phytozome v7.0 (chr-ID scaffold0380 6; pos 281145 to 281787 reverse strand)
ctccccagcaggtctttttctccttaaattttccatttcttctttcatcatcattctttcttcttgtagtgtattatatttagtatttcttctttctcctatggacttgaatattatcgcgatatccaatgagtcgctatcaatatatatgtaaaaaagaaacttgtattggacagtttgaaaaataggacgtactattttgatatgattgaatccaaaagcttaaaatgatagattacaatgtgtttctttgtgagcttctattctcaagacccttgaaaaattattctatagccattattttacataactagagtcctttcctgttgaggaatgtctctttttgtgaacatggtttttttctatgtttcatttctttcttaatgaaagttgtttcgaacaaccttaatattctatacaggaatgtttattacttagctcacatgaacaagaattcatcgaaatccatttcaagttcgatcttggttgcctattgttctttttttgtttttgttttatcttctttgaagatctaatgactgcacgtgagttaccactgtttaactttttttctttcttgtcccatctggtcggttattggatgctttgaatatgttaaaggttcatatcacacaaggagatc

SEQ ID NO: 65813 - DNA, 670 bp, Cucumis sativus
  Intron number 1 from transcript Cucsa.310230.1 (locus Cucs a.310230) derived from phytozome v7.0 (chr-ID scaffold0299 5; pos 87859 to 88528 reverse strand)
acactgccggaagtgagtatcactctttttctttatatgaatttctcacttgtagtatcgttaatgaggactgcgctgtgtttgagtagtctggtgcaaattatcgaataatttatttattttttgttttggatggggaatgataattatttaacactgtttagtcggatcatgtagttgtgctgtacagtataccgtttatttcgaaaattggcggtagactgtgagtagagctttatagtctgaagacggggagttggcagatgtgctttgtcttgtatgatttagtccttgtttgttcactgttcgctatttgtaattattgcttgatctgttttgatgctcgctaaaagacagtatgtgtggaatttggatggcatttgtattattgaacctggacgatgttttccatgatttcaattcgttgttagtaacatcaaaatgactagtgtgaggattcttggttctttgtaaaataacacggccatggggaataaaatgtttttcaatctttgtcggctttggacgacaagtgaagccaatcatctttgaaacctttacccaactcattcatactatcaactacagtcaatgagttttgagttgtactgacaatgacaacctatattcttcaggaaggattccttttgcattccttgaagatattcat

SEQ ID NO: 65814 - DNA, 916 bp, Cucumis sativus
  Intron number 2 from transcript Cucsa.325250.1 (locus Cucs a.325250) derived from phytozome v7.0 (chr-ID scaffold0312 7; pos 48793 to 49708 reverse strand)
gcttccatacattgcaaggtaccgtgtcaatgatcataatctgtttacaacttctgattggggagtattttggtttgctgtcggtttataggtgttgaggttttgtgttcttgaactgcgatggtgttttcgagaacttatgcttgtcagctaggctgtggtttggaggatttttttttagttattagtgggttgattgtcaaaagcaaaattgactaattgataactgctatgctcaatggcttcatgctggagtttatggaattgatatattttgaacaactgtttcaatttggtttaaagtttgagtcgtgtaggagttcagtagaaatgggcaagcaagagtgtgcttggttgccgcgtcttagagcttaattgtgtaatttcgaagaaaaataggtgccaacacggcattgtaatcaccaacgagaagaataggaaggggggggggggattgattgatcttcctaggaagcttaaagttttgacggcaaagaagggagttcttgaaatttatgaagtaaaatctgagagacatttgagttttggtttctgagtgctgacatatattggctagggggactgagagaaatcataggaacaactgttgagctgttacaaggtcggtaaaaactagtgctttaggtttaccatgcctggttactagagaagtaaagaacatagtagcccagttaattccggccgttggcagaatcatcacctcccatcagtgggaatcctaataaccattattggatggaacttgaagtttcatcgaccaattaatgaactagtttgaacaattataaattattctaactatctttaatagttctcatttaatatatgttatctgcttttttaaaacctagcctacaatttcatcggttgtttgatctcctgcgagcagatttgg

SEQ ID NO: 65815 - DNA, 660 bp, Cucumis sativus
  Intron number 1 from transcript Cucsa.384800.1 (locus Cucs a.384800) derived from phytozome v7.0 (chr-ID scaffold0390 4; pos 242336 to 242995 reverse strand)
gcttcggtgcagctccctcaggtaccaaatcttctcatctcctaaatctcttactcactatttttccttccgacgccttgttttcatcgccacctctttccgattatgcttctctaactttctgttgcttccaattattctcctgctcttttgtacacttttcacttcgattctttttcttcttcttcatcactaaaattttcacattttcttcaacggcttaattgctatttactctctatttcatcggatatttgattttcttgctcgatgagtttttctaaattgtccatttggcgagacgtttactaatttctactgccctctgcatcgcacctgtattagttgttgagaaatttcatttgtgcttagggtgtggatttattgatttgctgaaaacgaaaaacacgggttttctttcattttcttgctctatctgagctaagctgcaacagtgacaattaatgcagtgaataattcgatttgattattctgtttataaaggtatagatcgaactgtattgttccttcgtacttggaagaagtactgtgtgtggttgttgttttaataacatattattgtgcattgaggaggtattgttatttcgaacttagtgtctgttgttttcgtctgttatcgtttttaggggctgataagtt

SEQ ID NO: 65816 - DNA, 458 bp, Cucumis sativus
  Intron number 3 from transcript Cucsa.312100.1 (locus Cucs a.312100) derived from phytozome v7.0 (chr-ID scaffold0299 5; pos 1587586 to 1588043 reverse strand)
cgccagtatgatgtttcttggtttttgttgtattttatatgcacaaggatcaaattattcattgatatgtccatatattcgggtttgatattgatattaaaagttataactatcattgataccttttataaataccataaaacataaataaaaaaaaaaaacgatggctatatactctaataacaagatatcatcttcaaatcccaatagcgtgatatacactataataacaaatgtataacttagttggaagtaaaaagaacttaattcttgtgcatataacttaaaagcataacattgaccttggttattatgttttctttattgtttagttttaagtcgtggcactacacggatttttggttaagaattagttttattactcttaattattggaatttgaagtactcatgaccttatgtttggaacaggtttcctgttcgctgtgtagtgagacc

SEQ ID NO: 65817 - DNA, 443 bp, Cucumis sativus
  Intron number 2 from transcript Cucsa.312100.1 (locus Cucs a.312100) derived from phytozome v7.0 (chr-ID scaffold0299 5; pos 1588140 to 1588582 reverse strand)
caaccactggtattctaattctccatggatcgaaatcttttttcttttccatcttgtttgaagattttatcgatttctgttttttcttatgtctcgcgttgattttttgtatttgtttataatggtgcatcaattgatttgttaatcgtgattatctgttgtttcggagttttgacttcttccgtcaattgtgttcaagatcagtttgttttgtgggatagagctcttgtataatttagaaacaaatctgttgaggcaggatcgttgttttgttttgttttacttgatttggaaaaaatgattattaggtaatatttgaattggcttgaattgtttttcttctttgtgatgatttttgttttctgatgccttcttcgaatgatgaatattttctttctttatttacagcggaagagatattccgtcatcaaatatcgatctgc

SEQ ID NO: 65818 - DNA, 745 bp, Cucumis sativus
  Intron number 1 from transcript Cucsa.363710.3 (locus Cucs a.363710) derived from phytozome v7.0 (chr-ID scaffold0361 1; pos 1326295 to 1327039)
cgagtgttgcttgtcgatctgtgggagattttgtggtaaaattacatgtttttgagcattattgaggcttgtttctttagtctttttggactgtggtttgtgcttttcttcatggtttctctgattagttattagaatcagattttgcattctgttttgaatgatcatatgaattcttagaccatgagaatctatggcggcttcactaattgtcagttcttttttctttttttgtcaatttcatctttatctttttgttattttctttgtctaattattgaataaatgaatcaaagtaaaagacataatacccgatgttgaagttttcttagtcttcaatctctgggaaagttcttatccggaagaaatgttgacagttcaaacggggtccggaaatttggcgatatttgtgctggatgcacttttctcttgtgaattttttagttgattcttgaccattagcatggttcttacttataataagattccctatttgaatataatgctgttatggagaaagtttgatatcaagtagtttctaacaaaatagagagccaacgaaaagatgtttctaacaaaagagtggtattttatggtgctttaggtccatgtgaggtttgctttttgttcttttgaagaatcttctttccttgctttttgctttactctatgtgtctcctttcttttatttcttgtttattaagtatagtggatggaaactagtcaatgtttaatggctgtgcag

SEQ ID NO: 65819 - DNA, 543 bp, Cucumis sativus
  Intron number 2 from transcript Cucsa.326100.1 (locus Cucs a.326100) derived from phytozome v7.0 (chr-ID scaffold0313 2; pos 359042 to 359584)
ctagtaagaaccctaatcttattttttttcagctctcttcttctttcttcttcttctttttatttttaattttaatatctcaataattgtccttttgaatctcattttggttatcaaattctgctagttgtatacatagatctagtgataggtatattaaattaataaaaagtatagatctaacttttaattttcatttatgtatatagttttaaatttacatgtagacaaatatgtatggtagatctagtaatactgtagttttgtctagataatttatgtgatttaattacttttattttgaaaagttcataatacactttggtttctcattttaagttcgtgtttcatccattcaaagtatttggtgtggcattaaaaccaggtggaaaattaaaagttatatcttcagttagtttgacattttggtttctagttccatcttcgcatgcaattgttgaattaaaaaatgagaatgggttaataataaagtgaaatatatacatgagtatatgtaggaagtaccggagaatcaaagagcgg

SEQ ID NO: 65820 - DNA, 782 bp, Cucumis sativus
  Intron number 1 from transcript Cucsa.349890.1 (locus Cucs a.349890) derived from phytozome v7.0 (chr-ID scaffold0348 7; pos 1095495 to 1096276 reverse strand)
cttgggggtggatcattgtaagaatgtcctttttctaaaaaaatttaatttcaaaccctagatatccttttcctatgataattatgaagtttcatggaatgaactagtaaacaatgtttcgtacatggtggatctcttttcattactagagatctaagaatttacttgagccttttggtttgtaaatttttgtgatgaaaattagatatacatatatgtgcttatttaatttgctgatttttttctttgttttatatactaataaaaataccattttgaatcatattcaataagatttgggcaattgctcaaatgtacatttgcaagaagttagaaactaaaacaaagaaaagaaaaacaagtggtatatgcatgcaaacacattcaaatttgataagataccaaagttcctatttgagagtggttttgaaattgttaatccatttttatcgtattttaatgtttaattttacacactattgaatgtaatttccatatcactaagttaaaacatgtttaagagtcaataattaaagtgatattaacaagggtagaaatcactcccaaacatattgttcataataattcattacatttacattgtttaaactttaccttgtttaaacgatttacaaaaatgttactttttatttttaataaagcttaattaatctatattttcatatccggataaaatataaaattttgttttatattttataaatatttttagaagttcttctatttacaataattttcacacatatatgaaagggtgtttg

SEQ ID NO: 65821 - DNA, 661 bp, Cucumis sativus
  Intron number 1 from transcript Cucsa.333900.4 (locus Cucs a.333900) derived from phytozome v7.0 (chr-ID scaffold0329 0; pos 49652 to 50312 reverse strand)
ggtaatcacctatcagttttatctattgcctctgtttcccaatgccgggggtctctttttagcttcttgattgttgaccttggtggggattctgttttttggattccagtgttttctttttgtttccttgtagtttcttgaatctttcttcttggaaacgcagtttcttgaatctgtcttgttggattttttgtttttatcttagagtagtgtaaatggattcagtattttctcactgttctctgttcgaatcctgaattccatctttcggtgtgggtataattactgtcatttctgatttctctcgctcaagtctgaaccaacttacctttcttgcttttgcttactagtttgtattttgcacgttttttaattgagtcgctgtctctagtgttaatggtgagaggcgtcagtctttcttcctcaactgactgctgctatatattatctttggttgtgttttgggataaattgtggcttgtttgcttgctcttgtgtgcccaaaagtttgtttgtttgtttgttttctaagttgtattttctaaaggatttatcttagttttattttgattgatctgctgggacatgcgttgtagttatatatgtttatcatgtttatgctgcagtgtgggggcatttttcgctgttctcttactaggtg

SEQ ID NO: 65822 - DNA, 557 bp, Cucumis sativus
  Intron number 3 from transcript Cucsa.331930.2 (locus Cucs a.331930) derived from phytozome v7.0 (chr-ID scaffold0325 6; pos 116361 to 116917)
gataaaggtatgtcaagttttttccttttctgcttcccctcaacattgacggcaatttaaatgtagaattatgaataatgcctttctgagatggagttttacttaatcctcactattagagaaactgggattctgtcatgcccaattacttcactcccactgatcaaaaagaaaatataaagaaatatgaagaggtgctcttgcttaatacattgtcatttcgggtctcgtttggttattttagtcaagagcattggccatattggttcgttgcatacaactgtgcaacattgtatgttatgtagctgatttggaaattccagtatcatttttcttgttcatcagtccgttggtgctgtcttgaactgtgcagatataattgaaagatgaaaacggaagcatcaaagtttacaatagttatatatcatcacgaacttttattcttccccgttcccataatctcactgacagaatatgtgacatctttttggattttctgtatataataatagaaatccgtttgtgctgttttaggtggattcgccttaaaaaaacaa

SEQ ID NO: 65823 - DNA, 787 bp, Cucumis sativus
  Intron number 1 from transcript Cucsa.368470.2 (locus Cucs a.368470) derived from phytozome v7.0 (chr-ID scaffold0363 9; pos 145203 to 145989)
atcaacaatctccatcgtcctcagctccttctccggtagagtaattccaaagttcttcgcatttttctccccgccccccttttgggttttcatattcatttgtttaatttaactatcgttgaagggtatctttcaattcagcttgaacttggtgcaatcatgaggaaaatttatttcctttttgcattgtctgttacgaaatgattgattaatttgtgctttggggctcagtggaattagtttatgcacatgcctaggtgactagcaattagcatatggtttttgagttatattccaatttaccaattgtgttaatgttgttctgaacctacaaccaccactatagtttcactgtccaaattatcaagtttctgattctatattgaccatggagtgaacaaattgactttttttttttgtttttgtttttgagtatacgtgaatcttcaccatgaagtgctctcactatccgtcttttctaatagactaatcagtccagctctgaaataatcatcttcttgtacttggtgctaacgtattgatttttttcccatggatgtagtggacttagagcgtgattggtttaacttttctaagtatttagttttgaaaatttgttgctccaaaagaaattggagtgttcgtcatctactcaatagattttgaaacacattcattgaacaatttttatcaaaactgtttaaataaaaacgattttctttttaaaaaaagacaccttttgctatattcaatccatacgagctcttaacgttcttttgatggcaga

SEQ ID NO: 65824 - DNA, 610 bp, Cucumis sativus
  Intron number 2 from transcript Cucsa.368470.2 (locus Cucs a.368470) derived from phytozome v7.0 (chr-ID scaffold0363 9; pos 146091 to 146700)
caaagtcttttagctgtaggaacactgtaagtagattgctaccctctggaagattatttttcattaatcattggttgttggttgccttgagggtcattaattttcttcctgtgctcagttcccatatctttggttcactttgagttggctagatcattttctatttgcttcgagttattattgataatgttatgcttagagttatctgcttaatgctacaattcttgtctattttcatacttcagaactttttctctgtataatttttatgtgtttcgtaagaaattgtgttccattatcattgatctacttccaaattactgtggagaatgtctttagagaagttgacggacttgcatcttcaacttgcctaaccacattaagattttgattattccaatttgttgaaattcttaagagcaagagtcgcttgaagtgatttatgttctgtgttttatcatttgaagagtataatggttttgaattccaaccatttcttatcttgaaggaaatatgttcaactttaacttcctattttaaattttggtcttttctctcaatttgtttttgttttttgttttaaactgttttggtctttcttgctgcaggg

SEQ ID NO: 65825 - DNA, 716 bp, Cucumis sativus
  Intron number 1 from transcript Cucsa.338030.1 (locus Cucs a.338030) derived from phytozome v7.0 (chr-ID scaffold0335 6; pos 1025829 to 1026544)
ttcgtagtgctgaacaaggttacactttctcacttttcactctatttttcacatctaactattttttcttctctcttttatttttttaaaaaaaggttaaattgttaaaatatataatatatgaatttttgttggtatttatttcaatattaattgtggtcattatttataaatggttcaaaattgtagtaagtaatgtttgtttgtttgttttttttataaaaaagttcacaacgttatttaaatattgaatgctaagaaaattgaaattagagacaagatatttaatttaagcttgggaagctatcttaaactaatgcaattaattaatccatgtggttacaaaactttctttatcaaaccattttttagttgtttaattctccgtggtttctatttaattaatcattagtcttaggaagtgtcaattacaaatttaaatttataattatccatccattaacgagttgactaagggtagactaaaaaacaaagcattgttgggcaaaaatgacatttcaattgattatttgtttgataattatttagtttttaaaatttatttgtaaatattgtgtgttctatttttcaccattttttaaatgaaaaggttaaattttgcaatttaagtacaaaaatccaatgtgaaaagcaaatattcctttgtaactaaaatggtggttcttatttacaacacaggagatacggcgctgcac

SEQ ID NO: 65826 - DNA, 730 bp, Cucumis sativus
  Intron number 2 from transcript Cucsa.395590.2 (locus Cucs a.395590) derived from phytozome v7.0 (chr-ID scaffold0410 0; pos 1106483 to 1107212 reverse strand)
cctgataccattaccttgagaggagcaccatcaaggtggtttgccgaaccttgggtttcgtctaagccatctatgttggtcacacataccattttttctacatttggaagcataaggttttgtctatatttaagcctaaactaatttcttctgcaatgtttttctctgtttattttgcctgtcaagtttggtttgatcattagcttcatcttccttttttgtggtcttccaaattgatgcaagctcaatttatatggctagttcattgtatatttggtttactgtaggatctgagtgggttttctaccttgatcttctgcacattggtgtgaattgaggaatatattgcaccttataaagttgttacatgatataatattaaatttaccttcatccatttgcttaaacttttatgtaaattggtgatttaacatagtactagggttgttgatcctgtattcaaacccaccatgcaattttatttcctcctcaattaatattgattttcactcgttgaaaatgtggggagtgtgatataatattaaatttaccttcattcatcgatttaaagttttgggtgattcttttaggtcattttgtgatttaacaaaaataatgacgtgcatttttgctatgtatggttctttatgtagagttctattttgattcatcatcagcatgttttttcctaaaatacacactctcaggaatctaaatatcgccgtggacg

SEQ ID NO: 65827 - DNA, 550 bp, Cucumis sativus
  Intron number 1 from transcript Cucsa.364130.1 (locus Cucs a.364130) derived from phytozome v7.0 (chr-ID scaffold0361 1; pos 1679971 to 1680520)
tttataagtgggaacccgacgaattgcctggtaaatatgttgttcttcccatgattgatctgattgattgatcttctttcggcttttccttgacctagtctgattttgattcagtttgtcgttgattgattttattttactgtttataatgggtttgggggtctttctgaatctatctttgtgatttgcgtttgattaagcttgttgtcaaattttaatcgtatcatacagttcgatattatcatttaacttcttgcattcgtaggtgaattgaagctattccttgttatccttttcggttcattttctttgcgagtcgtttttatccactcaattcctattaccgatgtactaggcgaaggcataattgatatttgatagtatatttttcccgaatgttagagagttggtcgttccttttaccactttctgtgaatgtttgtttgctctatgattcttttattctttggatatctacgagtattgatgatctttctaatcatgaaaaaataaatgcaggtcaatctaagttaaaaactggtgatagaca

SEQ ID NO: 65828 - DNA, 650 bp, Cucumis sativus
  Intron number 1 from transcript Cucsa.322350.1 (locus Cucs a.322350) derived from phytozome v7.0 (chr-ID scaffold0308 0; pos 2124219 to 2124868)
ttctctgcgttctcagtgcaagattgtttccagcagtgagttttttttttttttttacgttcttctattttggtttgttttcaaataattttgatagtttaggtttagtaagtgatggggacgtgctgctgaatgctgaatttgagactatctgagattgaaatagtaggttctatcattctaggtgtttataaatgataatctcaggatgatttgtaactgacagtaataagattggtctgtatatcttcttgtaaatccagctacggatataaccattatttaattttgtaaacaatgatctcattattgagttagtggatggagttatatgggtacagacttagcttagaattgactccgttttatggacaagagaaaaactaagtaagatatcggtgaccatataacagaaacgacagtattctgaatgtgcaacattatcatcttgatcaggggaaggattagaaattatttagagtttaaaacttttgattcataataaacttggggttttaagtgctgtaaactctcataaacgtggggtttttaatattctctgaaaagagacagttggcttcactatctgttcttaagtgaattttcttttggcaggtgtggaccttaggtcatccaaggtttgtgaactt

SEQ ID NO: 65829 - DNA, 879 bp, Cucumis sativus
  Intron number 2 from transcript Cucsa.387970.1 (locus Cucs a.387970) derived from phytozome v7.0 (chr-ID scaffold0396 7; pos 390731 to 391609 reverse strand)
ctgagaaattcgagaaacctaattacttcaaggtgatttttccacttttgtcttttggcctttacctggttgtgttgtgtagagtcttattttgaaattacagttactattttttgttacctatgattagtaagcattgtaggccgtgtgattttcgactagagaatgggtactattgttcaaaatatcaatgaccttactcgaaagagatctattctataggtggttttacaattgttttttgttctaaaatcttgtactctgtgtatatatatctttaggcaagcaatgatttaatatgtataaaaaattcacaagaccatggattagaaagggccaatggagttacatacactgcgagcttaccttgtcttgatgtgttttgttacaattctagtactatttgttcttgcaagtcctattcacacgttgctttgtagatttgatgtagttgatttagtagaacttttgtattttttcttgttaaaataaatcttggtttttgctttagaaaaaagtaggtaatggatattcttggttttttgcacaacacaggggagcctttttgtatcaaaagtatcgaaagggctctcctgtgttgcggaaatattttttaggccaactggaaatccttataatcctttggcttggacctctttccccttttgttgttttattcattaatgaaaatcgtttcttcttttttgagaaaaaaaatgtcttgttctttgatgtcactgtagctttgtcatgtctgttttactatcctactcttgtcccttgagaaacaaacttttcattaatataataaaatgagactattactgaagatacaaagttcaaaatgcatccgtactaattgaacatataaatgtagag

SEQ ID NO: 65830 - DNA, 478 bp, Cucumis sativus
  Intron number 1 from transcript Cucsa.360130.2 (locus Cucs a.360130) derived from phytozome v7.0 (chr-ID scaffold0358 8; pos 877991 to 878468 reverse strand)
ggagagcaggtagcgagttttttctttgttatatattgaaaggttgaattgattggttttggtagtattggtcaatctatagtcgtgattcgtcgcatgaatgtgagagattgtttgtgtgagttgttctggaattattcttgttgcagatgtagctacgtaaaagtaaacctggaaaattctttgtgatgttttgaattttgaaattgctttgagtctgatgttaatgtgattgagattctggaaggttaattcatcaatcaaacggaacagagcttctctttgttgatcgtattcctgaaagtatgttaaagagtggttgaatgttaaattcttcctccaatattttgagacttgcgtttcaatgacgagctgcataaatccctatccttccactatccatttttgtttttcgttctgaagaaaaacattgtggctaacagggttcacttctaggtgttgaagtcgacgttactgg

SEQ ID NO: 65831 - DNA, 1057 bp, Cucumis sativus
  Intron number 1 from transcript Cucsa.353020.2 (locus Cucs a.353020) derived from phytozome v7.0 (chr-ID scaffold0353 3; pos 660324 to 661380 reverse strand)
tccccaccgctacttcgaacaagagacccctaactgtgagtaatctatttctctctttttctttaggccctttggcgaactggattctgcatcgtctctacctagtttccgagaaacaatcaggcaaaggaaatggatttgacaaaaagaacatgtataacgagcagttgggttctttacaaattttgatatttgtttatattctcaaagagaaccgcgggttacctctagaaagtgaagtctagttaattgtattttccgtcacttatttgataggaaacttatgtctcttgggaatggtctgtcattgttcttccgtatccctcttgtcttgaaatttctatcatgccaattttctggttatacggtattattgagatttcttggagattgttaattttgagagtgaagagtgcggtgatattctcactcgcgctgcaggcggttgttgtatttcctctcaattctcactcgcgctgcaggcggttgttgtatttcctctcacctagctaggattttggaggtttaggatgtataagaaacaagaaggatgatgggatagatgttcaattgtttacccgcgtcctcatggtctaatttagacgtattctcaataatcaattaaaaagatgatggattcaatccattatgacttcctactgggaattaattttctgagtttctttgacactcaaatgttgcaggataagatagattgtttcatgagattagtttaggtgtgttaagctggttgcaacattcacgaatattgaaagactactgttcatttctgtgcctaaccataaggccttttgcgtcataagcaactcattgagatcttcggctgtacaaaaatttgacagaaatttaagttctcttgccggttggctacagtcccgattctatcagtatcgtccaggaaactactcttggaaaattgaaattagataattttttttaactggatataggttcggatccaactaattatttcttagctaacatttttaagctatttgcagtttggtctccattttttgcttttggtggacttcat

SEQ ID NO: 65832 - DNA, 502 bp, Cucumis sativus
  Intron number 1 from transcript Cucsa.310600.1 (locus Cucs a.310600) derived from phytozome v7.0 (chr-ID scaffold0299 5; pos 354847 to 355348 reverse strand)
aggcaagttttttgtttctcttgtttattagatccctaaaactggtttaatcttcttctccttcttcttcttcagcttatattactcttcagggaaattttgtttccacgaatatttgttctgttttctaatgattgggaccttgagaatgagaatgtattagggtttatgtttatttctttgctgaaagaatctgtggaatattgctcgactggccaacaaacattatgggaattttggaagcctaaatttgcttgtgcttcagctcgaatagttttgcttttggtgtacattatatttgcctcttttctattcagaatttgtgatgctttgtggctctgtaatattctgtccttgggattgaaatcagacttgatcggatgagtttttgtttctgattcatcatcttgccaatgaccagaatccaatatccaaattgtttgtatgatcaaaataaattttataatacaggtgttgagcgatccccagaagaaggctattt

SEQ ID NO: 65833 - DNA, 533 bp, Cucumis sativus
  Intron number 2 from transcript Cucsa.316830.1 (locus Cucs a.316830) derived from phytozome v7.0 (chr-ID scaffold0305 0; pos 62713 to 63245)
caagtaaaaatctgtctcaaggatcatcagaagtactttgggaagcactcgcattattattatgttttcattgtcaatgatagaacaaagtgtcctgtttttcactgatataaccagtataatcatctaattcacttccatatcttggtaaatcatctgcttggttggctatgcttgtaaaatcagatgtttcttcttttattaagcctgttcactaactgtttggtgaatttcggtccttccgtttgattttactcaacaatttgctaggttttcttatattgcgtctgggaatttgagacctactaaaacacttttccatttttttattatgtttcattgtatatgaaaatttttgtttctttaaggaaaactgattaacacttgaaaaaattcgtactgacttttggaaatatattaaatggatgttttcctcatataattcaaacactccaaagtcctctgctgtcgtccttaaaatggtagcctttttctttcactatattatgcacatgtttcactttgcaggaatc

SEQ ID NO: 65834 - DNA, 823 bp, Cucumis sativus
  Intron number 1 from transcript Cucsa.311920.1 (locus Cucs a.311920) derived from phytozome v7.0 (chr-ID scaffold0299 5; pos 1433066 to 1433888)
gctcgaacaaaacctccacggtaagttatatattgatttgagtttgaatgttatgtataatatagttttgggattccaaaatgcagtgtgtattgaatagttgcttttttaacctatgcattgtagtgtgtatttaatagtttgcttgcattgttcctacaaatttcattgcatggaaccaaatgacttgtattttgatagattttgttttttgtttacgcggtactttttggtctatcataaaataataattttatttatagggaaacaacttttattgagaaaaaaattgaaagaaaacgaggacatacacagataaaaaaaacaagaccaccaaacagaactagaagaacgagttccagataaataaaatgttagtgatggaatagttacaaaatgtctttgaaatcaaaactcaacgagatacataaaatctaataagaaaccaaacctcgtgatcctgcttcctaccacgaaaaaccccaacattccttacacactccaatcataaaataattcattagttgagagtgttttgaaatgatatttgtattgacctgcatgtatatacacatatagatagatacacacattaggtgttttcccctctagttttacaccataaatatttattagagttttaatgttatgtatattatagttttaggaattccaatctggagtgatatataagtaataatcaatgctatatgttcctcaaattgatgtattaatttattacccaagagtgttttaaaatgatatttggactcacactgcaaatgcttttggaattgtagatatggaagagaaggtcgatagc

SEQ ID NO: 65835 - DNA, 993 bp, Cucumis sativus
  Intron number 1 from transcript Cucsa.378430.1 (locus Cucs a.378430) derived from phytozome v7.0 (chr-ID scaffold0381 0; pos 60814 to 61806)
aagaagaaaccaaacgccttgcttgcatccgtgaggtaaggagggatttcttttctttttttttcacagcattttaagggtttttacctttaaatctttcatgggtttttcttagattttggtttttgagacacgcttttaacttttctgctgtgttttacatgaatttggtgggtttgggggaaaagttgggtataaaattgtggaagatctcttcaatatgactgtaattttgagggaaatatttgctaaaaaggtctgaggacaaggggttcttaaccccttttgcatgatttagttctattatctatgggatttgggattaaattaatgttttatcaaggaattaggagcagctttatgtcagatttgtaagtttctttgtattattttgacttgcattcttaacatataaccttttctagactaatgtcccattttgtatgtgtattttcgttactttagttacctgaaaatgaggctctgatctgaattttagccttttatttttgtgttgttttcaaaccttttcatgtcaaggaacaagagcagttgaaagagcttaaaaaacacctcattcccttgagagagaagagagattctcatttgcatagtctatttactcatgaattcaaggagtagatgattatggtgctaaaacattatctacaatgctttgatgttcgtctgtggttggttagttcaaagaatcttttagttctatgattagattaggtggacaagcaattagtagaagaagagtttatatggcaatgtccaacgatttatatcagaagtagaaatatgaagaaatagttacagcagatactttattctatggataaaggatgtatttgatagaagaatcgccgtaaagatcaactagtcagatttttggttgttttcgaattggattctgtttgttgttcttgttgtttcggataatcagatgaattttacatacaccaggaacttgaggcactggcagatcca

SEQ ID NO: 65836 - DNA, 1064 bp, Cucumis sativus
  Intron number 1 from transcript Cucsa.394810.1 (locus Cucs a.394810) derived from phytozome v7.0 (chr-ID scaffold0410 0; pos 581478 to 582541 reverse strand)
ccaatttggttcattcaactccaattctcttttgggtacttcctcatataccattattgctacttgttttctgtcgttacgaggttttttttctttttttgtttcaatttcgggatttggcttgggttcctattcaatgtccagtcttcttcgtgcttttagagtattattgttattattttccttttggagacaggaaatgagcttttctgctggacattgttacttatagcgtctttgtgacaatcaatttcccgtttaatcttctgttttttaaagttaatcttgttatcaattgtctgttcctttcgattctatgcctaaaatcattctcaaagctctcaaattgttgtagaaacagaaagtgctaagcatatagttaatttcttggaaagagtgaactggaggctaaaactatttctatggatttgtgaggcgttcattgcttgatgctaagtcaagctgaattaaaaagattacagttttcaacttacaagttgccattgtgctaagtcgagctgaactaaagatattgttcttcggttttttctgggtatgtttctgtggatttgtgaggcgttgattgcttgatgcaactgaagttcatgtagattgagaagctatggaaagcaatcaatgccacaattttgaaatatgatcaaagtcccattccacatcttcttggaaataagatacagattcttcgaactctgttcaggatggaaaaagaagaatacatatcttgaattatcatttgtgaaatggatttataagctcaccattatacttgggaggatttcacacatctgattttaagttcattgcttacggcatccgatttacaaagtcacatatggtataaaaagggttgtaatttattgttttctttgatagtgggtaacaagctcatcaacactatcgctacatcaattgtttgtatgatttctttcaatgctgtaccagcaataactgtctaggtctattttgcttttcacttcatctacgcataacctttggcttaacttttagcagtgtgtgggttgtgcagaacgcttcgtcagagt

SEQ ID NO: 65837 - DNA, 1016 bp, Cucumis sativus
  Intron number 3 from transcript Cucsa.321480.1 (locus Cucs a.321480) derived from phytozome v7.0 (chr-ID scaffold0308 0; pos 1243290 to 1244305 reverse strand)
ttgaggattcgaggatttctggtcaacggaagcaggttagatctgtttactttaccattcgaaaaagttgagatcgttttcttcttcttcttcttttcattattgtactactctcaagacgctccaatgccgtcgtttcctttgaatgaggtttagtgttttgaacgcttagatcaattgacgttttggttgagtgtcttaagttgaggaattataatgttgaatgtatgagaaaaatactatatcgaagttttttgaatttgtactcaaacggttattaggagtatgcagattttttaatctttatcctacggttattggtaagctgtcacatcaataattttctaaggagtgacgcaattttaagatgcttagtatatgagagacataatgagttttgggtgttaatctcacttcaaggttcgaacttgcgacctcctccaaccagtgtgataccattatttattagaaaatttaatctcattgaagaaaacacaaaaacttttggttctacctaaaacactttttaagaatggagtggtatcattatttatatatatattaccatgatcttaactacttctaatcaatttggggccctgttaactgtttggaatgtcaaatctcattcatatttattcatcgagactaaaaatggaaactctacatcttttttacttgccctttgttgtgaagattggtatactattcttgaccattttttttatctataatgggtatccttatacgtatatcgagtaatgcttcactatgttagcctcttccaatgacttttgatttaatttttatcttggtatcactcaagttgcttatttagaaagaggacttttccttcaagtggtgataactactgtagttggttttattagattcacttatgtggaatcatgttttcatctatttttttagtattttagttccaatagcattttcatttcctccactctcattggtatattgcttactcacaaacgcaatgcataaacagagtgaat

SEQ ID NO: 65838 - DNA, 947 bp, Cucumis sativus
  Intron number 1 from transcript Cucsa.365370.3 (locus Cucs a.365370) derived from phytozome v7.0 (chr-ID scaffold0361 1; pos 3109155 to 3110101)
gctaagctctgttgtttctggtactaccgcgtctctctttctctgttttctcctccgtggaatttcaatctcagggttcctaaaatttcttctcctctcctcgaccactttcgttttgcttttttgggaaaaaaagtattttgtcctccgttttcggttttattttttgtgagttggtgagtggtttgtggttttttgtttgtggaggcgtttcattagatctagattatctttaatggtttgctgaagggtttctccgccctttcattttcaaccatcaattttgttatcttcatcctaatttagtttctggatctcgtttttgtcgtgcccctcgctatatttcagctgaaggatgccgtgagatcttgggagttaaatatttgtgagggtcagttgattcgggggctctctggaaccgctctttgtatcatcatgtcgaatggcttggtgctatgaagagggtaaaatttgtacttcatcgtcctcttttccgatctaactaaatcttgatagcttggtgctatgtcgaatggctttgttgttctggtatctgttgaattagaagaaaggtttctcctttggggttttcattcctgaagaacttcttggaaccatgctccctgttttgactctgtcttcgtctattcttaagatccagtggattgcctttgtttttaagctttaaccagcctttcaacaagctactctacatccgatctcctagaataatctttgttttgattttgcttctggcctcgtcggatctcgatctcatatgctcttcccccactcttctttcctaattttcttttcttctagctacttttgattcgtcaattccattagctatttcttccatggatttctggtgttcgtgatcttgtgaactgacagttatctgggctgcaggcacacttattcgaattttaaagggctgattgaag

SEQ ID NO: 65839 - DNA, 870 bp, Cucumis sativus
  Intron number 5 from transcript Cucsa.391860.1 (locus Cucs a.391860) derived from phytozome v7.0 (chr-ID scaffold0406 2; pos 216760 to 217629)
tcacagacaaagacaaggctgctgcccatttgaaggttgatttctctttctgcatgtgggattttaatcaatttcataaactattattttattgagttggttttgaatatatatactatttaaatggtttattattattatttttgtccctaaacatacaagaatttaaaatctatatgcaagtacacctagcctactattcttggcttcaaatatttatctaggtatatttcttttgttctggtaaatgaacaactaaaagtctaaaaccgaatattctaaagtttaggtgtgcttcgaacatttgtttcaattaaaagttactttttttatggtgctgtccttttgatgtcttagacttttatgttgtgttatacgaattcaagttgattgaaaaactagcaaaagtaatcgtttaattttgtcttgggttttggagttttgggtccatatgggttttgagcctgtaggccatttgctggtttattaagtttccagtttggtacttagcttaaaaatatggttttatttgtatgaattggtacttagcttaaaaatatggttttatttgtatgaatgttatttattcaatttagaaataaaatagaaagacaaattctcttgctaaataagtattgcacttgatacttctgttaatacgaggttaataatttaatagttcaaatttgcttcttcatgttctatttattattttactttcatttgtctatgtttttactttttagaatctatcagttgtcaaagtgtctctctccaacatatgcaattacgtatattgcatttgtttttgcttatctttggtaatttgaggcagggtggtgcaaagaaagttattatctcagctcccag

SEQ ID NO: 65840 - DNA, 998 bp, Cucumis sativus
  Intron number 2 from transcript Cucsa.341550.1 (locus Cucs a.341550) derived from phytozome v7.0 (chr-ID scaffold0335 6; pos 3967140 to 3968137)
tagctttcaaggtattactttaattatatttccattgcaggcctactttcactttttgttctttcaattattcttatattgatttcttacttcttaagtcccaacaagccaagcgtacggaaaacgcttaactcaaaaatcaatgcatgtgattctgttcttccatgtacttttctcaaattccatgcatgttaattattgttcttttttctcgggtaattattgtttttgggaactttattaaaggataaaagtttgtttcagcgaatccatctaaaaatttgtttcttagtatattttgtccggggaatctgcttcatcatcctaatccgtgaaaatttgtattcaaaattgtattcagcttcttgtgaagttgtgttaagaaccaaggtagtatgggatgcctttgtctcacgttggttagaatgggatgaccaatttagtacttaactggcttgactctcccacccccaacaactggcttttggggtgtcgttctccaaagtgcttaagtacctgacaatggtatcatattcagttgttgacatttcaaagtggaaccggtggaaggttttggttgggtgtggccatctgaagtatcatcgggacatcaacttttccagaaaaggggtattgttaggaaccaaggcagtattataggatacctttgtcccacgaaggttttatccgatgatgggtatgattttatatcaatcactcttcatttttctttcttcgaagaatcattataagttttaactaattcttcaattagatcgttggagttattgtgtaattactctaggttttgatttccctatctacattaccagcaagtcaggtaaaggctggtgaactgcctacttgtttgaatctcatttcaaaccaatgtgaaatcttcatctctatgattaattaattagaatgtgagtaaatcattctaaatggtctctgcgttttttcttcagtttcaaacgacagctccgaagagctgttat

SEQ ID NO: 65841 - DNA, 392 bp, Cucumis sativus
  Intron number 1 from transcript Cucsa.312370.1 (locus Cucs a.312370) derived from phytozome v7.0 (chr-ID scaffold0299 5; pos 1804166 to 1804557)
caggttagctcaaaattctctgttaacctttgttagcttttctttttctttatttgtcgacttgttttttcaactagattttagttgcattgttcttcaagcttggttcgtatctattatatttttttgcttgtattcttcgaatttgaatgttggaaacggggattctgctttactctttccttaatgaaagattaaaagctgaaaagggcaagaaaaagacagataatcacggctgtaaatgggtattattccattttttgttctctcaatgcttcatttacactcaaatcctcaacttaatgttgctaatttatgtaatttttaccaattctaaccgggttgagttcattccagatcattacctacagaatcttcaagggggtggctta

SEQ ID NO: 65842 - DNA, 807 bp, Cucumis sativus
  Intron number 1 from transcript Cucsa.356320.1 (locus Cucs a.356320) derived from phytozome v7.0 (chr-ID scaffold0357 7; pos 1058644 to 1059450)
ctcagcctcctacacttggctccgtctggaatcgggtattttctttggttttttaattgggttgttttctttgcattggcattttttttttttttggttaaagtagagataatttgatttgattttctgcaggattaatggctgaaggaatttaaatcatgtttaaaaattgatattgaagtccactcctatgtgttaggaggcttgaatttcttaccaactaaaagttttgaaatgactatcaattctggaatttggaatattggttaaagtaatgagaaagatttggatggaatgtagctatttttatttatatttatatttatttatttgttaagaaggagctttgctggaaaagagaagaaaaatgtttgctaatatagtgttttagtcctgattgacccttcatctgttaatattttccaactttgagacagtttgttaaatatctttgaccaatttggttggatgatgtcgatatcaggaagaaagttgaaatttgtaaatgagggaggtagtcaaactttgtttatgattaatttgcctaactttgagatatgacacggcaaatattacattgaatgtgccttttactatggaaatttggatgttgagatatactgctaataacttattagaagtgacgatttggtggcgatcaatttagattctcttatacatggaatgccgctaaaatgattggcttttgggatgatcttcgtttctagagggttatctatttgtctgattgctgtggtttgcactattcttgtaggctggaacttgggaggagaagaacttgaataa

SEQ ID NO: 65843 - DNA, 666 bp, Cucumis sativus
  Intron number 1 from transcript Cucsa.369900.1 (locus Cucs a.369900) derived from phytozome v7.0 (chr-ID scaffold0366 5; pos 621 to 1286)
tggtgggactgctatcatcactagcactgacccaagtatgttgcttccttcaaaagttgtttctttgttacctcactagataataatgtgttatttttctattctctctacctttctttttttctttttgaggaagaggttaagagaaagtggagaagatcaggcaaacttattatagataatctggtaacgagtccaaagaatcaaagaattcaaattgttgcaatgctaactgagagtttcttctgaaggtccagaagctttgaaaatatttaaaacagcagccgtcgtgaacaaactctattcgtcctctttcccctttcttaaaaccttctacgagaaatgtggatataaagacaattagtcctttcttactttgaagttaatgatcaaaaccccaaatctaatagtcagaggaaattcagcccccacaacgcacacactttttccccttttccaagttgggttggtgaaggaagaaggttgggtgtgtctgtagggactataaagtgatgtgaattattgaagctataatgggctgtagtggaattcttctttctgcaactgcaaaatgtttgaggacataaaacttcatagattgactctgtttctctttctataaagtcttgtttatgtcttttcccaccactatttttttcaggtact

SEQ ID NO: 65844 - DNA, 651 bp, Cucumis sativus
  Intron number 1 from transcript Cucsa.311520.7 (locus Cucs a.311520) derived from phytozome v7.0 (chr-ID scaffold0299 5; pos 1094615 to 1095265 reverse strand)
tgttcgttccccattattctactctttaattcgaggtaactgtcttctgggttgttctttttcttccttttcttactatctttgggtttaatctctgctttggatgaagtagcttggtgggttctttgttgtttgtttgaaggataatgataatgtatttgagaagaattatgttacatgtttactaacttaaggctcgccactcaagtccgtttctggggttttggagctctctgttaaatgaattgatttggatgtttttgttttcaggaactatattgacgttttgcttgtttccatttcttgttgggtcgatcttgaatccttatccacttgtggtgctactagttttcttgatctgatgctttgagttggtgatgcggatcttagaagatgatgtcgttttgggtctattattttattttttaattctgatttttggatgatggcgagcttgtgttgctttcagtattggtgatatctggatcttatttgaatcttgtcgagttagtgtaaatgaattggtttttctgtattaatgatttacactgcaatttttttctgctgtgtttctgaattgatatttgaattgaatttgattctatgaattttgatgtgtttcagttgattttgaggttaccaccgtagaaa

SEQ ID NO: 65845 - DNA, 639 bp, Cucumis sativus
  Intron number 1 from transcript Cucsa.353330.1 (locus Cucs a.353330) derived from phytozome v7.0 (chr-ID scaffold0353 3; pos 883805 to 884443 reverse strand)
ctcctctttggcgcagtggtcctcaaggccctaaggtcatacccctcttctctctgacaaatttaattactttatgtttttgccttgcatgtacatactgatctacaacaagttgacccatttctttgttttttttaccataatccagaattttccttccaaaggtctcagtcctcgcagtgaaaacactttaggtggtgaatatttaaaataataatggtagaatatatggtaaaatttattgccttttctatattcatatacaatcataagttactcatttgaagtacttatgctttatgtggtggtaggttttgattttcattcttataattagctaggttgtttaatgtgtttcttgtaaaagtcgatttcttttaataacataggttctcaacaacccttctcaagattgtttcttcagactaaatataacatgagatttctattttaaatctcatttatgttaaagaggtttcaaaatggaacagatgtttgctcttctcttcatatatttctgtaatgacatgagatatattattgtttactttgaattttataatcttttaagggatagcctttctttgttttgaggtgattatgtgattgtagttttggtttcttttgggtgcagtcact

SEQ ID NO: 65846 - DNA, 657 bp, Cucumis sativus
  Intron number 2 from transcript Cucsa.337330.1 (locus Cucs a.337330) derived from phytozome v7.0 (chr-ID scaffold0335 6; pos 428844 to 429500 reverse strand)
ccgaagtgtcaaagacaggtacgcttttacttggtgaaggtgggttttttgttccatctctgtacagtaatcgttagaattattgcgctggtttgcagctatattctgagtggtatctaggaaaattattattgaaacatcaatcaacttatgtagcttatctactcttgaagaaaacttagttaggattaaagtaatttcgaaattttctaaaatgaaagctcaaagcttctgtttatagaggaagtgaggaacaatcaacaaactacaattactaaaaaatatagcagatttgaaagagattacaaagcttgggcttttgagccatttttactgtgcattttgtagtggtgactgatatttgcagtctcggtttctaacttcctactttcagcctaattttaatttttacattggtttacactcaagtcaattgtatactaattacttttcaaaattaattagaaatgagattttggctacattggcaaccttcaaatgcgttggagatctactacagaattagggattatattatgtatccttttcaacatatttcttttcatcttagtgagaggcatagatatatataaatattactagtaaccagtcagttaatatctattaccttattgctttctcagaattggttacagt

SEQ ID NO: 65847 - DNA, 440 bp, Cucumis sativus
  Intron number 1 from transcript Cucsa.321650.1 (locus Cucs a.321650) derived from phytozome v7.0 (chr-ID scaffold0308 0; pos 1498990 to 1499429 reverse strand)
agagaatttgaattttttttctcccaccttatacagtcaatatgtgaatgaaagagagaagatgctgaagaaactctctgaccaacaaattaaatatgtgcactatgtttggttggtatatgtgtgtgtatataattaatagtaaattttaactttttcccctcatgaggaaaagaaaaaaaaaaaaacattttcactttttcataatttatatctatgatgttgctaaataaattatcaacactctgctttagaaggaagattgattgtcaactttctttgtgaaatttgaattatttttggtgcataacaaatttagggtataaatgaagtaataatacaataatataacattattaatgaactcttttttcgttttcttaaataattttataattttactatctttatatatagttttaacaaactcaattttttga

SEQ ID NO: 65848 - DNA, 440 bp, Cucumis sativus
  Intron number 1 from transcript Cucsa.364220.1 (locus Cucs a.364220) derived from phytozome v7.0 (chr-ID scaffold0361 1; pos 1766336 to 1766775)
aaccaactttctccaggtaagatttacagatcaaaaggcactataaaaaagtattggaagaatctgaaatttgagtttaggttttttgattttgttttttgaattttgaaatgataatgtcaatgtatggaatgatacgaactttgttctttccactttcctttcataatgagcaatagttttgctatgagtggctttgaagtaaatctctttcttcttttccactaatcatgaatatcatttactaattatgaagaaaaatccacttgggtgaggcaaaaatgacatcctaacataatcctctctcttacacagctgttttttggttttcattctttggtttatttcttaaacacagactgatttgggaggagtatttgtttttcctttcctctgattttagatgtttggattgtagaacaagcaatcctctgccaaga

SEQ ID NO: 65849 - DNA, 673 bp, Cucumis sativus
  Intron number 1 from transcript Cucsa.336840.1 (locus Cucs a.336840) derived from phytozome v7.0 (chr-ID scaffold0335 6; pos 21233 to 21905)
tcttcttctctggcctcgtcgttaacctcattcaggtattctctattcttacttatgcctcgatctttgtcacttgttctctatttctttctcgatttagatcttttcaagcttccctgcgtttctccagcttcgattggttcttcttccggtgtcttgattttgtttaaggcgagtgcttgagattttaatagttaggttaacttgcttcacccgttttagtggtgtgttgtggtaatgcatgcttcttgctgttttgtttggattaatcgtctggtttcgtccaggtaacttgtagatttagcttagattctgtttttttttcctttctttctcctggcttgtttttgttgttcgagcttttaatttatgggttattttaacgagtcttcttcattggttgtttttaatgaaatgtggtagaggatcgaggtgttttgggtgaatactgtggctcattgagtcgggtgatgagctttaacaatatggtgtatcttctacgcaatcactgtgatagaattacactgtgctatgctacttattttttttttttttttttttttgcattctcacgtaatcttgtttgattgctttttcggggggtattctgactgtgtgtacattgaatgatgtgatctgactctaaaatatctgcctccttgtttcaggcaat

SEQ ID NO: 65850 - DNA, 574 bp, Cucumis sativus
  Intron number 2 from transcript Cucsa.336840.1 (locus Cucs a.336840) derived from phytozome v7.0 (chr-ID scaffold0335 6; pos 21989 to 22562)
ttgtttggctaattgattggtgggctggtgttcaggtgcatcatactgatccccgtatcatgtcactttagtagttatagaagaattataatttctccgtcctgattttcaatgactcgattattcatctctctctttttcttttttcttttcttttttctttgtttgtgtgtgaaggagaaacattagacaatatcaaaattagttgtttcccctcattgaaaggttacaccatctgacaatcctttcccatttattaagattattttatggtttactttttactttttctttgtcaagttactttacaggattactgttttgtgctgaagaatatagcactagtttatcaattatccgttcattaacgagttcaagtgctcttcatttttcttcaaatgtttttattacaaaaaccactaaattatcaagtttctgtatatttacattgaatccatatcaagtgacctagtacctggtttttcggttcttggattagactaacgaaaggccaatttgttgaatcattctgaatgcagattaaagtgttcacggatcgtgaaacccttaaatt

SEQ ID NO: 65851 - DNA, 648 bp, Cucumis sativus
  Intron number 1 from transcript Cucsa.374760.1 (locus Cucs a.374760) derived from phytozome v7.0 (chr-ID scaffold0373 5; pos 218595 to 219242 reverse strand)
ctacttctccttgtcgccaccagctaaagcttaatgtaatgcttcacattcttacatctcttacttaatttctgcttcttctatgttgcttgtttctgcttcttctatgttgtttgttttcactagctgttttatgctctgtttttgtgtgtgcgggtttccatatgtgtgcgatgggtgccttagtttgagtatatgaacacttgatttggtatgtgcgatctgtgcgattaccaatttttttttattatttgcattaatttctggatgagttgaatttaatcgtattctgttgctaagactgggaaacgtactgctggtacccgaatttagtatgtgttcgataatgtttggtttattatttacttttactgccgatgtatggctatcggatccttcttgttgtttctttttcaatatgaacttcaatctgatccgaatctagaaaactctatttccttctcatgattacttacctatctgtcactgttcttcaattgcttgaatttcaactcccaataattcgatcgatgaagcttttagtggctaatttaggaaatacttcgttgattttgagtgcgtaactctttaaagtctaatgaattccacacaggtcgtgagaaagagtcgttcgaagttagtaaggat

SEQ ID NO: 65852 - DNA, 785 bp, Cucumis sativus
  Intron number 1 from transcript Cucsa.332350.3 (locus Cucs a.332350) derived from phytozome v7.0 (chr-ID scaffold0326 4; pos 89803 to 90587 reverse strand)
tgtgcgagagactctgctccgagttcccatctgaggttctacatctcttcttcttcttttcaaattcactaattccctttcatgtttagctcttctgtttcttacaaacgctagctatttctaattggggaaactatggggtggattttcgaaatccgcctggggtaggtctttctgtgtacccatttttctttttttctttttttttagtttttttgttcgttggtagtttagagtaaagtaggacgtttacgctgcttgtgcaaattggatgtgtagtgcgcctcgtatatttgatgctctgtagttttgttttacttaattatagcttccacttcctctttccccccaaaaatgtattttgtgttttcgtagcgtcaaaatatgtaaatctgttttttttttttcttctttacagcgttattttttgaagatcaaactttaggaaaatgggcttttacaaccaacattttgaattgttgctgattgtatatcaccagacctctggttgaattttgttcgaaaagaatcagatattaaaagaaaagttgaaaacaggtttaagggtagccaattccatagagtttttaatgtatgtatgcaagtgatcaaagataatctttgctttctctcctgtcttgactttgattattatcttttggtattttttccctttatttcttcattgttatttaaaaactgaaacacttcctttcaacatttgtatgatttctcgttttatttccacagacaaatttgcagttactggcaggctgttttttgca

SEQ ID NO: 65853 - DNA, 700 bp, Cucumis sativus
  Intron number 2 from transcript Cucsa.358540.3 (locus Cucs a.358540) derived from phytozome v7.0 (chr-ID scaffold0358 6; pos 137609 to 138308 reverse strand)
cgaagcccttcacaaccctcgacaccgtctaaccagtcagtattttcttttattctaattttgggttttgttcagcttcaagtttaacaatcttgtttcctcttattcatttccctctttcttgttggatgacatcttttagggtttttatttttatgaacttccaactgtggttggtaattgtgaatctgttattgtatttgtttaattctcaacaaaggggttgtagcttttgtctcaactttgatgccacttacataggttttgtcttagctttaatgggcatttgctagttttagttcagattaagtaagtttttgcctccatggaactagaagagaaccctgttcgctaactatttggtttttaattctcaatttttgaaaattaagtctataaatactcatccaacctttcttattctttaccaatggtttaaaaaccataccagaatttgaaaacttgtttttgtttttcgagttcaactcttttcaaattttggcatggtttttaaaccaccagtaaaacagtaacctaagagttcaactcttttaagaaattgaaaggatataagttaattttcaaaattaaaaaacaccacatggttatcaagcgaggtctaagtttctttttgttgatattattcccttttttcaatatactctgctcattgtagtttatttttaccatagttctgcgg

SEQ ID NO: 65854 - DNA, 862 bp, Cucumis sativus
  Intron number 1 from transcript Cucsa.356720.1 (locus Cucs a.356720) derived from phytozome v7.0 (chr-ID scaffold0357 7; pos 1574165 to 1575026)
tagagtaatcttgttaaattcccgatggatctgatatgctgaattcagatctgctgtttttctgcaacaaacatgcttcttataactctgtagctccctctatcagaaccccaaaccttttcctgatctctctgcagcaagaaaattaggaccccttttgggtcttctccttttctttactttttttccccttcttgttcgccacaattaggattgtgatcagaaaagtgacagttttctagacaagtttattgggttttctgtgttttggacataatatctcacaccctctatcacttgtcataatatggcggctccagaaagccccaactgtattggcatttgaagcaatcctctgaaagtcatcattaactttaacatcgttcatatttgatttggaacacagcgttacaatctcatactaatgtcaatttttctggtggtaagtgggtattaaggtgttaagaatgttgatttgtgactatggagtgcagaaaagtaaatatggaatcttaacttgaggtaacaggtgagcgttaggtagggccatatcttggaaaatatattttcatctgtgacttttatctaggcgttggttagtttagagtgttgcagattgggtagatttatcttgcatattcttcacgactaattgttgtagacattaaactgtttaatgcttaaaaaaatggttcttatcattttgattttattgtaattgttacccaggaagctgaaattgatcatcaagcccttgaatcggagaaaacgctgatggattttgaattcgtacctgatattccaaaagaggctgctgtattgaaatatgaaattgcaccatccactgacaatagttattttg

SEQ ID NO: 65855 - DNA, 608 bp, Cucumis sativus
  Intron number 5 from transcript Cucsa.322630.2 (locus Cucs a.322630) derived from phytozome v7.0 (chr-ID scaffold0308 0; pos 2327345 to 2327952 reverse strand)
ctcaggtggcttttgctatttttgtgttccattttggtttttgtgcagttctggttatatgcctatagctctatgtgaacgaatttatagttgatggtactcatgtcatcacatctgatctttcctgcacttgttttctttcattttttaccgacgaaagttgggtttatcattttcctttttaaatcaaggttactttaaacatatatagatagcacaattcaatgacatcaccttttgggtcatgtcttcatttcttctaaacgatatttttgctgccagttttggaaatgtggagggcgactgaatagattgtgaagtgaactatttgttggtggttatgtacagaacatggaaatgttctgtgattgattacttatttttttccgagtatcgaagatctttaaggatttcttttattagtatgttggtgtgtattaagttataacaatggtgtttaatgtctttgatctttcttccagtaaaatctctcagacaacacataaggttttctctctttatttgttactcgttgaatttaaaaagtatttatttaaattctttaccttctaggtgttgagtattccagttgttttggtcgagaacag

SEQ ID NO: 65856 - DNA, 929 bp, Cucumis sativus
  Intron number 1 from transcript Cucsa.374140.1 (locus Cucs a.374140) derived from phytozome v7.0 (chr-ID scaffold0373 3; pos 35823 to 36751)
ttcctgctggtatgtctctttccctttctgctgttttctgttctataggctgtagaaaccctagggtttctctttttttttttgcttttctcttcttttttgttcattctgtttgttatttctgtgattattgtttgatggatttggttttctccactgaattgcggatcggatgtgatgcttgaatctatgtatggcttattctcaattccgcttgtgggttgtatgattgcatgagtggaagtggaacagtgctcttacttactccaatttacgaattgaaaagaaaaatgagggactcgtattctcagtcgtcgttttcatgtttgattttgaaagtgtattttgcactgcttttgaagttcaactttcaaataacttcccattgtcatttagaattactaattagtgagtgactgaacttgctctttgcaatcccatcctggataataatgaaaattatcgtcttcgctcatcgatgtaggcttttataagtcgaatgtgcctagttgtgtcatgtttgtgttatcttttccctctctttatttatttatttttgttgcgactgccatatttatagtaaaattcagttttttttttctttttttgctattttttgctatgtattgtaaaagtagggtaactgttttttttttttcatgaaatcattacttactcttctgaaatttgattttctgaattcttttgaaatttcaattttgcctttgtagtattttgatcgtcttgtactgttttgtgctggtctttgaattaattttatgttggtttcactctttctatctagtagatgtctgatcttgatgtatccatcattcattggttttaaaacaaatcatgaaaaattactgcaaagttggaggacttgttggactctaatttgttaagctttcttctaacaggtgttaaag

SEQ ID NO: 65857 - DNA, 534 bp, Cucumis sativus
  Intron number 1 from transcript Cucsa.311490.1 (locus Cucs a.311490) derived from phytozome v7.0 (chr-ID scaffold0299 5; pos 1075173 to 1075706 reverse strand)
aaggcatgatattgtttatctctacaatcaattgctttattatggatttatttgctcatttactcgatcgattctgtgaattttagtgattactgttgttttgattgttttgttactgtaaattcgaaatagttgtggcggttaatcacttcttagggctatattttgaaatgtatggagcattgatgaaaagaagtagaatcaggatttgttgtttgtaggttgaggcgtcttggcgcttaaatctagaatttcaatttggcttagaaattacttgctataacttcttataacaagacattataatttcatcactggttgttgctattgttcttatcgtagtttagctataatgagatgagaagtgtttgtgctcatggtttcgatgttgactggatttgtagagatgtagatggaatgacaatgtgataaactgagacatctactttcattcattgtataatacgattttcaggattccttttttttgaatctaatagttcggatcattattgccttttccatgcttcagag

SEQ ID NO: 65858 - DNA, 793 bp, Cucumis sativus
  Intron number 1 from transcript Cucsa.394720.1 (locus Cucs a.394720) derived from phytozome v7.0 (chr-ID scaffold0410 0; pos 526881 to 527673)
ctcaagaagtgctcttacgaaggttaatttacaaaaaaaagaagtctcttttttgtgttcaattgttgcttgatttcaagctctaagtactactactactactactactactactactacaatttttgtggccgtgaattgtcttggctttttgcaatatagtactgaaaatgatacagcccatctgaaaaaaaatcaaagcttttcattcgtattacagttgttttggcagattaatcaaaagttcatctgtaactgcaacatatctcatggttctatggtttcttcaccttttccttccatatgtcataaagccaaggcttgatttcttatagtaactatggaggagggaagaagaaggttgaatggaaagttcgctaaatttggaaaatacccaacatgccctctttctcagtggctttatgctgcacattcactggctttgtatttagctcctctccgtaattaagattagagctcaatgatgaacattgaaattagcaagaaataggatcttaaacactgtttctcaagccaaaccaagatttgtttctgtttaatatgttttctttcttcattcactcaagtaaccagtcatagctgaagcactttgggtttctgaagaaggaatttagttataaaaacaccttgaacttagtcacttttatgagatctattccagctaaaggttgtaaatgaaactgaaattgatcactgtttaaggctagtttagatcccatgacctttttcaaatcaggctgaaacattttacatcctgtgttgcagtgactac

SEQ ID NO: 65859 - DNA, 771 bp, Cucumis sativus
  Intron number 2 from transcript Cucsa.319520.1 (locus Cucs a.319520) derived from phytozome v7.0 (chr-ID scaffold0307 8; pos 206065 to 206835 reverse strand)
ccacaagagaggcaaggcagttatatgagtttcacttgctcttatataacttccaaaatttcttggtggtgggatgcacttggttcaagaaggtatatatattgattgtgtttcttctcttttttttctttttaatgtgaatcgtggagataatgagcaaatctgagagtttcttgttccaattgggatcgatttgttggaaattgaagttcatttcttggttggccggggaaaccttcaaattgacacgattttctttctatacttttatgatattatgtccttcatcattattatttttatttgtgagatcgagagaagaatttctgtagatctcggtgaaatgaagttgctaggatggtggttgatggtagtgggttcgctcaaaatgctctgccagaaccgtctccatgttcttttggtgatctcctttgaacgtctggatttgaatcggagacacatatgaacatttaattaatctcaaattcaattatttaaaattttgtcactaatttagtaaataatatggcaatttctgattggaccaaagtttcacgttcaacgtctacacagagaagtgaagtaaaacaaaacaaaaaacactgaaatgtttccgaacaactaatggcatgaaaaggaaatgaaataagcacgtcattctcttgtctcaaagagggaatgagaaagaatttacaggcttccatgtgaactccaagtggattttaccacatgaaagattttgtggtattgaaaaattgaactcttacaaaa

SEQ ID NO: 65860 - DNA, 542 bp, Cucumis sativus
  Intron number 1 from transcript Cucsa.310750.3 (locus Cucs a.310750) derived from phytozome v7.0 (chr-ID scaffold0299 5; pos 515336 to 515877 reverse strand)
ccatcagaagagtatctgtacgaacctcctagtcaatgcataatttctggttttactgattttacattatgaactatgacatgtgctttagctagaaaaaaactaaccaaatctatgcctcaatctgcacatgtggttctgttctgcatgctctcatttattttccttttattaggccagtgctattcatattgcacgagtgtggtgtttatattctgttgcttatgttatacatttattttatactaccttgtttcatgcctaatgtttgtagcatttctattttataatttgaatggcccttatcatttaagagacatttgaagaagcaattctttagctgcttttaaataaattaaaaccggccacaaagaaatgtaaaatggacctgaactgagactattattgaaccattttctggagatgtccaaaaccagcaacaaacattgcatcttttattttattaacatttatgtgacttaatttggtattatcattgtttgattgtgctatgtaaaaatatttgacttttttctctccag

SEQ ID NO: 65861 - DNA, 525 bp, Cucumis sativus
  Intron number 2 from transcript Cucsa.359120.4 (locus Cucs a.359120) derived from phytozome v7.0 (chr-ID scaffold0358 8; pos 176067 to 176591)
atctgcattccttcgatactgaattgctgcctgaggtgggattaaattcatttccacatttcttattactctctcgaatttctgatccttttttgttttttcagaattctcagaaaataacttaacgattcatgtgattatggattcgcaaagtgaatttatctttcacctacagctttgttaggcctgccaatcctaaactgataatgatggttactgatgtttgtataagcacacagtcttctgcattaggaacattaaacttgaaagcaactgttattttgaggctgatatgaagttattgactttgtcgaattaattctggattgccctttttcgattttagttctatgcaattgtagaggcaagagaggtggtagatataaaattctatgttcatgtattttggggcttttgaagctgaactaaagttatctcataccacttgttgggaggtttgagaaatctcatgttgtgttatctcgtgcaggatagaggctttgacgagtctgacgtctttatttc

SEQ ID NO: 65862 - DNA, 756 bp, Cucumis sativus
  Intron number 1 from transcript Cucsa.320900.1 (locus Cucs a.320900) derived from phytozome v7.0 (chr-ID scaffold0308 0; pos 755329 to 756084 reverse strand)
aagtctatcatcctgacaaatatcaatctcctcatgtatatttcccaattcacacttacaattctcttattgttaatcgattctcagttatctggatttcaattttgctttctccagtgttttaagttaagtttgtcgttgtttgacgtttttgtgttattttgctcttctattgaacttatttgcgatcagggatagttggccgaacactatcgtggcttaatttttgtttaatagtaaagtggaatgtgtttgatttaactgagttgcattgttcatggctttttgatacgtttgatttattttcttcagtgggtttagccatcttgatctttttcttttaaaaaattattgtgtaatctcacatttgtaggttgtcttgctttttggaacatacaaggtagcagagttattgatcagtaattttgtgaatgattttttctttttaaattgcaaataggtagtgtgcttaatttcataatggaataccctataaattgtgttaaatcattatataagttctatttctgttttcagaatctttagaataagataatacacgcagaaacatatttccatttttattttacacttactgggatatatggagtgaaggtgatccctttgggggggtaatttataataaataacacgaaatgcgtcttgatgaaattttgagtatctactagttttgatcctgttgttactgtccttgtgagacttttttcatttttttttttgtgtttggttctctag

SEQ ID NO: 65863 - DNA, 623 bp, Cucumis sativus
  Intron number 2 from transcript Cucsa.360190.1 (locus Cucs a.360190) derived from phytozome v7.0 (chr-ID scaffold0358 8; pos 931282 to 931904)
atcaccctgcgaagaggatatttttctctaataaggtaaattttaaaaaagtaaaaataaaatatcaacgttttttcttagttcagcttttgtaatttgttttcaactaaataataaagacctttatgagataatgcgagttaaagctgatgtgatgtattgtttcatatatctgtttttaaatgtctccacgtcctcttgtcattttaatgaatgacaaatataagtcccatatcatagactataggggaggtgaaaagaaagggaggagaatttgcaagcctttgttttccgttcgaaactattctttatttaattgtttcattcctttctacagttctgaatctgctaaactatttgataagattgcctgtggacccagaattcgatctaacaaaactataatcaaatcatcaagtttgctacttttgcgattatgagcatgccaatcataaatgaagaagaataatttcaaaccgaaaagagctaaaaattgtaatcgaaccttcctgcaaaatcgcatgttctctttcaatcttgctgtaaatttttgaatggctatctaatgtgtgttccacaattctgcagccttatcttccaggtgaaacacctgcagggattaa

SEQ ID NO: 65864 - DNA, 752 bp, Cucumis sativus
  Intron number 1 from transcript Cucsa.342730.5 (locus Cucs a.342730) derived from phytozome v7.0 (chr-ID scaffold0335 6; pos 4999536 to 5000287)
gacgtcgatcctcgtcactacgacaacatcgtgagttcctttttctctcaattttcgttattgaattctttcaacttttcctctttaaattactgaaaccacttgctcatttctcttctgtttactcgccattgctcgattactttgtttccctttatcttttgtcaatttgtgaagttgtaattagaccctggccgttccttacggtatttcacttactttcataaacacatttttctgatggtgtttctctttatctctttcttcagaggaggattaatcgatcaattgaaattgcagttcgtagttcacttctcttcttgttgatatttctctgcttgtttaaagaaatcggatattggacaatcattttctgtttacgtctggataatttctattacgttaatgcccaacgttttagtgatgtattggttacttgtttacatggtgataaatatggaattggatagacttcaaagtattgttattgagttcagatggcacgaagttggttgcttctatgtgataaattcccttgtctggttcgttttgggtgtggaataatacttaatttctaatttcatttttccttgtgggttcatcctttgaaacttcattataggtgaataagaaatggatgttggttaccgccatagttttgacctgtttgattcttgttaaattgttaatcttattaacttgtccttcattttaaggacttcatttttctcatatttcgttacaggctgtga

SEQ ID NO: 65865 - DNA, 656 bp, Cucumis sativus
  Intron number 4 from transcript Cucsa.388310.2 (locus Cucs a.388310) derived from phytozome v7.0 (chr-ID scaffold0396 7; pos 755249 to 755904 reverse strand)
cactacttgagagatatactgtgaaagaaacacaggttggcattaattcttaagaaagtataaaatttgtgagacttatcttaagatctatgttggatatttcttaagaaaatatatcatatatatgttggaataggttatgctcatgaattcctgatactagtttgattcccaaattagacatagaaatgaaagaatacacgaacatacaagaaaaactcacaagtagggagctccctttacaaaaaaaaagcttccaactatacaaaataatgtctttgtattaaagaggcttcaaaatcgaagtccacaaagaaacataaaaacaaaccaggagccaaaagtttgatctctatccacttccccggacattccatatttcttgtcctgtaaaatgatggtagagtcgtgtgtgttggctttcatgacctcaacaatgctagtcccaaggatgattttccttggtcacaaattgacatctttgttaaaacaatgcagtctagaggcatatgtcaggccacaccgtctcctcttgtctacgtctattcgttagtgtctgtgtttgtgtttctgttgcaatatgaaagggattcttatatgattttgcatatttggtgttagctaccgcgcatacaagtgactgacccggttgcacg

SEQ ID NO: 65866 - DNA, 413 bp, Cucumis sativus
  Intron number 3 from transcript Cucsa.388310.2 (locus Cucs a.388310) derived from phytozome v7.0 (chr-ID scaffold0396 7; pos 755949 to 756361 reverse strand)
caacttccaaatcattccacttggaagttttccaggtgaaaatattttatggagtatttttatgatttaagtttgagaaaaaccaaaccaccacaagttagagaagtaaattagattcgttttgtacaccactaatttgaggagaatcaaaggaaaccctcttactctggaaactggaaatcatcttatacttagtttggttattccttgttttgcaaaatgagaatgaaaaatatggggggtttcttggattctctggttgaagaacaattaaagggttaaggtagggcttggtttctataatattcttgctcttttcttagttcacttgaaatatacaatttttattctttttcttatcttcatctgttgatgcaggaagcagaattgctagttaatatcaaagatcacgt

SEQ ID NO: 65867 - DNA, 389 bp, Cucumis sativus
  Intron number 1 from transcript Cucsa.341730.1 (locus Cucs a.341730) derived from phytozome v7.0 (chr-ID scaffold0335 6; pos 4134952 to 4135340)
ttctactcaacgccgttgccactcagctgaagaaggtaaaattcacttcataatatagacattttgaataatgttttgtttgtttttcttatcctttcattcaattactacgtgatgatggaaagggtaaaatatgttgaatgttttaagggagatattattggtcttctaatattgtgttaaaaaaataaattaacgttgaattaaaagaaaatttaagtagatagtgtgttaccttttgcggaagatacggccacatcttttgactccacctactttgttagacactaaaataaagtaataagtggagagatgagggtaaatttaatagtgttggattaattttgtaaacaggaaggaagctcgggtagagttgtggggttagatcg

SEQ ID NO: 65868 - DNA, 839 bp, Cucumis sativus
  Intron number 1 from transcript Cucsa.360910.1 (locus Cucs a.360910) derived from phytozome v7.0 (chr-ID scaffold0358 8; pos 1407021 to 1407859)
tggtgctcggaatcttgcttcagttaccccttcaggtgatttagttgactaaaattaaaacataccgactctcttcacggattcttaattttactttcattctttccttttagattgtaaatggattctgctttcttctccgagattttttgcacccatgaccaaacttcacggttgactgtcatttgatttgacccgttttttgaaaataatgaatgaatactttttgttgttgatgtcacaagccacttgcagcagcacctttttctcagagcggcgagcactagtgagaaaataaccttgtgtaggaaaggaatggaaaaggagctcggatagaaataacaaagttgtgtatccatacttccaaattttgggtcaaatgacaatatcaatttggatcatccatattccatacaaaaatctcttcttcttgatgaaaaagaagttacatgccatatactcccattccactactttggagaggaaaagataagttacatggaatgaaacactgggcacaaggtgtcacgagccaaggcagagttgtttatagtttttgagttgcacaaactgagggatggaattgttaatatgaagtttgaattgttaatatgaagtttgaattgttaatatgaagtttgaattgttaatatgaagttttctatctttaaacattatttataagaaaatttctaccttagacctaattaataattcaattaactttgatctgtttttacctattggacctttgcttgtaaattggaaaatgtatatcttattggtttccttctctcaaacacttgtattaggttttattagcattgactgtggagcaa

SEQ ID NO: 65869 - DNA, 949 bp, Cucumis sativus
  Intron number 1 from transcript Cucsa.355740.1 (locus Cucs a.355740) derived from phytozome v7.0 (chr-ID scaffold0357 7; pos 265032 to 265980 reverse strand)
aggcacatcagagtggtttattcgaagggtttacggttgggacagacaaaatccacctctccatctgataagcgcataaaatgtgcttatttttacttcttatttagggttgattttattggatttaatttgtttgatagtgtttcttagcaaattatggctaatttatcattttggataaaaatacacgaaaacgggcaaacccaagttaattggaacaaaaatgaaggaaatatgtgaaattaagaaaatttctctagaagaagggctgtgttgcaatgctacctatagagttgcaatgacgcccacaaggagatgatgcgtcgagtggtcccatgcgtctgatgagtaggcgtcaaaagtagacagcgttgcaacgttgtgcacttagtgcactcagcaaacaattagtgcggttgtgaagatgctctacaacgtcacactgcacctatagcgttgcaaggctctccctgtccaacatgtataaatagggcttcaatttgtcattttaagcttcccatttgattccaaaacattccaatcacgggaatttctcctcctccatactttctttcttttgtgctacttagaatagtgtttcgtagcaaattatggctaatattattagtcttctttattcaactcaattgaaacaaacctaacctcattttccattgccttagataaaattaattcgattcttgaatagctaagttaaaacctaattttgatccttgaggacgatactcgtccttctaagcggttttattgcaacttgaccatgtccaattgcttgaccccacatcaccatcctccaatttgccgatgacacacttctgtttagtcaatacaacgagacatctttgaacaatcttattgatacagttggtttcttttaatggtgttccggtcagaaagtaaattgggaaaaatcagctctatacggagt

SEQ ID NO: 65870 - DNA, 700 bp, Cucumis sativus
  Intron number 5 from transcript Cucsa.333840.4 (locus Cucs a.333840) derived from phytozome v7.0 (chr-ID scaffold0329 0; pos 1930 to 2629 reverse strand)
tcttgaacacagcataaagttcaatcagcttgaaggtatgacatcgtttaaaagttgtgttatcacgcacatatatttttgtacagaaatggcaaacaatgacatttttgtatagaaatggatggcaaacaatgaatttttttcgtttatttaaaagaggaaagaatgaaaagcaatctcacaaagccactggataaagggttccaactaagtaagatgttgcctagggaataattacaaaatatattctaaatagcccaaagagaaatgtgaaactttgacttggatccctatccacacctcgcaacactctatggctaacaataacagctagatagtagtgcagagaaaggagtcagaaaaccccaaatttttgaagattgtctcttttagcattgaaatttattttagtaatacttatgtgaataatgatgtactgggtttatttggctgtgatataactgattttctgtttcggaagttaaccttctccaagacttccatttctattgttttgtctaatttatgttgacattgttcttttccaagatttctgatgtgtagaaatcttttaaatgctttgtattatactcttaactcaccatgatgctaatttcttaagaagcataatacaatattgatttcgttgttgtgatgtttgcctcatgtttgtgtgcttgatttaggcaggaaagcttat

SEQ ID NO: 65871 - DNA, 715 bp, Cucumis sativus
  Intron number 1 from transcript Cucsa.365380.1 (locus Cucs a.365380) derived from phytozome v7.0 (chr-ID scaffold0361 1; pos 3120092 to 3120806)
aaaggtaaggtttctacttcattcacaaatgaaattaatcaaatgtcttgtttattagttcacttaatgataaaattttatctccactgttttctttcaataattttaaaaaaatataagttgttacatatatttaacttttttaatcattaatttttgaaaatgaagcatatttatccttaatttcttaccatcctttcattccaaaagagttaattttcagccatattcaaaacacaaaaacaattttttttttttgttttaaatttgaactttggttttttagttttttgtttttttagatttcggcaaaagttaaataattgaaggattgttttctatgcttaattttaaaaaactaaaaatcaaaaatcaaatgtgccaatgaggattcaaaattaaaaattaattaaaattaaaattgtactatcttagctataaattatattaatcatgaaagtttgagatccaatttcattattttttgattgaatttttgtaactattgtaaatttggaggacccaattttaatagggtgaacccatcccataaaaatgggtgtaacaatttcatgtttaatttttaatttgttaaaaactatacttatattcccccaagttgagattagaagtttggttattaatttgaatatcaaaatagtaacgaagatggattgttattgtgaatttggacgaggaagcaatcgagacgtat

SEQ ID NO: 65872 - DNA, 626 bp, Cucumis sativus
  Intron number 1 from transcript Cucsa.336980.1 (locus Cucs a.336980) derived from phytozome v7.0 (chr-ID scaffold0335 6; pos 127590 to 128215)
cccttcggaaacctcaaatttagagtttcaatcaggtacagttaatgcatgtttttcttcaacgaaaaaaaaaaaaaaaaaaaacctcttcatttcgttgcttaaattaacaactttaaataaaaaataattaatgttttcaaaagttgatagattatgttaaatttttagatttctttttctttctataaatgtgaatcaaaaccaacaaaaacttaaaaactttttgatgatgtgacagttccttcttgagctgaaaattttgaacactaacatcaaaaaaaagcaaaggaaactttcttcttctttttttaattcttgatgaattgtgtttgtgtctgtttttatttttaaaaaattacaaacacttcacgggagaagtaatgagaattaaattgatgttggtgcctcgattttcgatctcaaattaaatttgcaaaaattaaaaatggaatttttgggtagtaaaattaatatgaagagaattaatatttgtagttgggatttcccagtgcatcttctgatgtctgttattgccttgtgaatattgaaaaagaaaatgcatattaagagaagggttttattattttgtttttttgttgaaggttatattataatattcataa

SEQ ID NO: 65873 - DNA, 770 bp, Cucumis sativus
  Intron number 1 from transcript Cucsa.328200.1 (locus Cucs a.328200) derived from phytozome v7.0 (chr-ID scaffold0315 9; pos 613772 to 614541 reverse strand)
ctcttcgcgtcggcgatcgtattcttgtcgagacggtaatatttttcaagctgggttttgtatttatctgtcgaattatgtgcttaattttttttttttaaatttcagacttccactaggttttagggtatttttgtgcatgtgatgtgaaaatggattgagattttaagcgtggttatgatgaagctcgatcgatcgactgaatcttcaaaattatgtgtcagttatatcatattcgaagagtatcggtgaatcatgtgtattaaagtattaactatgcattagtttacaaaaacgttggtagtttcttgttagttctattattatataaagaaaaaagaatcaaacatatagaaaacagtataatcatgagcaagacaacggaatgtgatttcagtaatttagacagaaattattttcgtctttataagttttacaagagcctgtcattttttgaacgcgaaaactcgtttttgaatagtttggtctaagctgaggtaacatagctaggtgaacaaagtagagggacttttgggggaataagtttaaactctgttgtatcgatgacctatgacattttgtaacgtctaaacattgtcctatgacattagttgtgagacactcacagataacaaagaaaaaaaaaggatggttaatgtgatttacattgactgttctgaaaattttcatgtgatctctgctcaaactaatatcaatgtcctggttgcattttcttcaggcctcttatcttatcagaaatccttctataa

SEQ ID NO: 65874 - DNA, 863 bp, Cucumis sativus
  Intron number 2 from transcript Cucsa.388800.1 (locus Cucs a.388800) derived from phytozome v7.0 (chr-ID scaffold0396 7; pos 1216033 to 1216895 reverse strand)
caagctccgggccaaggtagctttcgctcagccagtctacgggtttttattaaatttattgtttatcgctgcaagctcattgagtagttatctagttattgttcctatggatttcgttggccgttttccatttgtagtggatagaagtattgggcaatctttggtatatgagaagagcgagtacgggaagtcaaatttgtgaaaaaaagcatgaagaacttcttagtgttgttttcctgtaatctgttgtggggaacattgatatatgatttattgttcttgccgtggggcggtgtcatttctttagaagcctaatcctttgaacacccatacccccgaagtgttgattttgtttcattaagttgagtttccgtaattaagaataatggtttggaaagttactagttgtgccttggcaaaatggcatgcaaccggactctttttgctccactttggtactattgtatgtcttgacttttttcgatggtttaattatctttatgatggtgttcatctcctggaatgctagttgatttttctattggtctcctggtgtgccaaagtttttcatatccatcctctcggtcttattattctaaaacctttttctctatcttattaggtatctagctattgttttaactcaattttgtttttcttttatttgataggaaacaaaaaccattcattggtatgatgaatggaatacatggatcatattttacaagttaaatccctttccttgatgcaatttgccgctttaactatctaaccatttaaattgtgtggtataactgcaatatcacttttgctctatggtgaccgtaggttctgatcgtggcacttcaaccaaagaaagtgag

SEQ ID NO: 65875 - DNA, 995 bp, Cucumis sativus
  Intron number 1 from transcript Cucsa.363250.1 (locus Cucs a.363250) derived from phytozome v7.0 (chr-ID scaffold0361 1; pos 843963 to 844957 reverse strand)
ctggtaggttgacgttcccgatctctattaagcaggtgagtggatgtcacgcgcttttttttttttttggtggtgttgattttggtggaattttaggtatgtttgatttggttttgaactgattgggaattttgggtggtgttgagttgtgtttagcaggatttggttttgttgttattaggtttttttagtcttgagagttcggttttaggattgttaacaatttggtggaaatgttttgatatctttgctcctggaaagttcaaatccataactggtattatgtcatttcatgatttgattgtgtgaaggaaatgcctattgtaacttgttttcttcgccgagttgttttgtttgtgtttttgggtcattgcctttcgcaactcttgtttttgtaatcttttttaggattttattgatgagtaaacatcaaaccacatttttcttgggaaggaatgttgtatcaagaagcatccatttcaggatacaatctgtccacgacggattcaagaattttaagtgccccgtgtcccgacgggtcattttttgaatttatgcttgtttcttcccaatttttaaattatggttttggtaaaggaacacttgaattcctagtcgaattttaacaacaaactatttttttagcttttcaaaactaggcttggtttatcaaaatgtatgaacttatgagaagtatcatttataagtttaattttcaaaaaccaatgggttatcaatcggtgcataaacatgtgaagatgggtgctttctttttattgggataggaaaagatgttaaattaatccggtttgtggatagttcaaatgtttttaatataggcttttgtgtacccaaatattggacctctgatcaatgcatttgtttagttttgtattttcatgccttgaactttcatacttccaaattatgttatttcacacttggatgtaatttttgcagcctggttcaagggatcctcttctacagtgtttcat

SEQ ID NO: 65876 - DNA, 1035 bp, Cucumis sativus
  Intron number 1 from transcript Cucsa.327790.1 (locus Cucs a.327790) derived from phytozome v7.0 (chr-ID scaffold0315 9; pos 133586 to 134620)
gtacagcatcctatctaacggctctgcactgattggtattctcccaatctccatctatctctgtctcctcactcgaataacgaaagaatggaagatttgtatgtattatcatgaattttccagcatctcccttctcagtcgaagtaattcaattatcttttaatcacaagcacgtccggcggctatcttttaattgaccgaacaacctcaacaatatttctattttgtatatttgtttaaccaatgatggtctgaatttactgaatataaaagccttcctagttccttatgcttcatacttgatactccaccctccatttattcttcttctattgctattattatatttctatagttgattgtgtcaaattagagtctgtgactgttttgaatgatagctggacgtgtttcgattgattttttgtattgaaaatgtttatgttttggttttgttacttctgactaattggagaagttttatagctccattggtttgggcatgctgtcttttttcgtgtgtgtgtgtgtaaatttcatacatcaatgaaatttgtttcttataaaaaagatgaaaggtttggatgatttgatttgatgatttcttctgctgagattgcaatttgaaactgtgtgttttgtttgaaatgtttatgaatgattcggatgccaaatcgatggtgtagttgtctttccgcttgctaattaaaacaaagtaataaagtgtaagtgaactttcttttgggcctgaatatcgaactcgattgggaaaacaccaggacgggccaaagaaacagttggttgggatgaaatgttaattactaattctgaggaagttaatgaggttggaccttaattattgaaagccaaggattttttttattaaatacaacttgcttttcattttatggatggagttcaactctttgtttttggtgctgtttttaggtcagtttttgtttaatctcccagaaattttttatgagtgagtgtctagatagcttatgcctaccttgattaatttcagtcagaaagcag

SEQ ID NO: 65877 - DNA, 805 bp, Cucumis sativus
  Intron number 1 from transcript Cucsa.361060.2 (locus Cucs a.361060) derived from phytozome v7.0 (chr-ID scaffold0358 8; pos 1515211 to 1516015 reverse strand)
cagggtgtcactccctggaccctctctgttgctaggtcagacacacacacatatatataattcatatataacttactacttttaattacttccttcatctttctttctttagctcccctacatacacacacacacacacacactataatgtcaattcttaatgcttttacatcctcaatcctcgctctttttttcaaaataaaatagtttgttttattggttgctgtgaacgcgtttgctatggggcaaataaaactgcgcatttctatctcttcaagagacgacaaaaggaaaagaaaaagaaaaggttttggcatattgggttgacgtctactcgtaaaggatgaggtcaaagactcaaatgttttgaaattgattattttggccttatctttttgttgtgccaaccctttatgtgagaaagaggaataaaacaatacaaaatttaaatataactgtattttcataataatcttaataaataggtactaaagaaagaaaaaggtttaaaaaatagctatattaatttttaaaaaatcctaatatgcaatacactcccacgattggtttggtttagcttatcaaccacctaaaaacacagccaccaatagcacaagttcttcctaattaactttggtttactgtactgcacttcaattatatagttgaattggttaaagccatattcattcgattaggggtagtttcatcttgagtctttaactactattatgacgagttgattatttatcacaattaattctccctagtggatataatttactgcgggatccccatcacaata

SEQ ID NO: 65878 - DNA, 663 bp, Cucumis sativus
  Intron number 3 from transcript Cucsa.326890.1 (locus Cucs a.326890) derived from phytozome v7.0 (chr-ID scaffold0313 9; pos 10619 to 11281)
aactacacaattcactggaatcccagtaccgttgtgtaagtgacatttcattattggaattcatgaaagtcgtgtttgttaaccactcccttcaaatttagttaagaattcaacatttttatttggggaagatgcaaaacatagtaagaaagttatttggaatttttaaaaacaaaacaatcagtaaaaggagtctaaatctatctatttatattctaaacctcattttcatccaaataagacttcaaccataaatggaatattggaccttgccttaaacttcaaatccagttacttacagtctaatcctctaagtttttatttgaagaataattttgaaatatatatatatatataactttttttcacagccaacgagttagagaacattttgaaatatatgaacaaagtctaaaatgttgttgccttgtcatctaagttagtagcattttttaaatataaaaaaataaataaaaatatttataaaatatagtaaaattttaaattctatcaacgatatagacctattcataaaatctacaactttgtatttacaataattttgctttaagttaaaataacatcgatctataaaacatgtttgaatgttactttggattattttcaggtggtatatcgacagtattccaataagagtatttc

SEQ ID NO: 65879 - DNA, 744 bp, Cucumis sativus
  Intron number 1 from transcript Cucsa.322230.1 (locus Cucs a.322230) derived from phytozome v7.0 (chr-ID scaffold0308 0; pos 2008620 to 2009363 reverse strand)
gattcagctgtttttctcagaatttacactctcgggtttgttcatatcctttttgttgacttcttgtttaatttttctgattctcctgaaacgatgatggtttatgatttacaatcttctttctctgtttttcatgttgggttgattttgattttgagcacctttattatttttttttgctgtgttaatctttactgtttgggtatttagggcattcgtatgattttatttgctgtttatggtttctcctctgtttcataatgattttggtttgtgtatttggagatttgtctattgtgttcttcatctttgtaaagagatttttggtgtttgattttgggaaaggaaacagagttttagaacctatgtttttttctttggcagaattataatttggtgactttgttttttaaaattgtactttcttgtcttatttttcgtatattctcatcagtgacctgtattttaattgtatatagaaaaaaaaaaagatatcaatgagtacagtaacattttcattgaaaaagtcggtgtaaaaaaagtataaacagatctattttgaaaataatttctgaaacaaaactggaaaaacgttagtataaaatgattatcataggatatattttttttttatgttagttttatgattactcgtaaggaataaataacaatttataatgtattttttcctccttatgcttattggcaggttgaagatattcttcccaataaccattgttgcac

SEQ ID NO: 65880 - DNA, 853 bp, Cucumis sativus
  Intron number 5 from transcript Cucsa.325870.1 (locus Cucs a.325870) derived from phytozome v7.0 (chr-ID scaffold0313 2; pos 172683 to 173535 reverse strand)
tgaaaacaccaggtatggactatccaatttttttttctttttttttttttgtagaaaacagaaaatatcagtaactagtgattttaattaggtgtaacaaagggaagagattatttgatattaaggtcaaggaagttacagtgccttgataaaaaagaactgaaaagacgttcaacatagatttcagggaaacacacaatcctgtttacttttttcttgagttatctctggaattgggagcaatgccttatctacgagaatgggaggtccatttgaaaattcaagtttccccaactatgatgatgttatatgaagtcccaagtgttaccgtcattgttccagatgtcagcaatgcttcatgttttgagttagctatggaggagaggaactaaatttgccgagaaaagtcagatgtacagcagttctcccactctgacttcaagaaagtccaactgttacctgtaaagaacaaaggggactcttggagattaacaaaatcttattttggactagaataaagaattattccatataaatacactttttttttctgattacaatttacactatgctgcaaagttggcttctgcagtaaaggtcagatccattagagcaaagagcatttggtctttatattttccattcttaacctccaaaacaaataggtttgaacgtggttcaccaaccaattaataaggtaggaggttcctgcagtagcaacataacccattcaaataaagtatctgaaaatatgcactgttgttcgcttcttacttcactatttatgtgtttcagctatggatttagaaacacttttaatggtgtagtacatctgtttgtttgcagtggtacc

SEQ ID NO: 65881 - DNA, 617 bp, Cucumis sativus
  Intron number 1 from transcript Cucsa.325870.1 (locus Cucs a.325870) derived from phytozome v7.0 (chr-ID scaffold0313 2; pos 174389 to 175005 reverse strand)
cagaaacacagtgcaatccctaacctgccccgttggtgagatagcactgccgcctctcatttttaagatccccaaggttttgattttttgattgtgttttgttgtttttttgttgattgttctgtgcgtccccgaagaaaaaaaaatgaagaagcaaaatttttcggttgatatattcttcaaccaatgttccactagtctacacgaaaacgtaaaatcaagagaagaagttacagattcaattcaaaggatgaacaaagcaattggttggctataaaaaataatcgaaaaagctgtatttgaaaaagattgagttaccagttgacagaaaacagcaaaatacaatggacaaacattttgaaaaaagctggagtttgattgaatggcgttgaatttgcttgagtatagaagaaactattgagccagataaagttcaaaatatcttgcatgtgctatgcctatgatctaaagcatttaaaagttaaattctgattagtgtatttgccttctgttctatccttacaattaaaaaaatgagagtttatattttagatgagttacagtctatttaaataattcaaaaaatttcatttccgattgtttagcagagtaagttg

SEQ ID NO: 65882 - DNA, 941 bp, Cucumis sativus
  Intron number 4 from transcript Cucsa.385190.1 (locus Cucs a.385190) derived from phytozome v7.0 (chr-ID scaffold0390 4; pos 553553 to 554493)
tatccactggtcagtatacatcactatatattacattattgcgtatgaatacattttaccttctattttattctcctttatacctttgaaggcttgtttggattaaaagagtggagttgtgaatttaaaataataatttgaagtgaagtcataaaaattgtgaactccaaagacccacggtaaagaattaataagatgattgataaattttcatttgtgggacccacaaaccataaactctcaaccccttaagccaaaaaaaaatctcacccataaaagtgaacaatgagttgagttcgaaaaaactatgaaaactagagagctatgaactctaataatgtaatgtaagaagttttttataatacaaattgggatgaagagtttgaatctggaatctcttaatcgtcgatgtaaactccatataaattgggtgagtctcttaatgggatggaagggctagacattggtacagaacagaaagtagcggaagagaagttcaaacaacttaaagaaaatggagctatgcaataaactataaatctagcgttgaaacacttgggcctagaaaggtatacacttaattaaatcttaaacaaggcctggttttcctttttgttttggaaccgtttggatttctatttttgaagactagacttcttacaatgattttcatccttaagtagcttaatttttagctcaattaaaaaacaaaacaagtttttacaaactacttctttttgttttaaaaaaattgacttagttttttaaaacattcatagatagtacttagtagataataaaaaaaatttgaatttaaaagtcagagagatatttacagagttaattttcaaaaactaaatgtttccatgaagttattttagataataagatattttatagtatttaaaaaaatttcaattatgattaagattagggctagg

SEQ ID NO: 65883 - DNA, 781 bp, Cucumis sativus
  Intron number 2 from transcript Cucsa.332670.1 (locus Cucs a.332670) derived from phytozome v7.0 (chr-ID scaffold0326 4; pos 429199 to 429979)
caggcattctcgtccccagcgtatcagatactcaggtataactttacaacatataaacaagtaaaaatggccatctaaatcaaaatcttcatttttttccccccctaattttagttagatttcaaacatgttttcaaaaagctaagtggccaacaacaaaaaaaaaaaaaaacataaatgcatgccccataaaatcaagtttatatacttacaccttcaagtttatttattttgttttcgacttctttccagttttttcataaactaaaactaaagaaaaattcgtttgttaacacttgtttttcttattagaatgtgatcaaaattcaaaggtgaaaaccttagaagcacaagcacttcacttctactagcgtgagtcaatccatccatctctggcttctgccatacacaattattggacatttcaattcacttgttgaatacatatcaaacacatgtcacattagtgcgacatattattagacatgcataaacattaatgtagaccagaaaggcacgtatatctaaaatacatcaaaataagtttctgaagcataactagatttttaaaatatgacatgttgtgttagatcataattggagtcataattgtgtcttgtatctctgtgcttctaaggtgaaaattaagtcacaattttatgaaaaacaaccaaaaaaaaattaaaaacaaagtcatcatgaaagataccaaaaatttttaatgaacaggagttgacaatcttggattgcaagccgaaaatataggtaatactgaagtact

SEQ ID NO: 65884 - DNA, 699 bp, Cucumis sativus
  Intron number 1 from transcript Cucsa.382200.6 (locus Cucs a.382200) derived from phytozome v7.0 (chr-ID scaffold0386 6; pos 290888 to 291586 reverse strand)
accttaaaatttcttcggtgggtaatgaccagctttcattaaacttaagctgaaatggaagaacctacatactcttaacatggttttaaagagactcaaattgccagaccaggcttctgtttatgctttatctttgaaagagcaatccaatgagaaccattaaagatgtatgaaagtttgattgattaatggcgtacttgaatgtttgtctcctattttaatttgtgtccattatttggacaatcatagtattgtaggctctttttttcttagctcttgatagtaagtgtttgaattgatcccccaagatatgctggatgtgaccgtgctggtacctcctgttatccaaacttatgatctttgctttgtcaatgaaaagagactgtatcatttttaattatttgcttgatgtagctgaatgaattcatcgtagtgtggggtgattccaatcttctttatgattttactgtagttctaacatgtctttatattgaccaaaagatagtctcctttcagtttaggttaattaatgtaggttcaatttttcttttaaactttttgtgactttgaactaccactcattcttagttgttgaggttttatttcactttagtttctatctttcctgttatgccttgttgatgcttcccattatctaaatcttgctgatgttttcaatttcatgtaaaatcagagtag

SEQ ID NO: 65885 - DNA, 1051 bp, Cucumis sativus
  Intron number 1 from transcript Cucsa.316840.1 (locus Cucs a.316840) derived from phytozome v7.0 (chr-ID scaffold0305 0; pos 88720 to 89770)
ctcaactgacacctgtatctttctgtggacaagaggtccgggttcaaatctccaccaaaaataaaaagaaaaaaaagaaaagggatttccagatatattactcaaaagaatcgacacaatacgctgtgtgtcacctttaatcctattttgatcggatccagctctacccaaacttttctggtttaccccaacatgaattatgaagcaaagaaatagaattggaccattgtgtatattagattaatatgacacatatgtaattgatatgatatctatatatatatagaaagatatatattgtatattcatctatattcaaatggatcaatattccacctctatttttatagagtacaattttatacccttaaataataataatagatagtatggtagaaggattcatatatttctttctaccatagaatacttctctcatagaatactgataattctagtccgccaatttcatctaagacgcaaaattttaatgcttttcatttttcttatcttcaatcattgataagaaataaaacggcaaggttaattcaaattaatcactttgactgattgtttttacgtatattataagtaaaaaggcggtctgaactagaatgaacagtgcagtagcaataaatgcgagaatatttacttccataatatcatcgtttcattttttattcgcaataactcgagatttaatctgggatgcattgtatcttgatgatatcgaatcgtattaaaatatcatgaataacaatatcagagttatccaatcgattcatcgtcgagaattaaatagtataacataggaagatcttcacaaaaacgacgtggatggataggaactaaaaaagagagattgaagtagtttgaacgattcaataatattattacttcaattcataatttttagttggataaatcttagtgatgcaataataagttataattcattggtttcattgtatcaataaccatttctttcttttattttaatatgaggaacttatcaggaatccactgatttctgcctcttctgttattgttg

SEQ ID NO: 65886 - DNA, 438 bp, Cucumis sativus
  Intron number 1 from transcript Cucsa.326070.1 (locus Cucs a.326070) derived from phytozome v7.0 (chr-ID scaffold0313 2; pos 334932 to 335369 reverse strand)
gatacccttttccaaggtaaaccacacaatgccttctctttctccgtttttttctctgtcttggagcttcagaactgacaattttgtagtttttaatttcttgttgaaattgaatagtagtggaaacaggggtctcccgattaagatggatgaggttcattataatattattgtttatttttttgaccatgtgagtttgatgtcactgtcaattcacggatacatttgatgcttgtaatggttgaagaattgaaaatatgtttctagaagaagaaaccattgtttaaatagtgatctcaacaaagttctacttcctgtgtttgtttcagtttttcattttccatttgtgttatgcattgtttttgtttatttctaaggtgatttctgattcatcatcatgatgaaactcaggggattgaggagtttgatattaagaga

SEQ ID NO: 65887 - DNA, 777 bp, Cucumis sativus
  Intron number 4 from transcript Cucsa.361020.1 (locus Cucs a.361020) derived from phytozome v7.0 (chr-ID scaffold0358 8; pos 1489664 to 1490440 reverse strand)
ttgagggaatattgcaaggcaggaagtggagaagggtaaatatctatcatacatatcttttttcttattcccttcaacgtggacggctgagattgatcgaacatgaatttgatccctttccctgctcctccattttaagtatacatctatattttcatttttttaaaaatatatatcagtttttaaattaacaagtatagtagaaagtaacatgagctttgagatgtatggttcagtctttgcatgcatgcaatggaaacaatgacagtaggaaggtagacaataacatattattattattattatcgtttacatcacatgctcacttagttacatgaagaaaaagcaaccaactttttcaaacttgttcagttaggtcattactgtgcatcactgttgatggtatcttatactaattaaagagattttccttaaagttttccattaaaaatctgcttatttactctaaaaagtaagctttgttttctaaatcttcttaaaaagtgattttgacaaattttccattcctaacttttaattaaaaggggttatttaaaaacaaatgttattctagaaggtatatatatatgcatgtaatctacttaattgtttgggttcaaagtctcgactccctagtgctacttgagaaacagtttcctttcccacttccaaacactttttaaggctttaaagagtttgtacaggatcacctattttattatcatttgttaactgtttactaaaaacaaatatctcctttttttataatgaaaacag

SEQ ID NO: 65888 - DNA, 409 bp, Cucumis sativus
  Intron number 1 from transcript Cucsa.370560.1 (locus Cucs a.370560) derived from phytozome v7.0 (chr-ID scaffold0367 8; pos 256567 to 256975 reverse strand)
cttgcagagagacccaccaacttcttgcagtgcaggtgatcagttgatgcaactttgactccgtttgatgatgttttctatgtctgtagttccctttttcttgttttcagtttttgacaaatatgagccctttaatttggtaatacagattctttcactttagatcttgttttgataactattttgttttttatttttgaaaaaacgtacacaggtcttttttttcttttttgagtttaacgatgaaaatcaaaccatctaccttgatatagtactggatgagagggaccaagaattgatcacccgtttaatcttttccttctttaactctggggaaatcttctgtacaaatcaaatgtaagtttgtgttatataatggtgcatttcttcaggtcctgttgcagaggat

SEQ ID NO: 65889 - DNA, 860 bp, Cucumis sativus
  Intron number 2 from transcript Cucsa.341320.1 (locus Cucs a.341320) derived from phytozome v7.0 (chr-ID scaffold0335 6; pos 3727196 to 3728055 reverse strand)
caatttatacaatctgaactcctacaagcattctggttagtcatcttaaatattctgattaacgaggcgttcttttcattttaattgcaatgctagtggattaagtttggaagatttcgtttgaacgtctatacaacttagagacgggatcgttagtatattatgtcgttgtttgaagtttgtgtattgtttaagtagagtgtagatgaaattgaaatattagagtgtttgtttgctttgattctatgaagtttttcaaatgaccaaaccgctgctatgttattgtttgaattcctgatgttctgctcaagtggaggttatctagattagatgtgtgaggggccagcgaactgatatatagttgtatacgatgttgtaaatcgtttgaaacttcgtttgtgcagcatctgggagggtcgtagaatagagattgcatggtcattgtgcttgtccaattaatgtttatgctatcggttcttttattcttagattagatgtgttcaagaaattatttagttattgggttacatgttcgacaattgattctgcggttttcttgaatacttccaaccgttgctaatctctttgtactagaaaacatatttgagtatttaataattttttgtccttgttgaacagttcggtttattgtctaatatctattcgaatttcattgttttagaactttattaatagtggtgagaggagtttaaggggattttttcttttcttcattatttttattgtatgttttggattgaagataatattgccaatagtcggtgcagtttatgcttagggttcattaagattcttgtgttttaggtttggccaacaagaagactgtcacaattcaacct

SEQ ID NO: 65890 - DNA, 611 bp, Cucumis sativus
  Intron number 1 from transcript Cucsa.395380.1 (locus Cucs a.395380) derived from phytozome v7.0 (chr-ID scaffold0410 0; pos 947655 to 948265 reverse strand)
ttgccggttccgctcttgctcacactctcggcaaggtgtacaatcggtttcttcttcttttttctttttttttttaattctttttctttcttagtaagtattcgattattagtagaagttgatatttgattcacagaaaccctttgaatgatgaagatttatggaagtcattgaaaacttgggggttgtaaattgctcttccatgtaaccaatgacatgacgggatgattgcttttagtttctttctttcttattggtgcaaataattctttttaaaaaattatacagccacctttcgatttttataatggataaaatcactgcatcgtattttgatgcaaattcaatttgattattgttgagcaaaagagaaggttggaatttatattttaaaacttaaccaaaagttcaatttggtttgtttagttcatcggattgttgttcatcattaattgtcctttcaaaggtcaattatcatttcaaaagttaggtggctaaacttaaaaaaaggaaaagaaaaaggtttgtacatatatgtatattttttctctctcttttcgttatttttaccatggaagcaaagcaaagctgatgacataaaaattggtagg

SEQ ID NO: 65891 - DNA, 548 bp, Cucumis sativus
  Intron number 1 from transcript Cucsa.312700.1 (locus Cucs a.312700) derived from phytozome v7.0 (chr-ID scaffold0299 5; pos 2034054 to 2034601)
ttcaaccatcggtttgtattctctcttctctttctcccttctcttctgctgcatattcattgaattttaatatggattcttctctatgttgttcaaattattttttctgctgaatacgagctaaatggaattggccgatggtattgtatgtttcgttgtgaaaaatgttggcggatttgaatttgatccagttatacttatacttatactcactgtttgagtgattcttattacgtctgtgccaagcttctttcgaggaaggtatagccatcggtgtaatgttacagtacctgtaacctcttcaaggttttagacatttcatttgttttttctggtagtgaaatagagttcaaagttgttgtttctatattcttcattcccgattaaattagtcacatatgtgtgaaattagagtgacaaaaatatattgtggaaaaaatgaatagtttaccaaacctgtcgatttggacttttcgaattgcattgtttttttctttctctctagatttaataatcttatgttttttttttttgcataggactctgtt

SEQ ID NO: 65892 - DNA, 870 bp, Cucumis sativus
  Intron number 1 from transcript Cucsa.338050.1 (locus Cucs a.338050) derived from phytozome v7.0 (chr-ID scaffold0335 6; pos 1041930 to 1042799 reverse strand)
aatcccagatttccgccgcccctcttcataatccggtacctattttatttcctcccctttccttcattctctctttattttgatggcttcttgctttctgggtttaatctgaaaaatgcctttactgtgtgtgtgtgtgtgtgtgtgtgtgtttggtgggacataggaaaagattattgaaatgctcatttaactgtcttattcatattcttggtcttcttcttcttcttcttctttttcttcttcttcttcttctattgagttgtctctttccccctcttctactctcatttcaactcttcttttcattgtgtgtatatgtttttttgggttctctaagcatttgggttggggcccttattgggttttaacttcaatatatgattttgtttagatttgttcttgtaatgtttttgtggccttggttgactttactgttcctttcccaactttgtggttttggaagaagttcattaggagaactgtttttagccaaatttgaatgtggaattcagatggtttttttggttcagtttgtagtggatccattgagggttaaatgaagttctcttgtgaatatctggagctgctgaaaatgtttgatgaagattgattccttaatggaagtgttctgttcatttatatcatgtttccttgtatcttttcattcgtgttgcatattgtactatctttcttgaatgaatgtaatttttaccttatttgggaagggctctgaggtcttgttttgtaaaatcccatctccttgtagattttgatacacttcttggcttttttttcgacgtatgtcgattgtgtgcttctcttttctgactgttgttaagtgtcaatttgttgaatactgttttcagg

SEQ ID NO: 65893 - DNA, 426 bp, Cucumis sativus
  Intron number 1 from transcript Cucsa.360310.1 (locus Cucs a.360310) derived from phytozome v7.0 (chr-ID scaffold0358 8; pos 996398 to 996823)
ttgccgagtcaactcggccttcacttagttctgtaagtctaagccgcgacaaatttcttttttctctgcttattttcttctgttttgtcgtttttatcagtgtttaatgtatctttctttgatacctgtttatatttgtgactagttcgtttgaattcggtgtagtagaatcaacataggagctatcttggttggtttgtttattgttttttttttttgaaattttggggtttctgattaattggaaatgaatttttgtttgtattagagagaattaaagattcgttaatttatggttattgatggaggagtgagtttgagttacatgagtttgatggagtggtttttgtcttgatacagacgaagtttttgtttccttatttatttatgtatttatttcttgtctgtttttgggggtttcagttt

SEQ ID NO: 65894 - DNA, 656 bp, Cucumis sativus
  Intron number 1 from transcript Cucsa.357210.1 (locus Cucs a.357210) derived from phytozome v7.0 (chr-ID scaffold0357 8; pos 70389 to 71044)
gggaatttcggtcattaccaatttcttccaaaagggtaagattttctttcaagtggggttgttgacatctcaacttcttggctgtaaaacattccattctctgaatttgaagctctcatgaatctgtaaatggaagcaaagcttttgggtttgcctttctttttcatcttcctaacttccctctttacctttttctttctcttgattaagaagcttttgtttatggttgatgcttactttgctcgtttatgtttgtttttcttctctctcttgttttagcaagttatcatttcgcttttattatgctatttagtactgtcttgcttttctcttgaatttatcattccaccattcccttcacgttcgttggaatatcatcataattgcacttgctttactcatttgttgtgttttccttcacacatgtctccgtagattctggaacttctgcttataattcaaaggggttatattttatgtgggagatttttgtctcaacctttatcaccttggtgtaggattttcatatttgttaaacgtcttaaccatgtgagagctctgcaaaatagtttcagtttcagttgattttggaacttggctctgccccataggggtttctggtctcacactgtgctttttggcgtttgaaggtcgac

SEQ ID NO: 65895 - DNA, 489 bp, Cucumis sativus
  Intron number 1 from transcript Cucsa.358640.4 (locus Cucs a.358640) derived from phytozome v7.0 (chr-ID scaffold0358 6; pos 265148 to 265636)
ttctcgccgctcagcttgaggagcaaaagattaatgtactctcactctctttctttcatgtcttttctttcctattactcggggacttttagattctttcatttactcaacagttggtactcattttgagtttcatatcagctgcaatgatatattttctcacctgggttctttcgttattcgattgacatgttttgttatttataaattcttctacttgaagaaattagatttgtttttaactttcaagtcattttcgtgttttatcttggtggagggttgctatcggtgtttatttcttttcttgctaaattagttgtttgaaaccatatagagtttagggttttacattgcagattgtgtaacaatcagttgtactcattttatgtccatttccctagggataaaataagaatcacttgtttttccactgtaaaactaaatttcgatgattctgtgctgactctctgctaatgatattacaggctg

SEQ ID NO: 65896 - DNA, 409 bp, Cucumis sativus
  Intron number 1 from transcript Cucsa.312880.1 (locus Cucs a.312880) derived from phytozome v7.0 (chr-ID scaffold0299 5; pos 2207058 to 2207466 reverse strand)
cattacaaaaccaccgacagtggagagacaagaaggtaaaaactaaaagatcttcgtttttttcactaaaaagtttctcttaaagcattcttgttttttatttttctttcgaaaagaagaaaaaagtagaatttttttgttcatttggtggaattttcttggtgggtttgaaaaatctcacaagaaaatggtgaaagttagtaactttattctctttatatgtatatatatgcatgttaacattattctaaacacatactactgtcaatcttttgttcatttgtattttctaaaaatttatgtacagtgggtagtgactttttgttgcaataatgtaaatttataatgttttgatttcttttttttttttgcaggtgagtgtggtctaaaatccaagtgttctattttt

SEQ ID NO: 65897 - DNA, 393 bp, Cucumis sativus
  Intron number 1 from transcript Cucsa.362150.1 (locus Cucs a.362150) derived from phytozome v7.0 (chr-ID scaffold0361 1; pos 133327 to 133719)
aactaagcggcagtctcagttctgccaccaaagtacctctcaagttctaatccctaatcgaattgcttttttattgttcatattcttaatgcattgatgactcaacctacttttgatttctgatgtttgctgtcgccgatttttcatcttccctgaattagcttctgttctgtctattgagcgttgtgacggtccatatcctcatctaattttctattcacgttgaaattcgatgcgtttcttgagttttttttttttgttaaggtttatgcggattcaagtaacttttatgtacatatctccatgccgtttgcatattttttgctttggattattttgtaatcaaattcggtctctttgttccatttttgaatttgcagccgaaacaaattc

SEQ ID NO: 65898 - DNA, 641 bp, Cucumis sativus
  Intron number 3 from transcript Cucsa.394230.4 (locus Cucs a.394230) derived from phytozome v7.0 (chr-ID scaffold0410 0; pos 262592 to 263232 reverse strand)
aggtgtgctgaatgtctgcatcattcattaactttaattgttggaattgtagatttcatgctatccactttgtcaatagacttatcaagtttagtgttaaatacgacaatttgaactttagtggctagatgtgattatatttattgcaatgccagacgtatgaaattcttttttttttccctgtccagtgaaaaccagacaataatggtttgtacataattatagcgaatagttgtgcttctttgtgctttgtaggttttttcttctaataatctatgggatagataatttataattcaagatgactgtgaggaggtcacaattctctaatgcctcttagacgacattggttagaagttagaactacgcttagtacttaatgatacttaaagaaggatcgagcaagggtaatagcacctgaaatttgttggcatttgattaaagatactaacatttcatgcagcttggactgccaccccatttccagccagacaagtcattcctttatatttctcccgatcatttattttactcgtttgctccttgaattgaattggtcaattattttattgggttaaatacatatatgttaagattgaattgcgactgaagcttttttatttttttccaccgactacagg

SEQ ID NO: 65899 - DNA, 678 bp, Cucumis sativus
  Intron number 3 from transcript Cucsa.385500.1 (locus Cucs a.385500) derived from phytozome v7.0 (chr-ID scaffold0390 4; pos 810818 to 811495 reverse strand)
gaagctttcttccaaaagatagccctcttcgtcaggtaagccatctctttctgctttcttttttctctctctcattatgaaatctcttcgatccataataatttgcctcactgtttcaatgaaaacgcaatgtcctggatcttgcagagtctttaggcaactttctttgaatgtccacgaacgatgtttttagaaactgcatgttgtttttctttatgttgcagtaagaaaactggcagatcttgaaattaataattacactcaaaatatcgtggtttgcatgccgatttggacgtttgtgtgccttgatccgtcatttggccttgctctttggctgaagtgcagattaagaacgacaattctatttgttggttttgcaatgaaactatttgccaatttgaattaattttctgatttgaaatgtgagacttaatgtttggtggcaccaaggattttattcgtttgcttggttcgaactagctgtaatcttcaacagagttcagaactttatattattcaagtgttgtatgccatcttttgttccacgaacctttatctgtataaaagttaaaagatgactgtgatttctattcttgtcgaatcctcatacaatagactaattgatgataataacctgaatattgtattgtcatttgttatgataggatccatcatatt

SEQ ID NO: 65900 - DNA, 895 bp, Cucumis sativus
  Intron number 3 from transcript Cucsa.363920.4 (locus Cucs a.363920) derived from phytozome v7.0 (chr-ID scaffold0361 1; pos 1499389 to 1500283 reverse strand)
agcaacaaagaaaagtgagccaagtttctattcctccatctaattttttagaattcatttttcgaaaattatatttgccttgtggttggttttacttttgtctagactgttttaacgtgggaaaatggttggttcttgaaacttgcccattttgagctattaacaaggatggaatataaattatcgctatatgctgtgttcatataatttacaatttgttttacagaagcttctctctctttagtatgtgtatccatgtagaatacaaaaataaatggttatgaaacgactgtcatttttctccatcatctgttgtggggttggcattttgcacagtttctttgggctcgttggttgatttcttctctactttattgggtgtggaataaaggttgttaggggatgggggaggaggatctcgttaatccaccctattgtaataagggcataatcttgtagcatgctagtttctttgccattttatgaatatttggcttgagtgtaataatataggatcttcctacttctctgtagtcgtttgtcactgggcctttttttaaatgggatattggtttgattttattggattggagtttctttatgtagttgggcttgtttatgctcttgttatcttttcacttttctctaatgagagtttgggttcttataaaaaaaagaacataagatatcattttttccttcacatttgtgtactttttcaatgaaaaataaactttaccaaatctacgttgtttttaatgtggtaaacttttgtcaaatgctttaatatgtgagactcaactttcccttttaatcaaattatatttactttcatgataactgtaactaacatgtgtcctcttacaccttggcatttaggctgaaatcactacat

SEQ ID NO: 65901 - DNA, 450 bp, Cucumis sativus
  Intron number 1 from transcript Cucsa.363920.4 (locus Cucs a.363920) derived from phytozome v7.0 (chr-ID scaffold0361 1; pos 1500636 to 1501085 reverse strand)
tggagctcctttcactgaaaaacttccaggtttttgtaatttttcttatttttatttttggtattttttttcttttgtgtttttgatgttaatttggttgagttttatatgatgtatctttcttagtttctgattcttaatttctgatccattttgagatttctgtacctttattttcgttgaaatagagctcacctccttctttaatgaagtttttatgagattatttggctgtattcactaatttgtgtgttttggcttcttttcttttgtaatttctgtcttatttcggttcatgtagacaattttttgggttatttgtttcatattttcagtattgtttcatttcttgattcccccctgattttatggctttctctgaacagaaatcaggtttctgggcgtttttttgtagaagacgttggcagctttggaacagattcgaagggg

SEQ ID NO: 65902 - DNA, 571 bp, Cucumis sativus
  Intron number 3 from transcript Cucsa.388060.1 (locus Cucs a.388060) derived from phytozome v7.0 (chr-ID scaffold0396 7; pos 513977 to 514547)
tttctcctgacctccttgctgccaagtccaaaaaggtcttttcacttttccccttttcttttttaaattttagattccactttaatacattttccccttcattaacttcactttttctggtaacaacttggtatcaatatttccttctcttttttttttttttctcttttgtaataaaagataatacattaaagaggtttcactttgagttaaagatggtatttctttgtttggattttgacattacataaccttatttattcaattgtttttagagaattattataaatggcaaaattattgaaaatatttaccatagatctgatacatctggaattttacggaaatggtccatttttcttcaacatttttgtaaaactctactagaaagatgatggtaagttttgggtgatacaaaagttgaaaataaaacttcttgttaatacttttctttaaattttgtttatgggttatgaacttatgtatatatttaattataaatggtttttctaatgtatatatatttatttatgcagaaaagagggctgagttacataacaaattgctttgt

SEQ ID NO: 65903 - DNA, 1033 bp, Cucumis sativus
  Intron number 2 from transcript Cucsa.355870.1 (locus Cucs a.355870) derived from phytozome v7.0 (chr-ID scaffold0357 7; pos 416735 to 417767 reverse strand)
ctgtcgctctctgttttctttcttggtatgcaattctagttctaagcttttcaactatacaatatcttttattcataatatactagagattattgttttacaacttcaaacaaaataaaatatgtcaattacctttcaaatgattgttcactttgcccatcaacattgaatattatattacattttattttttagtcatgagactagtcattatttttattcttaattatttcttaaattttattatattttccacgttgtcatgattctctttgcttcatcattctatgaatacctattttttaaaaataaaactaatactataaactatttgggaatatataattagtggggcatctagatatgtttctttttctatatatataaatttcaacaatttcttactttttctcaataaaaacaaaatataacatgattagattatgagttgtgacactatgaacttaatttaatttggttaaatttatggatttttaaatgtctggacttaactttaatttggtgatttctgtaaacaacatttgtttttcactttgtttgttaaaattgatttcataattcaacagtttaaaaagagtattcaaaatttaaaaactaaaaaatgcttttctaaaaatgttgtttatatttttgatatttgactaaaattttaattattgtatcttaagaaagatacacgttttttaaaataaaaatgaaatggttatcgaaagtgatctaaatagtaattttgtgttttttttttaagaaaacactccaaaatattaagctgtaatagtagtaataacaggaaccgaagaggattggaataaaaatgatgtggatagagttaaccaacaagcaaggttaaaagtttccaacccgatataatggtttaggagaaggatatatatctgaatcaatttagctgtgcttaattggaagtgtgcacattcacttatgttgatcatatgtttgatataagtatgaatatgcagctgcaataacgacattcgtgcgattctttcctcga

SEQ ID NO: 65904 - DNA, 882 bp, Cucumis sativus
  Intron number 1 from transcript Cucsa.321740.1 (locus Cucs a.321740) derived from phytozome v7.0 (chr-ID scaffold0308 0; pos 1558664 to 1559545)
ctgtaactcctgttccaacctctggtttgtttctgtatccctccaattttctttttatctttttgaaaatttgctttgatcacaattcaaatatttttttctctaattttagtgaaattagaatagttaaaaagggctgtgatttcgtttcttccaactttaattccctgttcaccatgtttgttctgaagacatcgaaaaatcagacattttctcatgatagtttttttgtgctagttactggctactgccattgggatttcgccttaactttcatccatcaatgaaattgtttattattgaaaaaatcaaaaccacaatttcataaatcatcattatggccaaagagataagctatacactcaaattgttttgaagtgataagttcaaatctcatgggaggttgagcttcattgactatctgtgaggatactacctaaccagaatcaatatctgaaatatattgagaattaaagaagaactacaatataatccaagtttactccacaaaatagtctctccttcactcactcaccctcatactattaatacacatccagtaactaactttccatctaatggccaatatatcccttttaacatactaatattcctatctgggtacctaataccatctttgcgtctatggtcaatcttgttggttgctttctcctctgattattgattgaagaaagggtggaagtagtgaagttgctactaaatcttgtggagtctaggtggttgagtttgcctagatattcataattattaacaaaacaaataaatcaatgatgatggtgatttgcaagttcctatatgctcggaattgtttatagttaggatatgattggtttcgaatatgacccttaagcaggcttaacg

SEQ ID NO: 65905 - DNA, 737 bp, Cucumis sativus
  Intron number 2 from transcript Cucsa.338500.1 (locus Cucs a.338500) derived from phytozome v7.0 (chr-ID scaffold0335 6; pos 1365852 to 1366588)
tggtctcttgcgacgcttccaaaaggtgcaacaaccatggaggtgaaattgttttcgaatgcatttgtttttttttttaatttctttcgggaaaattgtttgattctggaatttggaagctggtttgttttcaatgtgatggtgtggaatttcattactgttcttgtgcttttactttgttgttcaatggaccatttgaattcaatcaattagtcgaatgcccttgctggttaatatggttagaaggttaaaccgatcaaatacgtttgattttgattggtaatttttaaatacggatgacaatgtgacacagattgagcaatggaattcctgcaaatgtgcatctcttgtatatattgtatctttatatgcacataaccattgaaaactttataccaaatgtcgattttaatgtattatttttcattgcacaacgtttattttccatgtgaaagtatatgttcatatgttttttcttccttcatttgccatctttatctcgccatttcataacattaagtcatatttgtcttgggcatgaaaccttttccagtgcttgtattctcatgcttaccctgaatgagatcatgctttgataaattagggtgcaacatgagttcgttcagcttactaagaatggcaaaaattcccattgcttacattttctttgtgaatattttctcgtatttcttcatccgacatcattgctattcaattcaggtacagagagaatcgtc

SEQ ID NO: 65906 - DNA, 922 bp, Cucumis sativus
  Intron number 1 from transcript Cucsa.313580.2 (locus Cucs a.313580) derived from phytozome v7.0 (chr-ID scaffold0299 5; pos 2720707 to 2721628)
cattctactttacttgctgggattttgtttggaaggtaccctccaaagggtctttcatgaaaaatcactgatgtggctcaatgtgaagttgcaagagttaatgcatccacttggaatgcctatatatatttttttgaaacaaaaacgagtctcttcattgcattaatgaaatgagactaatgctcaaaggacagtggaaatagaaagagcaaaagaaataaaaggcataacggttgaggaggtgacccaggcatctcaactaggttgacatctccttagcatcctcatcatctccagataagatacccaatccttatagacttccggttcaagtgcaatacaagaggataccaactagactgaaaacaaaattaccgaatgcctttatattttcattactcttgttccgttatttattgccttttattttatttttatatattgattttcttatcaatcctttggggagctcatattctttgagtatttagtctcttttcattttattagtgaaaaaatttgtatctagttgaaaaaaatgttgatatctgtaatctaatttcttttgtagtattctagatatgagaattgagagagtaacagatcaagcaaatacttaactattttactctagtggttgatttccaacacatatttattattttgataagaaacggagctagacactatcgttttgaattttaaacgcactgtccatattgtcatatttttcctatccattggattagagttcttaatatagtttgtatgacttccattctttcttatgaaattcctttggaggaatgcccttagatccaatgaggggttttatttatttatttttatttgtatcaatttccaaaatgacttgaattctctttgactgaaggtttttggcgcccttagagtttttgttaag

SEQ ID NO: 65907 - DNA, 689 bp, Cucumis sativus
  Intron number 1 from transcript Cucsa.341910.1 (locus Cucs a.341910) derived from phytozome v7.0 (chr-ID scaffold0335 6; pos 4347014 to 4347702)
gagctcctctctaatccacgcgttgatcaggttttaacactacaaattatgcaaaattttatcttcatgacactcatcatataccatatgtccaaaggtccatggattatcaccaaagaatctataagacacagtgcttgacttccaaaaagttaatgttgattgatttgataaacgtgaaaggtaaactattgtaaatgataaattagtaaaagtatttacaaaatactgcaaatttttttttattgtatttatattgtagaaacaatttttgatgatttttatcaaaccaataataattagattttaacatgtaaaatcataacagaggaataaattatgatttttttttctaaactaacatataaaaacaatctttgtaatttaaccttgttataacttgaggtacaaaaatttatattttcattttttgaataccaaactgagtactcccatgccttcagatttgaaaaataattatgataggtccacttagttacatttcgagttttggaccatttttgtgttgatatttgtagtttttagaaaaagttatatttattttttattttttaaatgaaagatgcattaaaataagaaatctatactcatacaagaaaaagtgtttgattagggtgtatttaaaatgttcttactaatattacaaaatgacacagtttaagaacacc

SEQ ID NO: 65908 - DNA, 699 bp, Cucumis sativus; identical to SEQ ID NO: 65884
  Intron number 1 from transcript Cucsa.382200.1 (locus Cucs a.382200) derived from phytozome v7.0 (chr-ID scaffold0386 6; pos 290888 to 291586 reverse strand)

SEQ ID NO: 65909 - DNA, 458 bp, Cucumis sativus
  Intron number 1 from transcript Cucsa.349020.1 (locus Cucs a.349020) derived from phytozome v7.0 (chr-ID scaffold0348 7; pos 387009 to 387466 reverse strand)
atattatcaaaggcttgattttggttagttcttctcatctctcttcttttttctttttcacttgtgaattttgtttttcaaagtttttttttaaaaaaatgacttaattttgttagacaaatatgattagccaactgagtagtaggatgtacaaagatgaatatagcctagattttattatagaaattacgagtgtaaaagaagacccagtccaacccaacctgttgtcgattgtgtacggacaagacccaacttgattcaacccgactgaggtggggtccattaaatattaaataatattcaatttttaaaaagaaaaaaaaggaagaacacttcttcagaattgggtcaagttgggttccttatatactaaataacattcaaacttgcttaaaaataccttttgtagaaaaatatgtcacgcttttttatctaactaacgtttcatctcacagaca

SEQ ID NO: 65910 - DNA, 522 bp, Cucumis sativus
  Intron number 1 from transcript Cucsa.359820.1 (locus Cucs a.359820) derived from phytozome v7.0 (chr-ID scaffold0358 8; pos 636121 to 636642)
aaattgagctgaaaaaggcttcagactccctaaaagtgagttattctctgcttaggcgtttgttgtactgtattttgatgttttaaaggcatatttgggaaatattttttgttggaattggagtggtctaacatgtatgtgctagtcatccactattatcttctatgccttacctggtgtagaagttgtgtgcatggggctctgctttaatttagtagatggatgcattttaggcaagcatcgtgttgaagaatgggtatattatattagtaaactggtcaatattgttgtagtcgatgaaacgctttgttacatcttgagaactgatggtaccgtatcatgaaagccatatgtttgttttgtttgttcaatatatagtgaaaaggggtgtacacgttttggatagaatagttcatactaagaatggtctttccgtgctttctgtttgatgggttgacacaatttaatctctatttatctcctccagtcgtgggatacaacttcgatatcattgacagctgg

SEQ ID NO: 65911 - DNA, 456 bp, Cucumis sativus
  Intron number 1 from transcript Cucsa.363920.3 (locus Cucs a.363920) derived from phytozome v7.0 (chr-ID scaffold0361 1; pos 1500636 to 1501091 reverse strand)
tttttctggagctcctttcactgaaaaacttccaggtttttgtaatttttcttatttttatttttggtattttttttcttttgtgtttttgatgttaatttggttgagttttatatgatgtatctttcttagtttctgattcttaatttctgatccattttgagatttctgtacctttattttcgttgaaatagagctcacctccttctttaatgaagtttttatgagattatttggctgtattcactaatttgtgtgttttggcttcttttcttttgtaatttctgtcttatttcggttcatgtagacaattttttgggttatttgtttcatattttcagtattgtttcatttcttgattcccccctgattttatggctttctctgaacagaaatcaggtttctgggcgtttttttgtagaagacgttggcagctttggaacagattcgaagggg

SEQ ID NO: 65912 - DNA, 511 bp, Cucumis sativus
  Intron number 1 from transcript Cucsa.333880.1 (locus Cucs a.333880) derived from phytozome v7.0 (chr-ID scaffold0329 0; pos 26691 to 27201)
ttctagctctttctgaagggggaattttgtatcaggtaacttcaaagaacttatctctcttctttcgaaaaaccaatatgatattggtacggttaaaagaaaacataaagaatagagaaatcacacaaaaatttatgtagttcattaatggtgttctattgcaaaaagagagaacaacttattattacatagaaaaatttatgtaattcaaagacggtagagagtttatatcgcatactcctctataccttagggtcaaaattttagataaggtaaataacataaatacgaattttgttgtttcttggttgtgtagaacacatataatagattcaacgcatttcaatatatacgaacagatcaaaagaaatattactacagaatatagtttaagaaagttgtacaagacttgaatcaattttggcaaaatagcaaatgaaaactttagaacgtactggatcttgatagtgatgaagttatttccattttctttcttagttgcagctcagtg

SEQ ID NO: 65913 - DNA, 618 bp, Cucumis sativus
  Intron number 2 from transcript Cucsa.394860.1 (locus Cucs a.394860) derived from phytozome v7.0 (chr-ID scaffold0410 0; pos 602854 to 603471 reverse strand)
gattgtcatcgactctggtccgtgttactctctttaacgagtattctgcacgttcttgttcttggactctgtaggaatttgtattgcagataaaccaatcgtctctattttctaggatacccataaacgaaatattacgaactaattcgattccacatgctttgaattgtcaattcttctgcaccgtaacactctgcacgcgacctagcaagctgcaacagagtttatactatgattgatgcattctgctacgtataaaattagttattgttcgtcaaattaatcatccctccttaggattttctagaaatgatgatgaaaatgaaaattatggtactattggattaacaaagattgtatcatagtgttgttttaagatttattcatctatatatttgctatgtcctatgaaagtttataatgtatacattcttattgtttccggccaatgcttttacagtttatcttttagcagccaacatgatttactccttctcttgaagccaggggttatattatacccacaacctgaatttgttgtactaaaagaacaatttgttttttacgttttcttacgttttcttttaggtaaagtagtagttcacgccctcgacgaga

SEQ ID NO: 65914 - DNA, 964 bp, Cucumis sativus
  Intron number 1 from transcript Cucsa.356070.3 (locus Cucs a.356070) derived from phytozome v7.0 (chr-ID scaffold0357 7; pos 795530 to 796493 reverse strand)
gatcagacggctcttaaggtatctttgcccttccctcctccacttccctcattgactttcttgctcttccactttcgtccatttactatgagctgagttcttggttgaatttgctttagttggacttcaatttgcgtggatctgctctattttgcttactatgctttttctgctgcttaaacttgggttttgctcctatttttgttcgtttctaaaagggtattgttggttttgttttgctacttgcattgcttgagcattttgaaattatgttctgggtttttgtatctactctgttgatgttcgattgcgggtgtggtgttttatactgtttgatgttcaatttagctagctaaattgtgatgatgtaagctgcatttgggggttttcccctggggtttctgttgtagagttgtaagtgttctcaagtctactgggagtttctttatttgttctgcattcttatcaatgttctttagaaacaattcaggcctctatgtcattctttgaagttcaccattgatgcatgtctatgaagtttgccatttctaagcgttcttcttgtgtgtaccttatatccttactcttcattatgagttggacgtacaaattggaggatacaatttgatgatatgggaattcctttttgtacttgtattgtgtcatggtgcgtgactgttgcccctttacatttaattcataatatgatgagttttttcactttagaggatggaggctgcagtttctgtaattcaggtgatcctatttgtttttgttgatctagatatggaccgatggtgtgttttttgccactttcagattgtaatctttatgttcccatgttggcagttagctggatatttagcaatttgaattttttttttctccatctgtgacgtaatgatgaatttcatctctgttgtctgtaggttgcaacaaatcaggagagttcaaaatcgcggtc

SEQ ID NO: 65915 - DNA, 650 bp, Cucumis sativus
  Intron number 1 from transcript Cucsa.388780.1 (locus Cucs a.388780) derived from phytozome v7.0 (chr-ID scaffold0396 7; pos 1189111 to 1189760 reverse strand)
ttcgagcttcgtctgttaaaaatgtaagatcgtgattcttattttgttgctctaaattttttttttttctttctgtggattcttggagtttcggtgttgtaatttcacttctcttttgtttatggggaaagtagaatgagagaagggacagggaagcttgtgcgactaactgacttgagattcttatggagcttcatatcaagagattaagcattgtttgtatgtatggagattactgtggaagcaggagtgattatttttatgttgttttatttctcttcacgttttgttgttgcttcatatagatacctagctatgtggttttcttgacttactgaactggaattatgctttttcttgtgtgtacatatgatctttttctccaaataacatggactgaacgtgtgttattttaatatttttgtcgtttgagtttattttgtgctctatgatgacttatggctgtgatgtttctggtttttgttgtcttgcttaagagaaatgggaaattattgtcattcttctgctcttgagggcctgaggtagaggtcttttgtattccttttcaaatatcctttttggtggatggggagtggttgaattgcattaactctattttaatcactttgcaggtttttcaaggccaacaa

SEQ ID NO: 65916 - DNA, 836 bp, Cucumis sativus
  Intron number 1 from transcript Cucsa.379650.1 (locus Cucs a.379650) derived from phytozome v7.0 (chr-ID scaffold0383 7; pos 56964 to 57799)
tactcccacagcttccttctccctcttctcttcaggttcttactcttttctttgttgactttattcatattccaatgttttgactttttagatgtacgttcgagaacagataataatggtgtaagttaagtatatgtatatgaaaattaattttcactgtaatataagtttaattatgataaggaaacaaaactttggtattatcaaagctgtgtgtacaactcaaacagttgttacataaaaaaactgtcaagtgatagataatttgattttattttttcaattgaagaatctatgagactagatgtagcttaactagatgcatctaattatcgttcttgtagttaatttaacatggttctatagatgtttttgggttttttttttttttttaatagttagtgtttttttagtacattaaatttaggtagaaatttgaacaaattatttcaaaactcaagggaaataatacatattgatgacataagaaataatactcaaagtaaaagtcctaattgcactcaccttcattctagtctgttcttctatatatataaatagttattgcaaactaagcaaagataagtgtagttgttggtatcgaaagtcaaaagtattcttctaatactaatgtgtaaacgtttttttttttttttaatggtattcattacattaacgatgctatattttataaaaaataaaaaaagagagagaatgtatacacatttaatttttttctatttatatgaaggcttttctttcttctttatggagtgtaataatgagattttgttaatgcagagggaggtgggtgaagaggaggcagcgacggaagt

SEQ ID NO: 65917 - DNA, 310 bp, Cucumis sativus
  Intron number 1 from transcript Cucsa.357550.3 (locus Cucs a.357550) derived from phytozome v7.0 (chr-ID scaffold0357 8; pos 734356 to 734665)
tcagatccgtgaattggagtggatttggattccttgtaatctcactttttttcattctttttgtgctctttgtgttaactttgacggaattttttttcagtgctttgtttcccttttgcatgccttctttttccattatctttgttctttctgtttggattaagtttattctcaggcctggctactgcttttaatgaatcttgtactgcaaattgagttatgattctttaactttttattcgattttgatatttgggtttcttgtccatatggtgctaataagggtggtttgtgtattgcagcttaaaac

SEQ ID NO: 65918 - DNA, 909 bp, Cucumis sativus
  Intron number 1 from transcript Cucsa.367010.1 (locus Cucs a.367010) derived from phytozome v7.0 (chr-ID scaffold0362 5; pos 475866 to 476774 reverse strand)
tctcggtagccctcttgccatttttggttcctctggtatacaattcttcattcccttttctttttctttttcatttactaacattttattttatagtttgaaatataaagtgtggttttgattacttcttgttctgcttttttaatacatctctagattttaaatttcatgtctcataaatttctacattttaaaaattttagacaactttttaaaaaagaaaatatagtttcaatcatacctttatttctttttaaattgaatcttacctttatacaattgttaaatatttagtacatttcatgcctcgtctctaatcgttcaatcataacttgtgggatgacaaattttctttttacttttttctaataattgaatattttatgcataagtgatggaaagaaattaaaaaaaaagtgatgtctgaaatgcactcagatattactttttttttttgttattagagagatttgatagaccaatttttaccactggaattataagaatgtaacgaaaactaagaccacatatgcataatttctactatttatccttaaacttctttaatttaaggtttaatttagcgtatatcacatttagtgaattgttcgaatatataatcaactaaatttaaaagtataataatttaaatgaatattttaaaattacacctaccaaaataaaacaaatagaaaataacattcaatttttaagaattttgtataaacaaaaatgaaattacttgtttatttttgtatttaatgatacatttcttctaaaaaaattttacatctcataaatatatatatttggttaatgagttgtttgtttgttagttgtaaagtaataataataatgtgagtgcataaattaggggaaaatccaaaggcggtgaagacaaagctaagg

SEQ ID NO: 65919 - DNA, 627 bp, Cucumis sativus
  Intron number 3 from transcript Cucsa.341620.1 (locus Cucs a.341620) derived from phytozome v7.0 (chr-ID scaffold0335 6; pos 4048278 to 4048904 reverse strand)
accctcttccaggtaaggtttttcccttcttctctgtccacgtactaaaaaaggttataccgggtcattattttgattttcatgtaaattcaaaatatcatgacatgttgttggtgctagaaacatatgacgcatcaaggtccttatttgctactatgcttcttgaaacatttcattcttcttttatcttctcattacaaatgaattttgactctgatcagttgtaaaaaactaatacaactcaattggcaatgatgatgagatggtcaaacggactgattaaaccttttaacaatataactagatatcatgttggactattttgtccttgggtattctgatgttaaacgatttcaacgctaacatgaaatttagttttatccatgatcaaagttagccctggaattgttcgtacttatacattctccgagtattttgttagttaactttgcgaacatttggaatatgattagtttgatgtcataaatatttcttaagtttacgcttagtaaaactaaaccaatcacttcatttctttgggtttcattggatgatcaaagaatgactctgaatgttgacttatccaatgcagcctcacagtgctcggttgaatcatcacacattgaa

SEQ ID NO: 65920 - DNA, 517 bp, Cucumis sativus
  Intron number 1 from transcript Cucsa.341620.1 (locus Cucs a.341620) derived from phytozome v7.0 (chr-ID scaffold0335 6; pos 4049368 to 4049884 reverse strand)
tccaatacccacctaaacagacagctctcaatctcgtaagatttcttttgctttttcttcttccattctgagtggatcgcttatgtatttctttttacttcgtttcgctttttctacttcaaactttccaactcttggatcttactcttttctctcttcatcattacggattcatacctttcatcttctaatttgtttcacttattttgtctctgtatgtttgtctatatatatatacttatttatttatttatctcatcaagtaatatgtatgtggtaggttacatttacaagtcaagacagtaattcaaagcaattgtgagcctatgaatttgttttcatttgagtttttttagtgtttaataaactcaattaattttcttctgtcatttactaaagagtgatacttcaaattcaactctttgctctagaaatacactgagttgattgtgcttttggatgctgattaagctacatttcagtctgcagatctcatttcttggtgacatcagtggtt

SEQ ID NO: 65921 - DNA, 943 bp, Cucumis sativus
  Intron number 1 from transcript Cucsa.339950.1 (locus Cucs a.339950) derived from phytozome v7.0 (chr-ID scaffold0335 6; pos 2490220 to 2491162 reverse strand)
aatttggctccgcggaaactcatccgtttgttaaggtacgaggagttgttctatgaagagattgcttgacgtttgtcgtgtggaatcgatattaattgtggaacgctaacgacgatgtggtattattatgtaattaggggtaacacattatgcgtgtaattagtggtttttatttgaattgttactttaatcgttagagtttattggtttattttggttaactggggttgcatcctcttatatatagggatcatctcttgtattgatctagttttagtctctctatatatatatctacactctactaatagtctatactagatttgaaggggcaataagaaaaagttacttcaaagttgaccaagtccatgttatgcgaatagaacatcactatttaggtccaatggatgttacattttgatctcggcatctattgctaattttacaatttctttttgttcttagaaagagatttcagtgtatcatatttatatatatatatttgtagaacctattttagtatacttaatcaccatgatttaccattaataaatataaatgaattttctacattcatactcaacctttagaaaatataaaagaacaaaataataaactataaaattcatagacacgtgcatcatacgcgagtcattactagtcataataaaacagtcatcagacccatttgatgtttggttgcatcagtgctatcctgggttaggtgaaaccaatgcttaattttatggtttttaagatactacatggttattagatttgaaagtcgattctctggttctatccccatgcccaatttgatgatatggctgtggtgtggcttatctgtgttgaacaaatcgagcagttcaattttctctggttaatgtaaagtttaaagcagtgacagtttggggtgcgtggcaggtgttatcttgtcgagtgg

SEQ ID NO: 65922 - DNA, 1006 bp, Cucumis sativus
  Intron number 1 from transcript Cucsa.356420.1 (locus Cucs a.356420) derived from phytozome v7.0 (chr-ID scaffold0357 7; pos 1224020 to 1225025)
tttctcctgaaatctgcaccatttcctcaaaaaaggtacaagtggagtttttaaacttgtatcacgccttgttaagaggcctgcgctatttttcttgcgtatatttccattttaattgttgaatccttgggtaattagatgactgcttatattatattgagaactagagaggaatattagttcttagagagattggaagatcttgggtggaggtcagagccgtcgctaggtttaaagcatctgtacgggtgtatccactctttgtttgtaattaccagcttggtttcattcttttggattggagtcggctctcctaatttttgttaggatcagtgtttcaaaagcccgcttggaggcgcacgcctaggctcaatgctcaagggtcaagtttagcgccttggattgaaaaagcaaggctcatgaaataaggcacgccttaggtgcacgaaataaggcacgccttaggtgcacgaaataaggcacgccttaggtgcacgaaataaggcacgccttaggtgcacgccttttgtgatgtcccatggctcacagccctggccgttggggctttttcattatttctaataaaagtaataattagggttttttccttctttattaactaaaatgattaaatttagtaagcccaaatgcaatttcttgtgtttattgggtttccttttcctatatgtccactttaaccatgctttctcatgaatgtagtatgtttatatataatgcgcctcattaaagaactattgcgttgagccctaaaaactattgcgctaagccctaaagagtattgcgttttcttgtgggttgaggattaagaaacactggttggttctttgactccttatgtcatgtgaaattgttcttttgtatcttcttgtgcattctttcatttttctcaacaaaagctcggtttcgtatgaaaggaagtttatatattaatgctgttatgaacctgtttgtgatgttacttgttacagtctccagacgagtagac

SEQ ID NO: 65923 - DNA, 889 bp, Cucumis sativus
  Intron number 1 from transcript Cucsa.363560.1 (locus Cucs a.363560) derived from phytozome v7.0 (chr-ID scaffold0361 1; pos 1089340 to 1090228 reverse strand)
cagcccgatcagagaagaaaggcaagtttttgcctacttttagggcatattacttttcttcgtttagtcaagcttgaatttgtgttacgcaggacctcgtggtctgatgggaaaaaatatgttgctatctaatatgcttggcctacctcattatacactttcgtgtgaatagcatttttagatgttcaattatagttgttgtatgttatatgttaatttcttaatggattcaaggttgttggtttgactttaagttagttgtggttggtaaaacttctatttttttttaagttgttatgctcaggatgtatctataatcatctttctttcatatttcacaagggaaggtcggtttcttgaagaaaatgaaatctgtaatgatgcctccttgtttcattttagacatacgaaaattttagaagcttacatcacgttgtatacaagttcttttgactatgtcgccatggtatcatccctgtaaaaaaacattctttcgagtgcagtttgatcactgcatcactgttattaaagatctttgatttgcctgcatatattttttgttgactttgcaaagctttctctgctgggaatcactaaaggaggaatgggcttacgtagtttgagggcattgtcttcttcacttggcattttaaaacccatatacagtttactgtatacgtttgttccttatctattgtgagagtggtgccccctaaaattgtcagcatactcagaaatgcgagattgaatgatgtttggatgtgcattctgaacaaaattacttgtatatcatggactcctgtatattggttacactctctctattgtgttcttggtgacaatgatgatacttatagttgtttaaatgtgatgatgcagtcgtccatag

SEQ ID NO: 65924 - DNA, 701 bp, Cucumis sativus
  Intron number 1 from transcript Cucsa.365830.3 (locus Cucs a.365830) derived from phytozome v7.0 (chr-ID scaffold0361 1; pos 3716042 to 3716742)
ggtcgaacgggtaacgtctttgattcttttccatttctccttctgttcttctgggttctatgtgcttcctgtctccattttgtttcttcctttccaatgccaaactctagagggataatattctgcttcttcactttcttcagttaatacgagtaactactttttttttttttttttaattccaccaatttacttcttaacttcgctctttacttgattacgattagcatactcatctgaaaaggcgagtgctctccattaccgtgtgccattttgaaattgttggcctaattttgtaattgtgagctgttttatgaactgctaaaggaactaatggaacgtgtttcagtcatggtagtcgtagatttgattgtacggttaagaaaccgagaaatgaggtccttagatctatatattgtttacatcggttagcaatataagatttacatggtttgaatgatgcgtttcactagtcaaattaatcgggtccacacttgagtgggcttaaacatacgacacttgatatactattcagtccaatcagtttctgtcttaataggcttttggtcatccatcgacatagtttctagttaactgttgattctagtttatattcccatttgtttgctgttatcacggtcctttacagttgattctagtttatattcccatttgtttattgttatctcggtcctttacag

SEQ ID NO: 65925 - DNA, 744 bp, Cucumis sativus
  Intron number 1 from transcript Cucsa.313080.3 (locus Cucs a.313080) derived from phytozome v7.0 (chr-ID scaffold0299 5; pos 2345663 to 2346406 reverse strand)
catcggagccttggcgtccatataagcttcgtcaggttttttttttttcattcttattattaattgtttgtcaaatgttatggatcttagtcattattcttacttgggaattagatcaaccctcgaatgggagaattttgttacaatgtgacctgaatttcagcccatgaatgtcgtttgacttaggttttgacaacaatgatgaataatgtttcggtgatgttacaacttgctttttcgataaccgtgagtaagagatcgagtgtgggagagagtgagagaggaagttcctagttatattggattagttgaatgtgagtgcgagcgcgaggagggaggagctggagcacaatcatttttatcttgaatcggtgtcttaatgagttgtggcattttattttgtaaagtattatcgttgtgtttgagtacttgtttgttagatactaaagaaaaagttatatattttggcccaaaaagttcaggaatctattgtttctttttttttgaaaaaagtttaaggacatttagtttgggattcaacatgtgatttgaaaattttcttgcttctaaattcaaagaccaaagtagaatgaatatagaaattcaatcattagtcaactcatcattctgacttttgtttataagttctttaataagaaatcaatgaacacgaacaaagggagaaaagaaaacaagagtaattgatgagataaattcttataataggtcaataaatttggactc

SEQ ID NO: 65926 - DNA, 603 bp, Cucumis sativus
  Intron number 3 from transcript Cucsa.339990.2 (locus Cucs a.339990) derived from phytozome v7.0 (chr-ID scaffold0335 6; pos 2520130 to 2520732)
gcactaaagaagattaatatctttgaaaaggtttgtgatttggcattctcactgtttctttgcttgttgatgtttgtttttagcgatgactagttattatgatgtaatcttatgtgttgaagatgtcatctttgagatgctgaacatattttgtttaaagagagaatgtctgtggtccagaaggcagcatagttgaaactcattatcctacaaggaaatattctatgattgccttgtcaggctaccctatatgttcctttcttttttctttttttgaaaccatcctatatgtaccttaatcgacatttatgtcacaaaaatagcagaatgttgttctttttagctactttaaagatcacgtgagtatacaacaatacaacttgctgtttgactaactattctaatccatagtggatgtgtttaagccaatccatatacttaactgtactttgttgtttcgtttccagtcaatgatattgtaatcttttattgtaaacagacctcaaatgaattggccagcatccatcttactctttttcttatgtttttcaattttcttgcattctaggagaaaagacagcagcttcttactgaaatacggac

SEQ ID NO: 65927 - DNA, 961 bp, Cucumis sativus
  Intron number 2 from transcript Cucsa.398160.2 (locus Cucs a.398160) derived from phytozome v7.0 (chr-ID scaffold0415 8; pos 703727 to 704687)
ctgcttcaattccgtctattctcaggtagtaatatcttcttacgtctcctttggctggttttatgttaagttcataattatatgtgttgacttctgttgaactttgtatgggggttgtttctgagcttctgatgagttgttgagttctaaatcatggttctgaattatctttgttaccgatcactcatcagtcatcatttggacttgttcttgatttatgagataaaactgattttgttacctttagaaggagctccttgtttaagtttgttttttcaacatggtaactaacttcatgggttgggattatagactagttatgttcttgcttttatgcaagttttcattttgaatacagcaagaccaacaaaagtggttgtcttcacgcaacaatgtttggaagaattgtcaacttctctttcttgaagttcaaagttggcgatacttgccttttgtttggtcatttaagattatgcattttgatgagtaaaccgaaaaacaggtcagagactctcttttgctagtttcatgttattcgtatgacgtatatatcacaagggatttggctcaatggtgatatccacagtttgaaatccaacgtccttgggtttgtcttttataatgaaaaataaaccctgaagatgtttgtatattttgacggagcagtgcttggatttcaatcatgcaccttttcttaacgtgttcaacaattgttgacatacactcatttgcttgttttattctctcttgaggcatgtaatcttgagtatctacttgaaatgaactttcgtattgtcttttgaatgtggaaagatatcagaacgtttcactggcaaactgcacttaggagtagctctccaatattgccaattattatgaggcacatttatcttgatatcattgattatgaaccatgaaagatttattccctttgtctttagtttgtaggagggcgttcgtc

SEQ ID NO: 65928 - DNA, 802 bp, Cucumis sativus
  Intron number 3 from transcript Cucsa.313480.1 (locus Cucs a.313480) derived from phytozome v7.0 (chr-ID scaffold0299 5; pos 2642670 to 2643471 reverse strand)
ttggtgagacatttcaaaatatctttttgctagaaatcctctttctttaaaatcgacgtttctttgctgtctttttcaagattcaaatatgttttctttactcacgccccaaagaaactatcttaaggtacttgattgcttgaggagatctgcattctcttttctataatccacctttggatgctaattacatgtataacttagccctctttcttttttcgcttggttatgatttgaggctcgaaattttatccatccatgttccttttggttggaaattttattttggaccttaaactttcattatattgcatatttagtatttattgaaaaaatgataatgagtgagatgacatcacattgtcaataaaatagttatacatctttattgtaaggagtacatgtggaatataattatactcgaggactaaagctgaaattctaaagaaataataaataaaaaaatagagaatagagaccaaagtagtacattaatgaaagttcgagtaccaaaactatgtttaatattttttattaaattttgtttactataatcagatatatagtggatgggctggaattataaacagattgaaaatgcacttatttctactcaacgactatagagtttcactattttttccctcaaaatgtgtatttccaaatatcattaacttgttaaattctgaattggtataattcaggttctccattcctttaagaagtttccttttttactttcttttatacttctgtgtgttgagaagattcacttgtcatactgcagtttattcctgcactg

SEQ ID NO: 65929 - DNA, 557 bp, Cucumis sativus
  Intron number 2 from transcript Cucsa.313480.1 (locus Cucs a.313480) derived from phytozome v7.0 (chr-ID scaffold0299 5; pos 2643613 to 2644169 reverse strand)
ccgtcagagcaacaacacacgaaactgtgattgatgtaatatcctttccgtcttttttcgctttttttttttttttttaataattcgtcaatgttccagcgttgtttttttatgctcgtgattgtcatgagtttgattttcgtttctgttggaaggatttcgataatcgatatgattcttaaatctctatatctctgtgcttggttgtttcctgatgtgttacgttgggaatataagtttttctgaggatttagtcttcgaataatggttttctgcttcattaattggagttcaggatgtttatggttactgtatagtgtatgtgcctttttgtgtaaatgcattatcgttttcacgagtaatctcttgagctgagacgtttgtacgcatttttgttacttttttcctcgagcgtttcgctcttgcacatttgtgagacgtcgattagctgttcgatgtttttctttatataaatatgtttaaatttccatttgaaatcagtttatggtttgaagatgtttgagtttttgccgatgagcagtgatataagaagaaac

SEQ ID NO: 65930 - DNA, 715 bp, Cucumis sativus
  Intron number 1 from transcript Cucsa.364340.1 (locus Cucs a.364340) derived from phytozome v7.0 (chr-ID scaffold0361 1; pos 1810990 to 1811704 reverse strand)
tctttcacgcagagtttcaaatcttagtgttaagggtatggattggaaccgaataattaggaacgcttgaattacttgcaatattattttcatattgatttctcctactttttttttgacgtttaatttacttcttgtaataattaaattttgaaacattttttttatattatcttttaattttctttctattatataatatataatttctgtatcttttgctctttattaagtgattaaatgacgatttctcctctagtatggctgtttttctttctttccctggctgaaatgtatatattttatatgtttaattcgctgggcttataaccgagtgtttcttctacgctttgtttattttatctgaggagtttgactttttttatctatttatttattatttttaagggttgtgttggagccataaccattaattctaagtaatccttctggtggtagcatttaagtttttaactaactattgagtttgttaatatttcaacaggatatcgtgaatgatcaattttcttgggatgtttcaccggaacttgaaattcagtggctcctaaaataaaatcctggaagttgtcatttttgtttgaacagtggttggataagaaagcaattcttcaacaagcaagtggtttcaagccgtcgacactggggttttaattatttgcttttgtaaactaactgtggtgcaattattcaaata

SEQ ID NO: 65931 - DNA, 877 bp, Cucumis sativus
  Intron number 1 from transcript Cucsa.393880.2 (locus Cucs a.393880) derived from phytozome v7.0 (chr-ID scaffold0410 0; pos 30369 to 31245)
tgttgatttcatatacgagtaacacctttcccacggtgagtttcttttgtttttcttccattttggggttctgggtttgtttttattttcgataaatatccttcttttttgctttttgtttgagggttttaatggatcttgtggaagaatcatgggaagaaggagataatgatggcttgctatcaagaacaaccgcctttccttttttttttttctagttttccatgaaatgtttttaatgggagcaaaacgaagggttcaatttatggattcttttttttttttaattgttttgtgtgtatacatttcgaaatgtttgagggagattggatgatggtgatgaaatgttattttactccaatcatttggaatgtgaaattttttcggcgtgttcttacctgtgtagttgaatttctaatcgagatgttcgcttctggataaataataataataatgcaccctttaaagccacactccaggaaacaatctcatcaattggaatcctctgaccatcctcgaagagatcaattcctttcttcttctttgaccttaactttgaacttgaatcgttttccctttatttgttcaagactacatgtttgattgaatacttcaacacttttatgcttatatatgttatattgaggttctgagttcttgtttgatggttttctttacctttgcttagttttaagtgtatattttttcaaaatattgaacaaaagtatatattgagcttcggaatctttttagcttttactccatgaatggaacttttgatctcttttaaccttccataagcacttccattctcagcatatatgtacctttctaatttgcaggactacgtgcctaccgttttcgacaatttcagtgc

SEQ ID NO: 65932 - DNA, 578 bp, Cucumis sativus
  Intron number 3 from transcript Cucsa.393880.2 (locus Cucs a.393880) derived from phytozome v7.0 (chr-ID scaffold0410 0; pos 31648 to 32225)
tggtgttccaatagtccttgttggaaccaaacttggtaagagttatttatttattttgaagtcagctttgtattttcacttagggcttaaagttaagtggttaatctggtgctttagtagagcaatggatgtgtagggagtcgattctgatcttcagtgtagcagtaatgggttaatcttagaaaaatagacatgtcattttctccactttttgaaacgcgcgagtaattcaattgttttttagttgtccgtttagtttcccaggtttgtttaaagtagtagttcatagcatgtagtttctagttactgttgcatcatcttcaagttttttctacctttcccttttatatcgttgtcaacactaatcaatcttggcatttgccaatataagcattacttagtcaagacctatcactacttccttatatcgtaggtttgatcctccaccttatatgtgatgtaatattcttgatcaataaaagaatgacaatcaaatcattctcgtgtttatcatgaggatattatcgcaattccaaggatgcaatcatctcattatatttcattctcagatcttcggg

SEQ ID NO: 65933 - DNA, 850 bp, Cucumis sativus
  Intron number 1 from transcript Cucsa.367310.1 (locus Cucs a.367310) derived from phytozome v7.0 (chr-ID scaffold0362 5; pos 720121 to 720970 reverse strand)
cagttctgttcaaggatctttgggaccagactgaggtaatctaacaaccatttcctcttctgggtttgtccgaatttactgattgaagttcttttgctgattgattctgataatgggtttgtgttttaatctgcttgatcataatctgaaagctgcaactgtagactgcataatgctgagacgaagaagaagaagaaataattaagaattggacatggaattccttggtattatgcataaattattggtaatttatttggtctgaactttgatgtttctttccttccaagtaatggaaataaaaagggacagcttaagaatgattctaactgagtagaggtgacagcttcagtgtgtaatgttcccttccttttacttgagatagaaaccatgtagcatattgaagaacagagcaaaaaggaggaaaatgctgttatgttataaatctcaaattttggcagtttttgaaaacattggttgaaactagatcataaaccaaaaagtttacaggtgtaatgagggtttataagcaaaaaaaaaaaccaaatgattactgaaaagggaccttagctaactgaaattccaattcataagcagtgagtgtagtgtatttgaaaaactccactgcaatgctatcctaccctctcagggactatttcatggtagaattaacatctggatatatatgattcatgagtaacatatctagagagctcaatagtgttacatttactgacttatacaacttgatacgttatgtaacaagtggaggcatctatatctccatattataagttatagattcaaagatgtgatatttgatgatatttgtttggtgtttacgtaggga

SEQ ID NO: 65934 - DNA, 956 bp, Cucumis sativus
  Intron number 3 from transcript Cucsa.360540.1 (locus Cucs a.360540) derived from phytozome v7.0 (chr-ID scaffold0358 8; pos 1176836 to 1177791 reverse strand)
agttgcgagtgccacaaacactgctgctggagacggtatcttcatttagcctgaactgcctttattattgttattattattattattattgttattattattattattgttattattattgttattattattgttattattattgttattattattattgttattattattattgttattattattgttattattattattgttattattattattgttattattattattggtattattattgttattattattattgttattattattattattattatatgttattatttaattttcattactaatatcatatatggtgagaagttgaagcgatgttcatactgggacttacaacgctagaatatgtagaggaagttacaagacattaggtaacagaagatgggtaatggacgttaattttgaattgagcatatggtcaagatggggataggattctgttgtaacattttcagtactcagttatgtgtgttgtgtagacaataaggctgccacaatgcgtgtttggctgcctcaaaacaactcttggatgtgtattaaaaaatttgtatgccctggcccccaatagcaactagataaatttgagatacttctcttaatacatttcacgatgaaaagctgccagccacattgtggcggcttcactcaatggtttctcccgtgccccctccttataagcttgtaattctcagaaattgtacagtgggcagtgggcagtgaggatggtattacatgtttgtatgccttttgtctttgtgtcaggttgtgttatttgttgacttgtgaagacttagcaatgcagattctaagagttgcatagcacgacatattggaagttgtgcttttgaacttgaacaaggaagttgtttgttcatgaatgaactgtatatcttgttgcaggtacaacttgcgcaactgtgctgactcaggccatt

SEQ ID NO: 65935 - DNA, 449 bp, Cucumis sativus
  Intron number 1 from transcript Cucsa.360540.1 (locus Cucs a.360540) derived from phytozome v7.0 (chr-ID scaffold0358 8; pos 1178260 to 1178708 reverse strand)
cttcgaaattggcttcctcgacgtcgagaaaacttgtaagatgaagtaaaattattactcattgcatttctccatgtttgattgtttcgtggtatatgggtgctgactgctcaatttgttatgaaactgtagaatgaaattcatttttggtgtcgatcgcagtatattagtttagttaagttcagcgaactttaaattttccctccttgttttcttcaatttttgaggagtgattaccatttttgatttgcgcgtgcgtttcttgtaaagaagaaatgaatgttgtttgtgatatttggcggttgaacaagagatgaggttattggagctgatcgggttctgattcagtggttcttgtttttttgtgattgtttttggttcagttgagtacggagtgatttggattgaaattttagaaattaattttggtttgctttggatttgaaggt

SEQ ID NO: 65936 - DNA, 572 bp, Cucumis sativus
  Intron number 1 from transcript Cucsa.328050.1 (locus Cucs a.328050) derived from phytozome v7.0 (chr-ID scaffold0315 9; pos 322390 to 322961)
gaggttgatactttttgttttttcataatttcttctttaactctgtgtattatattcttgtttgaatatttgacttccctgtctgttcatgtttctttttctcattctctgatgttttgaattctttctgttagtgtactttttttttcctccattaacagcgaggtggaggatgggggttgattttgtttcatcattagttgaagataaaggagaattggtgggggaattttctttgtttgaataatcattttaagttatgatgtttctgttgaaagtttttgtttgcttttgaaaagttcttccaactttttttaccactcgtctttttctatttttattattatttttgagtattggtaacagggctttggattcccagcacgtatagcccagagaacttttttttatttttattttgaaccaagttatcgtgtaacaatgactttgatctgattttcttgatttactcaagcgttctgtgctgagattattgttaattttcattgaaatgtcactgccttttatggtaaattgctaacattagttagctgattctctgtagttcttaa

SEQ ID NO: 65937 - DNA, 433 bp, Cucumis sativus
  Intron number 2 from transcript Cucsa.328050.1 (locus Cucs a.328050) derived from phytozome v7.0 (chr-ID scaffold0315 9; pos 323023 to 323455)
ctattcattgtatgtaactgttataatagttgggaagggaggggggtcttcttttggcttttggcttttgccagtttgaactcaaacttttctctttattatcattaaaatagatttgcttgttctgcttcagaataattgatataattacaatatctgaggggaatatataggaattgctaatggagtaatgggtcacagtcacagattatgatccatttcttggaatgacttttttccttcactctgttataacatcaaagtggcaatgaagaagttgtgtttgatttccaatcttatagtggactgcaaagttttatatttgtctcttccttttaagctcagttttttttcttcttcgttcgtccattcatagaagtttagaaagttgttgaatttctgtttcaataaattcatgttttttggcaggttc

SEQ ID NO: 65938 - DNA, 743 bp, Cucumis sativus
  Intron number 2 from transcript Cucsa.367270.3 (locus Cucs a.367270) derived from phytozome v7.0 (chr-ID scaffold0362 5; pos 684969 to 685711 reverse strand)
aagaagaggtaatcttttttatattttctcagtaccttaattatttgaagagatctttaaagaagaacttattatatgatttttctttttgaggttttttttttagtttgcttatatgataaaagtcaactgttcaagtaaagcttctgacaataaagcttgtgatattaatatgttccttcatttaggctgaaaagttataaaggagtgttgcttgttttaatacaaagtaatatataaaatatctgctttcttctctcactctcaaaggactgttcctttgaagtttgaccataagattccatattcacaattccaggatctgggaagcttttttcttaacgcagctttaagattaatttcaatataattataatatttttatcaattggatctatataatgaatttctggatgacttacctgtaagtcctgttgcgggcattggcttattcgtatcaggtgtcccgtttcattgttttcatctctcttgcgagcaatggctttggttaagattccatttactatgtgatttcttggtcaagtagtgattactgtagctaccatatcaaattaaaatttctcaacaaccttttgtcttatttatttatttgctggtgtttctactaaaggcttttaatttaaattcacttttaggaacactataaggtattctcaatagtttaatttatttaaaatccttttgcagacacttcttattgacaaagctcggttggagaaaga

SEQ ID NO: 65939 - DNA, 673 bp, Cucumis sativus
  Intron number 1 from transcript Cucsa.367270.3 (locus Cucs a.367270) derived from phytozome v7.0 (chr-ID scaffold0362 5; pos 685806 to 686478 reverse strand)
tggtgagcttcatgaacctcagttgctttttcttctcatgcatttttgttttctgaatgtgggttttttgatttgaggccagtggatgagtggttttttggttttactgtaatgggtttagtgattttgctgcatttttcttctggggttttgattttgctacatttttcatctgggtttctcttttgaggtatacttttaatttcccccctctttcttttcctctctttgcttctctgttctattgtttgttttcagtgaaagggaaaagggggggataaaggagatagagaaagagagtggaaaatgtttgaatagattgaattcttgcaggtttttctagtctcttttttttcacttacctcgctggaatgtgagcttttttgtttacttatttgactacccactgaagttctacagctttggatttcctttttttgaggggttttgtttcttgactaaatggaaagtctttctcttgtttcttgtggaaaagggtcatgtgggttttttgtctgtttttctacattgtcacttgctgatggatatacgccgtgagtttgttcaattatttttagaagctgaaggttttgttatagacttgtggtggttcatctttgtttaattggtggctgcagatatttccattgggacttgaaatttagtgagtaaa

SEQ ID NO: 65940 - DNA, 718 bp, Cucumis sativus
  Intron number 2 from transcript Cucsa.313980.1 (locus Cucs a.313980) derived from phytozome v7.0 (chr-ID scaffold0299 5; pos 3114741 to 3115458 reverse strand)
taggagaaggaagtgtaaagatcaggtgctcttttgatgtgtatttgtgttctagctattagttagggaatcataaatacttgtgccgttcggtaaatatttggtttctgaaatgaccaatcattttcttccattttttttatcatgattttcctgtaaacattcgaaaccttaacagaaaaaaaaaacttaggcccagtttggtaaccattatgttttttgtttttgatttttgaaaattgggtatattttctttcattttcttactgtcgtttgtatcaatctttaatagtagcgttgcattctgagacaaatttaaaaaaacaaaaataagttttaaaaaattacttttttagttttcaaattttgactttttttttcttctgaaatatagataaaaataaatatcaaagcaagagatttagaggtaaaagggtgttcataggcttaattttcaaaaacaaaaaacaagaaacgaaatggttacatgatggggaccttaattttaaaattttgactttgatttttaaaaacatccctaaaatgtagacaataaaacatagaaacctgtggatgaaaatgatgtttatggacttcatttccaaaaacaaaatacaaataacctaatggttaccaacgggtctaaaaaataagattaccaattttctcaatccatctcattactaatagtatcaatggcagttcttctgcaggcttt

SEQ ID NO: 65941 - DNA, 934 bp, Cucumis sativus
  Intron number 1 from transcript Cucsa.327950.1 (locus Cucs a.327950) derived from phytozome v7.0 (chr-ID scaffold0315 9; pos 236585 to 237518 reverse strand)
ctacttaattggattaaagaggctgaaaagctacggtaaagtcgcatttgtgattctctctcgttataatatcattgagtttgtttcaattcattgtgtctctgtatttggtaacttgatcacgttttttcacaattcaatccttttcagtttctaaaattttgttgattttggtttggttgaatattttgtggcctttgtttggcaattctcagctctggatttatgctggattctgaaatcattagatttcttaattgaactttgatttccttcttgattttaggaaaaatatacttgtttttactcttattactgatctgagaaatcctgtgtaacttgcttacaacagatcgattgggtacataattggagttctctttatagaacaatcttttacaatcatgttagtagttttacaaacataaactacgggttgttacgatgtagctgatattcaggcaggaacagaatctctctgcagatggattttctttcttctgttttaaggatggagttctattgttttttgtctactctttgttatggagtctattgaaatcaaacgtcttttggccttctcttcagagtgtggagaagccaggttgcaacctggacaacttctctttgatcatttgcatataatgtccaagtttattgttgtcaacattctcttggtctctctgaaatcccaatcatatcaatatgttacaaaattttctatgtatggcattaaatttattttgcttatgtaattttgagatttttttataaattaagggtaaatgcttcataaagcctaattcttttaaaggctgttacttgtgtttcatccttgcagaattgcttagttcataatgacagcgttctctatgttatagaactgatctgtgtgccctcccctttacaggaaagaagaaaagaattatcggat

SEQ ID NO: 65942 - DNA, 1035 bp, Cucumis sativus
  Intron number 1 from transcript Cucsa.360060.1 (locus Cucs a.360060) derived from phytozome v7.0 (chr-ID scaffold0358 8; pos 822739 to 823773 reverse strand)
gacctcaccattcgggagcggtttcgtcggtacaggtacattcgccggtttcctttctatttgttgcttttttcgttttggcaatgagaaaaattcatcttctactctgtttgaagtcaattttagtttggacttaagtcatttcgtgggtagacgtttgaattcagtgttctatcttgtgggtttgtaaaagcaaacagcaaattatgtggtcttagtttaattattgaaacttgtttgatttgaatgctttctaatggtcaatttcaacttattgcgttaagaaaataatgggtcattgctttttacttgatatgtaatctgtatagatgggtgttattgatttagtgtttattgcgttaatgggttattatatttggttgtggaatagagcttcctggcagtgtttgggtatgcaccttttggcctataccttaatctagaattggtacattattattattttttaaatgtgttaatgggttatcaaggatagccggtgtatatctgctttacgtgcagccgtttggaaagattacattccatcctttcttttggtatgtattaaggaagaaaacgcacaaggcacatatcgtatctaatgtgctgataattctgatgtaggagttgtaagcatcctccttttaatgtactttataagcgctgatctttgtgttcggtagatgagtgatgttttgttattttgttactttgaccggctggcctaaagttaatgcataaattggctttcaccacccattagttttgattatcaataatagatcatcttcaagttcttggagcatttgcattaaatttcatatttgaattttggtattcattttttgagttgaactttgccttgcaattgcagcctttcttgatggaagcgaggtcttcacttaagaaaaatattgttttatagcttagctttcttacacttttttgttgtatttaccatttttaaagcaatgccatacctgttgtgaaacttatgcaggaaaaggtcgtcaaacatatcacctcacaaggaag

SEQ ID NO: 65943 - DNA, 445 bp, Cucumis sativus
  Intron number 1 from transcript Cucsa.359650.1 (locus Cucs a.359650) derived from phytozome v7.0 (chr-ID scaffold0358 8; pos 519268 to 519712)
atctactcgccattaagtttctgttttgagattcagtaagctcattcatttctgaattttctttaaaattcgatacaaattaccgaaagatagtttctttttgcttcgaatttgttccaacaaattgaacttcttctctctcttggacgatttgggcattccgtttcttttctttactaagaatgtgctatatgagcttgatcagaagtagaatatccacaagtcctgaagggtgatttggttttcacttttcttcgagctgattaggttatatggttattttctgtgtttgttcttgttctgtgcttccgtacttccgtacttccgttctgaagtttaatgtttttacattacattgcaagcacctggactattatcacagaacaattgtttgactctagtcaaatttgatgctgcttccagtctaatttcaggatacgcttga

SEQ ID NO: 65944 - DNA, 793 bp, Cucumis sativus
  Intron number 2 from transcript Cucsa.311840.1 (locus Cucs a.311840) derived from phytozome v7.0 (chr-ID scaffold0299 5; pos 1362039 to 1362831)
cacctaaaaaggtttacattgttttgaaacttttaagcttgtgagaggcataagtagtgttcttgtaggttgaatgaattttcattcttaacaactggagccgtccttttgtaatcttcttgttcttggttgctttttggtttgggctgtttttttcttttgcaattcgtcgcaatgacagttgatgccttattataatacaaagcctagtagaaagggagatgcaccttttgcacagccaatgcctgcttctagggttgtaaggaatgtcctggtagtgagtgctaaaaaaatactctccatcactttcaaattgtcgtgtggccagctactgacttcagttaggagttaggacatgctgttggattcttttttctacaaagcacaatagttgtggaatggacgatgcttgaaaacttttttgagaaaactggttctacctttctggttattccttaaggtttttgttcccttacaagtttgtgtctcgagaagcagtgcaaagctcaattctggttatagtatctaatctatcgcttttattcacatgtttgctttcattgtttggagatgtacagaagaaattacatatgtccatttcaggatttttactggggtgtgggggtgggggattttatctcttatttgacaagagttaccgtgtgtgctttctcctccatttttttctaaattattttttctgtttggaaactgttttggaaacactctcgtagcatattttgccttcaatctctgtaatgtgctgacttagtctttctgcaggatcctcaga

SEQ ID NO: 65945 - DNA, 682 bp, Cucumis sativus
  Intron number 3 from transcript Cucsa.340600.2 (locus Cucs a.340600) derived from phytozome v7.0 (chr-ID scaffold0335 6; pos 3016198 to 3016879)
gacttactttgtaccacttgaaaagccatcttcaggtacataatctatttaattaaaatctaattttgaataaatacaagttttcaaaaactgtttttccaactctcatttggtaattccttttagtttttccttttttttttttaaataagtttattttctacattaatttcttgcaatattttatatatttcttagccaaatttcaaaacacaaaaaacaaattcttaaaaaacttatgttttcattttttttcaaaaatctggcttgctttactatagcatagataaaaaataaataacaaaagcaaggaatctaagagagggtaaggtaaaagtgtttataagcttaattattaagaattaatttcttttataaaaaaatccaatagttactaaatagagcctcagttttgaatttttggcttttgattttgaaaacacacctaaaatttagaatcatctaattaaagaataaaaataattattcaaagggaaccaaagcttttaaatttattggcgatttgattcaatgtattgtatatatctctgtaatagtgatcatgagtttgaatcgataattaatctccttataaattaagataagtatatagttttacgataatataatttattattttttaaatttgggatgcagaaatacaggctaagcaagaatttgc

SEQ ID NO: 65946 - DNA, 989 bp, Cucumis sativus
  Intron number 3 from transcript Cucsa.378590.4 (locus Cucs a.378590) derived from phytozome v7.0 (chr-ID scaffold0381 0; pos 192446 to 193434 reverse strand)
aactgctatctgcaaccttctggtttagtgtcctggtacgtgaaatttcaagttgaatatctgaactacatttgtgatagagctgaccgtcgtctcctttggcatattattgatatcactgacatttttctgcaacggatttttgcatatcaacatcattgttgacttttcatgcttaccttttttccttttgagatttgaatggtggtgatagagaccaattattattgataacagagaggtaaaaaccgagggagattttgagagttcctgtttttggaaccataactaagcctaaccaagaagatatcgctctaagccaaagctttgtatttgtatacttcctcaattttcatacttagtcaggagtatatcatacccatcaaatgtccccccatacaaaatcctcacaggtattatttttttagaaagaaaattatacatcatttctcgcttctctcattctctttctatgatcacattaattgccaggggcctactggcaggaaataactattatgtgcctcaacacacaacttcttgtcgcttagtgataaaatagtcactagtcggttaatgttagaatatgtttgttagtttcttatggtatccaactttaattctgtaagggtcttttatatttttctatcttaaaagaagatttcaaggagattttttctatttgtagctttgtaactttgaaggtttgtaatttggaagatttcctacactgtccatcaataagcttgtttgtgtagctacaaatcgtgaaccatcatacaagaatttgatgattatttgatttcaagcattaaaacataataccattattgcgattctcatgctaagaggttattcataataacatgttttttcattgttcatcaagtttggtctttgaatcttttggccttctattatcaattactagtttaactccgttcttaaccttcttcttaaatgtcacactttcaggcaacatttttact

SEQ ID NO: 65947 - DNA, 498 bp, Cucumis sativus
  Intron number 2 from transcript Cucsa.367230.1 (locus Cucs a.367230) derived from phytozome v7.0 (chr-ID scaffold0362 5; pos 646279 to 646776 reverse strand)
acaatcaagaggatactgtaactaatcaattaagagtatgtgatttcaagcttgttgtttattgctattttgatctgtatttttcttggattttggaagacaaattatgcatctcgtcttttacgttataaatttgtttgtgttttagatattgttgtatgatataatattaaatttaccttctaatttaaggtttttagtccaccaatgatttaatatagaatcagagtaagtgatctaggaggtcacgtgttcaaacccctccaatgttatatttactctctaattaatatggatttctacttgttgggtctttttcacgttgagaatgttaaatgacataatattaaattcgtctccactcgttagcttaagtttttgggtcgataagttatttgacataaatgtttcattttactctctgtttgctgtattcagttcttttactagtaagcattgttgatcttttatgtttctcgatttcactttctcttcaga

SEQ ID NO: 65948 - DNA, 928 bp, Cucumis sativus
  Intron number 1 from transcript Cucsa.321570.2 (locus Cucs a.321570) derived from phytozome v7.0 (chr-ID scaffold0308 0; pos 1362588 to 1363515)
gcttcgtcggagatcgacggagatacccttttgaagtaattatcattttggttgtgtagtttcaagatccttcatacttgggcaggttcaagtttattgattcattagatcttagttactgttttctctttccttaattcttctcgatgcaatcatttgagcattttttttagcttcatttcacaattttcttactgggttttgtatttttcttcattatgatgatctttggttaaatgggtttgattctgtatagacattgtatgtgatgaaatggacgaaacttggaatttgtagtgaaatttgttaggagaaagcatgtctgatttagtggacccatttcaagtataaatttcgaccggagttgttagctttgtactgttgtgtacaaaaatgttgttcgatctgattattttttaaagtttgtttgagttttcctgaatctgattatgacagaggtaaaaagaaattgaagggaaaagtgaatctgtcgtaacttttcttggagaatgtcgagttttagacatccttttatgaatagatatgtattgatttgctagaaatgacaatgaatcaatgaccgtaatgttacgttggtaactttcatttatagttttcatttctacttattctagtatccaacttgtaaatgatggcattctgtctgtgtgttatagtttcattatttcttccacctctaatttctggatttttgataattctgatctgacaactattgcctattctgatcttgaaatacctagcaaagtgaaaattatatatctcatgttgattcgtgattcccatgaattttctattttggctatatgtgaacataatacaaattataatagcatgtactccaagtccatgcttctaacagttagataaaattgttgcagatttaaaagatctgtcaaatttaata

SEQ ID NO: 65949 - DNA, 488 bp, Cucumis sativus
  Intron number 3 from transcript Cucsa.337580.2 (locus Cucs a.337580) derived from phytozome v7.0 (chr-ID scaffold0335 6; pos 649764 to 650251)
gcagtcatttgcaggtactttaaaactcggtttccatcttttcatactgacaaactaataaaaagtggaagaatatgaataaataaatattctagaatcaaccaagaatcgactaagagattgacatgtttcactaagatattgacatgattataacgaagagattgacatgtttcactaagatagtgacatgtttcacttgtaatcagagaaaaaatatcagattacagactaaatatgtttgtaaagttagagagtttatacgttcctctaaattctgaacctaaatcgaaaataacataaatacaaatagatctcgtatgctcaatcattccaaaataacatatccaaagcatttcaacaaaagtaaaacacatgtgccaatagtacacatttttcatagctcaaagttttactttaacataaagttacgaaattctattacaatgttatttctttccaataattattatcgtggttctatcagg

SEQ ID NO: 65950 - DNA, 395 bp, Cucumis sativus
  Intron number 2 from transcript Cucsa.356210.1 (locus Cucs a.356210) derived from phytozome v7.0 (chr-ID scaffold0357 7; pos 937652 to 938046 reverse strand)
ccgtcttgccaagtaagtttcttgaccgcaataaagtttacatttgccttcactgattcaaataccttgttgattttcaagatactgttaatatgcagacatgccccttgtgcattttttttaaaataaaaaacattgtattaaaccagagtaacaaaagactaagatcagacatttggagttgaagctttttcttcgagtgtacaacttttttattttattattttatttttttggtgaaaatgtacaattgacaacttcttcttggattgctattaataattatttttgtaatgcaatcgctatttaactatcaatttagattggaggtcttttgttgttgttaactctttgaattatgcttcagggcctctcatccttaaggcttataagcc

SEQ ID NO: 65951 - DNA, 839 bp, Cucumis sativus
  Intron number 1 from transcript Cucsa.378530.1 (locus Cucs a.378530) derived from phytozome v7.0 (chr-ID scaffold0381 0; pos 129806 to 130644 reverse strand)
ttccgacggcaacctcagaggtttttactgggaaggttcgtcaaaatccatttcaaaattttttcttcccgttagtaggcgcaatataaaaatcacgttaaattatacaatatttttttttaattggttttcagtttccaaatgatatttaaaaattaacattcatggtttaaatttgtcacgaagaattagagagttgagtttaatcatacaattttcaagccaaattatgcttgttgaactaaaggaattagataggttcatagaacattttgcatggtttaaatttacattattcagttactttacagaactaataagtactcaataagtccatagtttctaataaaattttgtgttcagtaagggtttaattttttaaaaaaattatattatgataggttccttttcaatgtaaaattttaaaaattcataatgcttttaagttttaaatacataattgaaagaaactaatattgaagttttatcctagttttacaattaatctatgtaattgatgaaaattttgaaataataaaaatgatagataatttaaacttttatagagtaaaagatcaagttaatcgtaactcaattcacctaaaatatatattatcgattgaaggataagtgttggaatatagttagattattccaaactgaaaagagagcatgagaatttacttcgagcgttttcaccgtttatgaaattaatttttaagtaatgaaaaaagccaaggaaccaacaaagattcaaaagcttatagatttaaattatatttttgtattatcgaaccattaaatttatcaaccatattttatctttcaacaggttccga

SEQ ID NO: 65952 - DNA, 605 bp, Cucumis sativus
  Intron number 1 from transcript Cucsa.391650.2 (locus Cucs a.391650) derived from phytozome v7.0 (chr-ID scaffold0406 2; pos 97292 to 97896)
ggttgttcattcatctccccactgctccccgataggtttttgctcttctctctctctctctctctctctctctctatcgcgtgtacgcttctttgtgttttgatgttgatgtttttttcctttttgtttttataatttgttgctggaagaaacggagtattgcgtggttgattgttgtttctatgctttcttttgggaatttatgcatcttgagtaagtgaagtggtggattcttagcttagtttaggtatttgttgatttttaacttcgttcgtcgttcatttctcagttgttcaaggtttaatttcgacctgttgtttgtgaatatgcataatagcgtgactgtggacgggatttgggagcgtatatttctgttcggcgtcgggaactttttttcctttggattgattttttatttattagattttgttactgtagtagcatcttggtaggatgtatttttattatttggcatgagattgctttaaagttgaagccacttaaataaatgcatgttttaatcatcgatttcatttttcatttttcaaaataatatgtcttctgaatttttaatttacatttaggtatccgcatctccaggaaaa

SEQ ID NO: 65953 - DNA, 931 bp, Cucumis sativus
  Intron number 1 from transcript Cucsa.327900.3 (locus Cucs a.327900) derived from phytozome v7.0 (chr-ID scaffold0315 9; pos 203772 to 204702)
tcattctctttggattttcctgtttctccttccgggtacctctcaattgctgaaactatcagatcttgtttctttcgcatctttgattttgttcttttctgactgtgcttaagggttttgcaggatctgtggtatatgcctacattttaactgtttcttactttttggtcaagtgatcggtttttgagatgggtttttacgctagaacttagtactcagctcagctgggatattcttcttgtgttcctgtgtgggttttttactgtaaacaaattaaatcaaatcacaccactgtatgggattagtataactggttgttttgttttgaaattgatgctattgttaatggcttcatgtgtcttgtgttccgtttttcaatgtcttgtttgtcttggtataatctttttgtttggagatctattgctcttactatatcttctttaatttcatcacgacagctttaggccttgtcagtatcttcttcatttaggttgggatttatttatttatttattcagctggcagtctttaccacagaaacaggtcttgtggctagtttttccaatatatatatattataccatcgtaaaagaatattattattatctcagacctaactgttgaaagtatgagtcgttagataccaaagttagaaaaacccatgaactgttacgactaagggaattaacatgaaaacatggatcaagtgtgatgttcaaacatcaagtttgatgttttattatagtagaggcttgagttttacattttaactcgagatttctttggatacttgataggactatttgcaatatatgagatccttcagccatcgattttcactcatttatgttctcagtcttctgatctttattattattctttttcctggttgtaaggcaagcttctgagttgtgacatttcaaagaaaccg

SEQ ID NO: 65954 - DNA, 631 bp, Cucumis sativus
  Intron number 4 from transcript Cucsa.322110.2 (locus Cucs a.322110) derived from phytozome v7.0 (chr-ID scaffold0308 0; pos 1947935 to 1948565 reverse strand)
tggggagttcaggtacatgtaccaccactggaatgatagatcagtttttagtcctcctcctcctattcatcttcttcttattattagtattattagtattttagttaaggcactagtaacgtacttgtggatcatggcgttaaggctgtgtctcttaaatgaacttttctggaaactttatgctattgctacacgtgacatgtcaatgctcgatcatgaagcttttttgtcctggctttactgagttatagtgaagttttgattttaacaaaagggttgcaatggatgtttagatcagtcaatgaatatagagaatacaatatccttcatcatctgtaaattggctcttgcttctttattttccttctcctgatttattgagctacctttgtaactttttgtaaggataatttgctttagtttttgtcttaaattccatttggtagcatttcagatgtttatctctgtgggttggaaattagaaagcgcttctttaatttctaacttttagttcagagcattggaattggctgattcatggcttccagaaatcttctcttttcctttttccttttaggaaagaagtgcatcgtgtgtttatctaaacatgagtttttacttgcagcatatt

SEQ ID NO: 65955 - DNA, 445 bp, Cucumis sativus
  Intron number 2 from transcript Cucsa.322110.2 (locus Cucs a.322110) derived from phytozome v7.0 (chr-ID scaffold0308 0; pos 1948771 to 1949215 reverse strand)
gggagacgaagacaccgcctcctactactacacaggtttattttaggcttattttggagttttattttatttgttaagtgaaatatgtgtgtgtattttattgtgttcctataacgaccaagttattcttaaataaaaatatgggctgagagacaagtaaatatcaagatcaaattagtgttgagtgttaaatggaaccatttttcttcctctgcagaactgttctattaaaaaaaacttagaatttgtatgacagaaacaagcgtatgagcaaacagtttgctagaagcatacctcaaattagtatatgtgttcaaaggaacctgatcacggatccagtttgtaaaacaacttaaattttctatcaagtatcacaacatgggcctcagtctataaagtttgttttacaggagcagactacaaccactagtgctggcacggttaa

SEQ ID NO: 65956 - DNA, 330 bp, Cucumis sativus
  Intron number 1 from transcript Cucsa.322110.2 (locus Cucs a.322110) derived from phytozome v7.0 (chr-ID scaffold0308 0; pos 1949329 to 1949658 reverse strand)
ctcctccaggggtttttttgaagtttcgacttttggtaagtgaaatgctccttcttgtttaaatttgaattgtgagtgatgtcgtgtttttgtttattcccccatttttgttagggtttttggttttgttcgttattgtttagcttcatgcatgttggaaatggatagtgtgcttgttttcctagcaacttcgcagctcaaacggaattctgaattgtgggaattattttgtttttatcttctcattcgatttgtaccggactttaaaatttgaagttgttgatttttgttaaaggaaattcatcaccgttaggttgcggctcgttcagt

SEQ ID NO: 65957 - DNA, 533 bp, Cucumis sativus
  Intron number 1 from transcript Cucsa.340540.1 (locus Cucs a.340540) derived from phytozome v7.0 (chr-ID scaffold0335 6; pos 2956488 to 2957020)
ctctccaggtataatttattttgtatttgtcaccatatttggactcgtttttttatcttgcttttttcttgactttaatgttaaattaattcataatctctcttttttcccccttcaaattctgttgtggaattgctggaaaaaaagctacattattgatatatatgttcctatactatatataacgtattgttaagttcttgtagtcttctcttcagtgtcaagtaattgaagggtaacaaaaatccgaaatcatttatcttttgtttagacagagaagaatttatgttacttcattgcgttcctattgaatttcaaacacacaaaacctaagagatcagaaggggaaaaaaaaaaatcaaataaagggcccaaccgggttcgaaccggtgacctcttgatctgcagtcaaatgctctaccactgagctatggacccatgttgttatctatgcaactaatattatactaatacgtagctgtttattcatcttggtttccttgcaggtggagttaagctgcagtagtaagcaa

SEQ ID NO: 65958 - DNA, 1031 bp, Cucumis sativus
  Intron number 2 from transcript Cucsa.312140.1 (locus Cucs a.312140) derived from phytozome v7.0 (chr-ID scaffold0299 5; pos 1638000 to 1639030 reverse strand)
tggccgaataccctcgtgcagatttcccttttccggtaattatcgacaaaaatatttagttgcatctgcatgcatcttttcttttttttcaacaaattttacttttttttcttttaattttcaaaaatgataaatttgacacaatatttaaaattcttcaaattttatcgaaatctttcttaaattttgaaatattttaatttaaaagtgagaagaaaagcataaaaaagaatgcacttaattatgtccgttaatattaattagtataggatataaatttatcttgaaacgcacctaactattacatagattcatcttggaacccacctaattattactttttaactggcatttatagttttaatccctctttaatttgtcattattgaaaatttgtcaaaaatataaaattttgaaaattggtcaaaatggtaaaaaaaaaatagaaaatttgagtataataaaaaaaaatcatgaagggtaaaaaactttttttccatctatttttaaaaaactttctaaccttctttccatgggggataaaatttcacaaataattttttaaaatattgcttttgattttaaaatttagttgagaaattatttaagaaatatgtgattcatcataaaacataaaaagaaaatagaaatggtttggaatgaaacttaaaagaatttattatcttttaacatattagtataattttttttttgggttttgtaaaattagcaaataaattataaaaataaaatgcatggaacacattttttaaatttgtaaaagcaaccaatttttaaaagtgataatctcaatagtactatgattatcacctaaaagccttataatttcagtataatattattaattttgtcatattcgcgtatgtatgaaaaatattgttgtttttctatatgtttttgttattgtatgtaatttctcaaattgttttattgctatattggagaaaaatataaattaaattgaggcgatgacagaacattacacgaggaagaagaagaaggcgagaggc

SEQ ID NO: 65959 - DNA, 629 bp, Cucumis sativus
  Intron number 2 from transcript Cucsa.355880.1 (locus Cucs a.355880) derived from phytozome v7.0 (chr-ID scaffold0357 7; pos 431689 to 432317 reverse strand)
ctcttcatcgcaatctctcttctaattttcaagtaataatattctcttgcttctttgactccaaactctcgttaaaatatcattttggtgtaaaatgtttgttataccgtagtcattattgatttcactaattcttaaaaatactacactaggtctgtaaattctagcctaaatcaattttaatctattctattgatgtctcactgaactttttaaacatttatttactgttatgaattattttgaaaagaatctatgaagctactgatctctatttaggtttcaacaaatggtaaaggtgaaattgagcatgtatattaaagtcatttaattagtgtggacctaatactaatttagttgaaatattattatgtacctagtcatccacgttacattttttttaaaaaaaaaaatggacatccacatgatctgatttcattctaaatcacgatttaacattaaagcttttataggtttagggtttaaataatttaatatcatatcaaatactctaatctaaattccattatcattctttgtaagccaccaaaagggttttttcccccctctaagaatcaccatttattgttgtagctatcacaagaaattcgagcagaaatccaagaacc

SEQ ID NO: 65960 - DNA, 416 bp, Cucumis sativus
  Intron number 1 from transcript Cucsa.384960.1 (locus Cucs a.384960) derived from phytozome v7.0 (chr-ID scaffold0390 4; pos 381262 to 381677)
ctcctcattcttcctcccttttcatacttcttcaggtctgtaatttctctttaattcctctcttttgcgcattctctcaaaccgcttttttctttttctctgggttatcgctgtttttgtacatgggatgtcatattttgatcttgattatgataatgatgatgatgatttagcttttattgtatttgtgggtcttcttttttgtttttgtttactggggtctctgatttctgctttgtttccttgtgtaagcatgactttgttaatgtcctttctttcgtttttttttcttttcttttttcgctttttgtttgttctcattattagtgcttatgcccaatcattttgacgttcctgtttcttgggtattatgccatccagctttgaagatattgaggaaaccttaaagggttttt

SEQ ID NO: 65961 - DNA, 263 bp, Cucumis sativus
  Intron number 2 from transcript Cucsa.340310.3 (locus Cucs a.340310) derived from phytozome v7.0 (chr-ID scaffold0335 6; pos 2787315 to 2787577 reverse strand)
gactacttataattctgagtgcaacaggaattcaggtcgaattttctccctctatatgcttgtttataattacagatcaagaattttttgagctacttcattttatctttttctcccttcttcatgcagtttgttttgttttgctattttcagttggtgactttctctgctttctaattgtttaggtgtgtgttttctattgaaatttaaagggcatttgggaaggggatttcaaatttgaaattctagtgaaattcatcaag

SEQ ID NO: 65962 - DNA, 277 bp, Cucumis sativus
  Intron number 1 from transcript Cucsa.359380.2 (locus Cucs a.359380) derived from phytozome v7.0 (chr-ID scaffold0358 8; pos 309895 to 310171 reverse strand)
aaagccttgcaactaaccttatctttccttttctggtacgtttaatgcatttcttgatgccaattttcctttcgtttttgttttcatcaacgatgttagatttataaaactgtcagtattcgtattccatatcgagacgaaatcttcacttaattagatttggaatgggattaatcttcaacttttgtaattgttctttgcttttctagtttctcttggcccatatgaactcctatcaaatctacgatttcaggtactcgtgcttttatattcagac

SEQ ID NO: 65963 - DNA, 399 bp, Cucumis sativus
  Intron number 3 from transcript Cucsa.349320.2 (locus Cucs a.349320) derived from phytozome v7.0 (chr-ID scaffold0348 7; pos 601084 to 601482)
tcttctctcaaaaacctccacaatctcaacttcctgtcagtcttctctttctattctctcaactgttctaaatatattcaatcacttttacggtatctactaaccgagtgttaggcacattaagtttttatattacagtctataaattgtaatagtttgtgattgcgggtagaagtaaggttgtagttaattatagatcattcttgcacagtttttttatagaataatgtggcgtgttgaatttgggtaggttagaacatttggtggcatattaattgataaaattttgattgattagacatgtagttgaaaatctagaaacctatattttattttgttatttgtggaccgtttgtttaaaatctaacggttggatcatgtgaaagcacaggagactga

SEQ ID NO: 65964 - DNA, 989 bp, Cucumis sativus
  Intron number 1 from transcript Cucsa.362250.1 (locus Cucs a.362250) derived from phytozome v7.0 (chr-ID scaffold0361 1; pos 202182 to 203170)
gtcaggtataaaatctatgtttgagcttgaagtttagtttttggcagacaaatgtaatgttttaaagatcaatttgcatatttgttaatatctttatcaacatgaatatttgtagctttgttactgagcacatatcatcaactaagaggccagagccaaatactgttgggctcaaaaaagggaaaagaatgtaaatttgattgttcctgctgtattctacatactcgcacttgaaattttgtttgtggctggaaagtgtactgcatatgtgaccaatttggttataagttaacttgatcagcatgaagatgagcaccttgatttttcttgctggtttctatcttcttcaatgcatggattatagatgaaacttaattgccacttgcattaatgcttctagccatcagtcaagcataagtttgcccgaaagggcaaaaagaggactgttgcggatagaaatctggtgggcagagtatcaaggaaggatatggaagagattcttttccaatatcatagcttcagtttttcaggtttagtgtggggttgatttaacttagtgttagaggttttacgtcctagtttgtaatgggattcaatcttttaaccttaaacttattggttcagtggggattggagacactttacattcaatctcttaacttcctatgttcgagattcacctttcttttgagattgcgctgctgcaagtcttgtgcacattgcataacataccacctcatattacaaaacagattgatagtttctcttcaggaaactattcaacatgtcctgactgcgttctgttctttttatttatttgttttcattttaatatttagctacagattctaagccaagatctcttgttatattcccaaatttgtattgccagaagaaaaaaaactttgttaatgaccatgatttcttcgaaaaattatgatcaccaatatatttcttaattcttgcagatacagcaagtcatccgacgt

SEQ ID NO: 65965 - DNA, 730 bp, Cucumis sativus
  Intron number 1 from transcript Cucsa.357380.1 (locus Cucs a.357380) derived from phytozome v7.0 (chr-ID scaffold0357 8; pos 391225 to 391954 reverse strand)
catctctaggatttttagctgaaatttggaggtaatatacttaagacaattatacgcaactttatagaagaaagttttattatttgagttctgaatttttagttattagcctccaaatttgaaagaaggattctggctgagaacccggtttctgggcatgaaatagggaggccaagcatcaagggccataaggcgcgcaaccatgcacacagccaccaggcacgcacaacaccatgtgcacgccaaccccctttgtcgcccatccctacacgccagccattaccaaatgccattttggattttttttttttttttaatatttgtgccatttctaagtaaaagttctgatattttcttggtcgaagggattaaattgaatttaaataccattatttcaagtcaagacgagatcagacacatttataaaccaaggacttaaacttatatttgtgagcgaaaatgaatttattaaagtgatttcaaagcatgttcttaagctattgtttatatatgatttaaattaaatgtttaaattgttttacgaatgatttccaagcatgtgatttcattaaagtatttattcaagcatgtttagttactgagaaatgtttaaggcttattaaggaatgaatttatcgaagcattattgtgtttaaaggttgctttatgcaaaaagaattattaaatggtttgaagcatatagttttataaatgttttctcagatccaag

SEQ ID NO: 65966 - DNA, 449 bp, Cucumis sativus
  Intron number 1 from transcript Cucsa.370380.3 (locus Cucs a.370380) derived from phytozome v7.0 (chr-ID scaffold0367 8; pos 99706 to 100154 reverse strand)
gagaaaggaaagaaactagtttgtggatcatttaggtatattccctgattttttagtaaaaattctcactgatctctctctctctctctcctgttttctttttaaatgaagagttttcttgaagttatggttttgtcaatgagtttgtaagatatacctcaatgattctgtaacagttccttgtaggaaagagcaacttggttgtaattaatattgattcagataaaagttgacaggcaattggaagattcaggagtcacttggggttatgtttactaggatagaagattctagtttccagaatcaaaatactcacttcatattttgataaaaggaatctctttgtcattgattgttgggtggatggtgatacatcattgatgtttgaaagttttgttgattttttttttttttttttatgtgtaggatttacttctgagcaagattta

SEQ ID NO: 65967 - DNA, 789 bp, Cucumis sativus
  Intron number 1 from transcript Cucsa.364450.1 (locus Cucs a.364450) derived from phytozome v7.0 (chr-ID scaffold0361 1; pos 1918217 to 1919005 reverse strand)
tccttacaacgttttgatcactggttccactaaaggtgtgctggtctttctttcgtctatttttcgttcgctggcttctcatgtcgtttttgctagcaagaaatgcggaactgctgttgtctttttagctctattttcagctgtttgatgaaaaatttgatggcggaatgtgtgtttgtatgtgttatggacttgaattttgtaggaatcgagtttgagaaactttctagttgtcgtttttaagaattggaagatgtgttttagaaatgatttcagctgtatagttggaatttagattagtgaggtttaatgtttagttgagatttgcgagcttatttcacatgattgaagttaaacttaatgtttggaaagatgtttaaaaacatcatttgttaggaacgggattggcaagaagatgattgaagtttgagctcttaaaatggagtgttaaagtatattttgaatttttatgttatacataatccaaataaattaagcccttgttcatatgattttataactatattgctttggaccaaagtcaattctgcggaaaatgtttgttatattttaacataataacctcaattctcttgtccgtgtaatagttatattcgaatctacttacatttccttggaacttgatggagttatttttattttttataatgagagcttacaaataatttgctggttctatcttcttttacacttcagcgcctttgactttcgtattggcattctcatagaggtttctactaatatttgcaaattatccaggaataggat

SEQ ID NO: 65968 - DNA, 806 bp, Cucumis sativus
  Intron number 1 from transcript Cucsa.337240.1 (locus Cucs a.337240) derived from phytozome v7.0 (chr-ID scaffold0335 6; pos 352600 to 353405 reverse strand)
cagagctgtacgctactttctgccttctgaccttgatttatgcgaaggaaaaattatgaaggtgcatcttgcgcatgaaagagaaatgtatcattactttgcatgtgttcttgtatcaaaatttaaatatttgaactgcaggctactggttgttcccatcgaggaacctattatctcttgtttaagtacaagcatgccgtgccatttgtttgttgggttttctcacatctttgttagaaacttggttgttaaccagctacttctgtcaagcggaaccactggattttgcactgtgattaggtttattatgggaaatcacatcaaccgtaaatgttgagagtagtgcttgaagaacttcaaatttagtcgatgggtggggtggtcaagaaatccttaagactacctacctgaggggttatatattttgttacttctctaactattacatgtgtatgatcagttaagaatcccttgtttgtatcattggagtgtatcttatccaaaatcattgaagtatgcataaagattcatagattgttggcgtaaagtttttgaaataaaataggacacttgatcttttgcacctttagtttgttagaaaccaagtagcatttagatgatatgaaaagaaaccttttttatttgggtgtgtgtgcgtgcaaaatgaataagttgcacattactgttgacagtagtttgattcaagtgtaagagcattgcgtttacagtatcccatctcttgcatgttaaatggggagctcattgcaactttttatgagtgcaggttttattggccttttttgtcc

SEQ ID NO: 65969 - DNA, 861 bp, Cucumis sativus
  Intron number 2 from transcript Cucsa.342180.1 (locus Cucs a.342180) derived from phytozome v7.0 (chr-ID scaffold0335 6; pos 4548217 to 4549077 reverse strand)
caagcaatcagaagcgtttatattcctggcttcaggtttatttttcaattcttagtttcgctttctatgagttcaatccattatagttaccttcttaggatttaatatgccacaagtctagcagagtcaaacaggttgttccatgagattaatcgtgtgaactgtcactcattgatatcaataaaagagagtaaattttcatagatggagtggctttcgtttattttctttcaaacatagagataatcgaaaggcttagaagaggggaaagttgtagataaatagtaacaacaatgactctattagcgcattggtacaagaggtattagatacctagattagtatagggttagaggtataagggtaattagactagtatagggttaggatataagggtaattagatatttgggaagttactagtagttattgtgtaagtgtggttactagtagttattatgtaagtgtggttactagtagttattatgtaagtgtggttactaggttggttacagtttgttataaattgagggagggtaagtgagagggaatttggtggagtgatctagggcttgagctagagtactcaagaggaaggttccaagtgccttatacttggttttatcttgttcttgttaggaagtatcctaacacaaggctattgatagaacttgttttccttttctttcttaaaggaagtgacttgtagttatttgtggttccttcttttgagaagaaggattaagaaagtctaactttctcttctagttgacagattgttcttttatttattcctcgagttttgaattgaatacttggaatgtagatttttgccaaccaagaagaacagagaaaggtgga

SEQ ID NO: 65970 - DNA, 426 bp, Cucumis sativus
  Intron number 2 from transcript Cucsa.368490.1 (locus Cucs a.368490) derived from phytozome v7.0 (chr-ID scaffold0363 9; pos 170373 to 170798 reverse strand)
atttcaggtatgattatactactttgttcgagactgtttgcgatttcccccttcatttccctgcaatgcccaccaactgttcgacgaatttcctaaatgatttgcattgtcttcttactgctcctccgccgctttagtatcccccatggctgtcttataagagttcatgtttaattcatcactatcaaatggagtataaaacagatgcatgccaatcaattatttttccagataaacaaaagcatgctgtggaggtgttttctttctttttgtttgagttatgttcattgcttttcaaatgtggactatttgattctttgatcatgggatttccccccatttttttttcctatgaataatttgcctttccttaatagtgtaaaaccctgatatcataatctcattccacgttgccaggcttaacta

SEQ ID NO: 65971 - DNA, 627 bp, Cucumis sativus
  Intron number 3 from transcript Cucsa.312790.1 (locus Cucs a.312790) derived from phytozome v7.0 (chr-ID scaffold0299 5; pos 2089305 to 2089931 reverse strand)
tgggagactattgctggtggcggttctgatgtaagaactctgcattcttcttggagtgtcaaatgctattgtgtatgatgtgtttgtgggacacagtatcttcttgaagtgtcaaatgtacattgcatttgcatatatttccttatacttgaatgtgggcatttagcatatggttttagtcttcaggtgtcttgttaggtctgcttcaatacatgatttcggaagcttgtaaccatataagtgaaatctaggttacatagaacccttttgaaactctagcctgcaagagctttttatttttgatgaagaaaagcttaatggctatttgctagatatgaagacagggatttttgtcttgagcttgtagaatgatgtcacttttacgattttttttccttgaatcagcctttcatactcaaattttagattctatgaagaaacttaaagtgtccatgatcttgatggtctctttccacttgataaagtgtttatgatctcaagattttgaatgccatttgaacttaattatctgtatagaaaaagcgaatggttttgggttaaatgtttttaaactttgttttctgttggtgtaataggacgatcaagaaggtatcagaacagttgacg

SEQ ID NO: 65972 - DNA, 810 bp, Cucumis sativus
  Intron number 1 from transcript Cucsa.320660.1 (locus Cucs a.320660) derived from phytozome v7.0 (chr-ID scaffold0308 0; pos 416988 to 417797 reverse strand)
caattattcacagcctcgagtggcagagattcctggtaaaagaacatgaaaatttcttcagttcagtccaattgtttactattagtttgtgtttatggttaggtagttatgacctctgtttaaatgaaaaatcaaggttgaggaaggagatagaattggtatcatatattttagcctctagtaatgggagttctggacattttagataagattaactactcttggatgtagcttgtccattaatttcaatccttgtagcctttgtctacgttgattgtgcaagttaagaataaggaaacaatgacaactattaatctgaatccaatgaatttaagttgtttccttgagacaatttcattccctttatgctgctcaaggggctatgaacaattgtctcgtgaatgcaacacttcaatcacgagatccaacgaatgtctaagtaattgtatagaaaagagagaattgaaggaaaaactctttgtattcttttcttgttattgttttgtaaaacttgtaagaaaaccaatatgtatagacttgtataatgttgtgtctttagagaaaaaacctactcttttgttaagtgttgtttatgtcatcatttttgctcataatataaggtttcttcttttggttttagtctttatttttggttattctactctccttacgttgtttcttgtgtctgcctataagaacacagaatggcaagcttgtgacaggctatttatttattctttttctctccagggatgagggattgacttgtgcattatcttataatgacgaaaacactcttttcagggattg

SEQ ID NO: 65973 - DNA, 995 bp, Cucumis sativus
  Intron number 1 from transcript Cucsa.320320.2 (locus Cucs a.320320) derived from phytozome v7.0 (chr-ID scaffold0308 0; pos 180028 to 181022)
ggctggattgtgattcttctagcagttcgccagaggtaatgcttctgttccataaatatttctttatcaacattactcactactgaggattcttttgcttaaaatagtgaggtttatttagtactttagctggtgaggaaggaagagaagatgagagaacctgagttaattttttaaatggtcttttgaaggaaagacaataaaaacaaataaagtctctggtgctgtattcggtcatcactgtgcatgttactttttttatttattatacaatctataaaaaaaaagtaaaacaactggaggtcaataatacgcatcttcttttccctttcttggcgttatgattcttaatagtgataatttctgctgtgatgtgttgtaatgaagattggtattacaaattggaagtggaatttttcaaacgttggatgagtgtctagttttctccttggctaaataggttggctgtagaagtttagatgtcataaagttaatttaattgtccgttggaagaaggaaaagaagcttaacttttattacatctaattaatgccaagaagttaatttaaaagccatttcattacatatagttaatgtatcagtttggaggtttgtgtaattagtctatcaaataagatctagccttttatttttcatagcacgttttttaaattttggttaagttttctggagcttttatttttcctccagtctttagattctgccctgatttttttttaaaaaaaatctttaatttttttaaaaaaaacttcgttagatgggcgcatagtttgtgaaatgaaagattgctgttttcgagagaattgtttaactttatttcatcacaaaattaagatatgtgtattcttgtattcaaaattttgccattttatcattctggattcaaagctcaacattaattctattgtagctgctgaagtttattttcctatgcatcagataattgaccagaagaaaactacatttgtcgagat

SEQ ID NO: 65974 - DNA, 1007 bp, Cucumis sativus
  Intron number 4 from transcript Cucsa.312840.2 (locus Cucs a.312840) derived from phytozome v7.0 (chr-ID scaffold0299 5; pos 2134494 to 2135500)
ggttgatcaagttacttgggttccaggcaagtttctttggcgtgttaacgcacattgggatttttttattgctgtttcctgatctgaagaatttaggcagtggatataatgtagacatagaattgtcttggatgaaaagatggaataactggtgcatcaaagacaaaggcttttttatgtctggagattgtcgaaaaaggaaaagttcaagtggaaatctcatgttaacgatgataacattctgatctcaaacttatgcatcttttggatatcaaagaaagaaataggggactttcctgacttaacaaagcataagatcaaatgagattcaaaagaattcccttaagctcttctctggggaaaagaataaaaactatgcataaagtctatcaattagaaatgtgagacaagctcaacctcatgttgtaataaactgtcaaaggttaaaggaattgctttgttggaaatcaaccaaatttcgttttgcctgaacttactaattggagttaaaagatatttttagctcagaaataattggcacactcccatgaacattgtagatggaaactcaacctcgtgagcattgtagatggaaactgttctttgggaatggccatagctgaatgtaatttgctctccatattcatttgatgtactgtgtacacttttattgatctttctatgttgttgggcgtgagtcagtgggctattcacgaggatggtttgatacattttagaaagaaataagggaatttcccatttacacgtcctgcctctctctccacctgatttttcttttatgttgttgtcgttggtgtgtttatcacatgtggtattccgagtggatttaggaagacatgtaatttctggtattcacagtatggaaataggaactgtgtagaatcttgttcctgattgttatgatatactctattcacttccttaaaaaaaaaacctaccccctacgtacacaagggtattaaggatgcgtttgcattattcaggag

SEQ ID NO: 65975 - DNA, 735 bp, Cucumis sativus
  Intron number 1 from transcript Cucsa.366440.2 (locus Cucs a.366440) derived from phytozome v7.0 (chr-ID scaffold0362 5; pos 62022 to 62756 reverse strand)
aacaagtagctgttaaaatcattcccaagtccaaggtgtttgatcttattcttcttcactatagatttgtgctctgtaatcatcttagattttgtgaaaatgttgcttcctttcctctcaaaatgaggaaattggttttatgtttggagcaattgcttgtttatctctttgttcttgagatggtcgtgaggggttatgctaacttttctttttcagattccagcttggagcattcttcaccttgagcttaaatctagctgccttaagatcttgttaacatggattataaaaactggcttatgcttatgcgacttcaggcttttcttttatgcttcaaatattctgctagtaaccatgtccatttcatatatgtattgttttgataaattatgttaacatactgagtagttccattttctttttggggtcgttatttaagttgattttgagacatccggcctctcttttatgaatttatgaactcaagtccagacgtatctattcttttcttgtagtgagtgtatcctaaagttgagaggaaaaaatgaaatgacgttttttttacttcaagtgctttggcatgagattctagcttctgaaatgctcacctaagtcttgaacctttgcacggatttaaacaagtagtcttttacgttttgctttttatgattgcaatatgtgccatactgaagttatcgttgttcctaattgtttgacttgtatttttcctggtag

SEQ ID NO: 65976 - DNA, 743 bp, Cucumis sativus
  Intron number 1 from transcript Cucsa.314650.1 (locus Cucs a.314650) derived from phytozome v7.0 (chr-ID scaffold0301 5; pos 5568 to 6310 reverse strand)
tcctaaaaactactttttcaagatcaatcccaaaagtcttttatccctctatttttagattatttttgacaacttttcaaatattttcaaaaattttatcattaaaaataatttttcattattaaatatgtaatattttgctcagcggccaggttgataaagttggaatatttgttgaataattccttactttcttgctttacaagaatacaatggtcacacttaattagaagaaagaattagaactaaaaaaataaaaacacttacatccatgtaagtacaatttaactacaacgaataattatgaaataaatcacccatagttggaactaatttaacacctcatatgatctctctccctcttttagagcatcatgagtgaaaatcatctttagatggtttttgtcctttcccaataatattcttaacgggtcattcttaataatattcttaacgggtcattcttttggagagagcactttgtagttggctcatacatagttgttttttctaaaagtgtcccaagacaaccttgtggttgaaacaatgtccacgcaaaatataaataatagataaacataaaattgcaaacactttacaaatttaattcataaaatccaacatcatagataatcataaaaaacaccagagttctttctactcttttttttttttattcattcaaatgaccaatattctttgattatggtagaataaatacagctagtgctttacaaaacaat

SEQ ID NO: 65977 - DNA, 900 bp, Cucumis sativus
  Intron number 2 from transcript Cucsa.339700.2 (locus Cucs a.339700) derived from phytozome v7.0 (chr-ID scaffold0335 6; pos 2263420 to 2264319)
ccaagtaagtctctttttcttgtatgctgtcgagttcgtttcttcaattattatgcagtctttgcttaaggcaattcattttttttcctaaatgatttttttttttttgagtgggttaaactctgcaagtagtttttggcgcggtttgacgtgtgtttgaaggccatttgaacttttatttttatagccgagtattttattctgttgcgtctcttctcagaatgatttgtgcataatggagcagactaattttgcgtttcattgtgttcttaggagatggacatagatactagtgaggtgtggtcccattttagatttcgtgttctcatttaggcttccatttccaagaccttctgtaacgatcatttaggttatattttgtataaatagagtctcttcttgtagttgggctcctgtttttgtttgctgttttttttatgctggtgtagtctttcatttttatctttatgaaagttgttgcttttataaaaaaactgttagtgaatatcattttgaaattggaacttagctggaaaagtaacttgtttatgacattttgttgttgcttgggttatgcatatctaagacaagtttttctttgtgttaattctggttctagaacactaatgttaggttgtgttgatgaggccctggtctcctaagaattagtgaattagtcatggtcaagtgaaggttctgtgaagacaatccgagtgtaaagttcttgtgtcgaagtttctggtttaatgatcacccctagtcgttccatttatttatatagtatatgactgattgtgtagttataatgtatcaaatccttagcttatttaagtcccttccctctcctttttttgacattttgtagtcgtccgtggatttgctattggatcctgcattcta

SEQ ID NO: 65978 - DNA, 993 bp, Cucumis sativus
  Intron number 5 from transcript Cucsa.355770.1 (locus Cucs a.355770) derived from phytozome v7.0 (chr-ID scaffold0357 7; pos 317358 to 318350 reverse strand)
aaggtaagagtctgatatgctctgttatattaacactttgttgaatatatcacgaaggagggccaaactgttgtcctgcgctagatcaatggtctcgtgtaagaaaacaaaagttgaactattttgtacaaaagatgtttccaagtgttataataatttatgtttctgagaaagctgaggaccaaagaactgtaaatctgatgatgaagcacaaaatattgatatcatcctctatgacgatcagtacattaaatggtttcttgtcttgtacctttttgtactcaactataagagtctattgatggatgtttgggtctttaatgtttatagacatttttaggtgcaggtctatgaactgaaatctacagaagaccgtttcacctataacctgttggataaatatgaggttctatctcaaaaccaaatgacaatgagagtagtattccatataacttataaagcttatgagatctctctatcttttcaaaatggaattgtcaaaatgccttatgatgatagtgcctctttgagtcaccatccttgagttggatctcattcttttctttaaccggatacccatttgagcttcttggactcaaacatgggacttcattatagcttctaaattttgtggtacctatttatattctcgcgtcttttatattgaaaacaatacttttttgggatgtctttgttctttattgcttgataatttaagaagacaacgaatgatatatgtatgtatgtatgcatgcgtgtgtgtgtatgtgtgtgtgtttgagtgaatgtttgtatttgtgtgtatttatattgagaaaaggtattggatgatcttaaggcttacttgttaacttcggtttcttgtactagattaaaagttagaatcagctctcttatggttaactcatccatcagttttgattaaaattgccatccttgtgtttggtgacttttgcaggggagatagaacattgtaaaaagtttttcagtaca

SEQ ID NO: 65979 - DNA, 335 bp, Cucumis sativus
  Intron number 2 from transcript Cucsa.321410.1 (locus Cucs a.321410) derived from phytozome v7.0 (chr-ID scaffold0308 0; pos 1194733 to 1195067)
tgaagatcctatatatcttgcttcacagacggcctgtaagttgctttgtttattatctctgagatctagctgtcagtatttaatgaagtttttttgaccacactcttttcgaccatttatgttgaatcatttttctatggctccaaattattgtatttcaaaattactactcccacatgttgctactttgattctacccttgcccgtccttttctagcgatcaagctatgttcttatctatctgaatttttctcatatattattcacattgcttcttgtttgttttatttggtacaacagttagtgtcagtgaagttgaagcattgtttgagctg

SEQ ID NO: 65980 - DNA, 890 bp, Cucumis sativus
  Intron number 1 from transcript Cucsa.388700.1 (locus Cucs a.388700) derived from phytozome v7.0 (chr-ID scaffold0396 7; pos 1104001 to 1104890)
atttcgtccgatagtgctggaggtgttggtgggacgtaagttttaaatttctgcttaaatttgatattctgtagtttgagctatctgaattgaggtgttttcaatttatactgcctttatgaaacaatctttttggggagttggggtttgaaatgagaatttaggaattggtcgtacatggcttgttgctacgttatgcttaataaaactatgcatgtatttaggaatttacaaaagacgggcgagaggctctagccattggagttacaaaagaattctgcaattggtttagggggaagagagattgttagaggggtagaaagatgtacatatgcaacgagtcatagcaagatagataatatattcgaaaaagctattaagagggcttcccttttcattcagaagtgcttactagaattatttggttagattcttctagctatttatggttttgttagaatctctgtttctctttgggccttggtttctcgagttattttctaattatttgctaggtcttatctctcttttctgaaccctttttcgcaaggtttttccttgttttctttcatatacctctcaatgggcgtcaagttttctcattaggaaaaaaaagtttacatttggggttgtggagcttggagcaattgtcttgctgctctggcaggaagttgtgcgtgatagagagcaaatatgatagggtcaataccccacatccagtatttgagagatgttagtcttagttagcaaacgttaattctattagccttcccatgctttcttcttatttttatagaaattgatatgttgatttgtctgtatgatgctcttctttaaaatatgaatgtatttcgattcccatgtgccctatcttacaattagattgccag

SEQ ID NO: 65981 - DNA, 958 bp, Cucumis sativus
  Intron number 3 from transcript Cucsa.313150.1 (locus Cucs a.313150) derived from phytozome v7.0 (chr-ID scaffold0299 5; pos 2386151 to 2387108 reverse strand)
gaacaacttcacaagtttctcaatttcaggtaaagaggatatatataaaaaatatgcattatgttttctatgagtactattaatatgatttgctaggatcaatttcaattgtattataatcatattctcttgcctcaacttggaggggataaccaattaagcattttatgcttttgcttttttccttttctttgtctctctctaattcaaaacttttgtgtgtcaagttgatgtccttttgagccattgaatgtggttttttttgggtgttttgttgaaacttaccattttcctatatcatggtaattctatttgttacaattttgaaaataattaaagaatacatatataaaaggtaaagtagtaattaaaaatcaactcaagctaagatttacgtggttcgctaacaaagttataggtatagaatagtgaaacccctagagttagagagtttatatattgtgcttctttgaaccttaggataataattatagtaaacaaacaataaatagttaaatatatcaaatacgaattcccttttgacaccctataattaacatattcaaggtcatctctaacaatattcattaagacaaaattcaacccattaccttctccttgttaacatagctaacacattattagtgaactgatttcataacaaaagcaacgagttcaatgacattaatgtggatcgatttgatacatgttctttcggtttaacgggatagtgaatataagtgatgaaatatttgtgtttatcttttagaatgtattcttcaatgaatatatatatatatattctcttaactagaatctaagcttttacctataagtataagtataaaatagcattttcaaatgattcactatgttcttatacatatattcctctccttttccccttctttttcatttgataggagaagcctcaaagacaacaacagaagaagaagca

SEQ ID NO: 65982 - DNA, 579 bp, Cucumis sativus
  Intron number 2 from transcript Cucsa.395300.1 (locus Cucs a.395300) derived from phytozome v7.0 (chr-ID scaffold0410 0; pos 885638 to 886216 reverse strand)
gaagcaggcaagtttggtattttttttttccaagccaggataaatcttaaacaaggattcagatttgaactttacaaagcttacacaaaaaggaaatttaaatcttggattatttcttagtttctataagatagtcatgagtagctctgtatgattctgctttcttaccatttgtttttaccatggtgtttatctttctaaagtaacattaccaaaatttaagcatttaaaagttaaaaagatcgattttgataaccatatgttttttttaacttttggtacatttcatagtttcgtttccctaccaatgtttttaaaaatcaaaacaagtttttaaaactaaagatgataggttttgttgtttttgtttttgaaatttgcacaaatgttaagaacaaacaacagtgaagatgtccgagagggaacaaacatatattttcagaaaagaataacttaagaagaaaattgttatgaaatgaaaccttagatacttttgttttcttctaaacttcatgatatgttttcacatctctgtaaagaaatatttgaacttttaatcaaattcaagttgttggtcag

SEQ ID NO: 65983 - DNA, 811 bp, Cucumis sativus
  Intron number 1 from transcript Cucsa.334190.1 (locus Cucs a.334190) derived from phytozome v7.0 (chr-ID scaffold0330 6; pos 73486 to 74296)
tttcgattggatctgcaccgtaatcatactcccatgtgagacaactttttcaagcttctttgattctttgttttcttctgtttatcatttcgattccttcttattattttgcggattgttggaccgagctgggttattacagattactcttagatgcgggaactcgggttttttatttgttgattctgctgattttagtgctcgtgaatctgaatctgcttctttggatgtgaatgctgtacagtggttctgtgttggtttaggactgtagttctgctgctgtacgaatgggatgtttgattctggttggtttacggcaattatttgaatgatatgctgtttaagtaaactgttaagtgccgttcttggttagacttcatacgaaattatagacttcatacgaaattatatggtagagagttaagcagtttgttgagctgcaagacactctaaatctactgaagaagttaaaactaaatcgtctgctatcaaatttaacggttcttaatggggatggcatgcatacggaatttaagcgcttcagttactatgatgacatgatggggttgaaataatcgttgtggtgtttggatcttttgaggccatttatgctaagatcggttttcttgcccttagactagtaggtctctcagaggagagtttttgcatgtttgtttttattttattgggtgtagaatgaatgaatttatatatggcttcatgctgttgaataaatgcttacatggtttttcttcttaaataagtaatactcattgctaatttcctctctattatagttaagatcgtgggc

SEQ ID NO: 65984 - DNA, 643 bp, Cucumis sativus
  Intron number 2 from transcript Cucsa.334190.1 (locus Cucs a.334190) derived from phytozome v7.0 (chr-ID scaffold0330 6; pos 74410 to 75052)
aactgaaaattttaacaaacaaccttttgtcattggcaagtattttctttcaagcgttacatgcttgatttcattttttatgttggagtagatgctagatgcatgaacctgacgtttatttaagaataaattgacatttgtcctcaatttttttagtaggtaattgtaatggatggttacttatccccatcataacagtttacaaaattgactttaatctagacctttcttgaagaacatcaatcctttaacacttcatagctaaagttacatgatatatgattttttttattttttatttttcttttccttctttttttttctcatctttcccccttgttagctgattgagaaaactcaaaatgacatcaaaggtccagccataataaattgccattttttatttgttttttatgttggtggtctgcgtggcaatcaattccttttgatgaatatttttgctcatctattttattatattctaatttagcatcacttatgccattcttttttgtgctttataactataaaatttcccaacatactcaaattaataggtctctttgatcttccatgtgtatggctcacaaatcttcttaatcttgaaggggttgctggtggtgcggcctctggaaagacaaca

SEQ ID NO: 65985 - DNA, 366 bp, Cucumis sativus
  Intron number 2 from transcript Cucsa.310280.1 (locus Cucs a.310280) derived from phytozome v7.0 (chr-ID scaffold0299 5; pos 125075 to 125440 reverse strand)
ccacagcacggaccgggaaagatttcgttggtacattttattattttaccatttcattttaagaatgagattgattactcttatctgctgttagatcctattctgattttgtttatttatcaatgctgggccaaaactatggaccatattttgatgatatgctgaaagcttgaaggacatgcttaatagaatagaactacttatctgctctaaattatcaactttcctggactttgtctaccttattcctctaacttaactagaaaactttaatctggatatcttttccctttgtcacaaaagtttatagaagagtgtttttcaattgaaatgtttcctgttcttggtttgattcatgcaggctcc

SEQ ID NO: 65986 - DNA, 366 bp, Cucumis sativus
  Intron number 1 from transcript Cucsa.310280.1 (locus Cucs a.310280) derived from phytozome v7.0 (chr-ID scaffold0299 5; pos 125480 to 125845 reverse strand)
gctctctgttcttaaattggacggctcttctttcggtaatttctgtttctgtgcgtggctgtgtttttttttattttaatccacataattcgattcggggtaatttttggtagtttttttatgatgctggagaaatggagattattccctgctcgtgagttttgtttggttttatttagagcagagatatattgacggtttttgaaatgggtttttatttgatcccagaaagtgagaaaactgatttcttaaatttgaagaataagaatgtctttgtttgcaacctcttttaatataggaggacttcaatgaattgagatgtttgacacagatattcaagttaggagatctgctactgttgctgaa

SEQ ID NO: 65987 - DNA, 960 bp, Cucumis sativus
  Intron number 3 from transcript Cucsa.368580.1 (locus Cucs a.368580) derived from phytozome v7.0 (chr-ID scaffold0363 9; pos 394279 to 395238)
atactttgatatcgaaatcggcggaaagccctctggtatgacctcccattttcttgttaattggaaaattttcgatctacttctgtttagggaaatgggttatgtttatgaaccctaatgtaaggttaggttaatcattttttagttttatcattagtttctgagtggaattacagtgatgaaagtgggagcatctgagattgggattgtgatttgatgatatccgttgtgttcttgttatgaaatccagccaattttcagtttaatgtgggggaattttgggttaatctgagatcagatcattttgttatgacatttcattgtcaaactcaatggtttttcctgtttaatgagctgctggctatagtccatattagcgttgggctttcgcaaaatattactaaggcagctatccaagttgaagagttttctccgtataaaaggagtctatgtcttttggtttcaagttgttctagttagatacactaaatgagtctgctaattctagttgggatcaacagagagaattgttctgtgaggttgtaataattttttacaaagtatactttttctagtccgtcgtttatctttagttgggagtttttccaagttaattcttgtgtttctagctttcttttaattgctgtattatttttctgtttatttttgcggtagaagtgagaggtttttgttcctgcagtagaagtaagattttttccaacacttagggtatgacaaatgaaaatgttgggcatactcctacgcagttttgttcttgagaaactttgcttttcgagatgaaaatggccgttgcagtgatttgcttctgtaatttagttctttaccagaagtatatattgactctacaaaatggaaactcgcatgaagatgtaccataattcatattctattttgtttttctcaggacgagttgtgattggcctatttggagaaacagtt

SEQ ID NO: 65988 - DNA, 339 bp, Cucumis sativus
  Intron number 1 from transcript Cucsa.358960.1 (locus Cucs a.358960) derived from phytozome v7.0 (chr-ID scaffold0358 8; pos 90903 to 91241)
ctggtcttacaattgctagcctttctattcctcaggtatgtatgataatgaataagattgtttcatgcaaattgaaatctgaagattagagatcgttttttcttttttgtcttgatttttattatttttttatttatggaaatgtgggttttgtttcattcgtttggttcgatttttccttttcgaactttgtcaaatttgactatccttcattttggctttattattttaatgtgtttgtttgtttgtttgttttagccattacattaagtgttctatgattctatctatcctttttttcttttcattcttcgttttgatttctgtagggaataagct

SEQ ID NO: 65989 - DNA, 790 bp, Cucumis sativus
  Intron number 1 from transcript Cucsa.332060.1 (locus Cucs a.332060) derived from phytozome v7.0 (chr-ID scaffold0325 6; pos 209724 to 210513)
aactatataggattaagaccctataattcttcaatgtaaaaagatataagttactcggtgggcaatccactcgatcacctgttaaataaaatatattgtctattttcacatcgatgtttttatttagcgattatggaagaatcatcaatcgtaaatggatgaagaataagttaaacctaatgttttctcaagttgaaaaaaaaatatttgatacgttttaacataagctacgtacatacatttatgctagtttgtttgttcttcttattaattttttataacattaaaaatatagttagaggttcgggactccaatactttattggttactgagctaaaaaaatgtttcgtatatccatctattcactacaaacatgtgttggaaaaaggcccgcgtttgcgttgggttgatgcacgatgtatcaatataatcatgcattgccacaccgtgtaggttatcaaaaaaaattgagacttgaagtgatgtggtggtgattgagaacaaaatttggattaccacaccgtgtaggttacgaccatactcttccaggtcccactatacattcaaaattgtatagaacttatactttaagcgatagttttgaaattttacaagatgtacaagaaaatattattatgttgcatttgatatgaatgggtgagtttaatggtacttttataatttagccttaaatttattattttgccctcttccgttactttttattaatgaagtgagttgtctaaaagttaagtttttctttccaagcggagaatctgttcttgctta

SEQ ID NO: 65990 - DNA, 745 bp, Cucumis sativus
  Intron number 2 from transcript Cucsa.383560.1 (locus Cucs a.383560) derived from phytozome v7.0 (chr-ID scaffold0388 2; pos 565968 to 566712 reverse strand)
aagagcttggaagaaaggagggagaggttggttcattttttatagtttttttcatagttttgtgggcagataaatttgactatgtgtccccttcattgtttaattttccatgtacctttgtacttgtcagtttgcgtttcctctccctctccttatgggccactggtcaggctcttttcactgccatgtttttatgcatttaacttatatttgggaaggcatctattatgttacacactttctttttttaataaaattaaccgttaggtgtaagaatgtatatctaattttgagttactaatatttcctctgtaattcaaatatatactggtctacaatgtgtcttttattttattctttaacgtattcatcctttgtgaatgtttttaaatattctggtcaataagaaaaaaacactatgctaacagagaaatatttgtgggcttggcttattttttttatagtactatctactccttagtcctttgtctgctgctttttcatcttcatgtaaaacactatgtgacagatgctaaaaatgctccacttaggcacttgttgtttttgctcgatcttgttctatagatgttttttattccatttgcacttgcattgttaggcaatgtagtccttccccagaaactcattgaagtccttgtcactttggctgtttgatttaccttctatgtacttcttaatttttgtacctcagaataaaattttcgtctctttctttgcaggcgtc

SEQ ID NO: 65991 - DNA, 581 bp, Cucumis sativus
  Intron number 1 from transcript Cucsa.359540.2 (locus Cucs a.359540) derived from phytozome v7.0 (chr-ID scaffold0358 8; pos 428175 to 428755)
tccggaaggtttgtttctacttcacgatctgtttatcttcacttcttctttcttaattctgactgcctcgattgttttattgatcttcttatatgtgatttaatcggcttaagttgattttatatgcattctcttatacttcagatgccaatacttgtttttttttcgttacttcacttcctgtcttgatgtgcaatttttgtcgtttcattttgttcagattcgtatttgatcttattttatggatccggttttattgtttttttttattattatttatttaaatttaatttaactgaagtgtgattacgttgagtaatttcgttatttttgttggatgttgcaaagtgaatattaatgtgtatgtcctcattgtctggttctacaagttgataacaaaaagaaatgaattatgatcactgcgattttggttggtcatatgcttgtggatgcatcgggtttcactcctttagttttttcttacatttgatcttttaaatttttgtttaattctcattttgatttcacggacggtaaacgcgcttatgattcacaggtatctggaccagtcgtcgtggcag

SEQ ID NO: 65992 - DNA, 512 bp, Cucumis sativus
  Intron number 1 from transcript Cucsa.362070.1 (locus Cucs a.362070) derived from phytozome v7.0 (chr-ID scaffold0361 1; pos 68506 to 69017 reverse strand)
ttcgtttgctctctgcagattgcctttccaaaaatgtactataactcttctccttcttcttccatctctctctctctttttcctatactattcgtttcattcgatctaatgttttgtttgtttggactgaatccatccgtctaaatatttaagaatatacgtacatgtttgttgtttgtagtttcttatttcttattcataaaattattgtagttaaacgttatattaattttatcttcgtccattgtgatttaaaatggtatcagtaggtggttgtctagaaaagttttatgttcaactccttgcgtctgtgatttatattcaaactgtcattttcttggctcttcttcatacaataagttaattgaggaggaggaggaggagtagggttagaaattatattagatttgtttttgcttattagttttaaacctttggattgatgggtgattcaaaggatgatgtaaaagataaatattgatgtatatttgattacttaatacagggttgtg

SEQ ID NO: 65993 - DNA, 914 bp, Cucumis sativus
  Intron number 1 from transcript Cucsa.313570.1 (locus Cucs a.313570) derived from phytozome v7.0 (chr-ID scaffold0299 5; pos 2705009 to 2705922)
atcgccgccgcggtagtgaagacagagataataaggtctctttccttaaataagtagaaatgtcttaggttggatgcgttaagaaagtaaatttgctatttttataaaaaaaaatagcttaattcaacgatactttacatgatttttgtttctttttttatgatggaggtgagaggttgggaatgttccaaaaactgatggaaatttaacccaaaactactgatcaaccaaaggtggttatcaacatactgatgagggagagaataatattatgtttgttcatatatctaaatggtgttataaatttataatattgtattttaaatcgttaaacacatttaatcctaaagaataaccaagaatttagtacttttacttcaaaagaagttagaatattgtttttatcagctccaatgggtaggtcgcagttaattattcgtctgccaagtgagtatcagtaaactaactaatcatgagaaataaatactacacaacgattatagtctataatatgtacactagtgtattttctcattcttcttttatatacactccaattcattcttaaccaaactctcatccatttaacaggacagactatccacttacaaaaaagttatattttgcgaccttacctagagtgaaaagatcacccacacacgtgaatatactaaagatagcaattctcatacttattagggaccaaatttataatctttaaccgagactttgaatcgtatgagcgaacacaaaagcttaaaggatggttagtgtaagtatattattcagtgtagagatagtattttttttttaatcaatatatcttatgaagttagggaggtcgtgggggatttgaagtttcgaatcaatgaagagtatcccttcacattataacattgcatgtataggtggta

SEQ ID NO: 65994 - DNA, 861 bp, Cucumis sativus
  Intron number 1 from transcript Cucsa.378850.1 (locus Cucs a.378850) derived from phytozome v7.0 (chr-ID scaffold0381 0; pos 352517 to 353377)
ttcaagttttggtatcatttctttcttcttttcatctttaatttcatgtagtttaactcttgattcattttcttgtttaagctgctttcttgacttcgcctacgaattgattttagatcgaacttggtttcatcattggttctcgatttttttagtcaattggaaaatagtctgaggtctttgtggctgtcaattgaggggtttaattgcgcatgtctgtttgaacttcatttcttcaagtgtctgctggatgtgtgccgtatttgattttaatcttcgttttttttttttttccaattattgcaaaggtgagcttttgggtgttcgatatcgctgagaatgttagtgggtcttctttcgtttgaggtttattagggatagatatactgtgcgtagagcttggtcggactgagttcaagaattttcaatcccatattcccccttctataccgtgttggcacttggaaagccaatttcttgggtcccaaagagggtataaccttagagccagtttcttcaaacagtatttgttatgaggtgtgatggactaattgctagcgaaaaatatatcatttagacagtacgtacttccgtccgaattcagcactactacatttttttataattactgaacactgtatttcacctgattttgctttggattcttcgtactcccccttagatcagttgatagtaaatattttgttcttagttgcaacaatttttgttgaatggtgatttgatctgagtctatttgatcccttgtttattttatgctacttggatagtcgttgacacctttgattatttttgtatccaccttcaggggatctcaggaggaacaggtccgccctccaccag

SEQ ID NO: 65995 - DNA, 897 bp, Cucumis sativus
  Intron number 1 from transcript Cucsa.348620.2 (locus Cucs a.348620) derived from phytozome v7.0 (chr-ID scaffold0348 7; pos 73988 to 74884 reverse strand)
cagcaagattaaaggcttttgaacgagtttcgtaggtattgttgatctaaatagcttttcaaactcgatttaaattttgattgattggggtgtagatgcagttttggaggaatggattgttggttaacatttctgagcgctttttgggtaatcttaccccgttgattggacatcttatgtattgtttttaattttagaatacgttatttaggttttgggtcaagattttctgtaaggaaaaggaagattaagttgtttggagttgctttgaggtatctgattcttctatcagattgccacactgataggttggataaaatgtatgatttttgaagtttctgaatgtcgaaaaccggatgatgcatgatgaataataaacgtagaaagttcatgttaatagttgaacgacgatatgacaattgtgaaagttgtatgacaattgtgaaagttgtttcgtgttgcatcctacatggtttgttggctcagccgtgccatcgggttggttcagtgtaagcatatttttcgactccacattattacacacacgagttattgagtcttatttgtaaaagttgagttatgagatcatttaaactgttcttattttagtctatgtttaaactgttttcaaggaattctgattcaagtttttgattattttacagaaaatagaaaattatcctctcaaagattttaaaatgactttaacatgcatgtagtgatgtccctcgttagttttagttcaaaaagttagttgttacaattcaaatcccatgtctttggttcttaccaaacattgaaaatgatttcaaatttgaggcttctaaagattgctaattttatgttgacgattttcctccagggacttccaagggccctgctcttaggaattaggga

SEQ ID NO: 65996 - DNA, 863 bp, Cucumis sativus
  Intron number 3 from transcript Cucsa.348680.2 (locus Cucs a.348680) derived from phytozome v7.0 (chr-ID scaffold0348 7; pos 132722 to 133584 reverse strand)
acacccttgttgtcttaaaggtctcaattccctcctccttttcttccttttattatttctatggaatttcaatgtcacgtgtaaaactctaaactttcaactccaaattaataatacaaactttatatattaattcaactttattgttttctcctttcaaatacttttttaagaattttcaaattttaattatcactggtagatgtttttatccatatcataaaattgaaattatttaccaaatataattaaagtatagagaaatttaataaagattatgtatttaaaaactaaatgaaagcatagcataatatttaaaacaaaatacttgtgttcggattaaattttgttactcttatgtgacatattataggagaaactaaaaagcttaataaaatctattaaaaatttaaattatggcttttgttcattattaacacattaatacaacaatttaacataaattcatcgtaatacataacaacattaattaatttcaaattactatattaatattttgagaaacattttttcgtcgtttgaatatttatggtaaaacaggatataaagtattcaaaaaacgaacatatgctcttttgtacaacaataaaatgttaaaaagttaccattattaattcttatgaatttgataaaatctttaaatttatcaaatattatttacaatgaaattctaattttctttttctttttctttgaatgaaagtttaatttgaaaatgatttgagtttggattaaaattgttattgtcaaacataaagaaataaatgtgaaaaatagagtgacggtagggagtgtttcataaagcagggaatctcaacggacaaaataatagacgttcgtcg

SEQ ID NO: 65997 - DNA, 357 bp, Cucumis sativus
  Intron number 1 from transcript Cucsa.383310.1 (locus Cucs a.383310) derived from phytozome v7.0 (chr-ID scaffold0388 2; pos 292388 to 292744 reverse strand)
tacttcttcttcatcatactcttcatcaccatcaggtaaaacccagaaactcccatgaacacccccccaaacaacaaacacacacacaaaaaccaaatacatttagaaatcgggatgtgaatcttgattatgaatatgctattccactgatttgatacgcaatatcattgaaacaacacgtctacttctataaacctcaaaaccaaacacaagttaatgaaacattacctgaagaagttcatcctcgttactgataaaagaagggattttgtttttctttgaatgtcaactaaacttgtgtggttgatttttagcaaatgtattttaatatgaaaggttacatttttggtgttaggg

SEQ ID NO: 65998 - DNA, 448 bp, Cucumis sativus
  Intron number 1 from transcript Cucsa.320240.2 (locus Cucs a.320240) derived from phytozome v7.0 (chr-ID scaffold0308 0; pos 122718 to 123165)
tccgtctcaaaatcattcgcaagctgaaagacaatgtattctcgttttcctattttatttccttcctcatttcctctgtttcctaggtttttgttttatagctttcgctattcattcaatttttcgcttaatagtttcgctaattttattcatccagtcgtaattactgatcaatcgtatgaaattcttatgatagagaatgaaactttgccgaaagagggatttgctgattcatttgacctattccttctttcattcttctcattccaaatgaactatatttgtctagggttttaacggagaaaaattggagaaatttgacttcacttagtggtagtattaatggaagttccaagaatgttggcatagttgttgaattttggattcttatagaaaagtatgtttaattataggaagaattgcgcaataatattgttgcaatagtgaa

SEQ ID NO: 65999 - DNA, 984 bp, Cucumis sativus
  Intron number 1 from transcript Cucsa.325900.1 (locus Cucs a.325900) derived from phytozome v7.0 (chr-ID scaffold0313 2; pos 191222 to 192205)
ctgctgagcttaaaattggaggtagaaatctatctataaattaaaacttcctatctatattcaatgagaatttaagtttcttgtatatttatggtgatgggtttccttcatatatttgtaaaattagaattttataagcaactgatgtatttaattttttattttgctcaaaaagttagaaacttaatttataatgttataccccatgatattatatgtatcattattgcaattctttgatccttctagtggccaataccgatagggagactgttcttatgtacaatgcatatagatatagtttagattggaaatgtggagttaatgttatcttcaagcagttttatgggtagtgcggtaataatctcttaggcctgaggggagaaaggctgaacttccttagttctttaagatcgatagctatgtgattatatattgtagccatgtagtatctcataactttcttggatattgttcggtaagtcatagtcatttgattggtggcttgatgacacgtcaacaaaagaagtttattttgtctatatcttcccattgtgttttacgatatcatgttgtttctcataatattttaagctagctcatttacttcaaaggaatacttccttcatatgatgttaaagggtcaaatggctgaatgctttgagttctcttatattttggattaatatcatattggttattaggtttttaaaaaaatttagatgaaaatgtgtgatctattccgtatctaaattcttatctatgattattctggcaaaaagataaccaattattgtaagtttttccattcttatgaatctatgaaaatgcggactcaagaatgaccaaatatttggtttacataagtaattgtgcaaaagtcaagctcttgcacccaaatcattttggtgtatattctaagctttgaaaggtaataactggcgtttactttctttggttacttgcagagttcttaaaagccaa

SEQ ID NO: 66000 - DNA, 564 bp, Cucumis sativus
  Intron number 2 from transcript Cucsa.357230.1 (locus Cucs a.357230) derived from phytozome v7.0 (chr-ID scaffold0357 8; pos 111846 to 112409)
catccaaattctcagccctaaatctactcaacgtatgttatttcttcaaaacccttcaaaattttcttcttcttccctctattactctcttttccctgtccaatcgactaagcctagtgtagaaccctattccaagttaccgcaattgttttgggaaattacttatgttttttggaaaattagccacgttattatttgagttcatctttctatacacttttcgtcactggaaatcaaagcagaatagatggactaagttgcggaatcagtttgattgaactgctgaacggcagtgattttttaaataaattttattggatttgaaatatggctaagttgatagttctgtgattttataaattattatgacggttatccgtttcaattttctatatgtaattgtgcggtccaaggggaaaatgtacaagtaatgattttattgagtgaggaaaggatgggaagtctatatgttgtgtgatttatgaattcagtaatataaactttatcctacttggtatccatatggcaggcacctaagaaggacaaggctcctcctccatcctc

SEQ ID NO: 66001 - DNA, 398 bp, Cucumis sativus
  Intron number 1 from transcript Cucsa.317620.1 (locus Cucs a.317620) derived from phytozome v7.0 (chr-ID scaffold0305 4; pos 41813 to 42210)
ttcaaggctgtttaaatcttagatccgtgggtttctttgaatttcaagatggactttctttttctctttgttgctgttctttttttttaaaaaaaaaataattatgttcaaattatgcaattagtgatgattttatcattgaatccatgtgcttatcgccgtcctttgtctcgtttcatgacgtgcaaatttatggattccattaattaaatactgatttcaacctcggattctttttttggaattctcttcatacttattctgtttgttttgcatgttattgtttgttgtactctctacatggcagttctgaattcatttttttaaagagaagattgattctgagaccacttgttgtgtttatgttcaggtagaagtataaaactggtctcttaaga

SEQ ID NO: 66002 - DNA, 547 bp, Cucumis sativus
  Intron number 1 from transcript Cucsa.336220.3 (locus Cucs a.336220) derived from phytozome v7.0 (chr-ID scaffold0333 9; pos 29576 to 30122 reverse strand)
ttcctaaccaatcccctggtaacactgaagcttcaacgatttctattttttaatgcatttgtgtgggattatgaggatctgatgatccttgtttctttgtaataatcatctaataactcacgatttttcatgatcgaggttttttaattttatttctaattccaactgttctttttagtgttcaagtgtgtaaaaaattccgtgaaattacccattttattgttctttttatgtttatgttttcgttgtaagatgattctgggttaatgtattcgagcaatcactgttattttggttttgaagaacttcaatcgcgtttcgatgtgtttgaagcattgagggattttttttaatttcattcttgtttggcaatattgattttgctacttgtagttctttagtgtttggagcatctaaaaatcgaggaagttcgtttctggtgctgtgtggatcattttgttgttcatcacattttgatctattggtttttgattatcgccttctggaatcagatatctcagaggcgctttggcggttggaaatcagt

SEQ ID NO: 66003 - DNA, 263 bp, Cucumis sativus
  Intron number 1 from transcript Cucsa.384840.2 (locus Cucs a.384840) derived from phytozome v7.0 (chr-ID scaffold0390 4; pos 264990 to 265252)
cttttagtttaattcctcttaaaatagggagactggtgcgttttctttcttctctcaaccttataaatcggaaattaattggtactgtgctgtgtggacgtctgagtcgaacgacttcgcgttgtttattagtcatctaattgctgtttccgaaactccttttcctagtgatttcatttgttccgatctggtttaatcttggttgttgtttcatcttctgtaattttgattgttattttttgtaattacagttggtcttctcc

SEQ ID NO: 66004 - DNA, 530 bp, Cucumis sativus
  Intron number 2 from transcript Cucsa.359120.3 (locus Cucs a.359120) derived from phytozome v7.0 (chr-ID scaffold0358 8; pos 176067 to 176596)
atctgcattccttcgatactgaattgctgcctgaggtgggattaaattcatttccacatttcttattactctctcgaatttctgatccttttttgttttttcagaattctcagaaaataacttaacgattcatgtgattatggattcgcaaagtgaatttatctttcacctacagctttgttaggcctgccaatcctaaactgataatgatggttactgatgtttgtataagcacacagtcttctgcattaggaacattaaacttgaaagcaactgttattttgaggctgatatgaagttattgactttgtcgaattaattctggattgccctttttcgattttagttctatgcaattgtagaggcaagagaggtggtagatataaaattctatgttcatgtattttggggcttttgaagctgaactaaagttatctcataccacttgttgggaggtttgagaaatctcatgttgtgttatctcgtgcaggatagaggctttgacgagtctgacgtctttatttcaaaca

SEQ ID NO: 66005 - DNA, 376 bp, Cucumis sativus
  Intron number 1 from transcript Cucsa.342330.4 (locus Cucs a.342330) derived from phytozome v7.0 (chr-ID scaffold0335 6; pos 4679387 to 4679762)
tgattgtttaactcagtggttcagcccttagcgccgtcggtgagatcgcacccaacgttttatttttttgtttgttaggttattgttgatttgttctctgcacccacggagaagaaaatgaagaactgtttgttctcttcattggatttcttcttcaaattagtgttaatgaaaatataaaagcaatgtatacctcacaaatttgtaacataaatagattgaaattatgaatagaaagtagcaaaatacatattagtagagatttttctctgctccagtcgatcttctgaatgtatgagttgcagttcatttgattatctcatttgtgccttttgttgcaggaaatttagggtttgttatttgctgaagaaaagaa

SEQ ID NO: 66006 - DNA, 710 bp, Cucumis sativus
  Intron number 2 from transcript Cucsa.360990.1 (locus Cucs a.360990) derived from phytozome v7.0 (chr-ID scaffold0358 8; pos 1461992 to 1462701 reverse strand)
ttcttgactcacgataagagcattgctgaagaaaggttcatgatcaaatccaacccctcaccaaagaagaaaaaacttccttaccatttcaaaattattttgaagtagaaatctttcagaattttatacattgaagattgttttgaaagagttaggaaagattaaagttaatatcgatcatttgaaagaataagagtggtttttagacgaacgacaaaatcaatggcagtttttataatttaacccaaacgattgatgctgaaagtagcttatttatattattatattggctgtaacttccactgtttcagcaacatttagatttgctaggtgaatgcggttgaacgtggactaagaaagttacttcaaagtgaggacagaggaaagccacatactgatgctttatttgatttgaaatcatgttagaatgcataaaagttgcatattttttaagcaagaaattgagttacttgaaaagatgaggatttatttccacgacaatcaaatgtgtttcactgcacgataatacctatgaacacttggtcttactagaatctacatcttatcaaacatctttgcacctaacctttatcttttgtattctatctcaaatttcttcaaaaatgctttatttgcagtttgtacaagaacttagacttgacaagtcggtttaacaattctaaacgttcaacagggcagctaagttggga

SEQ ID NO: 66007 - DNA, 1031 bp, Cucumis sativus
  Intron number 3 from transcript Cucsa.368700.1 (locus Cucs a.368700) derived from phytozome v7.0 (chr-ID scaffold0363 9; pos 582965 to 583995)
tggggccgtctctggtgggtacggctgcatctcaggtgagactcatttgaattcggtctaattgatactatattatcgcacacttctaaatttcaatgttaaatttgtcttagccacagtgttattgcgagaaggggactttttggtatctgatatttgttagaaacttaaaatgcatttggctttttgttgggtggattgaagaaggaaggaacgggaacttcttggttcattgtaaattatatattttcctctataatttgtcctccgagatctttggaattgtaagattgtatagacacaaagttagaacgtaacatcttgcatatactacagaatttctggcttcacctgtctgttttgtgtaaaggggatcagcagaatacttgaaatttgattgatgatggacaacaacggcttgtctgtggtctcccctgtgttactggaatacactcttagttggacagttataggagggtattagagttcagacttgttacttagttttcttttgacatcccattcatacataaaacagttcaatcaaagtgggaaatcttccatttttattgccaagccttttcactatgatcctatcatgttattacaacatccttagttagcttgggcagcatcaactattgatgcaatggggtttgcttgagttctctagttatgttcagacgttatggttgaaaacaaaaggctaatattgttatcaaatccaactaaatacttttattgtattaatgccagtagctagtaaatgaataataagcatgcccgtcatggtgaactccctgctctctacaacaacattttctccaaaataaaataataaactttgaacttcttgttgggatattgacaaaaaacttttgtggtattttttatgaatatgatatacatgaagattcaatattttctactcaacttttctctatgcttcacattcatggtatcttatatttgaacaaactcttgttcttggtacagggtgtttactactatttctaccaaatattcaggaa

SEQ ID NO: 66008 - DNA, 819 bp, Cucumis sativus
  Intron number 2 from transcript Cucsa.341340.3 (locus Cucs a.341340) derived from phytozome v7.0 (chr-ID scaffold0335 6; pos 3740012 to 3740830 reverse strand)
aagcctcacgaaccagcaagtttgggttagatttggtaaggattgattcagttctaatcttcatattttgtcttaattgtttaggcttttagcaattgaacttgataattgttcaaggaagtgggttttcagattaacaactgttttgaatgtttgaaagtatgtttttatgttttcttataaaagaaatgttttacgtgatttaagaattaactaaaattgttttgaatgttttgatggattttactaaaagaatgtttgattttatggaaagtagtgattgattgaaagcttgaaactcgaaaatatttaaagctttttttgtaattttacggcaagtcttttcaaaagttttgttgtgttgaaagttattcaaacatcttggtttattgaatggctatttgaaagttttagtttaaaatgtttggttttgaaggcttattttgatttaaatattttgttttaaatgtatcgtttgtcacaaatttttaattggaaaagttttgcaatgacttcgtatttttgtgtacaaaagttttgaaagaaaatgaatttcaaagcttgatttggtatgaatttttacacatacgaacgaaggttggttggtttgaatttcacaattcaaagttgagggtggaataaaacaatcaccatagttaggggtagtttttgcaatttgtgttacattttcattaatactctgttttttgttttagtacttaaattttttatggtttttaatagtagggatgataatgttgattttacatttatgattaaaaaaaatgttgattttaaatcaaattcttttgcaaggtt

SEQ ID NO: 66009 - DNA, 567 bp, Cucumis sativus
  Intron number 2 from transcript Cucsa.362740.1 (locus Cucs a.362740) derived from phytozome v7.0 (chr-ID scaffold0361 1; pos 506450 to 507016 reverse strand)
cgccgcctagttggttgaagatctcttctcaggatgtgagaattccgcgccaaatttttatttttctagtattttggattaagctttggtcgttataattgattagaaatataaaattttggaatggaaaatgtgtgaaaatgtagatttcatctaattccattccgttgtgaagccattcgatcattagttaatatcgaggtttccaatgtttttacaatgcttcgggtttccaatgtgtgaaaatgtagatttcatgtaattccattatgaggatggttcatgtgattggcaaaataatagtaattaaaattgcagtgctcattttagtgaagcatgatgaaatgtatttgagtgttatctgagtaccaaagtttgatggttgctctagagtgtcactttaaatgtttttttctttataagaatgtcattttaaatgttagtcattctcaagttctcattgaaggatgggaggtttgtttttctactatctgtagaactagaaattaatttcttttctataaccaatcaggtcgctgaaaacatttgcaaatttgccaagaaggg

SEQ ID NO: 66010 - DNA, 958 bp, Cucumis sativus; identical to SEQ ID NO: 65443
  Intron number 1 from transcript Cucsa.342410.4 (locus Cucs a.342410) derived from phytozome v7.0 (chr-ID scaffold0335 6; pos 4719592 to 4720549)

SEQ ID NO: 66011 - DNA, 638 bp, Cucumis sativus
  Intron number 2 from transcript Cucsa.357620.2 (locus Cucs a.357620) derived from phytozome v7.0 (chr-ID scaffold0357 8; pos 847009 to 847646 reverse strand)
cttctctgattttgcttccttccaggtagtttactttcttgaggcttatcctattgggtttagctgaaatgggttggggtccaaaggggaaaagggtgtgttctgattgagcttcaggagaaagtagtagggaaaattcgcctttgaacggcctttcttggctggttttcttattcgcttttcacttcgtcttcccctttgctttggggttgttgataaaatgttatgttgactggtttaattcaaccctactggcggggttttaaagttcggtgagcttgaaatttggctttgcaatgagaacccacacgtatgcaaattttccttcaagatttttagaaacggaaattggggcgttaccgttctttattgagtgcattgtttatcctagcgagcttattcaatttttagactgtttgcgaagttattatacgttctcaacgcgctgaaggatggccttgaattaggaatttatgattcccattttttgctgattaaccttctaggttttctctccatctgaccccacgtttaaggaattgcatttgcgattcttacgagattgagataccgaaattgttactaaaaaatctttgatgttgttttacatcacattttaggatccattggaggtggta

SEQ ID NO: 66012 - DNA, 767 bp, Cucumis sativus
  Intron number 1 from transcript Cucsa.345750.1 (locus Cucs a.345750) derived from phytozome v7.0 (chr-ID scaffold0344 3; pos 37883 to 38649 reverse strand)
tcctaaaaagctgcgtgctcttcgcaaagacaaaggtgcgtgtttttttctaacttctaacttgcgatttcctttttttttaggctatgttcgataatttgaattgtgggaaactcaatattattgatgtttctttagttgaggtgttctaaaaatgttgtttgttttttatttgaatcttaatcgtttctctcttcactcttgtcgtttacattgttctgttaaacaatcttttctatgtccattacaatgtgccaaggtatgcagtttgtgtatgattttttctctttcagtagattacttggaaaatcgaaaatgtaattctttattataatggtaagcaaggttttcctttgtttccttgaagcgtgattgaggatgaaccaaataggtgtactgtttatcttggccttatgttgtaacatctatgtttgtccaacctgttttctagcatggtggattgattatgctctataatgatttgtgtcttctgaattgatctgatttctgtgctggttccttggtttccttatatgagtagtactctgcttataatatgtgtagcaagtaacatgtttttctgcattattttctgaggccttactaataatttctttatgaagcctttccccggcgttcttctgcagcattggtctcctgtgagggcaataaattatttttgttctttctatcatatattgttgtttatgatttcatttgtttatgttttagattatacatcaagggtggacttggtccaggatttg

SEQ ID NO: 66013 - DNA, 814 bp, Cucumis sativus
  Intron number 1 from transcript Cucsa.338110.2 (locus Cucs a.338110) derived from phytozome v7.0 (chr-ID scaffold0335 6; pos 1096495 to 1097308)
ctttctctgtcaaaattcctgttggggatagacatgtaatttgacaatttttactctccgcgagtttgctgtgttgaataggagtttgtggaagtttggttaggtggaaatcttagagtatggtttcaagtaggtttttttttcctggtgggaaatgtaaatatttaattgtttgtgcgggttaatttgtattgtttttttttaatttagattgtgtggagaagattttatattgctgtatatgtgttgccaataggtaaattttagttatttaagcattgtgtaaatagccaccggattatattgagtgagagttgtaagaaatgagaatagtaaattaaagttaatggcagtgagtgagtgagtgagagttgtagctgaaaaatagccaccggattatgttgagctgtaagctaagaagcttgagagaaggtagaactactggagtggtgaaagaagcttgtggatgcgagagagcaaacttgaaattttgagggtgggtgagcgggtgggggttcttcttcattttatgtgagctctatgtaatttgctttgtttggttaataaatgttaaaggagggcgggtggtcattctaatgaatttgaccaaccttgtacaaccacttagcttttgccttttattgtacttgtactctgctttagtttatttgtctgtatgcatgattgtagcttttatctgattgtctgaacgagcatgttcaacatatatgtgtgtctttagtagagctttaatttattctacatactgattctatcagattttggttgagacgggccatattgggaggcaagc

SEQ ID NO: 66014 - DNA, 912 bp, Cucumis sativus
  Intron number 3 from transcript Cucsa.328160.1 (locus Cucs a.328160) derived from phytozome v7.0 (chr-ID scaffold0315 9; pos 543229 to 544140)
gggagctggtaagtttaatagcttgtgttcttgtctgcacaatttttttttatctgctcaataagtttgtctaatactagtcctatgatgtggcctgttggctaaagcttgcggtctctgagtacacccactctaaggttgtgtatttaaaactttgggtgagcttaacaagggaaaagcttactcttgatatctcttgagtctcggctttgttgctagcgctgactattttgaaaatagtatctaatactaatgctgcagattggtaatatttgatgatttcttttatagacctgcaacaatcatatctgtttctgtaaattgttcatttgttaagtcaccagatgatattctgggttaggtttacactcatggcagctacgctttattttcatgagtaaattgttaaaacaaaattttctatggatctacatctatatttttggccttcttcatattgtgttgctttgtttattctgttgattgaatacctgttagtcatgcacttgatctgtgcattctttatgagtttgaaatttcattatttaaactaattcttgattttgtactagatctctacactaggtgaacatcaaaagatagtatgcaagtggttgtaatatatttcaatggaattctttagtttcattagatttaacagtattgcttctaaaatttcaattgtgaatttggaactggacattgattaacgatgagcttgaaaggttggagattttgtggctcctggtgctcttttctttcatgttctttcataacaaaagagttttcattgatgtttgatgaaaaccttagttaatgcaagtgccaaattccttgtagatgaatcaaaatcaactcatgtacttttcttttgcagtcatcatagcagaagcagttgcattgattgctgca

SEQ ID NO: 66015 - DNA, 1000 bp, Cucumis sativus
  Intron number 2 from transcript Cucsa.318580.1 (locus Cucs a.318580) derived from phytozome v7.0 (chr-ID scaffold0307 6; pos 107924 to 108923)
catttcaacctcctccggatcattccacctacgatgtacatctctctttactttctctctctataaattaagtttgctttcttttttagtataggaggaattttgaattttgctgtcaccgaatattgtttttccctaaataattatagttggttactaattaatcaggttttaatcttactatatccctataattcttaaaatcttttatttaagctaattttgaactttaagtttgttgattttttccttgttattcatctagttaggtctttatgttttgcatcgatttctcaaattaatttgtttattgacaatctatgacctttatttattatttgtagttatatttatattggacatatggtatatgttttttctttttcacattagtagtgtgattaaaatgattttcattgtgcaaacatatatcttgtaaagaacttgagaaaacacctctagaagtggtaaaacatttttcctataattgtctttacaaattattttattattgcatcattattttaatatttgacaactttagaacggcttttattgtgctgaatttataacctaggagggtctttaattagcccaaagaagaaccaagatggttgagttgaattcgtaataattaaaaaacataaatgcgagaaccggaaatattttggtgagttgttgatgctaatattgaagtagtaaactctttcaaattactggtaatagataatttattaccggtttggaagtggtttttaaatgataatatgtatttttctcaaattaaaatcagttaaatgtataatatttgatatttaaaaacaatctttttatcatgaaaattaatttaaaatcaatttaataaaacactttcgtgttaaaagaaacacaccaggatcttaaaaataatttggtatataattaaattatattaattattgatgtgtagaatatgaagtgggtgtgttacaaaggtgttgtgtttggatggcaggaatta

SEQ ID NO: 66016 - DNA, 684 bp, Cucumis sativus
  Intron number 3 from transcript Cucsa.320170.1 (locus Cucs a.320170) derived from phytozome v7.0 (chr-ID scaffold0308 0; pos 74871 to 75554)
ttcagcaggtgaagatctctccttttcatctcccctttaaacctttttctctactttcctgtttctgattgtatttttttagtgtatggacaaattcgttatctcggggttgttttttttcttttttttcttgtttcgttgaattttgtgtttctcgctagtaattttgaagtcgtagtgtttttttttccagagatcttagatgattattctgttttttcccttttctcttttcttccttggttgtttgcgattgtggattgattttgaattatgcattttcacatgtatgtatgattataatgtctgtttgtgtatgggtatgagttgggtccacttcaacttttgagctcatttctgggctagccgaccggacccaattgtttggtggcagcttttgagctcatgttttagcacacatcatgtgcatgttgtctttcattaacgattctcttgggttaaaatttgtttgttgatctattttatttttctttttttacttgggtcttcttggatctgcatcaagttttgttaagaaggttcatttgatattttactgtagtatgaatgaagaattgcatctccatggttctctacttggtttttgtacttacatgtatggttgattgctactgaaattaatatgacttctgatttgggaacgttaggaagcattggaagctc

SEQ ID NO: 66017 - DNA, 858 bp, Cucumis sativus
  Intron number 1 from transcript Cucsa.342140.1 (locus Cucs a.342140) derived from phytozome v7.0 (chr-ID scaffold0335 6; pos 4528220 to 4529077 reverse strand)
ggggaaacgctgtgattggataacgcttcattcgggtaatcaatattaaaccttgcttatcattgactatttctttgattaattttctaagtgatggaatctatgagagaaaacaatcggataattatttctgttatgggtataatgacagtttatcttaattcaatagtcaattcgtacttgcattgcaaatattttgtattttaatgcaattacaaattttatttagttcaaaacattcgagcacaaattagaataatataatcaaattatatagaattaaaatatcggttaagtatgcaattgtcctgtgcaaaaattaattatttaattcttccatttagtaattaataatttaatttttatggtaatgttgtgatcacaaagtacttattgcgtcatctaagttgttatcgccataattggaccatcatttaataacagattgacctcagtctttttcatgccatggacggatttattttgagtcgtgttctacgtctgcccatttatatattgaaaaaactgggttaggttttgtatattctagccttctaaattggttcatttggacgaaaatcaaaattattattgtatacggtaattttatttattaaattatttgaatattacattttattatcatatgtgaatgcaagtgttatataaaaagattgtgctctaatcatttgtttttttgttggtcgttgttcttctgtttagtctataaagcaatgtaattcaagaatttcatctttcattaaaccattcctttcattttcaactttaatttgaatctcttctaatcttgtaatgtaatatgatgatttcttgtagatccactttacatcgcttttc

SEQ ID NO: 66018 - DNA, 554 bp, Cucumis sativus
  Intron number 3 from transcript Cucsa.326860.1 (locus Cucs a.326860.1) derived from phytozome v7.0 (chr-ID scaffold03 139; pos 3608 to 4161)
ctgttgtgtaagtgagaattaatgtcctcaaacaaaaatttaaagttctactttaaaagaaccccatttattgcattatctcatacttttttggataagaaaacaatttccgatctgaaatatttaaacaaaaacagtagaaaaccccacaaagggatacaagattatttcattcaaatattaacatttcgtattagaatttcatttttagttttcactttcggaaatttacacatgtttcttctcaatttccatgttatgattatcactttcttgaagtaagttttcagccaaattgcaaacctcttaaaacaagtttttaaaaactaccttgttttagatctcaaaagttaacttgattttctgaaaatttagtagaaagtggataacaaaacaaagagatctataagtagaagtaatgttagctttcaaaaaccaaaaatcaaatcgttattaaacgggacttgaaatatttgcctgtggaagaaaataacaaatatgaggtatggctaatttcaggtggtatattgacggcaccccaatcagagtttttc

SEQ ID NO: 66019 - DNA, 987 bp, Cucumis sativus
  Intron number 3 from transcript Cucsa.330520.1 (locus Cucs a.330520) derived from phytozome v7.0 (chr-ID scaffold0322 3; pos 59107 to 60093 reverse strand)
gccaagaaattgtaagtagaagctgttaagcttcattgaccttcaaattgatgcttaatattaataacatcacttatattatctaatgttatcttcccaactatttccttataaagaaagggaaaaacactgtttgtgcaacccttcagtgcttttgttgctatcaagggtgcatggccttcccaatcataagttaaaagagatttaaattatttgcttgtctctgtcaccaatattagtgtttcacaggaattttggatatgattagtcatcattttaagaaatcttctattagttggagtaatggtccatgagagctttcaacagcttcatttgaggacaatgacttcctaatgagaggcatatgcggtcaagccctataggatgtgaaccctggtgcttttgctacgttctgactgtctgaatggtggatgaactattttggtggctggaaggctgtgtcctcccctttctttgtaatatttcacatatcaatgaaatacgtttactgtaaaggaaaggaggtttttaggagattagaagaggtcatgggggagatttggtctatagctatgctcaatatctccctcctttgtattctttcatttttttctcaataaaagttgttgattttatcaataaaatacctctgtctccctttggtatgcagttattgtagttctttgtttcttattcttaattgatggagtactttcttatagttattttgtttgctttgtttgttgtgggatgctctctctctctctctcctgtcccttttgatttagtagatgattaatttttttatctgtttctgggtcacgtgtcattgaataggtattttaagaattcgtcaaagaaaattccttatgcagtggttccaacatccatccccccctccctttcatcagtatctgctgtccgtttatttatttatttttatttttggtagtgtattgcagctatcagtgactgccctattaccca

SEQ ID NO: 66020 - DNA, 999 bp, Cucumis sativus
  Intron number 1 from transcript Cucsa.397860.3 (locus Cucs a.397860) derived from phytozome v7.0 (chr-ID scaffold0415 8; pos 400321 to 401319)
ttgtttttactttggtgtttttcaagtaaagtgtaacagaacttacatgcactaatctttctcttccttgatatcgtgaaccagcttttgatgttttcgctttttgtgtttcatcagataatttgttcttttagatccttttatctgtgaccctcgaagattaattctaagcagcatctttatgatcccataaatgctcgcgtgattctgagttaattgggaactgcttgttatgttatggttcagaaattatataccagccttcattgtattattcttcaactgaagagactaaatctttcgtatttggagcgacgaactgagaaaagatgtagttgttctttgtacatctaatctcattcagtagtttgattagtatgtttttagtttgtacccttttagattttgtttcaccatttgccttatcagagaaatattatgactaattgctattagctttagaatcattttgtaaaaaggaaaaagtggagagaatcatttttggaagattggtctttttttcccccataaagtaagcctctcaaagtgagaatttatctaaaatatattattctattaccttgagtttgaaaataagcagtaatgttgtaatgctttgattaactacagaaggttaaattccacttttcttctttgctttttctttttcaactgtcgaaactttcgtgccaactactttttgatctcgctagggtatccatcttgtatttccaagaatacctttgtgaaaaaagtcatgtcaattaaagttgaatagttatgagcaattttattaataattttttttggcattacgatgccatgttttctggtttgcatgaaataattttcatttttttccttgaagttcaagttggggtttctgaaacggataattctggaaaataatgaagatctagtgagaactaattcactagttatggatttatgacttttacctgtctttattgccgcagataagcatcttgattccccata

SEQ ID NO: 66021 - DNA, 544 bp, Cucumis sativus
  Intron number 2 from transcript Cucsa.379790.2 (locus Cucs a.379790) derived from phytozome v7.0 (chr-ID scaffold0383 7; pos 208522 to 209065)
gaaggtaaagcttctccgcatttcaaacctaaaaagttactaaattttttggcaaatatcaatttagggattatatcaacttttgcatctatgcctgtgaagtttattattcgagtaaaatcaatttaaacctttttatatatattacgattacagaataaaatcatacatacataaaatttctttataatagtataaatacatgaagatggaagatgagaagtctaaattgataaatttatgaaagtttaagagtttaattaattgatataatcaaaagtttcatacaatttttttaacgtggaaagagtgtaaatcgatataatccttaaaatttaagggtatgaattgatattttttattattatttgaaagaagatgggttagaagtatagatttatgaaaagggtgttgatgaatcatgcaggagtgacctcatatagtgtggatttcacaacaaaaaaagtgaccataattggggatataaccccttttgatgtgttggccagtgtgtcaaaagtgaagtcagctcagttttggccat

SEQ ID NO: 66022 - DNA, 496 bp, Cucumis sativus
  Intron number 2 from transcript Cucsa.353790.4 (locus Cucs a.353790) derived from phytozome v7.0 (chr-ID scaffold0353 7; pos 105738 to 106233)
ctgctgcctgctggtaatagtaataaattatttatatttatattcacttgaattagtttagtcttgtacttcagataaatcttagtctttattcagcatacaaatttttaatctgggtttctttttggtaaagtattaattgacatcagattcaaatggaaacttgctaacatctgagtctttttcgattgtctttttctctccagtttgtttcattaatttattttcttatcaatgtattctccttgaattagcttcactactcttcctgatttggatttctttactattaggtgaccagaagagtttgcctgaatagagctgttgtttcttcatatttcataagcacaatttgctaataaattttggaatgggtgcttctgttttttttaatggatgctgttctgtgtgataaagggaaaattgaatgatgcctacgtttcctgtaatattactttcaggtcaaattcaagctggtcgtcagagccaacttcag

SEQ ID NO: 66023 - DNA, 928 bp, Cucumis sativus
  Intron number 1 from transcript Cucsa.348560.2 (locus Cucs a.348560) derived from phytozome v7.0 (chr-ID scaffold0348 7; pos 23666 to 24593)
gattgcaccaattttctactctcttcttgttactggtattctcgaactctccaactatttcttccttctctattgaaaaatcaatttagaactttgtgtaacgaaagaatggaggacttgtattgaatttgattttttttttttgttgattaaaatcaccgaatagcaatggaaataggaaaagataaaaaaaccatcagcctcgcgtcaaaatgggatttttcgaagtgatgtatgctgttttatgccttttagtttctcgcatttgtctgtcaattgaggcttgggtaatctgtacatctcttcggtctctcccgaaaattgtgttgtttccaatctcctaaatcatccaaagcaccacccaccatgagttttccagcatttctcttcttaaccattaagtattatgtttagcaatacttggtcataccaatttatgatttgtaaaatgttcttaagtaaaattgaggctcttgtatcatacccttttgaggcttatgcctcgccttcaagaagccagcctcaaaaccacctttagcctttaaaatattgagtacttctattacattactggcattttaaaaaaaataagaagcctttgatattcattttattttaataatcaataagaagccttgctttatgttgaaaaaaccccacgacatgagggtgtcagaagctacttttgctttgcattgaaatcgtagtgttgattatagataatagtagacaatttccattttttaacgctcaattgactttctgtggaacatgattctggatactactacaacctatgttctattctactctttggatgataaaacttttgaaatttgatgccgtttatttttgttataggcttacagccagccaaaagtttgttggaggtgtcttatcctcttcattgaattgaagttagctaatt

SEQ ID NO: 66024 - DNA, 1028 bp, Cucumis sativus
  Intron number 2 from transcript Cucsa.348830.1 (locus Cucs a.348830) derived from phytozome v7.0 (chr-ID scaffold0348 7; pos 281786 to 282813)
gtccgtaagggcactggtgggagatcgtctgttaggtaacctagccctagctttttcgtgtttggattcttatatttgattattggctttatgttgtagatgtaatgctgggtttgagtgctttggaatgttgatggaaatttaagaaatttaatgggatgaagatgaacagtggtacttcatgcctcaaattgaatttaaattattttaaaaatcctaaattggtatgactaagtattgctaaacacgatagtcatataaaaacacaaaagaaaaaaaaatcacccctcaactaggattggtttattctatggatttttaccttcagtgttcttaaagtcacaataataaaagtagtaatagttgtagtcataactcaaacctttatatgtttttttaagaatgtggtaaatattgttttgatcattagacaagatatagagattttaagtctctgtgccttttcacgaagccataagcctcttatagttcaacaaaggcatactcaacgctagaagttaaagccttgcctcaagatgggtctcgagatgttattctcaaaacctttttataacatttgtgcttcaagtttgtaagttaattagtggaaatcaaatataatctttcagtgtcttttttagttgaaatacttatagcattttcccattgtcattgagggaaggattaattagatatactttgttttattgagtaagctaaaagatcatggcactacccactacgaactgacgtcattccatcttttatgggatattgaagcaggaaattttaatctgagctggtttctctgtcgctgtcagataatcctagtttgtgcttatctgttctttttcaagcatgcacattaggattctcaggcagatcagattattgatatttaattcaatttgtggatttagtctgtagtgaataaaccaaattctgtatctggttttcctgatcttactgttttatcgcaaaattgttttgcagtgggattgttgctactgtctttggagctactggat

SEQ ID NO: 66025 - DNA, 863 bp, Cucumis sativus
  Intron number 1 from transcript Cucsa.365570.2 (locus Cucs a.365570) derived from phytozome v7.0 (chr-ID scaffold0361 1; pos 3410185 to 3411047)
gaggtgtgcgatttaacaaaatctgagctgccgaggtcaatttctcttctaaacctaatatctgatttgtaatttcccctcatcctcttgcccttgcccctctcattgcgatatgaaatttgatttatgttctttgtttgtaatcttctgattccaatcgccatgcctttctgatttccttcaaattttgtttcactttgtaaaaaaaaaaaaaggagtaaggagtgttctatgtctgctatactgaactaataaactcttcaataatgcttttggtggttttggggcttcaattctcagttctttgcattgggaggatgaggattttgtgtccttcgagatactttaatttttgtggcatggttatgtaatgatgagaatgcctgttcttctgttgtttttggagtctttcccccctgaatgttggtggaattaggcttcccctttttgaaattattttccaaggaagaattttgtatttgatttctttcactagtgaagttaaattgtttatttatttctgcattgactattatgatatgccttctggaaagaattttctgccgttatctgcatgtgggatacttgaaaatgattttgtgatcagtatttccttttctactttttttttttcaaatgcatttcttttccggtggtgctacccaatcatttctatcttgttccttgcttgaaattttcgattgttatattaatgtgttaatatgatgccttttaatgtgacgacattttgtattcagagtgaattttgtaatgtgataaatactgcatcttcagagctaaatagcatcacgtctctttaactcgaatgattctggtgatgccatctttcaggactctattcc

SEQ ID NO: 66026 - DNA, 761 bp, Cucumis sativus
  Intron number 1 from transcript Cucsa.310800.1 (locus Cucs a.310800) derived from phytozome v7.0 (chr-ID scaffold0299 5; pos 554284 to 555044)
tcttcttcttcagtcttcacctgacatcaagaccggtagagtgggaacgggatcgaaatccgattttcccttttcgttctcctctttattcctttcacttctttgggtttgcttctaatttctcttcaatttgttctgttcgttgttatttgttaaatgttcttcctcaccctctgttcctgccaattttggttgtcggattctgttttgcagtagaaattagatgagaatttcgtgttttagggttttttttgtttttgtttttgaagttactttatgtttactgggatggaattgaattgaatcgttgttactgttgtattgtttattccgtatttacaaatcttgtttggattatttgattggaacttttgtttttgtttgcactccaaaaattttaatgtatttgccgtacggagttcttggtttacatgtggtgtgtttttcatcaagcttcatactatttcatcattgattttctttggagtgttggaatagaagaatatgtggtttagaggggaagcaattcaggagggtgtattttttccatttagtatactgttcttttgcgtatttgacctacattttgaattgtagagaaattgtatcatgtaaataagttcaattataacttatatttacagttctgcctagctttccctagtgtttggatactcatattggaataaccttctgtctctgttgtcggtactgaaaacttgttttgttccctataggtggtggcatttatctgcagaaca

SEQ ID NO: 66027 - DNA, 728 bp, Cucumis sativus
  Intron number 2 from transcript Cucsa.310800.1 (locus Cucs a.310800) derived from phytozome v7.0 (chr-ID scaffold0299 5; pos 555100 to 555827)
cctttatatttggagtcattgctgagaacaagaaggtaacaatttgcaagcttcataaacaagcatatgatcttcatagttgtttgattcttactgtagatatttgtgcatttgaaactgtcaacagcaagaattaagacagtgattgagttggctgttgttgaatagtttatctcgtgtctattctagatactctctcatcttccttggacgttggatagattactaaattattgtaccttgaaattgaagtaatatatcactgcatgtttagtatgtattcattgtactttgtatattgcaacttcatgggtacgttggtgtttaatttagtatgtagttgctaatctatattcaggagaatagacaaaagcaacatggtgtcatgtcacccttccaaatatgcttttaggtttagtggggatttaaccatccatttgttggagcagtcatgtagatgcaaatgcgatagctagttaggtttaacgtgtgagattatgacaactttccccgtggcatgtgaatagtttgtttacttttttattttttttatttttatctttttgctattttcattgggccatacatgatcccactctctgcgatatagtagaagttacatacttttgtatcacaataattttcttcttattaatggtcactgactttgctgttttcttaacttgtggacagcctgcatctggaacccccatcccaggcaagggtat

SEQ ID NO: 66028 - DNA, 757 bp, Cucumis sativus
  Intron number 1 from transcript Cucsa.312610.1 (locus Cucs a.312610) derived from phytozome v7.0 (chr-ID scaffold0299 5; pos 1962611 to 1963367 reverse strand)
agggagatcaggtacttttgctattatgtatagttcacactgttaataatctgttatttcttagtgcttataaaatacttgccttgtggatcttagtacttctgttttttctcttgtaattttaattcaattaagttgggagatttctggtgcaaggccgacatgttaataaaagtttctcgtcttttatttcctatataccatatcagttgcctcattcttgtatgtgtgctattaggatttaggactatactcttcatagtgtcatccgtacttatgataatgttcttttggtaaaaaaacatttcattgataaatggaatccaggacaaaccccaaacatcaaagaagattacagaagtgagtgcaaattactgacaaaaaaagataaactaaactaaatctcatgtttttctagcatgttactttgctgtctaaaagcatgaatttgtgaactctttttccggagaatcgccatcgaaataaaaagaaaacaaagttgtactttacctaaaaaaagtgtggagtcaacattactattctctttctctgcatacacaggaagatattctgttggtacctgttacaaactgtttgtatcttctctttaacaggcattttcttttgttaggctgtgtagtctttgcatcatcaatatctgcatcaatcatctcatgaatgcacttacagttggtttatgtatttaaaattttcatttgtagacggtttggaacttggccggttgcaaaattattag

SEQ ID NO: 66029 - DNA, 697 bp, Cucumis sativus
  Intron number 3 from transcript Cucsa.360310.5 (locus Cucs a.360310) derived from phytozome v7.0 (chr-ID scaffold0358 8; pos 997924 to 998620)
tagaagtcttgagttgactttttctttctttttttcatctcttttcttttgctattataattactccttagtgtgttccctctaggacagatgtttattcagcacttccattcttcgaagtgtgatttttgtgttgagtgggtttaaattgtgattagagactagttacctatgatttcatttttattttgtctatctattactacctctggaatagtctccttccagtcttgttaaaattctatttgttaatgatcttgcatagcagtagaattatataacttttgagttgaattgtttagattagcaatttgtaactatcgtagcttaagaagattacttttttgttttttgggggtggggttgagtttgggttgtgatgtctatattgtacagatacgccaggtttactgcagtctgatacctttgaagctgctgcagattataatgcccggttggaggtataaaatttgctttcttatgaaatgaaatgctttcttttgctgaacattgtgacttgttgcatggagtgcaaaagaaactttcttagacgagcctccacgctcttcacaaaaaatttacagattttgtttctctctcctaatattgaatcactgattattcattaatttgtactgattgtaccttttaataccctgtagtacattgaggaggttttgcaaaaggtgaaacagga

SEQ ID NO: 66030 - DNA, 224 bp, Cucumis sativus
  Intron number 1 from transcript Cucsa.341860.1 (locus Cucs a.341860) derived from phytozome v7.0 (chr-ID scaffold0335 6; pos 4307615 to 4307838)
aaagtaaatttaatttacataaccaaaaattaatcaataaccctaatggctaatcatttagtttgtcacttcattatcgttcacacattcaccttaagtaattattcttcagaacaaattgtaaaaaatcaaatgcaatagtggaaacttttattaattaatgaccattttttctctttgtatctctctgattaggagctacaccaaaatcagtattggagctt

SEQ ID NO: 66031 - DNA, 894 bp, Cucumis sativus
  Intron number 2 from transcript Cucsa.341860.1 (locus Cucs a.341860) derived from phytozome v7.0 (chr-ID scaffold0335 6; pos 4307852 to 4308745)
acctaaccctagctcacgtcaaaagccatttgcaggttggtttggctttctttaacttccgatattattttctctatttttccgatttggagaatataaacaaacaatttaaagtcaacccaaaaacccatttaagactctgagtttggatatatagtttaacgtcaggcaagaaatcctgatgatgttatttcctcccccattagcatttgacgaacaataatttaatctctgaacaaagggtctttaatttctttaaataaaaacaaaaaaatattcttttatatccctttaataaaacatttaaattttgtttcctaacccatttcatttttatttttttgtttctaaaaaggtaggcttgttttcccctaatttctttactatgattttcatttcagatctttaggtttgttaagaccaaattctagaaacaaaacatatctaatttagtttcaaactttaattcaacaaacttttttggctaattttccaacgacaaatgattaggtatagcttaggtgcttctaattttttattttttgagctatgagaatgtgaataaatgattaaaaacatatagtaatttaatttgtgtgggagggtgtagagttgtagtgtatgattctgcattgagaagcacaatggatgctccctttcattttccttttgggttccctagaacttgattttgtcacttaacatttatcttattctagaaaagtcttacaatttttttttgaagattcattagaatgagtaaggtgtaaaagagagagtacaaaagttaaaggacaaaaaaatggcatctaaaagatcagcaactacaaggaagagactgttaaaaaaactaaaacacattattttttgtttttggttttgttgttcatgcag

SEQ ID NO: 66032 - DNA, 880 bp, Cucumis sativus
  Intron number 5 from transcript Cucsa.363180.3 (locus Cucs a.363180) derived from phytozome v7.0 (chr-ID scaffold0361 1; pos 781036 to 781915)
tttgtcaccgtgatattaagcctcagaatttactggtatgtcgttttccctttttccatcacccgacagtttccttttctttagttttcttcttagcttgtttgtttttatttccccttcctagaaaaaccaagctttttctgtgtgcctgtgtgtgtgagagagaaagagagagagggagcaggacaaaaggagctgaatcaaacttaaacaactatgtagaaagggctcaaatctgaatgaataaggcctaatggataattagaccttaaaattttcacccacccaaggcattgaactagcaagggactccccaagcttaatgctataattcctcccaaattagaattgccactgcctcgattatacagcaaaagaccaaggggattgaaacctccatcataaaacgccaatctcttgtaaaagccaaggcaaagtaacagctccaaagatatgaaaaatgttcttacaagtagtattctaaaacattattcaaggggatctaattgagaatgacaatacctatctgtatctatttgcacttgtacggctgcatatgttacagccacatcgacaaaggttggcaaaccaagaccttaaatcgtcaaaaatgtttccatgctaacagtttctaaatttcacttcatataaatatattagaatggttgagaacttcaagtgtgcttatgtatttacatagatgatcatgtgatactcttgatacaaaatcaatgtggaagaagtagatagactaggtctcctgaaaagaggttccttaaactgaaagattaaggtagaaatgatgggtctatcttttacctgctgctcacttccttctactcgttgtgcaggttaatcctcacactcatcaactaaagat

SEQ ID NO: 66033 - DNA, 512 bp, Cucumis sativus
  Intron number 1 from transcript Cucsa.360560.1 (locus Cucs a.360560) derived from phytozome v7.0 (chr-ID scaffold0358 8; pos 1186672 to 1187183)
tgctgttagctttttctctgtctgtgaagctgcaggtaatgggtttggtctggttctgtagtttttgaattgtgtttgatctgatcatataagtttcacaaatattgatttggagttgaatttggatctgggtgtgatctgaaatgagttgggattctgatttctcacttttccaggaaaagaaaacagtatgattagcttcatgcagagtgtgttttttctttccctttacgttcttaagttggatggttcagaaactagaagaagaattaatatgctaatcactagttgatttttagcttgcttttaagattggtgaaatccaacacatttcttatcatatggttctttctcttatcaaagtagctacaaaagctgcatactggaaatcaccaaaaatattaataatttacttcatattacgttccttgcatagattttgttccattttctgattttactgctgtcattttgcagttgttctcccaggcagattgagcggatcgcattct

SEQ ID NO: 66034 - DNA, 403 bp, Cucumis sativus
  Intron number 1 from transcript Cucsa.364220.2 (locus Cucs a.364220) derived from phytozome v7.0 (chr-ID scaffold0361 1; pos 1766336 to 1766738)
aaccaactttctccaggtaagatttacagatcaaaaggcactataaaaaagtattggaagaatctgaaatttgagtttaggttttttgattttgttttttgaattttgaaatgataatgtcaatgtatggaatgatacgaactttgttctttccactttcctttcataatgagcaatagttttgctatgagtggctttgaagtaaatctctttcttcttttccactaatcatgaatatcatttactaattatgaagaaaaatccacttgggtgaggcaaaaatgacatcctaacataatcctctctcttacacagctgttttttggttttcattctttggtttatttcttaaacacagactgatttgggaggagtatttgtttttcctttcctctgattttag

SEQ ID NO: 66035 - DNA, 1035 bp, Cucumis sativus
  Intron number 3 from transcript Cucsa.338340.1 (locus Cucs a.338340) derived from phytozome v7.0 (chr-ID scaffold0335 6; pos 1270136 to 1271170)
tcaaaattattcacgtggcaggaactaaggggaaggtaaatattttatttagtatcttcaacattgcatatatgcattgaagttgaggaaaaacacttggtttataagatcattggagtatcgtatatttcataacctctttgtgtctcaaccaaattagatttatgtaattttttatatttaaattaatgatattttcatcaatttataattcaagatccacaagagggttggagactccttttagtttgaaggaaatcaagagggtaatttttagctttggaacaaggtgcctattgtgatagcttcactatggccttcgtgaaaggaaaagtagtacattaaggaggtgaatttgttttggtttttgttgatgtaatcaaaatcatgctcacgaaattaaacttacataggatacatgttttaggagtgaaggaccttgaactttttaccttttagtctcttagtgatcttctagccttggagacaattttttgtagtcctctaaagctaggggggttggattttggtaatatttcatacaaaatatatgttccccagaaatttcacctcaaatcttgcagtgttttttgtattcctcctgtgatcttaaattttgttggtaactttttactatatcaatgagaagtatcttcttttgtagaaaagttacttattatccatcatttatttcatattcatacttttttcttaacaaataaaatgaatgagctggctagttttctttgaacgacatttgacacaactttgttaaataatggagtgaactaaatatgaatgcatagcgaatttgtaaaccaaaatttaactcacttgtgattgtctactggctatacaaattaaaatgaaaactttttgaccttcattcatatatcgctgatgcagaaaatttaacctcaaaacctggttaaagaataagtaagtcagtattgcaatgttatttgatcttctttcatcttcatgtcatcggtatattcagggttccacttgcaccttttgtgaagcaattttacg

SEQ ID NO: 66036 - DNA, 402 bp, Cucumis sativus
  Intron number 4 from transcript Cucsa.343070.1 (locus Cucs a.343070) derived from phytozome v7.0 (chr-ID scaffold0335 6; pos 5328244 to 5328645 reverse strand)
ttatcgagggaggtaatgttcttcattataacatttgataggctcctaactgtgtattggtgatcaatcacatgagtttatgaatttgaggggcgaggttttgggctcagtttcttgataataatgttcttggtggttgtctattgagacgtgtaaaactatatattttcatccttggaaattagaacttgaatgagacagttgttgctggatcttttacgcatgaaaaataatagtaaagaaggttaaccatctttcttttcttttataactatgtgtatgtgtagttagccaggctgctctttatacagttatctgttgtcgtgccttaagaattctttgattttcaacggttaaataaaaccaaaagtaactcattgtacctttctgcagggaattgaa

SEQ ID NO: 66037 - DNA, 426 bp, Cucumis sativus
  Intron number 1 from transcript Cucsa.359180.1 (locus Cucs a.359180) derived from phytozome v7.0 (chr-ID scaffold0358 8; pos 210081 to 210506)
ccagtaggcctttcaaggctcagatttctgtcaaggtaattaagttactaattactgtgatatgatttgtattccttacactcttctacttctagatgatatcaacatgagtttaacaaacgatgtgattacctatgttttctcgagaagaaagaaatgacatggtagaaattttaacataaagattctatgttcgaaggaaaataaagaaactaactgcttaaatcactatgtttaatcatctatatctattcataaaaactcttgtagctgaatcgaaattcaaatctatgaagctagatcatttggtttgcgtctctcttcttgaccatgtcaaatttccagccattcatgaacagagactttcatttttttttattaatgcaaaatctgatttctttcagagcttggctgtgcacaattttt

SEQ ID NO: 66038 - DNA, 1034 bp, Cucumis sativus
  Intron number 1 from transcript Cucsa.362200.4 (locus Cucs a.362200) derived from phytozome v7.0 (chr-ID scaffold0361 1; pos 167290 to 168323)
ccaagtaattaccatctctcttgctttaccttggtatattgctctttcatttgctagttttgtcgatctgatggtctttgttctgatttgatgtgtataaattaacgatcttgagtgtagggatgattatctcaataaaatttacttaaatcactacgaaatccaaagctttgagcttttgtgtatactcttagcactctctctcactcgtgagtatgaaagttggtgactagcgatgttaatcgggagggaaacaaggtggaagaagtttgaacactggacatttggttgttacttgactttgagtagttggagcttgaatatagaatctttgataccacactaaatttatctgtatgctaaaagatttgagcttataaactatggaaaatttgatttttttgtatataatctctcaacacatgacatgatataatatcaacacgtctggtcacttcattctccctgatgtcatatcatttaacactccttgattgtcagatgatacttcgatactgattttaaatttgcttccagatctagaattggcatttcttttgaataaaccagataaatatctctaatcatgcttcgtccttatgatattttgattttacattttttataatggtttagattttctttctatttgtgaaatgttagacttagggaatcctatatgaagtgcatgcatcatgatttgtttatgcagttaactgttaaggtctctaattgatgtagttgtcagtgggtaatgacactgaaaacatggttgaccaatatttggaagaagagaaaaaaatgaaaagatatatcatatatgtaagttataaatcaccattgttagttaaatacttaaattatagtaagttaattgtagagagtcagaattgaatttttctaatttaccttgaaggatgtccatttttttgtataaattaggaagacttttacatgagatgtaatgtgctgagtattttatgtctcatctggaatcaggacaaggcagctttcattttctgtgttgaagacag

SEQ ID NO: 66039 - DNA, 521 bp, Cucumis sativus
  Intron number 1 from transcript Cucsa.356870.1 (locus Cucs a.356870) derived from phytozome v7.0 (chr-ID scaffold0357 7; pos 1787236 to 1787756)
ctttctattcccttgctggggaccaagactttcaggtttgtgggaattttgttttcctttgaggttttttcttctttattttttttaaaaaaaaaattagatggaggaagtttaatttcctgagttttgggtctttgttttaatcgcctaattaggtgctgtttgcggattttgaatctcttgaatgcttattggattttatgtggacttaagttgaatctcttgaatgcttattggattttatgtgcatttaagttgaaatgttttctttttctttcttgaaattggaagtagaaaagtgggagtttgacatttattagccacagttacataataaaaccattaagtatgtagatgttattttcaaagagaagaaggctttgagacatttttttaattttattgcaaagttcatgattttgaaattcagtagtttctcaattggacataccaagcagtacttattatctttttttacccactctttataataattgactctaatcatcagaaagagctgg

SEQ ID NO: 66040 - DNA, 629 bp, Cucumis sativus
  Intron number 3 from transcript Cucsa.332520.1 (locus Cucs a.332520) derived from phytozome v7.0 (chr-ID scaffold0326 4; pos 302350 to 302978)
tgtgttggaaactattgcaagggttccctattttggtgagcttttaattgcttcatgcctaccactttgttaacacattcttgttgatttcttccttgaaacagagatgtttcgtttggtatcttacccatctagattctgcttttctgatttcagattcagttaatcaaatgaatttagtgaacatccatccatttgacagatttgttttttaaaatttcttttggatttgagatcctagacattctcgaaaacagtggaaacataaaatgtaactttgattttcatcgaatcccttgttttcaaatttttgtttttagatcattaaccaaaaattactcccttctcaataatggtagtctgttatctgaatgcagtgtggtgagctgcaaaaacaattttatgtcacctaatgaagaacattctcattcgcacaaaaatgggctctttaataaatatgcagattggtgatcaatttaaaataattggttctgctactattttaattttggaagccagattctacagcttctgtgggtgtttatttgaggatgagtactgtagtgtccagtttgcagttgtttctaatatctcccttttaaattgcagcgtttgtgtcagttctgcat

SEQ ID NO: 66041 - DNA, 636 bp, Cucumis sativus
  Intron number 2 from transcript Cucsa.320930.1 (locus Cucs a.320930) derived from phytozome v7.0 (chr-ID scaffold0308 0; pos 778813 to 779448)
atcaggtacccaagtcagctcattgttgtactcttttttctgttttcgaacaagtgattttgatggcaagcatatccatattttgatacaaaactgtccggaagacattgaacatcaaattgaaatgagataaaataatacacgggaagactggataactgtattgggttagaaatatgcgtgttttggttataccacctacatgcttcattgattgtgtgatcatcctcttcttttttattgatattcttggtggatgatcatgaaagctgttatctaaccgttggcagtagaggatgaagttatttaaatttatagaggattgatttgttttccttgagacaaacttcttttggaaaaattggaaaaattggaaaaattggaaaaattggaaaagtacagatctacaggagtttgtatgaactgttttttcctctcgttggattcttttagttgagatcggtagtaaggattagaaacaaaggcaccattaactgttgcagacagataacgggaaaaaaaccacggactccaagagatgcattaattatgatatctattggtctcttgttcttatttcagatttggagtttgttggcaggttgaatctggcttgatcaccactggtgcatcagt

SEQ ID NO: 66042 - DNA, 880 bp, Cucumis sativus
  Intron number 1 from transcript Cucsa.337990.1 (locus Cucs a.337990) derived from phytozome v7.0 (chr-ID scaffold0335 6; pos 991503 to 992382 reverse strand)
ccttccttccaattccacttcttcatcatcactcggtactgtcctctctctatgttgtttcttcgaaaactgaatccaaattcattaacttttttgcttttaagttttatctctattcaattaatgctcgagtttatgcttcggatcttgtattcttccttgtgctctgctggatatctgcgttctggattgggtttgttgatggcttgttttatttccttgattgtttgactagtgtagagactaagagaattaagcatatctggtggttgctttgtttctggcagtgatgctttactttcttaaggaagacccgttatcagttgggaaaggaaagtgtaacttggaagggagatgcttagtgaactaattatctacacggtgattaagactagtgttaccactaactttttcctgcttagaggaaggggaatcaaactcaaacttcatccacttcaacattttgaattagtctagtgggtaaatgaaatgggtcttccttaattttaatgataaatacatatttttttcttaaatatactatttgacttctctctgaaacgttacagcttcacattaaaattcgtcttctgacgattttttcctctgatagaatttagttgattttatttcaagtcaaagatgtggcctaagaaatgtcaaactaacaaagcaatatctgacttgttctttgtatatccttcatctttaacacactccctttttcagatgatgtgtgttccttctgggtttgtgaaattgttccgtgtttctaggaactttaaaggttttaagttatcgttgcaatcaattccttgtctcaaagtttatctcttatactgcaggaaattccacaattccaaaccaagtttcaatcact

SEQ ID NO: 66043 - DNA, 677 bp, Cucumis sativus
  Intron number 3 from transcript Cucsa.397930.5 (locus Cucs a.397930) derived from phytozome v7.0 (chr-ID scaffold0415 8; pos 475877 to 476553 reverse strand)
aagtggagagtaagggaagaacgacatataacgaggttaggtcattttacagcttcgtgatttgtaaaaatttcatcaattgtgttcatatgaaaagcttcagtaactatgatgatgccttttcttttctttttattggttttgttaattaagtcttgttttagtaactattttggatcatttttgtcgatgtttgagggtgctatctcattgttcaatgtagtcatctataccttcccttcttttttttttctcccagtgtgatactttctgcctaccaatgaggctaccattgcctaactaaacactcatatcaactctagttagttttaaaattagtcaatatattaaaattttaggtatcttctattgaattatgccgtactccaggaaacttaattgcttgtaactgctcatcactgtgtcaatataattcaaaggtgctgcaaaattctttattagaaaggaaaaaagcagaaagaaaagaaaagaaaaggagaaaaggctagagcactgtttatgattgtctcaagttgcaactagaaagctgcttaaacaaggattgaaccattgccagtgatgcactggtgtatcaagatgtttggtttcacttttcaatcttgtgttctctcttacgccattctcaatttgtgaaatgtgtaattttcaggttgcag

SEQ ID NO: 66044 - DNA, 584 bp, Cucumis sativus
  Intron number 3 from transcript Cucsa.342980.1 (locus Cucs a.342980) derived from phytozome v7.0 (chr-ID scaffold0335 6; pos 5271126 to 5271709)
aagcttagagcttcatcaattagttcgccacgctggtaaattttcccttttctttttacttttacctcttctttcaccactatatatattttttccttgcatgttccaaaaaaatggtcccttttttccttttaattggtaaagaatttagtagtaaaagaagagaaaaaatttctattattgaatcggtcccaaaatattatgatttaatttgtttccatcaaaatgaaggaagcactttattggtatagttgaaagaaaaaagagtaatttgataatagcataaatcgctttcatgaccatggggactctgcctttactgatacaccattgctctcaaggtttcaatgctcattaacattaacattaatatttacagctgtgtttctatgttatgacgtgtcatggttttttatttttaccatattgtaaaaaagaaaaaagaaaaaagaaagaaaaatggtgcaggacccgttgacccgaccgacagagagatacgtcaaaattaaatccattaattttgtttttttttatttaatttgattatagtatcggaattgggtcctgaggattctggtcgaaac

SEQ ID NO: 66045 - DNA, 665 bp, Cucumis sativus
  Intron number 4 from transcript Cucsa.341010.1 (locus Cucs a.341010) derived from phytozome v7.0 (chr-ID scaffold0335 6; pos 3394935 to 3395599 reverse strand)
ctttctcgtggatttaaggaccaggtttgtaatttaactttcatgactctattgtcctgcctgtgagagaacttagttttagtttattattgcactggttttaacattttccttttgctctatctactgtttaattcactttttaagatgacattcgttgttgtgttgactgtactataattttagttttgccgaggccatttttatttcctccatgataaagagtgttggctggctttaaatcttcatggtgtagtgcgtttgttttcctttatctaaaactttacttttttatttattttcattaagaatctatgtaatagatttccaacctgacagtttcttgttttcctttgttatgtactgtttgagttttctatttttattttcgtaattatatatctcagagatattcaaaacgttgtaggatgctttcaaatttgatgctctcttcaatcttttattcgagaattattggtaactaagtttgtagctgttcgcttattttgctctcatgtggtgttgtgctttgttgcatctttttaaatttttacttccatcattcttcaatgtacctagtccatttcttattgccttttgatctgattgcatcttcgaaaaatcttctaactacccttctacatgtatatctccattgcagattt

SEQ ID NO: 66046 - DNA, 329 bp, Cucumis sativus
  Intron number 1 from transcript Cucsa.311710.1 (locus Cucs a.311710) derived from phytozome v7.0 (chr-ID scaffold0299 5; pos 1247530 to 1247858 reverse strand)
ttcagggaagacctttggcgtcggcgacaaacttggtttgctattgtttctttgactttttctcccatgggaataatgtagaacagctttcgtgcatcctcatttgttcatattcatctttctttttctctcatgggatttacgtcgaacacctatcgagcattcgtatttgctcatattcatcttttactccatataggaataacgtcgaacatctttcatgcattcatgttcgcttatattcgttctttcatttctcctagaacacctttaatttggagcatctgtattagcttatattttcttctgtttcgtggcagcgttcaact

SEQ ID NO: 66047 - DNA, 898 bp, Cucumis sativus
  Intron number 1 from transcript Cucsa.391750.1 (locus Cucs a.391750) derived from phytozome v7.0 (chr-ID scaffold0406 2; pos 163401 to 164298 reverse strand)
cgtctgtaatcgccggtcagtctcaactctttagcctgcacttttttacgaacgaattggttatggtagttaggaaatgtgctaagaataatttatgtcattcatatttgtgaattatgagctacaaataagtcttcttgctctcctccctcctctgctgctgtttgttgctagatcatctagtgcgtcttgtttgataatcattttatgtttagctattacctcactttttcatccaatgaatatttaagttccaatgaacatgctgataaccatttcgttttttgtctttgataattgagtccattttctgtcaatttcttataatgttttcatctttgttgagcgaagttaattgctaggcaaatttcaaaaacaaaaacaagcttttaagaattactttctttagttttgaaaacttggctttaaaacattgataggcagtatataacttagtatggaatttaggggcgaaataagtgtttgtaggcttatttttcaaaaactaaaaaccaaaaacccaatagttagtgttttttttttttttttttaaatggttatgtttgtttcaccccaatgttaaaagaaacattgaatttctagtcaagttcaaaaaacaagtctttggataaaaaaaaaagaaagtaatggatgaaaatagtgtttataagcttaatttctaaaaaactaaaaaaaaacaaaaaaatcaaacggttatccacgggtctgagattaaggctagttgaattgttaggattgctcatctttccatattgagtctctcgcattctaacatattttttaatttcactgcaaaatttctaaactgtgcactaaaagctcatttgaagtccatttattggttatttgtttgttttatgcgttaaaaaattgcagc

SEQ ID NO: 66048 - DNA, 976 bp, Cucumis sativus
  Intron number 1 from transcript Cucsa.356020.1 (locus Cucs a.356020) derived from phytozome v7.0 (chr-ID scaffold0357 7; pos 729314 to 730289)
agcctacttgccccaaaggttattgcacccttccttggtctcgcgtcgggcatctcgcatgtctccttgcacatagggcttgtcgcgtgccttacgcgcaagctatgcgtccagcacatgcccaaatgcatcactaacctctttcttcaccaacacacatacccttctcgcctagcaaggcttgtcactcgattagtcttccacttgcctaaaaactgattttcgtccaaaaatttaaattcactttgaaaaattataactaaacatccttaatcttttgaggaaactttcttctacaaagtttcttagaatttacttaactcgcttatctcaaaatttcaactcaagattcaaagggattcgttttgaatccctctcctttcaagctagacaattgtctctaaatgatgaagattttaggggaaaaaaagccttggaatttggtgggaaaatacaaatcaagcaggacacccatgttttgctttcatacaaaggctcaaagatctaaccaaaccaattcgagtatggcaaacaaataaaattagatcaatgactttgacaaaagaaagccttatatccgtgagatagatgccttggatggagaggaagagctaaactcttatgatcaaacttacaacaactgtagacaagctctcaaggctaacctcaaccaactcattaccaagaaagctcaattttgggcctaaagagcaaagaaagcttggctcaaagaagaagatgaaaatacaacaattcttcataaatgttgtacatcaaaacaaagaaaaagccttatctctgaaatacttgatgaagagggtaacatccacaacttgaatatctccattgtggtatcttcgttaaccatttcaaagatctttacaatggcagtggtaaggagtcctttctcatagaaaatctggaatagaacaaaattgtagatacccaacactcctcgctttgtgaccctttcgag

SEQ ID NO: 66049 - DNA, 638 bp, Cucumis sativus
  Intron number 1 from transcript Cucsa.310720.1 (locus Cucs a.310720) derived from phytozome v7.0 (chr-ID scaffold0299 5; pos 467371 to 468008 reverse strand)
ttcccataatcttctccctcatcggcggaaaggaggttagttttcctcttccttcttcaatgccgttgtttcccttccccccctctttttccgatcgttttgatgcattttggggttttttttgtgcctgttgttcttgatttcttgtttgttctgtaatggtgtttctccgatctctgcatgtttaattattttgttcatttgagaggatttgaggatgagttcatggtttttatcgatttcggactgttttcatggtcactgttcgcatgtttaattacagatattggattcttcatctggatttttttttttttaaaaaggagattaatggactttctagaaacttctcgcccttttgattcatagatttctttgtattttctcctttttttgcctcattgaaacttctggtgcttccaacctattttccaatcaaatctgtttgtattttccttttcttggtgttatttgtagggaaaactgaaaatgatgattaagatgattatttcctttatcgtcatgctgtctgtttctcagttgggttaattttccatttttcttgttcttcttccgttgaaatgtctcattttcatgttacaggactcaagcttagccattgccagagacaagcattt

SEQ ID NO: 66050 - DNA, 771 bp, Cucumis sativus
  Intron number 1 from transcript Cucsa.350840.1 (locus Cucs a.350840) derived from phytozome v7.0 (chr-ID scaffold0350 4; pos 272821 to 273591)
aggtacccttttggttttttcgctcagaaatttgatggttcttttcaaattggttttgtgggttttctggatttcgaattgtctctctggtttttgcttttttgataatttctgattcttgtttatcatgtccaactatggcatacgttttaattctctttatgttttctgtttctgttctggggttatattgttgggtttggtttgtgtaatctgtgacaaattcaaaatttgcattactcgttatgtgattttcctggccttattcttgctaccaataatttccctcacaagagcttttgaatgtcagcaccatcgtttctgtattggtcgaatgactagacgttgtcttgggtatgatggagtccattattggtttagttcgaagactgtggtacaccatcatttcatgtctctttgtattgtgagttatattccagccaaaaagttgaaagaaagagccaaaactgtcacatcattgtagagaaaattctgaaaatcttcaaaagtggtactatgtgcattctgttttggcatgattcgtgttaaaatttacatatttttcagaagaaaaaaaatcctccagtgatttagctcattaaaactcacatgagcactttgttaggaaattagactcaaaatgttgccatcccagaactcgagtgttcttttagttatatctgcagccactgtctttcaattcattgtggcatattgctgtttttcatttacagaagatttaccaataacattttgtgctgcgtttcagct

SEQ ID NO: 66051 - DNA, 523 bp, Cucumis sativus
  Intron number 4 from transcript Cucsa.309010.1 (locus Cucs a.309010) derived from phytozome v7.0 (chr-ID scaffold0297 8; pos 991443 to 991965)
ctcctgaattttcaaaggatccacgccaagtaaaagtgagtggctgcatttttgtttgtaactttcctgggctctatgttaacttatattgattgttatttctcatttatattttagtatgagagggtggattgattaattggcataataactaattcactatagaatatcatatttttattttccatcaagcgcacatattttctaacagcctaattttgtggctttcttaatcattaaaaaaaactttttggaaaaatgacgtgtttatgtggtactatgtcaaggttggtcatggtgttcctttttagtatatgcaataccttctccttcctaactgatatcgtgaataggttgatgctatattttttgtatcaattcagcatgatgcttttcttcagttttgattcgtttctttctttcatttcctcatattttccttcgatcttgttataactcttggtttaacgatatggtgcagtgactgtctaacaaaacttttttttcctcttatgtcaagcag

SEQ ID NO: 66052 - DNA, 865 bp, Cucumis sativus
  Intron number 2 from transcript Cucsa.359320.1 (locus Cucs a.359320) derived from phytozome v7.0 (chr-ID scaffold0358 8; pos 286808 to 287672 reverse strand)
caatcgctgaaaggtattcttttgttttaatttatcgacttcgtgcattttgaaggatcccaatttagcattgtctatcaagcgaaatgtacaatcttgtgcgcccctcttaattgattttactatttaaattggcgatgtgtggcttcacttatattttttttcactgtctttcatagaatagcattaaatatcaatgttgcctaagattgcttaattattagattttagtaattgattaaaaaatgaagttttgtggtggttggtgtctaatgactctaagcacgtgtttagaaggattaacttttttggtagaaatcttggatggtcgtgataggcgattggtgattaagggaggtattagtaagaggatgattcaggagaggaatgatgtgtgagaaatcttgtaagtcggttggatccatgtagcagccaaaatgtcagtgaattcgtgatggatatatgtaatgtacatcgctctggtctagggaggtatctttttcgttgccttgggctttgggaggaatgagaggtctcaaactctcctttaacttggatttcatatgaattgatttatatgtcattcaaaaatgttttctgtttctttcctttggctttgagaaaggtgggagctccaggaatttcttcattgactagtatgtaaagatttcaataattggtttctataaattcagaaggtcgacttttgatcttgtgtttatttgttggtatataggatagcgcccatcttgagaatttgagttgtcgatggaaggtgtgattgtaaaattcattaaacggttttttctatattgtttgttattttgcagagataaagtgtttgagcagcagaaagtgttgtatc

SEQ ID NO: 66053 - DNA, 687 bp, Cucumis sativus
  Intron number 3 from transcript Cucsa.312170.2 (locus Cucs a.312170) derived from phytozome v7.0 (chr-ID scaffold0299 5; pos 1661117 to 1661803 reverse strand)
agaattgagttagtcatcacatccccattgttcaggtatcttttcttagaaaccgatgttattttttaagaaacatgcttagatatagatggagtggacggattttccctacatgtaaaattttaactaatgattgggacgtctagaattacagtttctggatgagaactaactcatagtaaatggtgtgaatttgaatcatacccaaaatgtgtgaggcaaagcataacaagcctttgccaattctaaatgatgcaaattgggattgatacagtgacttgttattatttgcctgacctctttatgaggttgtcggatatcagtatgtccaaagatcttttcccttattctcgttgtgaacctcagataatttgctcagattttatccgtcgttgttcagctattaggcaagctcaatccttttaatgttctatatatgtttgtttaaatatttagaacttaattttgaatgtttatgtgcagtttgacagattgtgtttaatattttttccctcttaaattgcaagttgtcaattagcataaatcttataatatagtagttttatgcttatttatccctctgggtgattttccttgtgtctttctaaaattttctttcttttcttcaccacaatgcttgaatttcaccctgctaatcaaatatctgttatggttgcacgtaggact

SEQ ID NO: 66054 - DNA, 640 bp, Cucumis sativus
  Intron number 1 from transcript Cucsa.339070.1 (locus Cucs a.339070) derived from phytozome v7.0 (chr-ID scaffold0335 6; pos 1808667 to 1809306)
acaacaacatctctctcggcggccgtggaggcactgtgagctctctctctctctttctgccgctgctaacttactaggtttcttggtcgagttggatccttgtatttagtatggccatggcgattcccttgtgttttcaaaccctagctttttaactcctccgaaattccatatgaacttacaatgtggtatacggcgcttctgtgcctttccgtacctcttcctggctctgcggaagggaggcggtgtcaattacccagaataattagtgattttccaggaattggagctttttccacatcgcgttattcttctttgtaaatttgtttggggatgggatgtacttaaagttcccaaatttcataaatttgattggttgttattgtttccgagcgtcgtctgtggggagcatgggggttaagggttattatatttcgggctctttaactttttatcgttggcaggaggatactcaacttgaataaaggaaaggaaatgatctttaattgttacattttttttttttgggcttttgtgggctgctgttaaagtttggaatgataaaacataggtaattctccttcatgcattatgtttcaatgcagaaccctggccagcttaaaacagatcaaagaggtat

SEQ ID NO: 66055 - DNA, 958 bp, Cucumis sativus; identical to SEQ ID NO: 65443
  Intron number 1 from transcript Cucsa.342380.1 (locus Cucs a.342380) derived from phytozome v7.0 (chr-ID scaffold0335 6; pos 4719592 to 4720549)

SEQ ID NO: 66056 - DNA, 764 bp, Cucumis sativus
  Intron number 1 from transcript Cucsa.337440.1 (locus Cucs a.337440) derived from phytozome v7.0 (chr-ID scaffold0335 6; pos 515606 to 516369)
ggctctacttttactcaacacccaggttttttccctctctctctcgaaatttttacgtgaaagcaaggaaaacaggatagtctctcgcttggggtgttctttgcgctttataaggagcttcacggagaaattccaggactactccaactcgggcttgcgagtttgaactcatcgtgtgacttgaatttcatctacttttgataaattccagtaggttcatggatcaacacaattttcttctgtttcttgttgactataagtttgatcttgttgagaatctagttttcttgtaaattgggttttacgtttttcctaaaatgattcttatctgatttcatttttatcaaatgtcattagttaatcgcttgattgttgttgtgatgttggctgctacatgtctattgttctggtttgttagcgttttctttttaccaaattagatgttataatttatcagtttttgcaccatgtggttactgtcattactattgctcctactacattgttgttatggcaacgtgtttgtataactatggatggagtaccaaactgtttattttgttgttcctgtattgattttgtccctttttttaacccttcactgtttaattgttctgtatattaggggttttcatttacctttttgggtttgatatcgttggatgcagtgattgtaatgggctctcgtaaagtttcatactatcttcttctgctatgctttggtattgtggttgtatctgttagtacattctttgccattggag

SEQ ID NO: 66057 - DNA, 351 bp, Cucumis sativus
  Intron number 1 from transcript Cucsa.337120.1 (locus Cucs a.337120) derived from phytozome v7.0 (chr-ID scaffold0335 6; pos 276971 to 277321 reverse strand)
gctgttcgtcgccggtgctacagtttagagtcttggtaagatttgatagggttttactgagagtttcgttttggatacccactattatttggcttcattatttgatttaggaggttggaatttgatttaaggtcgattttggcaattttgttttgggtttcgaagcccgaatcctgttttcatatgttaataatatgtccaacccgattccaaatttttattcaattcgtggtagagaaaattttgttcttctttcttctcgtaattgttttttcctatagttgcttgtattcatatttgttctctttcatcaatttttcatttatgttagaggttgatcaaggagtctaa

SEQ ID NO: 66058 - DNA, 755 bp, Cucumis sativus
  Intron number 1 from transcript Cucsa.340150.1 (locus Cucs a.340150) derived from phytozome v7.0 (chr-ID scaffold0335 6; pos 2648323 to 2649077)
gaaacggtacggatttcgttttcgtgccttttcgagatgctttgcagctttttaagcggtttctaggaactgggggttgaaggagaatcttgttcatttttatttttcttctgggttatggggtttttaaatggcgtttgttagttttaggagtctgccacagatttgaagtgatcgggtttttggtttgcaacttgtgagttcggaaattactcagcttttttttgtttgtgatcatgattggaagttgtcaaatgggttgaatgttttgaatgttgaagttgaaaatatttaaaagtcaagtgaaatcgtgttgtttattaggatcttggatctcttttctctttcgtaaatgttttttcctcgtgagaatgcatttatattttgagaacgttgcaaattcatttccattcttcagccatttttgacagacggcggctctatcttgtttgaatgttccttgttttcataccttcgtttggttgtttcttctcttagtcggtaaagaagcgtgtcgtaattgaatacacagcttgctattttttcttttaaatataaagcttgagatcttttctaaaacttcatttgcaagagagaataatttataccctttggcttgctgaactgctatttcatccttttggatatacgggtatctgccttttagctgaggattttggtttatttaggctgattttattgcctttatttgttcatcagacaagaagaggttcttaagtttcggaagaatttga

SEQ ID NO: 66059 - DNA, 437 bp, Cucumis sativus
  Intron number 1 from transcript Cucsa.392790.1 (locus Cucs a.392790) derived from phytozome v7.0 (chr-ID scaffold0407 0; pos 69291 to 69727)
gagattccatccacaaatctggcttctctacacaagtaaactaaacccttaatatttgacttcttctaattatctagctagggtctcgtttgccaactattatgtttttgtttttatttttttaagtttctcaaaagttaagtctatttcttccatttttcttgactaccattgtttgcgtccttttttttttagtaaagaagttgaattattagcaagttatcttcttgggttttaaaacttgggttttgaaacttgggtttggtgttttgaagaagagtaaaaaaaagtagataagaataagagtagagtaggtgaagtgggggggttgtaaacttaattattccaagtaaaaaaatatataaagagtagccttagcttaattgtgtggcagtgtgttctcttaaaattttgtttgtatttacaggattactcgg

SEQ ID NO: 66060 - DNA, 969 bp, Cucumis sativus
  Intron number 1 from transcript Cucsa.339610.1 (locus Cucs a.339610) derived from phytozome v7.0 (chr-ID scaffold0335 6; pos 2216426 to 2217394)
cgcggatcttgctcggtttatcgttggcgttattggtaactattactattcttattgagttattaagtgtgcactctttgaatttatcattaattctatttactaacttcttgaaagaatttaaatttagtttctatactttaaatgaatcatggaattagtaatttaatggttgtttgtagttaataattttaaagaaataataaaatgtatagagaaggaataatagataaaagtgaaaaagtaaaattgcaatatatataggttagattaaatttaaatgtattagaagtatccgaattaaagttctaatcttatataggatcacttgtattttaaaagagtactatctctatattaagtcattgaactttccatattatatttaaatacaacttaaatttgtctagatggtcattcaactattcaaccttaactataatataagaacaataataataaaaacgaacctactatccacaaaatcttgacctaaaaacaacatctactaaacttttgataatgttataacatataaaatttaaagttaattgtacaaatttggagcaactactcaacaaacgaaaaaacgaaaactaaaactttaaagcctctcaaaggtgttttttaaaattagacttattcgaccgaatattaaaaatatgtctagaataactttctaaatgtttaaaaaaatatttataaatgctcatcaagtccaaactttaaaggtagtgcatcgatagcaagaacacgccggaaagatgttggtgtggattgaaaagaatatataaacatttgtaaaattaatccaaacattaaacttgtaaaataattaaatctgtattgaaaaaaaaaagctcctactaattattttgaagattagttaatagaattagaaaattgtttgtttgaattaattattatgtctctaaattaatgctgaaactgaaaaaaaatgtgtaggaa

SEQ ID NO: 66061 - DNA, 590 bp, Cucumis sativus
  Intron number 2 from transcript Cucsa.378770.3 (locus Cucs a.378770) derived from phytozome v7.0 (chr-ID scaffold0381 0; pos 291413 to 292002 reverse strand)
aaaagtgagtggtttttctattttctgcttcctaaaactgcctacattttgctcggattatacttttttacttagcttagtctgaattctgtaggtctgatcttttagttggagccctttttctggagggtgtcttcccctttcattttattcccaatggaagtcgttgcttttttaaaaaaaacaaaaaacttagcatagcatgaatgtagcatttcctaacgtgcgtgtaattttcactggagtaatggcgaatatttggaagacaattcgatagatgggttttgacacaaatgctcaatcaaatttgttaaggtgaatacaactaaattgtcaaatagttcgatgaagtagcattcagttctaggcctttctttttgtgtctatctattttcagatagttttgattataattatcaggtatctgtaagaggattttattgctagaatttcaatataatttagtgaatttattagttcccagcattgctggatcttgattgaccagcgatttgatgtctcagaatttcaaagcaaaatagaataattgaatagttgcttttttctgtgtccacgacactccaatttgc

SEQ ID NO: 66062 - DNA, 902 bp, Cucumis sativus
  Intron number 1 from transcript Cucsa.373460.1 (locus Cucs a.373460) derived from phytozome v7.0 (chr-ID scaffold0372 6; pos 365204 to 366105)
cgagatctgtgtgtttctatcattcttcttccttaacttttcgttaatacggcatcttgtttacttatgtacagaataatgactacttagggatgtcaattttccttcgcaatattcactattcaagccttactgaggtttgaggagttttcatttcatagacccactgatgctatgatttagtttgaccccttgtttttttttttttttttttttttaaatattctttgtttttatttttgtgtcaaaattatattatttgatcaatgacatgctaatctattattagtaataagaagtaaactgttgtttatctaatttttttagtttggatgtattactattttgttggaaggcttgaatgaattctagaaataatttgtttcaggcgtgcgccttttcttcttaataaagttttcattaggaatgggtgtatttactttcaggtgaatttgtttctttttcattgcctttataatttctttatggaaaaaatgtatttgccaatttgaatcaatagagtcactgatccttcctatcatttggttttttgggatttctctctggcttggtgtgatagatgggtgactgagggaacatcctttattggaaatgctcttattcttcatagtttgtttctcattttctcacctttacactttgctgctgctctcattgacagtcaactcgttttggaatttgtgatattgtgtgtattttggggtgaaagttgtatttaataagactagtgacagttcattattgattgtggagaaattcatgaccatctaattttaatttgaacaagggagaatgaaactgattgggcaattggatacccattgcatgtttttatccaactggtactcattttttctttgttctgatattcttcaggaaca

SEQ ID NO: 66063 - DNA, 605 bp, Cucumis sativus; identical to SEQ ID NO: 65952
  Intron number 1 from transcript Cucsa.391650.1 (locus Cucs a.391650) derived from phytozome v7.0 (chr-ID scaffold0406 2; pos 97292 to 97896)

SEQ ID NO: 66064 - DNA, 711 bp, Cucumis sativus
  Intron number 3 from transcript Cucsa.352790.1 (locus Cucs a.352790) derived from phytozome v7.0 (chr-ID scaffold0353 3; pos 511213 to 511923 reverse strand)
ggcaacaatttgcaatatcaatttgtggaaaagaagtacgtgctccaactctttcaatctgtttttcttgtttattgcttggcatggtctcctttgattttcctcgggtactgctcctgagagttgaatgatcgcagtgttgctttcattcattttcttggttcaacgtaattagttttgtggattgagtataatgtagttttgctgctacaataaaagaactgctctaagtgggggaacgataaaaatgagagatttgagagagattttgtattgagaagaaaccgttttcacctttgtactcgaattagaatatttttcagggaaaccaactaatagatggacccaaaattactgcgtgttcacctatttcattgccgcaattgcattgtgatattgaattttgacagttttccaatcaaatttctcctgtacctataatttagacactaatttatcattttaccatttcattcttttgtgaagtttgattaaattaaatatttagctaaacacaatgtaagaaaatgaaactaaattcccctccttttttgttatgcattttttcatgcaatcatccagctaatagagatatatgttaggtcctattgaggaaaaagaagaggaataaagcatatgcatgttgattgattgcattttttcttcctttggccagatttgctactctgcttcaccagtgtctgaattgta

SEQ ID NO: 66065 - DNA, 702 bp, Cucumis sativus
  Intron number 1 from transcript Cucsa.310610.1 (locus Cucs a.310610) derived from phytozome v7.0 (chr-ID scaffold0299 5; pos 360512 to 361213 reverse strand)
ctcttcaatttctcttttcaacatcaaggattttggtgagtttcttctttccaactccgatcctccttatacctcttcaattctctactttttctttggatttttactgtttttttcttgtgtatttttgtactgataagtgaaattaatgaagttttgtttcaaactgatgtatatgttctcttatccaacgaactgatttgctttggtttgatattttctcagtttatgaaatgttaggtttagaagtaatggtacttgcgtgttactctttatgtatttggtcattaagatttgatttccgcgattgtgaagtgattaaatcttttacttactgaatgttagctttggatatttggattttcttctttgaatcttggttttgaagtgggtttgttgttgtacaggatttgattcttctgatctttgtttttcttggtgaagaaaggtagatgtagttagatattttatttctgatcatccgaattatgcttccaattgctaaagaaaatttacattgtgtgtggaggggggattatgtgatgcagctctgtggagttttcttgatctgaatattgtatgatcatgattgacttgagtgctatgagtttgttcttacatcttcattcttcctgcgttttatttttcgggttaaattgttttgcaggaaggattggacaagatagcaatcatttctccatc

SEQ ID NO: 66066 - DNA, 440 bp, Cucumis sativus
  Intron number 3 from transcript Cucsa.394700.1 (locus Cucs a.394700) derived from phytozome v7.0 (chr-ID scaffold0410 0; pos 519129 to 519568)
gaagaaaggcaactgtcaaggatttttgtacttttttgtctaccaagagcctgttttgtattctggtttatcaaattagttctctggtgccatatggaaaaactgtcaaggttttagtgcagttaaaaaactttacacatatcccatgattgtaggaagaagaacatgagttgtgctataaacagggagttaagtaattgtatggttatttgaagagttctttgctgaatctttgttctgaaaataaatgagccttttttgaaattccaacccatccctatgcctcttgtatgaaatcattacctttggtttgtcgtggtatttgttaaagtccagatgtaattttacagtactaatattatgatttgagttgtgatgttgtttgctacaaatttcctacttcagctgtcatattgccatcccttcaacggctccaagca

SEQ ID NO: 66067 - DNA, 630 bp, Cucumis sativus
  Intron number 3 from transcript Cucsa.312660.2 (locus Cucs a.312660) derived from phytozome v7.0 (chr-ID scaffold0299 5; pos 2007359 to 2007988 reverse strand)
ggtatgtgagaattttatacatttcacgaagattatgatgtcaatttaatccaagacatgcatagttctcacggtaaactatatgtctttaatgtttgtttgaaagattttctgagcctgattgacctactaaagattcaaacaggccaatcgtctttgatctactaaagaaaagacaatttaaatggatttagtgtaaatcagctcttagagtgaccatttcctcaaagtttggaagaaggaagtttaatggtcataatctcggttacaaactctcaatagaactcatgaactgactccaggactaatcactcgaacacaacacttttgaattttccttaattttgtaagtgaaagaatgtaacatataggacgagtaaagttgtttcttatatcaaaataacaaacaagaagctagaatatgtgtagaagtaaacagatctatctttaaagttcgctgaggttgctcagtttttgtatttgttccttttttgaaaaaaaattatgagatttaaatgttgtgactttttccttcgtgggttgttagagtaggaaagtcatttttcatttcatgattttgtcggtggtagagttactgcaaacattcctttgatttagccagatatctgt

SEQ ID NO: 66068 - DNA, 814 bp, Cucumis sativus
  Intron number 1 from transcript Cucsa.339690.2 (locus Cucs a.339690) derived from phytozome v7.0 (chr-ID scaffold0335 6; pos 2250638 to 2251451)
aatttcaagaaagaaaaggcaaggtaaatgtgtatctttatttatgtttataatatcctttttaaattatacttcattaactactctactttttctttttcaaaataataattactctagttttttaattaaaaaaacaagtacttatgataggtaaaatttgttttaaaactttttaaatgttcagtaattagtaatatcttttttatattccattgattccacaggagaactaaatcctctttttaacttatttggagcaagaactaagttaatgattaaagttgcaaaactttccaaggttcaagttaagcgtaatttgatgaaattgagaagttatataacctaacaagtttagaggtgaaataggttgtattgtactcgtaagtgcaatggtgtatttattaatttaaatatattgcaagtttaagattagaattacaataatgctgcttactaaatcaatcaaaccaagaaaggtaaatcataatgatttgtgttgaagtagaataattgattgtggtaggctggagagccattgtatgttctattgtgctgctggctagcagccgtgggagctggtttgcttaaatcagaggaaattttggaaggagtagcaaggcttaggatttcaaatgatattgagtttgaagaagagactttccttgctatgatgaatgaggctagagaggtttgttactcatatcatacatatatttttccactttaaagtctcattttgcctaaaagaataaaacgatgttcatctatgtatatagaaacgagaaaaactaaaagcggctgttccgaacat

SEQ ID NO: 66069 - DNA, 399 bp, Cucumis sativus
  Intron number 1 from transcript Cucsa.319610.1 (locus Cucs a.319610) derived from phytozome v7.0 (chr-ID scaffold0307 8; pos 314254 to 314652)
gacaggtttgtttattttcaactctctgactcacaagttctttatctttctttacatacctttttcatagcttaacttctcattttaatgtttaattctatacacatattttgttattttaaagcataaagcacttaggcttttaatcctggtaatggaaggtttgaatccttcgtatcctattgttgtatcttttgagtcaattcaaattattaaaattggcgttccaaatacttatgggaggatttaaatctttctaacctggtcagatgacataaagttgaactttcgtcaagttaacataagaagagaaattcgaagaaaagaaagaagttgcatctcttgtttgtaatttaatatttattgtagactttatcgtcgtattgcacaacaggttag

SEQ ID NO: 66070 - DNA, 491 bp, Cucumis sativus
  Intron number 1 from transcript Cucsa.386750.1 (locus Cucs a.386750) derived from phytozome v7.0 (chr-ID scaffold0391 8; pos 293948 to 294438)
acgaggggttgctcgatcgtgaagaaggtatgtttagcattattgaatcttgaatactcgacttattttgttgacttcagaagccctaatttttaataccatgttagttgaggtttccttttctgtatttgactttctttcaaaatcaactttgagcattactagtagttaacgtatatgtttggctacgcatatcttctctacatttcaagttcacaaaattgattaattaatatagatctcatagtactaaaagcaatgtcagtgttgaatagtatgactacataaaagagtaaaaacctaatgttcttgtggttcagttttacagaaacacttgaacagtttatgactttggactctttttttttaacatttttatgcggttattcaggttctatcactaactctttctttttccgtacttgttaatttctttattgtttatgattcatctagcattatctgaatttcaaagtgagaacgctctgcta

SEQ ID NO: 66071 - DNA, 711 bp, Cucumis sativus
  Intron number 2 from transcript Cucsa.363030.3 (locus Cucs a.363030) derived from phytozome v7.0 (chr-ID scaffold0361 1; pos 693230 to 693940 reverse strand)
gaaataggaccagaagcaggttttgtgaaactttggtaacacttgactgcttcttcttagcttggaatttgtggtgtccgggtccctgttgatgaaaatgcatgtctttatttttccttacttataaaagttataaatttacagaagcctatatcgaagattcaaaacccattttattttgatttaaacaaaaacgaagaggtccactttgttccctaaaaatagaaatatagaacggactttcaactctttttcactttaacattgttttatatattttgttaactggggtgctggcctacttcttgcattatgctcttagccttcctcaattaatgtttgtggaagtttcatcctccaattctgatagccagcaaggcttcttttttttttcttttcttttttgtttaaaagagagtaattctgttttcatcctagcctcctaggggtttgaagttaggaactctggaaggtatctcccattctccctgcattgcgagttggtaccaacaaatatgtgaaattaattaattaactactacattgttgttttctgccattttcttgtgaaatgaacactggttactggcttctttgttcttaacttttttacttgaactaagtggatcatttgcaatttccaatctgttattaattagtttagggatttctgcagtttctgccgctgttggcattatcactgcagtcaat

SEQ ID NO: 66072 - DNA, 588 bp, Cucumis sativus
  Intron number 1 from transcript Cucsa.364130.3 (locus Cucs a.364130) derived from phytozome v7.0 (chr-ID scaffold0361 1; pos 1679971 to 1680558)
tttataagtgggaacccgacgaattgcctggtaaatatgttgttcttcccatgattgatctgattgattgatcttctttcggcttttccttgacctagtctgattttgattcagtttgtcgttgattgattttattttactgtttataatgggtttgggggtctttctgaatctatctttgtgatttgcgtttgattaagcttgttgtcaaattttaatcgtatcatacagttcgatattatcatttaacttcttgcattcgtaggtgaattgaagctattccttgttatccttttcggttcattttctttgcgagtcgtttttatccactcaattcctattaccgatgtactaggcgaaggcataattgatatttgatagtatatttttcccgaatgttagagagttggtcgttccttttaccactttctgtgaatgtttgtttgctctatgattcttttattctttggatatctacgagtattgatgatctttctaatcatgaaaaaataaatgcaggtcaatctaagttaaaaactggtgatagacaatggttctttttcagtcctagggaacataggtacccaa

SEQ ID NO: 66073 - DNA, 726 bp, Cucumis sativus
  Intron number 1 from transcript Cucsa.385870.1 (locus Cucs a.385870) derived from phytozome v7.0 (chr-ID scaffold0390 4; pos 1076408 to 1077133)
tcttctacgtataaaccgccattttgattgtcaaggttatttcttttccattttccatttcccctcactaaatcttgccaagaacttgaatcttcattaattctgtaatcaaacaatttcttttagaaaagtatcattttctaatcttttatttgaatttaaatatatttctaattttctattattccaatcaattataaagattatgaattaataataaaaaaaaaaagtaatagagtaattattgttagcctcttttttttttcttaggaagaaattgaattgtcttttcttttcttttcttgaaaagaaaattggacttggcaggtttaaaccaagactatatgtatccacttctctaaaattagaatcactgcattttttttttgttttaaaatcaatttcatatttatttcaactttgttcatagaaaatttatatatagttgactttaatccttttaatatgtttatttcagtatttatatttttatacttctatttgatattctttctcttactaaaaaaatgtttcttgtacgaaaataataaataaaataaagcaaatttaacaaatattttattaatatattttaaaggaaaacacttttaaatatgagggtttgaaaagatgtcatattttatccttatatgtggagtgaatgagtgaagcttgtttaattttgaaacagatatccgagaggacgccatagattacataccaggg

SEQ ID NO: 66074 - DNA, 918 bp, Cucumis sativus
  Intron number 1 from transcript Cucsa.381800.1 (locus Cucs a.381800) derived from phytozome v7.0 (chr-ID scaffold0386 6; pos 48862 to 49779 reverse strand)
acttaagcgtgccggagctacaggggccagagcaggtctgtgattaccacccacgaattattattattattattattattttcaatttttgtttcttgggtttggaattgccttctcgttgaattgaattgcttgatttctggatgtccaatctatttgtttttttgttgcaatctgatccattttgaattttttttttctttctgtattgtgttttgtgccctgttaggctgttaggaggacaggggagtttctttcttgttaatttatgtcagaacttttgggtgggttagttcattgtgaacttttctattttatctctctatacttggtgccatttattcaactagggattctgccatggcaaacagggaagttgagcttttgaacggagggaagctttagctttaagggttgggattggactctccatagatcatggattcagaacaccacgagacaccttttggatgtcaggtggaagctttaaggggttgggatttgagcttctttgtaaacttgtctaagctgcaaacagagttgttaattctcatcctctcgatgaaccaagtgatatttaattaatgaatttattctgttagatgatatcggcataagttttttggtcaattggtgaaatacattgtatcacggcaatggtttaggaacttctatgttcaaacccttgcaatgcaatgtttctttttaattaatattgatttccactgttgggtctatgcataagcttttgggtcaataatgatttaacctattctttcatttgctttgttattgcttcttatggacgtttaattcaagagtcttctaggcaatgttcatgctctacttcaagttgatgtttatagtctcattcttaaaacaggtgttggtggttatacatacctgttagagccactt

SEQ ID NO: 66075 - DNA, 538 bp, Cucumis sativus
  Intron number 2 from transcript Cucsa.321270.1 (locus Cucs a.321270) derived from phytozome v7.0 (chr-ID scaffold0308 0; pos 1075336 to 1075873)
ggggtaattgttctatccattcttctcactaaggagcacctatacatatatttttcagtttcgaagcatttctgcaaccggaagtgcagttttgaactgattctttttaattattttcaattattccaaagaattgtgtaggctctgttcaatagccatttggtcttttagtttttcaaaattgtatttgtttgcttcaattctctaaccatggctttcaaaactaagcttaaattttgaaaatgctcctaaactgtagagaaatcaataggtgtaagtagtgttcgtaaggaatatcaaatgcttatcaaacggaggccaaataactgctcaggagtcgcaattgatctctctccatagaaactctttgataatttcaatttagaaattgtagaatgtagaaaatttcttatctatcagtccgtgagaatgtgacagttaaacatgtgatgtgataatttcattttaattttagttttttcattcttttctcttttgaatagatacttaataagcgggcgattgaagcatcagagaa

SEQ ID NO: 66076 - DNA, 881 bp, Cucumis sativus
  Intron number 2 from transcript Cucsa.311220.1 (locus Cucs a.311220) derived from phytozome v7.0 (chr-ID scaffold0299 5; pos 882032 to 882912 reverse strand)
ctgcaatccagtcccctaggttaatcattcgaaaggtaaatttgatcaaggcttatgcctgactgcgagtgatttcttctatgccgttcaatcaagcctatgtttcatatcagttttgagtttcaatacctttgcaattatttgtcatttaaacaattgaatggatatattctgccaatggatacggtgcagaagttcaattttaatttgcctttaggtatggtacctcttcttttctatgtgcaatggttcatagttcatagttcatataattgattaggctccccttccaatgatcaataaactattatgcactctcacctcttctcattaagactttcaatttcttttctcggattctcaccaggagtcattactgccagctcacgctttaaaaagtataagttagtcctaagtatcgataattttcttaatactatattttcatctctctttgttaaaacattgttttcatatctttatcaatacatctgtttttctttcttttttgttttgtaccaaacgtacttgtgcaatgcatccattttggagactaatagtaaatatggtttatatactcgatcaattaataatgatgaacatttagatgtagctgttatatttggattaaaaattgataactttgtgtttaacatgttttcacgaactcagaaattgaaattaagtgcttgatttgtacattgttctttcttctttctcatctttttcctttttctttccttttcttttttccattttaaatgaggtttcaggtaaactacaaccgcattcatgtggaatatcacggtataagtagtttgtagatttatacattatttatcaattttaggtattgttggactgtggggctgtccaggcag

SEQ ID NO: 66077 - DNA, 771 bp, Cucumis sativus
  Intron number 1 from transcript Cucsa.311220.1 (locus Cucs a.311220) derived from phytozome v7.0 (chr-ID scaffold0299 5; pos 882951 to 883721 reverse strand)
gcttcggccacgccactcgcgtgatcgaggttagattctccattatagaatgttgtttgaatgtgttcatttttttttcctcatcctgctcgttgtaggcaatggagtttggatttcggtctggcttgagttcttcttttctcggatttgttgtatagaattctgtgaggtcatttctggcttcaaatttcattagatttggaatgtcgagcgggttcttcggtgcttgataatgttttgttttctcgctcgaaatgttgattaatttcgatgtgtattttctgtaatcttatgtaacttatcctgctggaagtcttctggagacaaaatgctcggaaaaaatttgctgaaatttcttttgttttgattgattgtgttcgtctatgctgctgaggagttttgatttcgttcggttatgagctcgagttcttctttccttgtatttgttgtttagaaatctatgaggctagtccgtgagttaaactaccttggttttcaaatgtcgaagtgtcgatttatattgatcttcgtttcctgtaatgttacttatcctgccaaccttcttctagagtggttaaagaaaattttactgaaatttgtgctggttttcttcgtggaaatattattgttaattataatgcattactttactacattgttgatcttcttcttcttcttcttcttcttcttctttgcttgagaatgtttaatgtgatgcattgttctgtgcaaaaaggttgttcgacacctgatacttgctggccacgaggt

SEQ ID NO: 66078 - DNA, 446 bp, Cucumis sativus
  Intron number 1 from transcript Cucsa.395040.2 (locus Cucs a.395040) derived from phytozome v7.0 (chr-ID scaffold0410 0; pos 723035 to 723480)
gccccttctcccgtcaccattcagtcaaatcacgagtgagttcttcccgttttcttgttgtttgttttttcatcctttgtgcttgattggattttctcttttcgatgtatttcattgttttgattggttcttcctggggggttttgggtagtttgtaatttcaattcgcaaaatttttctgcaaatgggtttttgtttttatcgaaatatcttaattaggggttcaaaaggttttgattgggtgggatttgtattggttgcgggagtttttcgtgttgcttttctttcctgtacgagtttgttgtgatgaataattctttacgattatggtgatcgatttctgatgggggatttgtatctctttgatagattgatgggggctttgttataattgaagcggtttggaatatatttggtctgcaggctcagcttcattgttcctgtgg

SEQ ID NO: 66079 - DNA, 580 bp, Cucumis sativus
  Intron number 1 from transcript Cucsa.379880.5 (locus Cucs a.379880) derived from phytozome v7.0 (chr-ID scaffold0383 7; pos 258990 to 259569 reverse strand)
atttgacaagcattttcagaaacacaaaggtattccactaaccactttaccgcagttttaacctttatttgtttacacattagaactctatggagcatttcatcgaacactttcaacgcatataccaattgccttccacaaaactccaccttattttgaaatcccaacgtgggttttcataataccttataaaaactttatttttctttctatattaaagaaaaaagatctcaatgtatagtgggttgtttttcccttttgtttttttatttctaaaagaatactagagacagacaggaagaagttgatcgacccttgggttcgaaagaggcgtttttgaaagctacatcaacatatcaatcgcttactttgattatttttggtgttaatggcttacatcatatgcataaggttacttatcactaataaataaaaaaccccacctcacttccattggtggctctccctccattacattacattacacgtacggtcaggattcaaaactccttcataaagtaaagtcacttacttgagattgtgatgctataaatattagttgaatacactcaaagtctcc

SEQ ID NO: 66080 - DNA, 512 bp, Cucumis sativus
  Intron number 1 from transcript Cucsa.311060.1 (locus Cucs a.311060) derived from phytozome v7.0 (chr-ID scaffold0299 5; pos 722457 to 722968 reverse strand)
tcaatctccgggaagtgccattgctcgaagagaaggtaacaaatctaatttccacattattttctctaaatttgaacaaaaacaccgacgaatatctgtgggattgatatattttgaagaaacagtaaccctaaacttcgttaacgaagaaccttgttgacggagaccgagttgactcgtcagagtagtaattgggggaacagttagcgagttagtgggcacaacacgcgtgacactgacacgattaggtggggtggtttagtaatttccaaataataataataattaataattaataatttagaaaaacaaaaagagagagagagagagagaggaaaattcaagttggcaataaagtaattttgtctcgttctttcagccttaattgttgaccgttgacatccttcacatgatctgccccaccatctccatccaattttaaaattgcaaaaatcaactttcccaatttcaataaatattgaccgccgttctttctctacagaaaaaatcgg

SEQ ID NO: 66081 - DNA, 964 bp, Cucumis sativus
  Intron number 2 from transcript Cucsa.360590.2 (locus Cucs a.360590) derived from phytozome v7.0 (chr-ID scaffold0358 8; pos 1216378 to 1217341)
atctccccggcgtcgctccacgggatttccagactgtacgttctcaattcgatcacttctccttaatgtgtttgttttctttcttgtgtttcttcaacttgctgttgctttttcccattgaaatgtttttcacgatctgcgctgtggcgagtagttgcggtttttggtagtttgtactgcggggcagtcggatctaggtttctggtgcttgatctggtctttaattgcatatgttctcttcatatcgtggtatccggacatttctaaacatcattggatgctgtgttctgtttgcatatgctgtgttcaattatgtgtttatttaagggaaaacacatcgcatctgcttacttcacggcaatgaaacgtaggagtgatagtgataccacattatgtgtaaacgtgttgtggtattcgtttctgtcatttgaattgcttcaaattgtactcgctaccgtgtttcactactcgatgccaaaccatatcggtatagtaaaatggtaaaattcaactgtaatcgtcgtccacgctgtgttcagttttccaacactgttaattttcttattgtagtatgttcaggtcttagaaattctcacttttgacctctttttctaccttccatctgttatcatgtgctaaattcctacgaattgatggaaatggtcttccaaacagggtgatattcttccagtcaaagtgaacaaactgtcatccacaaaaacacagctcccatatgattactactatttaaattattgcaagcccaagaaaattactaataatgcagaaaacttgggagaagttctccgaggtgaccgcattgagaattctgtctatactgtgagtatcttgcctgtttttagaagcaatctaaatattgtacagattcttcatctttaatgaaactactgtactttatttattaacctgtctttggtgtttctaaataattctccagttcaaa

SEQ ID NO: 66082 - DNA, 684 bp, Cucumis sativus
  Intron number 2 from transcript Cucsa.342310.1 (locus Cucs a.342310) derived from phytozome v7.0 (chr-ID scaffold0335 6; pos 4669494 to 4670177 reverse strand)
attcacaagtaagcttcttgatagcttctgaatctttcttctttctactcttaattcgtcaagaaaattctgctagtccattgtagcctcaaaatatgttcatccacatgtgtttcctgcactgcgaccaacttttttgagatctaaaagttaatgtcttgttgcttggacggatcttatccaggacacatgaatcgatgaaagaagtatgggtatagcaaggtgctaaatactggatggttggtacacattccatcaccattaccttggcctttagttgtgcgcccatctttttaagattcctataatgatcaatcagaaccaggccatatgacaaaacatggcctccccctctcctaagacattgaggatggtttaaattggggtcccctccactctccctagagtttcctgagaaccctcctcttttgacttgtacattcgtcttgcatcctatctgcttgatactttcgtgccatctctcaaaatgtagcgtataattgaacatgatcaatgttactatacaaatcaaatcactgtcaaactaaaactaatagggagactaggttgttcttttccgttgtcctctcaatgttttgatatctcttctgcctagactgcttaagccagctctttataacatcttctactctatctttatgcaggtatcaaagtacagaaatt

SEQ ID NO: 66083 - DNA, 418 bp, Cucumis sativus
  Intron number 1 from transcript Cucsa.377710.1 (locus Cucs a.377710) derived from phytozome v7.0 (chr-ID scaffold0380 6; pos 161173 to 161590)
acaacttcaacaccttgggggtccattttctctttgtaagtttgttttgttttgtgttttgcttttccttttgtcatttatcaatggacttctccatatctcagaccaccattcttgagtcaaatcactccgaaaaacttccatttgtattttagtctttagagttatgtccactcaatttctagactaataattgtatagcgtaaatattgaactttcatatttttttcaaagaatatggtgcaaaataatttccaattttagtcaactaaaatcataattaattttcacgagtcaatcaatttagttctttcatcgtgatatttgtctttagaaaatcgaaaagaagtgtatgaaacaatggatggcgtgggttttttagttttttgacctcaaactattgtgcagggtgatttat

SEQ ID NO: 66084 - DNA, 686 bp, Cucumis sativus
  Intron number 2 from transcript Cucsa.377710.1 (locus Cucs a.377710) derived from phytozome v7.0 (chr-ID scaffold0380 6; pos 161681 to 162366)
tcatctctgccatcaaagaagttggccatattaaggtcatacatatatatataatttgatcttttctttttcttatttctttgtttgtttatttatggttcttctaattttgtctcatatagttttggtttaaactttactttacgtgttagagttcaagttcaaaattaaatcaacttagtttttctagtttgttgagtttccaatgaataaacacttatctctgaaatgatagtaattgaggtgaaaataataatgtcagaagaacaattggaatagggagatttgatcggactttgtgctcatcaatgtacttgaatgacagttgagttaagctctttttagcaatatcatttaccaatgaaaaacaaaaagacacagtagggtttcaattaagtttatgctaatttgttttgcacgtacttgcgatataatatcttttagagagaaaaaaaaataattgagatgttttaaatgatgagttttgtagggaatgtaaaaaaagttagaaacgatctgtgatgaacaataatagggatttgaattggaaaaaagtggcatgacgttaagttaaaaaaactaggggaggagtaggtaggaaattaacacataatgtttgaatgagtagttgatgaagaggttttgggctttgggtgtatagagattcttcccatcagaatttggga

SEQ ID NO: 66085 - DNA, 962 bp, Cucumis sativus
  Intron number 1 from transcript Cucsa.373300.1 (locus Cucs a.373300) derived from phytozome v7.0 (chr-ID scaffold0372 6; pos 104741 to 105702 reverse strand)
ggccgttcaggtgctgttgtctttcatctctttgttctgtagacttagttatgcttacttaaatgtatctacttctctaatatatcggtgttgtgatttttcttgcttatttatcattagatgaaagttatgtgaaaataggtttgggacacacatgaactgtacaatccatggtcctcaattcgccttttgggtgaggaagcccgtttttttctcttatggcttgcagggtttgtgcagtcttgtgggtcttatggggtgagtgtaacatgtttaagggggtggagaggggatcccaagaagttatggtccgttgtttgcttttatgtttctctttagacttcgattttgaagattttttataattgttctataggtgtgatttcgtataattggagtcccttcttgtaaaggagtttttctttttagtggacttgcctttttgtttgcgcatgcattctttaatttttttctcatcaaaagttgttgattttacatataaaaaaatggattatacaatggatgtggttcccatcacaaggatgtgattttggtgattgcttagggaatgaggaagtatttttgacatttcgccttttatttgattaaaaacttcacttctgaattgttattatgtaaaaatttgttaatatgtcgagaatttgggttcttactaggtgacttctctaagttgagatatcgtatcatacaattattagttcttgttgaagcattctaagtgaggtttgtcatgacattactcttatgaacgtggacttgagtggattcgtaggataagttgatcgatttgggagatttttctgcatggaaaaatgcatgattagttggtttctgaaaggctattttgttaggatgtatttgaagtcctatctggcgtctttttcattttttttttgctctaaaatgattcttatatacattgtagggagtcttgttgctta

SEQ ID NO: 66086 - DNA, 572 bp, Cucumis sativus
  Intron number 1 from transcript Cucsa.340900.1 (locus Cucs a.340900) derived from phytozome v7.0 (chr-ID scaffold0335 6; pos 3274903 to 3275474 reverse strand)
atccagcgtgaccttgtgctgaattgtaaatgtgagttgctctcaagattaacaccttttaaaaagtgtgtatttgttggagtgaagaatgaaaccaaaaaacatcttgctaaaaaaatcaaaagtttgaaaagatcaaagaagaacttctaacaccacaatcttttttctcaaatatatatatataaaaaaaaagaataacagttttagatctgaatttaattttagatctataaccgtcaatgtattaaaacattagtattattaaccataaaagggctacaatatttgtaaccatgaaaataacaataattgtcatattttctatggaaacatttcatttccaacatttaactttgaacacaaaagtaaatgtacatggacaaagtttcttttattagtaaaagaaagcgaatttaaaagtttagaatctaaatcgtatttgaatctaaatgcatgatcggaacagttttttagttattgagtctgactgtgatgtgtggtatatacaaattatggttccaccatttatttcaggggagcaaatcatcaatatcggaaatacatacggg

SEQ ID NO: 66087 - DNA, 801 bp, Cucumis sativus
  Intron number 3 from transcript Cucsa.337100.1 (locus Cucs a.337100) derived from phytozome v7.0 (chr-ID scaffold0335 6; pos 245355 to 246155)
caacactttggaactctcttcaaagcaagctttatgtgagttttctttttaatttaataatcatacattttttaaaattatagaattgggaaatcaatgttttttagatttttttttgtttactgaatttatttttaaataaagtaaatgttttaagacttattttatataaattaacattgattatgagagtgaaaactatcgtaaaaaatagaattaaaacttgtcaatggtaagtaatatatactctttttcgaaattaaaagttgatgtttttcattccttagaaaagacgagattcgtaaatttggtggaaagagatagagattcttcacaatcacatcttaaaaagcctttatatttttaaatctaaggttgcagaaattgattaaatttgttggttgaaaattgaaatcaaatttttattattctttttaaaaaatcattttaaaatgtaaatttggttgaacaaagtaaaattaaaaaaaaaaagtaattaagaaacaagaatcacatctcaatatacattaaaatggtttttctttttgttctaattcaagattacaattaaaacctgagatagaaattgatcaaattacgatggaaatatagtttaagctaaaaataaaaataacgtaaattaatttagtttatgacttgaacatattaattaaagtctatattaaatctttgttgctttttattaatgtgtgaaaattaaattccaatattaatttggaatttttgggtatttaattatggataggagatcatcaaattttgtggtgtaaagtccaataa

SEQ ID NO: 66088 - DNA, 975 bp, Cucumis sativus
  Intron number 1 from transcript Cucsa.385300.1 (locus Cucs a.385300) derived from phytozome v7.0 (chr-ID scaffold0390 4; pos 645123 to 646097)
acgacggttttttactctcctcagaccaaattcacgttagtttggatctcttttcctatttcttcttttggattacgttttcatggttcttctttcataatctgatattggatgttagcgtaatgtttcaaccattttatatattttctggttagtctacttcacgattgttgttgctttttatgtatttcttcttggaatttttggagatttggacttacatgctgttttactattggattggaatacactattaactttcatcatttactctttgattaattgatcttttgattttggtaaggaaaaaggagaaaggttatttcttgtaattttaatatctattcttaatttcttggctattttgtggaaatgggttttacttcgttctgccgcagctgaatcagatgtacgtgtgagaatgggctcttgaaagtgaagaattgtgcacgggatgtgcattatagcttattctttttggttgccaattggtgttctctcttgtaattacctttagatgctttgaggttttcttctgatttcatttatcaatgaagtatttcttttactaaagaaataatgaagaattgtgcacgagatgttctatggatcttctgggactggggctaattagtagtggctcctgaactaatccttaccaaaaattgcgaaatgaatgtaatcttactgattgggatctcatcgtttcgagatggctgatgatcgagtatttatattgttttgctttctagagttgtattaaatttttagtcagtaggcaatttatcgtgttttttagctttagtaatgtcggaaacttcccaagtcctttgatttcatgtttgttgtatagatgaaatcagacttgtaagcacccacttgcaaattcaactgttcttcatacgaggatggatttggagttgtaagtagcttcaatgaaattttattaatttactatttgaattattttgcagg

SEQ ID NO: 66089 - DNA, 462 bp, Cucumis sativus
  Intron number 3 from transcript Cucsa.392110.1 (locus Cucs a.392110) derived from phytozome v7.0 (chr-ID scaffold0406 2; pos 375278 to 375739 reverse strand)
gtgtaattcttggtaagtttgcttcaaggttaatatatggcgttgttggttacttgctgtgtgatgtgagacaaagttaataataagaactggtgagcagtaatagctgatgtttgtaattatgggcttcaacaaaatgcttctcagtggtaatttacatggactctttctgttgaggttcgatgttgaaatcgccaaaccccatgttgcactaaaggaagatatgaatgctttaactaataacgagatgaatttgtaggcaatgcacatcagttgagtattactgcctgattgtacacaaatttctctcttcatttctatgtttgtgttgtaataagatgatctaaagatgatgtctatcactattaaagtagcctgtcatattgaattgatacagttaacaaaatcgaacctctgaattcttcttctttgttttttcatctgtgataggcataggatata

SEQ ID NO: 66090 - DNA, 256 bp, Cucumis sativus
  Intron number 1 from transcript Cucsa.392110.1 (locus Cucs a.392110) derived from phytozome v7.0 (chr-ID scaffold0406 2; pos 376054 to 376309 reverse strand)
tcacggtgtccttttgatccttccaaacgcgaagggtcagaaaatttcttatgtgtttgctttcttgttggtttacatctctgaatttgaatcgaccgttaatcccacgggcattaactttgttagggtttagagtcttcaggattttctttgtttttctactcctaaaacagtcagtttgtggtagttcctctatttttgtttttatgaactcagttttgaattttgtgaattatttgcaggtttttgtcttggg

SEQ ID NO: 66091 - DNA, 611 bp, Cucumis sativus
  Intron number 2 from transcript Cucsa.358640.1 (locus Cucs a.358640) derived from phytozome v7.0 (chr-ID scaffold0358 6; pos 265709 to 266319)
ttgaaggtaactgaatatttgaacaataaacttcatacaacccaaatgtattgtactaaaatggcaacgaagccacaaaacaaaccaaatatttgagttaattgatgcttctaatctcttgagatcactctgaagtgctgatctgctcgtcaaagtattctcttcccctttcttccttccgtactcagtgaaattactaaatgcctgtaaatccctctaatatcatccctatcaaatcctcatgctaagatttcctcataatctcttaagtttcttaatttttcttacattgttcatatgattatgcattataggcatttccaaattctgtcgtttcatttgttaattctgctataagtggaatgcaagaaggaaattcaggagtttagtttttgtttccttctgggttttcctcacagggatggtttcataagtgacaaatgattgaagttattatattctttgttttattatcttattcatttcccaagtgctgtggtgcaggggattgttatatgtatgtgtgtgtgtgcgtgcactcttattataacttttaaaacgagttcaagtttttattgacagaggaacaatcagcaaattccatctaccga

SEQ ID NO: 66092 - DNA, 542 bp, Cucumis sativus
  Intron number 1 from transcript Cucsa.322150.2 (locus Cucs a.322150) derived from phytozome v7.0 (chr-ID scaffold0308 0; pos 1969059 to 1969600)
tctctaaaagtgaaactcgtttactcttcaaaagggtatttctctctttctctctctatctcttttccccccttttttttcatttcctatgtttatctgctaaaatagtcttcgctttgaatatttgattcttgtagtggttttgtttgcccgtgcttctttttatctttttgtttgtttatagtttgtttgactctgattttttcaactctaattggattctagaggtgggtttgtttgccttttcaagcttttgaaaaatattgtttgatttgcgttctgggtgtcctgattttgactgtaaaccttttgatcgaaaactttgattaaaggggttttctgattttgaacctttcttagtatcctaaaagttcggtcaagtttttcttattcaaaattttgagtttgatgtctgccattgatgtaatttggttgaactaagagccaacaatccagggctctgacgagtgttttttttttgttttctttgtgtttgtatctcttgctgacaatttctgcgattgtctttgttgattacgaag

SEQ ID NO: 66093 - DNA, 703 bp, Cucumis sativus
  Intron number 3 from transcript Cucsa.377310.1 (locus Cucs a.377310) derived from phytozome v7.0 (chr-ID scaffold0380 5; pos 22915 to 23617)
gtacagaaagctggctcagaaattccccaaaaaaggtacgcaattttttttttatcagtgtttctgatgaacaagataacattcttagcgccaatgcccaacggttatcactatctttctttccaatgtggttccttgtgggagatttctgctggggaaagctgtatggaagactttcttgaaatatatggtttgcttgggaactactctcaaaatgacttcctatattttagagtaaaagttgaatttaacagtatttggatgactgtcttttaaaacctagttttcttgaaaaaatggagttgatgtaaatagtgaactatcagccatgccagtagttgctgctaattcttttgtaattacccaattaagttgatttacaacaatttggataatcttttgtaactagccccttaggagagggatctttcttcagtcttccctcttccccatgcctctaagtcgttttttccttctcttgttaatcttagctcctttttctactgcatggtttgttgtgaagagtgcaatacctgtaaagtggattctttattgtgtggcaagccggatgaaactcggttttctagttgctttgaaattgtttagagacagattttttcattttaattaagatacttctatcgtaattaacatcatgtcgccaacaggcccttgcacatataagagaagagaacttgcaact

SEQ ID NO: 66094 - DNA, 882 bp, Cucumis sativus
  Intron number 2 from transcript Cucsa.356000.1 (locus Cucs a.356000) derived from phytozome v7.0 (chr-ID scaffold0357 7; pos 706243 to 707124 reverse strand)
atctcgaattcaggcaaagcgtgctaattttcaaggtatttttctcccctcaaagaatatggatgattcatttgatcattttcatggtttgtgttaaaaaaatatagaaatgacacaagaattccaatgtttttgtggttccacatcccttaatttctaaacttctatctttgttatgtgcttttgcatgataattattgccatgtatcaatgtttgaccatgaccgctggggcaagagtaggggccaattggctggtgattattttagataatcgtttttagttttcaattatagtttttaaaactttggttggattttagtgatattattagaaagaggattatgaactataggaagaaacttattggtaaaagtaaagtagtgtttatatgcgtaattttaaaaaatcaaatatttatcaaatgaggcacaagaatttaaaacgttccctcaaatttgcctctaaaatttcagaattgaaaaactatatagaagtttgaaggtaaagtttcatttcttctttatgaaattcttttggctcctttcagtggtataaaccacataatctaaaagcattctcaaaaagggattttcatatgacgattcttttttcgtcaacatatatttttctctagtaaatcttgcctgccatggcattgtgaatttcgttcaaatcagtggggagcttgattatatttgaacgcgcatgaattatattttgtttgcatctttgttatctgatggtgactaattaaccacttttcatttagaactttccatttctctatgtttgttattggcattagattaagttgtgtattttactttcgtttttagattcttgcaatttcatgttacttggtcgcagattttcaggatt

SEQ ID NO: 66095 - DNA, 859 bp, Cucumis sativus
  Intron number 2 from transcript Cucsa.388090.2 (locus Cucs a.388090) derived from phytozome v7.0 (chr-ID scaffold0396 7; pos 547058 to 547916 reverse strand)
gtttcaggaataggcaatccactgatcggaataaggtaaatataaaatttcctttgttgatttctttaatttcagagttcgttctgcactcttattccgttttgaagatgaattaagtctttgaattagttgatttgccattccaactcttaagatttgcctaatataatttctatactgaattttttgagatcattctgttaatccagataaatgcatgaggattgtgaggataggatttgaaacaattaatcttgagaatatcatctcttaataaagaacagtacagttgcttaaacttaatacttctttgtgagtagataacttatggaggagcagaatttggtatataagtaaggctgagaagaatactagtgatctcaaggttttaccttcttcatcagcattcactttgtcacgcatatcacaaaccccaaaattgattttctatgagcttgttgtactatatgaccactttgaactttcaattttctttttgtttcctatcaaaataataacgataatgatagcgatatgtctctcaagacgagtgaaacgcaattagttagttgaagtgttcaaattctgctatgggggaggaagattatatatttgttggttgtacaatgagtcaatgactattatagcataccatacaaatcacaggttcatagaaaatgccgtatactcatatttaacaatcaaattccaatttcacaaatttgtcactctcaaatccttgatctgtaatactatgaatagatttcttgtcttatcatgtatttacctcaaattcacttgaaggaatgggattttgcatgcaggaacaagattttaggaggaacgtgcaaggtggtca

SEQ ID NO: 66096 - DNA, 835 bp, Cucumis sativus
  Intron number 1 from transcript Cucsa.352080.1 (locus Cucs a.352080) derived from phytozome v7.0 (chr-ID scaffold0353 3; pos 59153 to 59987 reverse strand)
gattgctgttgtaagaatgggaaactacgtttttatggtttagtacgatagttttcatcagctaattttattttctactgtttattgctgcatgcttgaaaggttcctttaggctttaggtacaacattagattagttttcatctcattttgtttgtttttgtgaaacaggttggaggtgttcattcgcatctcatttctcgagtccaaagagataaatgtaaagcagggtgtttcatgtcacaaaatgacataatgatgacggtttttcctatgttccagcagcacatcgaaccacatcttgttcacgcacatgttagtagacatgaaatttcctaagattaatttagttattgatgttaacaataattttgatgcgtcttgcctattatgttcttcaggatttggcaacttaaagaaaattgattgttttttagatttgagctgctttgaacaatgttaaaaaatagataaaagctaattgtgtcagttaacttctggataatagcaactaccaaataggttcttaactaactgtaagccgtactatatttcatataaatactaaattgggaacctcattgggttttcttatgaggacttgacctcttgtgtcatagcaacattttgccccggtcagcgtttctgtaaaagttcctgtaagattgtaatgagtattgtactgattatgcagctaatatgttccctttatgaaaatacatctgatgcataagcatctttacctgacattaaaagcatacttttggcttagtggtgattcataatctctataatgccccattgttaaattgccttcatacagctaaaaatacgga

SEQ ID NO: 66097 - DNA, 748 bp, Cucumis sativus
  Intron number 1 from transcript Cucsa.337700.1 (locus Cucs a.337700) derived from phytozome v7.0 (chr-ID scaffold0335 6; pos 717481 to 718228)
tgggctcttcgtagagcttctactcctctcaggtattcttctcctcctcctttatctgttccccttttcttcacactacaccactctgtttctctaccttacattcttccttcaatatcaaaacttttaatctcgtttttggctgttaacttttgaattcctttcatgggttttggttttcactgtctctatgcatcgacgatcttcttgcctgcttcttatcgattttccggtgctaattaaagaaggaaatgaagtcaagagttctgcgtgttctgttctgttcttgtagtaaactttgtgttccatttctgttttctttaacaggattcttccttgcttctgattgatcttttttttctctcctacggataacttggtccgagtgatgcaattagaatcatagaaaaacgtagacattgaaattaggatgtaagaagcttgagaagaaaatgagaaacccttattctttggacatttttcttcttattctaatgttctaaacatgaaaccttacaaaaaaaaagttctaggcatgaaaatttgtactggaaatttccagaactaaatcattatcaatcatccgaaggaatgtttttgtatgattgaacttctgtatacatatactacatgcatggacgtgtatatcgtggtggggaaagtacggtacctcgaactgttcagaccctctgtatgatcttttttttttctcttttcaggaatcaagggtatagagtaagaacttcat

SEQ ID NO: 66098 - DNA, 896 bp, Cucumis sativus
  Intron number 1 from transcript Cucsa.313520.1 (locus Cucs a.313520) derived from phytozome v7.0 (chr-ID scaffold0299 5; pos 2675380 to 2676275 reverse strand)
tcattaccctaactcggaggagcaaggaaccgatcgtaagtgcttgctcttagtctcatattagttcaatagcaagttttaatactttaaatttcaagctcgtgtcaactaggtcgttaaacttttaaaaaccatagatttataaattcgtaattttgtatttaataggttgttaaactttaaaaaataaaatagatcaatgaatttttattattttattataagttaatttgtaaatttttaaaaagtatttgattagtgaaatcatttatttgaaaaaaaagaaccaatattagacagattagacacaaaagtaaaagttacaatcctagacccttactaaaaatttaaagttcgaatagatacaaaattgaaagtttaaaaatttattatatattttttaaaatttaaaaacaaataaaataatttgtttttaaattttatgtttatttctttatactcaccacgccttttattattcttaaaagagaaatttttaaaaatagtagattttataaaatatttacaacctataacaaattctatccgactatgctatagtgatagaagactattaatgatataattaattttgttacaactcgtaaatattttgatttattttgttatttttaaaaataaaaagatattagaattcaaaatgtaagaccacagacattttaaattcaaacttttatttcatttttaaaagaatgtaaaaaagacccaacatggaaaaacaaattaaagataaaaataacttttaccagcttaattttcaaaaactaaaattaaacaaaactattagaaccaaatatagttatttagttaattataattatttcactccatacggcaccgtttgagtaatgtccttcgatttaatttaattttag

SEQ ID NO: 66099 - DNA, 724 bp, Cucumis sativus
  Intron number 1 from transcript Cucsa.395280.1 (locus Cucs a.395280) derived from phytozome v7.0 (chr-ID scaffold0410 0; pos 869457 to 870180)
tcaccagacgtgtattcctctgccttcggactcaggtcactctctatttcccctttcttgccttctttcggattggacttccattttcattcatcatcaatttcattttgttttgatctgtctttcttcctcttaatccatacttacttgtttcaacttctgccttttggattgacgtccaattctccgtagcctaggaggacattgttttctctcttatccaagctttaatttctgtttgtttgtccaatgaggaatcgcggaataaactcgattgatgttggaaactgatttttgatgcaacagaatcacaatgatgtaattatccatggttagagtagaagaattttttccgaattttttatagacataccgctctttatgtcacttcgttttagtttcagctcatgcggataggtttcggctttcttcattgcttttgccgcgtatggtttcctgattgctttacccgcgcatgttccgtcgagaattctagttattatgttcattttaaaattgggatgatggaatgttttatatagttgatattttgcgcgctgtttaatgttaaatggaacagtagaagagcttaatgaccattcgctcctcagcttctgtattcatattttcatttcgtttgaagatttttttatcatcttccaatgatttccatttcgtgtgggtgttaggtgaaaatcagaccgatcctgaagccaacgcaacc

SEQ ID NO: 66100 - DNA, 874 bp, Cucumis sativus
  Intron number 1 from transcript Cucsa.365750.1 (locus Cucs a.365750) derived from phytozome v7.0 (chr-ID scaffold0361 1; pos 3628084 to 3628957)
gaaggtgtgttacgtgtgtgtttttccaccaattgctctacttcttcacttcctccttcatcaggcgcctgtgaattttatcttttccttcaaaattactttattcttctgaatgtggaaatgccttcattcttctctaccccttattgtttcttgtgtatttggatactcggaatttgcttaaatttgttcttttggctttcttacttccttgggttgtttttgtaagattgggatcatattggagttaccagtaactgattgtaaataggaaaaggaaaaagggttcgtggttgctttgtcttgattcttacacatgagtttaggggaaaccatgtacgagaagattttgttggattttggtgtgcatcaaactgaactacgttatctgatcaaaccctttattttctgcatgataatatgtgttttggaaaaaagagcaggggtcacttcagttgtatcctgatatcagttgtgaagtggaaaggcattttaatgggttctccaatgagcagagagttttctttccttaacccagtgtagggaattcaaagttgaattgcttcagctaagatggtgccaaagggtctcgtggtccttttctactcttccttgttgctgaccagtggttgctgggttgaagcacagaattcgttttctttcattttcatttctaatgtatatgtcaagtaaatcagtgaacatccaatgactcatttataaaattgaattatggacttgatgcccttttgacagctgagacgttcttggtgttctcagaaaacttcactttcttttggaacttctattctttgtgctgtcatgttattcttatacgtttattaactagtttacttttatttttgaacaggtg

SEQ ID NO: 66101 - DNA, 991 bp, Cucumis sativus
  Intron number 3 from transcript Cucsa.359900.3 (locus Cucs a.359900) derived from phytozome v7.0 (chr-ID scaffold0358 8; pos 687726 to 688716)
ccacggcggtgctcgaggtaagtttcaatctcaatgcttaaattgcaactaaagcaaaatacggaatattaaagaaaaaaagggtcaattcgattcccttttttcctatcactgtttctaaaacttcaacccaattgtgataaacttaaaaaaggaaattgcatcaaattatcatacactgattataaacaaggtggaacttattaagtggctagcacgtgctcattcacattttctatttttatgttttaatattaaattttaaacgttacgttatatattaaataatactttattgttactaaattaaaaaaaataacacaatattgaaacggttgataaaatatagcataaactcgattaaactttggtaggagttttcattttttagtttttttttatctgtgagaacaattttctttttaaatttagtcgtaaaatttgattagatagtagcgttgaattagaaataattagttaattatattattttataaagtctagaaataaacaatttaggttgtaataggaaacttatcagctttggttctttgcaagtgttatctctttcagtatgcatttccccttgtgtaaccattactttagtctaacacctcaacacgctacatcattaatgtaagtaatcccattaagtataatgaatttggtgtagttttgttgtctttagtgtaaataatttatcaaaattttctatttttgaaaaaaattcctaacctaaacttggctgctttttttatggatgagttaacaagtaggtaggagtgaattgggctatgcagtaaaagtacatgtgccattaacaaatcaaaacaaactaataaacactaattcattagatatttgaaatttgatgaggaatgagaaggtttagaattgaaaatgcaatttagtttcaaataattggattgattgttttttttctttgatggggataggaaatatacaagaaagggggaaggaaatttgcgtt

SEQ ID NO: 66102 - DNA, 500 bp, Cucumis sativus
  Intron number 1 from transcript Cucsa.328440.1 (locus Cucs a.328440) derived from phytozome v7.0 (chr-ID scaffold0316 9; pos 11229 to 11728 reverse strand)
tgtatttgtcattgttgaatcgttcgatccggtttgtaagtaaaataaattttgtgggcgcacttgttttccacggttttcgtcttacggtttcatgattccctagatctctggttagagctaggttttttgttggtaattggatttagtaggggactgtctctgtggttcaatcgtagatccagtcatcttctacatgagtgtaggactccttagggcagatcttgtgttttctaattttaattttgttgcttccctgcttttgaacctgtttggttgttcagattcgtcgagtcatttccatttattaaaagtttctataattttctttgaatcttctgaatctgtgcttgtattacccagatttctataatcctatcttgatttcaagtgtgttgatattttcaagcttaagcaatactgatgtgactaaaacttaactaatggactgagtgtttttttgtacgcgaactaatatggtgttttgttatgtttcagag

SEQ ID NO: 66103 - DNA, 785 bp, Cucumis sativus
  Intron number 3 from transcript Cucsa.386160.2 (locus Cucs a.386160) derived from phytozome v7.0 (chr-ID scaffold0390 4; pos 1356327 to 1357111 reverse strand)
ctgtcaaggagacaaatagagttattcgctcagaggtgatgtagtaattaatatgttaatctattgtatgaaattcagattcaactttatgcaacttctaagttctaagaccgtttaacttgaatgtgagtctactgttattctagaaattattgcagaatatgttgaaggaagaaattgcccttcctagacagtttttaacacaaatatgttctgcatttcttttacatttttagccacatggactttgatatggaacgatgtttagttagtttgagaatagagggaaaagcataagctgaactagctttgaatttcttctattgctcgcagacggagggaaacttattgtaccgttctgtgttcatgaccttttgcttcttgtaatatcacaagcctcttgtcaatactgtaaaaggtccagtaagcagctcttttcatttttaaaatgaatatctggtcattaaattttctaatgaagcctgactttaattcttggttttcaatttactgaggtagaaagtttcttgggttgcttgcaatttatagacagaacacataaagccttactttacatagctccttgaattaaaagatttgggtagagacaatgccttccctcagtttttgtggagctttgaaccaatcttgtaaaggaactcagccccatagtcacctctaattgtgtttatggtttttgtactccgtagtctgtagcttaatactactcctggtactatactatctgttcaagttatgtttcatttgttgccttgatgttcagg

SEQ ID NO: 66104 - DNA, 744 bp, Cucumis sativus
  Intron number 2 from transcript Cucsa.358640.3 (locus Cucs a.358640) derived from phytozome v7.0 (chr-ID scaffold0358 6; pos 265709 to 266452)
ttgaaggtaactgaatatttgaacaataaacttcatacaacccaaatgtattgtactaaaatggcaacgaagccacaaaacaaaccaaatatttgagttaattgatgcttctaatctcttgagatcactctgaagtgctgatctgctcgtcaaagtattctcttcccctttcttccttccgtactcagtgaaattactaaatgcctgtaaatccctctaatatcatccctatcaaatcctcatgctaagatttcctcataatctcttaagtttcttaatttttcttacattgttcatatgattatgcattataggcatttccaaattctgtcgtttcatttgttaattctgctataagtggaatgcaagaaggaaattcaggagtttagtttttgtttccttctgggttttcctcacagggatggtttcataagtgacaaatgattgaagttattatattctttgttttattatcttattcatttcccaagtgctgtggtgcaggggattgttatatgtatgtgtgtgtgtgcgtgcactcttattataacttttaaaacgagttcaagtttttattgacagaggaacaatcagcaaattccatctaccgaatgcagatattttgtgtttgtttccatttagtttggagtgatgcctcaacctttcttagttttgtgtttgtgtgttgctcatgccttacttggttggtatatgttgtgagaacggagttttttgtggcaggac

SEQ ID NO: 66105 - DNA, 319 bp, Cucumis sativus
  Intron number 1 from transcript Cucsa.323030.1 (locus Cucs a.323030) derived from phytozome v7.0 (chr-ID scaffold0308 0; pos 2570615 to 2570933)
atcaaaccctacgaagctacggtgcgttttctattgcattctttctcgcttttctgcattcaatttttcatgcttacaaatctgggttattactctttctcttttttgttttcctttttttttctttctgattttgatgtttttggcattggttttttttttcttttcaaaatttttaatttatgtgcattttctgattaacgggatgttaggttattgatgtattgtttagaagtcccttgtttctctatcgtaaattgttcgcaccattttctttctgttagggttagaggcagatcacacggtccatttggttcgt

SEQ ID NO: 66106 - DNA, 484 bp, Cucumis sativus
  Intron number 1 from transcript Cucsa.357280.1 (locus Cucs a.357280) derived from phytozome v7.0 (chr-ID scaffold0357 8; pos 201083 to 201566)
tggcccagcacttcgaaatcgtcgctcgctgccaggtattcttcaaggtttcgttcctttactttttctttctttggatgattgttaaatgtttaggtttttgttgtatttttttttttattgcttgctattgaatttctttttgttgtttgacttgcttatgtgcctccctgtgtttcttgttttcttctgttttctttgcattctttttgtcccatttgttaaacgttcgttttcattttgaagcatattaaaatcgggatgtaatcttgtgttgttacatttgtaatgatggaagccaaagtccgactgagatttacctctgtattttcacatcgccttttagaaatcattatgacccattttgatcctatattttgcgtttttatgtgatatcctgatgtgaatgcctttggtgtctggaactatctgaaaattcaaactgatttgcagggtggggctaacgctgggcacacgatatata

SEQ ID NO: 66107 - DNA, 667 bp, Cucumis sativus
  Intron number 1 from transcript Cucsa.356900.1 (locus Cucs a.356900) derived from phytozome v7.0 (chr-ID scaffold0357 7; pos 1814474 to 1815140)
attaaatcacccatacactgctaaattgtgttgtggttagattacatggatatcctaagtacattgtgttagataggtacaaggttttccttattaatttttggagatagatgttcagattatctggtaccaaactcaatagaagctcggcataccatcctcaatctgattgacaaacaaaagctgttaatcggagtgtagaggtttatctagttgtttatgtggtgagaagcctaaggagtggattaattggctatactggactgagtattggtataataccacgtatcagagggcgatcggaattacaccatttcaggctgtttatggccgtgcaccaccgcctttgatctcttatggggaggctgaaacatctaattccacccttgaccagcatcttagggaaagaggtgtagcattagcagcattgaaggaacatctcaaattggcctaggagaaaatgaagaaggctgctgattcaaaacgaggagatgtagagttccaagttggtgatttagtacttttgaagcttcgtccatattgagaagtgtctttgagaaagaagagaaatgagaagttgtctccgtagtagtttgggccatatatgttgattgcacagattgggcaaatagcttataagctggaacttccaccagcagctgccata

SEQ ID NO: 66108 - DNA, 968 bp, Cucumis sativus
  Intron number 1 from transcript Cucsa.388260.1 (locus Cucs a.388260) derived from phytozome v7.0 (chr-ID scaffold0396 7; pos 709938 to 710905 reverse strand)
ttgtaatcggtgactgcctcttctttttttccgaccatttagatattagatatatcccctttagaatgatgcttaattcgtccttcccttttgttttaggattctgtttggttgttatttgctgtaaaattatctattttgttatgctgcttgatgtacaaaagaggtagaaattactgagtttgtgtatcatgcgtcttcgtgacttccgccttcttttcgctcaattgttggatatgattttggtgggtgatagggaatcaaagtgaaatggcaaaaagtgctgatacgcctgattttcatatcttgggaaaagtgtgtgtcatcctttaaatatcctagattggtcacccacaatttctctagtttataatgtgtaccttttgtatcatcgattaattttgtaagtcttcttctataggagagatgctggaccttttaactttttgtgctagaaaaggaaatgattagtgcctcattgagaatgattggctttatgtatgaacaaaagggtttgcctcattcattttgttaggatatcgtgttcactctatatttaattaggcttcttccaggttcctctttattgaatgtagtaaagatatctctctagctggttattgaatgtaaggctgtttaatacatttaagttgtagtagctgtccaataacctttcatggatttattaaatttgagcatcctttcgcaccaacatctgcgtttcatgttattgccattaggcaaggaataacagggatgacaccaaaaagttgctaagaaaaaggttactagagaccattgatagaataagaatttaaagttttgtctatctgttgtaacttgtatttcatattttcttgagcgttctaaatactgtggatgttctttttcattgttcacaaacttacattcattttctctcttctttggtagatctggtgcttttgctgactttacaattcgtaagt

SEQ ID NO: 66109 - DNA, 874 bp, Cucumis sativus; identical to SEQ ID NO: 66100
  Intron number 1 from transcript Cucsa.365750.2 (locus Cucs a.365750) derived from phytozome v7.0 (chr-ID scaffold0361 1; pos 3628084 to 3628957)

SEQ ID NO: 66110 - DNA, 594 bp, Cucumis sativus
  Intron number 1 from transcript Cucsa.395780.1 (locus Cucs a.395780) derived from phytozome v7.0 (chr-ID scaffold0410 0; pos 1216155 to 1216748 reverse strand)
ccctgcctcatctcagcattaaagatacccccattgttagtattttttttcttttgctctttcatttattttttcttttccaaatctttcccaatttgttctcttcacaagaccccattcatgctttcctttacctacttgagtcaggggacaggggggttggaggaaggggaatccaataatgcctttcctaggttgaatgtttatgggtttcttgtgagaacttttcatactgcctaaatggattgatttaatgcgtttatattttgatgggttgggggaatatttgtttagattggtcgattccatatttacttgtgattaaggtttattctttttgatttgttttgagaattttctgacttgctgatggttgcatttaggatattattacactgaactgttataattaacagattgagtaatgtaggttttatataaaattttctttatgtggttcctttttacccctttcttgtatgtttattcttcgagttcattgttagtctcaaatagctttaagtttctgaataacatgattggatgaattttttttcaggaaacttcatctgctcagtatatactacagcagta

SEQ ID NO: 66111 - DNA, 789 bp, Cucumis sativus
  Intron number 1 from transcript Cucsa.382030.1 (locus Cucs a.382030) derived from phytozome v7.0 (chr-ID scaffold0386 6; pos 163614 to 164402 reverse strand)
gctcagtttgctgacttatcatcaagaactggttctgtttattgatgtacatcggttggtgtacaaatccagccgctaccttttcgtggtatacaatctacaaaaatcacacatagaattgtttctgttagtccactggcggttcaaaattgctgactagacatcaagacactaatattaaccagtcactttagaacttgactgtgcccaaactaatcaatatccatttcttgaaacttcagtttgagaaattcctaaatgagttcccactccatatcatgacagaggatatgattataaagtcaaaactttgagatccaaaattcaaaatcttgattgaatactacatcattatcattgctttcactaaaaagtagtttgaaaatcataaggtcaataaagtcatcacatacagattgaaggtgaaacttgaattcttttcttgatgattaagtttaataagagggaaaaaagagagaaaggaaatgggttagtaaaaattattatgagtacttaggctgttggttttcctatttatatggtagcatttgtgttttattattattcacagatggaagtttctcatggtatcagagcctaacatttgtttttcttcttcactcatcttttctttttaagaagtgtttgaacttctttctttgtgaaactgaagtctcaagtctctcttgatcggagagcttcttttgccaagtgtatctgatgagttcctcaactaccttgccttcttcttcagctgagaaagactcactttcaccaatttttctactg

SEQ ID NO: 66112 - DNA, 645 bp, Cucumis sativus
  Intron number 1 from transcript Cucsa.349290.1 (locus Cucs a.349290) derived from phytozome v7.0 (chr-ID scaffold0348 7; pos 585076 to 585720 reverse strand)
tctcgatttgaaggtcagtatccagtatatccaccattaccccctacctatctcctttttctttttcttttcttttcttccttctgcttctacttctcttcttctctcgttttgatgttttttgtctttttctctcctgattcatcttccgattccttcgtttgtttttttttctttttttttttgttttctttttcctcttcttaacctaacttcatttattgccaaaggtcacatatggcagatctttgcaaattctgttgtcttgtacttttgattattaatttcttttttatgattgtttcagatggagctttcgtttccttctttaattaatgcgtttctgtattcataaatttgtcttgatgattaatgttttcctttttccatacatacttcgtccataggattcggattcggattccaaaccctagaattaatttattttatatttccttttatcgtccgccatttttttcgcttctcttttcctacaaagcaacttttctggatttttgattccgctttctttgttcttttgctttgattttgatttcccctcgggaacattaaaattaacttttcgattcattttcttttggatttctagacaggggaagtttactatagaaactgccgaaccgg

SEQ ID NO: 66113 - DNA, 427 bp, Cucumis sativus
  Intron number 1 from transcript Cucsa.363920.1 (locus Cucs a.363920) derived from phytozome v7.0 (chr-ID scaffold0361 1; pos 1500665 to 1501091 reverse strand)
tttttctggagctcctttcactgaaaaacttccaggtttttgtaatttttcttatttttatttttggtattttttttcttttgtgtttttgatgttaatttggttgagttttatatgatgtatctttcttagtttctgattcttaatttctgatccattttgagatttctgtacctttattttcgttgaaatagagctcacctccttctttaatgaagtttttatgagattatttggctgtattcactaatttgtgtgttttggcttcttttcttttgtaatttctgtcttatttcggttcatgtagacaattttttgggttatttgtttcatattttcagtattgtttcatttcttgattcccccctgattttatggctttctctgaacagaaatcaggtttctgggcgtttttttgtagaagacg

SEQ ID NO: 66114 - DNA, 864 bp, Cucumis sativus
  Intron number 1 from transcript Cucsa.367060.1 (locus Cucs a.367060) derived from phytozome v7.0 (chr-ID scaffold0362 5; pos 517538 to 518401 reverse strand)
gagtttctggaaattggtatgctgcttttttatgaaaattttctgtctcttttgattgattgttcttgaatcttttgattcctttcactatcccaaattggacctacttttcaaaagctggatcataacaacaactgagaaagataatgatatgttgtactgtgtaagaatttttgtgtgcttgaagttattgcttagtgtatacttagagtatgtggatgaaatgaagggctaaagttgtttgggtctttaaagttttatggcatctttgacttctagtgaaaggagctaatctggctatcgtcggttatggaatagaatcaacaaaaaggttaactaggttaaagtggttcaaatcttcacctgaactcaagaaaatagaaatagaaagaagtcaaaagaggaatcaggaaagttcttaagattagctttttgtgatattgtacattttctgcctcctcttctatttttttttatgctttttgaataataccgttttctgatatttcttgatcggaaagtggttttgtaatccatgtttttggtagggattacctttagtctgaccctaggatggtctctcttattaatttttgttaagctgtgccactatccatgaggttacattaatatctgagacagaggtaagagcaagatagtactgttcattttgataaatttggaatataagccaaaaaggcatagggattgaataggataatcttcaaacaaatggaatttatcagacaatctcgctttctttactctgtcttctgggattattgttgtgttttgtttgttacatgaaggatatgtaactcgttaccaggtacatcaagtttgacacgttcactcctgcagcag

SEQ ID NO: 66115 - DNA, 642 bp, Cucumis sativus
  Intron number 1 from transcript Cucsa.365300.1 (locus Cucs a.365300) derived from phytozome v7.0 (chr-ID scaffold0361 1; pos 2914669 to 2915310)
attttgatcctgaccaaccttggcccaactccgttttcttcctactttttctctacaaaaattacacatttctttactaaccgtttctaatttttttttttcttgttttcacattctctttttttaaatatatatattaatttaatcagttttaaaaaaattatttattagttaattttcagatgttgagattgtttttataacactagttagtaatggaatagtgaaatttccattttttttctactctctctcactcaaatccttaaaagggtagtagtcgtgtttactaatttgaaaacatgttatttagatttattttgatattgatatagttttttatttacaaaattgaagccgaaattttgaatatttgtattttgtttttgaattcaatttaaactaaagtaagcagaagtttaaaataactaaaattaaactcattattataattaacactactacactttcaaatctctataattaagaaaacaagacatcgtttttaaataaatagaagacaaaaaataaaatgatgattataaattgaacaatagctagttttaacaacatgtgcaggggtgaattaataagtaaatgttgttaaaaatgttaatgtatgagagatgtttggcaggatct

SEQ ID NO: 66116 - DNA, 899 bp, Cucumis sativus
  Intron number 1 from transcript Cucsa.370480.1 (locus Cucs a.370480) derived from phytozome v7.0 (chr-ID scaffold0367 8; pos 200480 to 201378 reverse strand)
aggttgatcaaaatactctcttcgatctcatcttggtgagttctttttttcctatctctctctggaactatgataattcgtggtgtttctcagtgaatttgatttttcttgttgctctgttttactctgttgataatttggggattttggattgtcatttaatgatgttttgtcatgctctgtccttttctcatttcttctacgaattggctatctatctttgcgatttcttttgttgattggatgatcggatatatccttagaatgatctcgcttccttgttttagaaagaactctggaattgaagattactctcaatcaatgaatcgcttaggcccgtttggttaacataatccaaattctaaaaaaaaactcgtttttgtagtgttcaaaatttgacttggtttttgaaacattcaagaaatttagatgtggaaagtgttggaaaattatgaacaaaatgattaccaaataggacttgattgatcatgttcctttgggatggtatgtttggctgattattctaaaatgatttaggaggccaaacttcaaaggatcctttcccttttgctgtattttattggattaaacaacaatcatcaaattggtttaagcccattaaaccctttccttcaaaattcgtagtgattaggagtagcaaaggaagactctatcaaaactggaattcctcagttacaaatcatatcaatttggttctttaatatctccacagaattgtttataagatttattctacaaagtaatatttgttgtataaattcactatacatggggtttttttcccattgctgtttatggtttataatgggtgtgctttctttgttttggtgcttccaaaatcaggctgctaactatttgaacatcaagagtctactgga

SEQ ID NO: 66117 - DNA, 495 bp, Cucumis sativus
  Intron number 1 from transcript Cucsa.312270.1 (locus Cucs a.312270) derived from phytozome v7.0 (chr-ID scaffold0299 5; pos 1718887 to 1719381)
cataacgaaataagctttattcaaacattgttggggttctacttcactgcttacagttattctatgttaggaattgttttgaagacgtggtcaatatttttattcttttttaattttatctcgttgctggttgcatagtttaactgtgcactggagctttcttgtatttttcagagttatgttaagttgtttcacgtgtcatattatttttatttgattagagttgaattcatgtgtctgttaccttttaccatctcatttcagttggaagggttttgtatatggatccttaagattttttctacagttgatatttacataccaattcttgcatttcactttgtttcctgtttttcttttccatattgaattgtttgtttaaacttccttttattgccgcaacttttgatatatgcaatttgtttcctctttcaaatcaattgctcttctgctttgacagtttagcaactatagcaaggaaaagaccagttcatt

SEQ ID NO: 66118 - DNA, 696 bp, Cucumis sativus
  Intron number 1 from transcript Cucsa.321050.1 (locus Cucs a.321050) derived from phytozome v7.0 (chr-ID scaffold0308 0; pos 903507 to 904202 reverse strand)
gttttgactctgtttttacacggccgtcgtcgccatcgtcgtcgtcggattatttcacttacagaggtagtcttctctagttccgccgccgctatcgcctccattgaagaagccggcagctttttatttttgattttgattggttttcttttaaacccgaatacccaatcaggaaattttccttttttaactttttgaatttcatcctccaatttattattattattttttcaaatgatggtaatttaattatcatttcatttttttacttttaatcttatttttctctatttatattttctaatttttttcttaaattgactccttcgtttctaaatattaaaaaatagtgtgattttaaaacgaaattataagcttagttttcaaatttaaaaaatcaaaacacaagtgattaacaaacgagcttaaattactatcattttaaaattttaataataaaacgaggatgagattaataaaggaaaaaaattgaaatttgtgttgtacatgtttgttccttttcttatttatttatttttccttattctcttagtggcattgtgtgtaattaagcttcttacaatttccacatttgtaaattcgtatgtattatagtagattacaatttttcccctacattatgtatattatatatatatataaaaaaagcttttttttattattattactgagtga

SEQ ID NO: 66119 - DNA, 787 bp, Cucumis sativus
  Intron number 1 from transcript Cucsa.342010.1 (locus Cucs a.342010) derived from phytozome v7.0 (chr-ID scaffold0335 6; pos 4420092 to 4420878)
tttggtaagaattcttatttaacttttatttttgtttttatttataaaaataaatattatttacctgtttttgaaaaacaaatcaaattttgagtaataaaaaaggtaaacttttcaaatcttggatttgtttttgtagtttaatgaatatcaatcattccactcacaaagattagttctacaaataaaatagttatttagaaaaatgacaaaaacatgtcaatggcaaatttattcttaagataaggtgataatataaataaatgacacaaataggacaaagtgacaaatattgacaaaaatatgtgtcaaaattctgagctagatccaccattttcactcagatcaaaagaatgaattcatagagcaggttcacgatttcctagtggaatgattgatattctttaaactccaaagacaatcccaagatttaaaaaaaaaatcaaacaaataagaaatgattgttgatctcttaaagttttagttatactatatgttgccttaggatgattcaaccatcactcagaacctacccttagttgttcgtagtatttaatatttttagaggcaaaatcaaacaaacaagaacacgtttttaaaaaatgcaatccaaattatgtgagtgttgtatttcaaaatggttgtcgttattgtttcttataaagtgtattttgaagaaaactttttcaaactgataatccaaacgcactattttaactatttcaactaatacttatgaacttattgtgtagactctaatattgggtggagcagagagcacacaagt

SEQ ID NO: 66120 - DNA, 957 bp, Cucumis sativus
  Intron number 1 from transcript Cucsa.349230.3 (locus Cucs a.349230) derived from phytozome v7.0 (chr-ID scaffold0348 7; pos 529099 to 530055)
aattacttgtgatgttgacccaattacagagcttttaaagcagttgtaagcttattttccggccaccattgattgcagataaagttgatggaaagaaagaagaaaatgggaggggccaaaccgcaaagggaaggtctttaaggggggtggccattaatttgagtttgtccctatactcaaaatccatacttctatgtgggacctcaagcacaaccaaacatgctccataataggagcagctcatccattctctgaccaaaaaatgtgtctcacctatcaccagcctaacaatgccttcatcattatagaaccttttttttttacttggacagtctttcagtaatacttcatgatggaaattctaatgtttgtcatgataaaatatagtttgatttgttaaagttttctttgtttcttctctgcaattgatatggaagttaaaattgatgcggattattaagatcttagaattttgattgatattaatagtagatttcagctttaatatggaattaaattgactagccaacaacctacctaaaagagataaaagagtcttgacaccactactaatcaaatattcttgagagaattattattgtaattgtaaatgatctacttaagagcatggttcaaatgaggcaagttctcagatatttaagcaaattaacaaagattaacggaatcaaagcatatctatggattttcttcgagaatgtttgtgatataagaaatatcaagaaatgagggagaaagagacgagatataataatgtcaattcaaatctacacaaccactcgtttctcaaggagaaaaaaagttgctttcatctcaacattattgatttaaaaccttatccagtcacgagatatcttgccaactttatctgtttaaccttataaatctgaattctactctaaagatacatccaagcaccaacttcacagcagaccgaac

SEQ ID NO: 66121 - DNA, 410 bp, Cucumis sativus
  Intron number 2 from transcript Cucsa.331840.1 (locus Cucs a.331840) derived from phytozome v7.0 (chr-ID scaffold0325 6; pos 19776 to 20185)
cccagaaacagaagaacaccaacatagaacacgaggtaatttgtaagaaaaattaagccgtttttttcccttcttctctctagctctatttttttctttgattttactcttcatcactgtacttaattcttctttctctctctctctctcaagtttctatttttaatttgatttttgctcttatagttagggttttgtttcaagtttccctttacgtagatccaaaataacacaaacacgcactttattctatgttaataataaagttgtaatttttattttctcatgaaatttaaagaaggtttggatctggtttgggtttattttggtgatttatggaggggagggggttgtttatatatatatatattttttttaatttagggaaggaagaaaaaaaaaagggaaaa

SEQ ID NO: 66122 - DNA, 577 bp, Cucumis sativus
  Intron number 2 from transcript Cucsa.318610.1 (locus Cucs a.318610) derived from phytozome v7.0 (chr-ID scaffold0307 6; pos 161802 to 162378 reverse strand)
cttctcttggaaataagtaagttttttcttaatttactttatgcatataataacacaaatgatctaatttattgttgtgcatactaaaaagtataatttaaacacatcaatttgttggagttggttttcaactactcttaatattttaaaaataggcttgaacagatatatattatttatctatttgggttttaatcaattgcctgtgtttttcttttctttattttagttcataaattagtttattttacactttttaaccccctaattttaaagaattattttatttaaatgaaccctcacttaaccttttttatttagagtggaaaatatatatatatatatattatttttttattgggacatattcattaagtagatgaaaaaagaaacaaatgaaagtttttttgcttttaattatagaaaattattgaaaaccctaaaatggtgttttttactttttattttatacaaagtcgcacatactttagaaagttcaggcagcaaaattaggcaaacatcgaagctaattaaattttgagaagtttttagttttatttgtttgtttgttttttag

SEQ ID NO: 66123 - DNA, 935 bp, Cucumis sativus
  Intron number 2 from transcript Cucsa.340860.1 (locus Cucs a.340860) derived from phytozome v7.0 (chr-ID scaffold0335 6; pos 3243731 to 3244665)
cgtggacagtaaaatttactgtaagttcggtaattttagcgatttcacattttcacgtagttttccaaattatgctattgagcctgatgttgtctccagcccttcacctggttagggtgaaaaagtcacgctttttctatttctctctattaacacgtgcttgttatagcacttgaggatcagcattacgaagaaagttgattttaaatttgttcgatatatcatccttcaaaacttctattcacttaaaaataattttgctgtcataatataaatagcaactgctttgttattttcccttagatatcacctacttgtggtagtaagcattttttaagtcagacaagggttttcattgattctatggaagattggaaaaatgagtactaatttcaaccttatgagctgctatgttgtttcgtcttgtatttgggttttaattgtaatctttgtggtaccctttggatatttcatttatcaatgaaatggtatccaaaaattgaccttacaagcttacagaaagctgctccacaagaaatcaattagtcttttttgatagtgtacactgaaaatttaataagcgcctggatttccttttaattccataagaattttactattttagtttgttacttccaccattgtaatagttgaactcaaccagatgattttcatttgcctcccattatagcactagaaaatcataatagttctgaaaacattccctctagttgcttgtttcattgcttttcaagggctaatgattttcttgaatatattttgtctgtattgtctcgttttgtactggtgggcatctgctgcatgttacttgtgcatggaaagcatgttatttaattcaaacacatcggtggttagcagaatgttgaccccatgtattttgactttctctctataggttctggattgtaactgat

SEQ ID NO: 66124 - DNA, 495 bp, Cucumis sativus
  Intron number 2 from transcript Cucsa.322950.1 (locus Cucs a.322950) derived from phytozome v7.0 (chr-ID scaffold0308 0; pos 2515552 to 2516046)
ctcgccactcttggtcgcattttcttcactagcaagtacgattttctaaactttcttcttctatcaatttcactttttataatatattcttttcaaaataaacttaaatatttatcaacgaattcaaatacgatattccatgtgcaataaaattgcattacatatataaatattttacaattttaccttttgaaattattatcaaatagattttagaaacaaaataagtgcaatgaattttagttttcttctgttgttccagtgaaaaattactttgaagattttagaaacctattattaaattataatgtaaccatcaaaattgatgaaataaacttgttttctaattcattactctttaagtttgaacgcctaacgtcatgatctattggtaaagtgataatgatagactttagaggtattggaagataaaagaagaagtatttaaaacgtgttaatgagagggaaatgtttggatgtgggcttttagggtgt

SEQ ID NO: 66125 - DNA, 785 bp, Cucumis sativus
  Intron number 2 from transcript Cucsa.349720.6 (locus Cucs a.349720) derived from phytozome v7.0 (chr-ID scaffold0348 7; pos 946103 to 946887)
gggtggtatttttgagttccagaatcttggtgttagtaagactgctagatccttgctacctttttcttttattcttattcactattgaactatttgtttggctttcttgcattggggtttatcttaactttgtgaagaagttgtaatttggattgttctttgatagtataaaatgtgaatgatttgagcttgatttggatctggtaactctgcttattgtttttaaaatattttgttgaccttttgttgtactggaaaacaattctttaagctgaaatcaagtcattttcttactcgaaatccgtgcctttggtgattaattctttattagggaaaaagagtggaaaagtggagtttagttccttattttaattgtcattacagaatctaaaagtgccaggatggaagttctgtgcagaacaccctgggcctttttattgttattttattcttttggaaaaattttcaagtattaggtgagcacatgctttgttatttggtcgttttctctctcttaatttttcattatgaagagaaaccatggaaattaatcaaacattgacaagatgataaaaaaaaacaatatgcaatgtttccttactcgaatggacacttctataacatttgacgaataacataatttaagtagataaaggaaataccattagtgttttgattatagttcgaaattatttgctttcatttatgttgtttcttactctaaattatatgctcatcaaccaatttcagggggatcaaaataaatcttctattatcaggttgaa

SEQ ID NO: 66126 - DNA, 603 bp, Cucumis sativus
  Intron number 3 from transcript Cucsa.339510.1 (locus Cucs a.339510) derived from phytozome v7.0 (chr-ID scaffold0335 6; pos 2112813 to 2113415 reverse strand)
gtacttcgacttctgaaaggtgcaaaagtgtcccaaataggggcagaatgtgaaatatgtcttgtatatacaactccaaatgtgagaacactttgaagaatgtggtttgactggtttttttttgtcgatcaattaggttgggagcatcaattatggctgaggagaaagggattttcttgagcagcgcttcctcttttgctggtgctactcatgataaagaggacagtgatgaacagtcaactgtggtaagttttttgcctgtgtataacacattagcttaaagatagggtctagtatttattttcagtaaattggaaggtgaaagatgagagacctgacaaacaggatgttggatccagaaccagaagtacaacaaggactcaaagggcaaggagcttttgtcagatgaaactcatgtagtggggagtgattcagaaaggatggacttggcctcaagaagtgcccatcagcaaaatttagatgagatgtaggatgcacatacactcgggttataacttattgttaatgtcctatgttaatcatatgctgtctattgtgaccactctaggttggcggcatcgattgcagcagaagaagcaagaa

SEQ ID NO: 66127 - DNA, 401 bp, Cucumis sativus
  Intron number 2 from transcript Cucsa.339510.1 (locus Cucs a.339510) derived from phytozome v7.0 (chr-ID scaffold0335 6; pos 2113522 to 2113922 reverse strand)
ttcgtaagaccgccgagaaattgcttctcaatcatgtgagtgtggtttccggttttcttcgagttctgtattttggagctatttactgagaattcgtgtattagtttcgtctacagatattaattattttgcttgtgtttggaaattttgtctagtagaatcaaaaagtgtgttttttaaagagtgaagtttgattcgatacaaatatctcaagcttatttccatcattttgcagtccaccttttaggaattacgtgtcttttccttgagtttcatttcatatttagttacgttggatgtttgcagcttttttcatttttttttaattcaagtttcgacactgctgttgggagctaaatcttgaactttttcttttacctcttgtttaatagatcaaggta

SEQ ID NO: 66128 - DNA, 965 bp, Cucumis sativus
  Intron number 1 from transcript Cucsa.388290.1 (locus Cucs a.388290) derived from phytozome v7.0 (chr-ID scaffold0396 7; pos 732240 to 733204 reverse strand)
acatctctgcttctccacttggactcaaacagaaggtttcttctcttcattcttactcttcttttttctttcttctgcaaatttcatgttggaactatggggatttccaggcatttctcttggtatatatatatatatgaaagccgtctatcctcgtctaattatatattttgctatatttgtaaatattttttttagaagatgtgccgtttaaaataaatttctaatttttaatgtatggtggtactggattgatatagtgtatttggttaactgggttggtttactataattgagcatagaactgagtttagaaaaaagtaaggaaataggtggatgaaagatggtttatggaccatttgtgaggttttatcaaacgttcggataaaagtgaaactaagtctaaactttagtggcttaattaaaactttaactcaaggacatagttgtacaatctatggaacacatcttgctcgagaagatcgtgacttaatttcaaattacagggaccaaactgaaatttaatctgaagaataatagagatatgttcttataacataccttaaagagttataaatttccttaattgtggaagttgtgcgtttctactgttttatttaacattggataaggagaaggaaaatcataggtgtataagtaaggatatctgttttttgtttggatgaaatcaaaaccaaagtcttaaggactcatgattgttatgaaaatattgggtggttttgttggtatttgactcattactttggagttttcttgattggcagagggagaaaattcagattctgttttcagtgaagtttgttttagtttcaactttcttttaatgtggtcttgtggacttggaactgcaaattccgatatgtttttgtctccttactgacttcttattttatgtaattatattcacaggtcattgggattaacggacagtttcctggacctgt

SEQ ID NO: 66129 - DNA, 573 bp, Cucumis sativus
  Intron number 1 from transcript Cucsa.370380.2 (locus Cucs a.370380) derived from phytozome v7.0 (chr-ID scaffold0367 8; pos 99706 to 100278 reverse strand)
gtatatctgtgatcatcttttccagcatctcaagagtgagacatctactctttgcaccaattcaaaactcagaactttcttattgcagctttacattttctgttcattcctatttgatcatggagagaaaggaaagaaactagtttgtggatcatttaggtatattccctgattttttagtaaaaattctcactgatctctctctctctctctcctgttttctttttaaatgaagagttttcttgaagttatggttttgtcaatgagtttgtaagatatacctcaatgattctgtaacagttccttgtaggaaagagcaacttggttgtaattaatattgattcagataaaagttgacaggcaattggaagattcaggagtcacttggggttatgtttactaggatagaagattctagtttccagaatcaaaatactcacttcatattttgataaaaggaatctctttgtcattgattgttgggtggatggtgatacatcattgatgtttgaaagttttgttgattttttttttttttttttatgtgtaggatttacttctgagcaagattta

SEQ ID NO: 66130 - DNA, 515 bp, Cucumis sativus
  Intron number 3 from transcript Cucsa.395140.2 (locus Cucs a.395140) derived from phytozome v7.0 (chr-ID scaffold0410 0; pos 770105 to 770619 reverse strand)
gattgattcacaaggtagtggctataaggtttctggtttcttcttctgttatgtggtttcctttgacttatttgagaagctccccccacccccaccccaccacacacacacttaaaagttctgtttcatatcatataaatgtaatgaagctcaaatagtttgtgtgtgtatattaatttgcatgcaccttgccgggactaacgtttgagtgtcaagaaaactcctttggtattacattttggattgggagcattctaagctctttatcaaggccacattcttttttttaccactagttcaacccataaaatcaaattcaaatttatgtatgttcaagtgtgatggggctttctaattgtcatttatgtatgttcaaatatttgtattgtgtttctgttccatgttcttggatagggaacttgttgccacgtacaataacaaccatcttgggttctgattatgtctggcttcatgctgtaggaggagcttcagttggcacttcttaaaagtccata

SEQ ID NO: 66131 - DNA, 392 bp, Cucumis sativus
  Intron number 1 from transcript Cucsa.349340.1 (locus Cucs a.349340) derived from phytozome v7.0 (chr-ID scaffold0348 7; pos 619748 to 620139 reverse strand)
caactctttgcagcgatctaactccataaacgccggtcaggtaagcttcttattcttccccttcttttttccttcatcaatctgattctcttctacctgccgtttgttcttgaagcttcactaccttttcatttgacttttcaattcaggttttgaacttcttctgctacttttgttgtttttgtgaatgcatctggtctattaattattgttcttctttttaatattgaggttgattttgtgtttctatattttctttttccatttcttgctgaagttggaagtaaagctggttggtgatgtttgatatggaattatgatttggattgtttgatgagatatgtaagtttttggttttgttttgttagagcaatcttttgttcgagaaaaaa

SEQ ID NO: 66132 - DNA, 377 bp, Cucumis sativus
  Intron number 2 from transcript Cucsa.348630.2 (locus Cucs a.348630) derived from phytozome v7.0 (chr-ID scaffold0348 7; pos 79031 to 79407)
gaagaagggctaactgtaatcttgcttctcttggtgctcataagccacatcctcccactcctcaacatggttcttcttgattctttttcatctgtaccctttttctttgttaactaaatgctttgatctcttcaatggattataaaatttcccacatgcaatgtgtttgtttttttccattgctttctttgaattctcaccttcaatggaggaggttgaatctgcattttgaaggacatttttttgtctttttggctgtgaaacatatgaaatctaaaacaaacataaggggagtaatattttctcaaaagtaaccacaaagtttgtggaacaaatttgtaggtgttggtggaagatttagaggtgcatctgggatt

SEQ ID NO: 66133 - DNA, 181 bp, Cucumis sativus
  Intron number 4 from transcript Cucsa.359250.3 (locus Cucs a.359250) derived from phytozome v7.0 (chr-ID scaffold0358 8; pos 236607 to 236787 reverse strand)
aactagtaactgaaattgctcgactcaaagctgaggttaattatacatacataaattgcttttccttttttttttcttttcttttttgtttttgctcttacaagttattgagatcgattcaaactgaacttcggatttatttacaggtggagagattaagaacagctctggataaatacgc

SEQ ID NO: 66134 - DNA, 532 bp, Cucumis sativus
  Intron number 1 from transcript Cucsa.398070.1 (locus Cucs a.398070) derived from phytozome v7.0 (chr-ID scaffold0415 8; pos 641394 to 641925)
ccccatcaaggagtgctttgaggaaaggtacgttggtaaaaacctcccactgttacggtagaaacaaacaaaaaattgacaaaaaaaattaagctagaaacatgtgaattaatgtggaaaaattccatgttagaaaaaaaccacggaccaaaaaatgtcaacatatgaaagagtataccaatcacacataaatctctcatcgattccaattacaagagcactctctccctctaaagttcaactacgagccgttggatagataagtaattagaatatttaaattttgattttggtccctttagaataaaatttgtctatacctaaattgattggcatacgttgagcaaatatgggaacagtctaaaatgtccttgggtcagactctcaagaacgtggaggaaggtggaagcattgccctcatttaagcttggtaatggaagaagattggccttctggacagattcaagggcaggtgatatatccccctaaatctccagttccctaagctattcagaattgatttgctacctat

SEQ ID NO: 66135 - DNA, 624 bp, Cucumis sativus
  Intron number 1 from transcript Cucsa.356530.1 (locus Cucs a.356530) derived from phytozome v7.0 (chr-ID scaffold0357 7; pos 1339516 to 1340139)
ggttttgtgcaatgacttcatgaaaaatgtgactcaactctaagtaggccatccttagcccattttcatttgttgtgggataatggtgttaaagctattgttttagaaatatggtttggaaagaatccgcacatttttcacaacttatttcctttgtttgatcgtaatcagattgctcctgtcaaagcttcttcacagtgctctcttttaaatcggaatggatttatttctccttctatccgttagtttgtaatttagtcttgttctcttgctatgttcttgaatattctcttcttcttttttttttcctaagtagactaatttcattaataaaatgaaaagtgttgttttcatttttcataatattaaaaaaattacaattaaaaaaacctgcattttgaaaatgatttaaatggaaatagggcaaacaatactgtcaagaaagagaacgcagaaaatcagaactcaaattaatttgttttaaccaaaaaagtgcagaatgatctgtgaagtagtgcaatgtaatcctttcgatgattcaaagcaatcttgagtaaccacaaagagcctatgcaaggaagtcaaagagtggttcgagaatagctgcgccgtgcaagaacacag

SEQ ID NO: 66136 - DNA, 561 bp, Cucumis sativus; identical to SEQ ID NO: 65703
  Intron number 3 from transcript Cucsa.385410.2 (locus Cucs a.385410) derived from phytozome v7.0 (chr-ID scaffold0390 4; pos 732734 to 733294)

SEQ ID NO: 66137 - DNA, 993 bp, Cucumis sativus
  Intron number 1 from transcript Cucsa.364700.2 (locus Cucs a.364700) derived from phytozome v7.0 (chr-ID scaffold0361 1; pos 2097938 to 2098930)
ggcggtggtgctaggcttgctttcttgctgaagtagagtttgaatgctttggaagtttggttttcttctttgttttcgtgtttaggatgaactgaaatgaacatcgcgttgaatctaacgatctttaacatcaataactggttaattttggttcattgtcagttggaactctcttgcttgcatgctctagtattttctttaattgttgatggatcgatttgctttctgttggcactctactgtgtattatggataatgtgaaaaattagaaatgtcggctggttagttgactttctggaagctgagagagtagggttttgagctggggatggatatcgttcggttagttagaacttaatcatctgatatttttcgacgtaatggtttttgtttagtttataaagtaacatttgttcgctccagtcgtgtaaagacattctactcagagggcacgttcggtattggttggtatcagagacctgggctgagtttttattgtactttaggaatatgtaggtagatcggtaatgtggattgtctttgatgctaattgttagaagctgaccgttagtttcgttaaagaatgatgggtgattgtctgagatgcttttattctttaaaatacaatacaggcttgttccgtttgtgcaatatatgctctgttttggatggacgagcattaggcagtggacgattctaaaattttaattgctctacgattgcaagtaactgttgctgtcaatcatctttgtgccaccaattatttagcaaacttataaagtctacttctgttgtttgctttttgcttctttgattttcatctattagtttatctcaataattctctagcaattcatattcttcttctctccgaagcatgcaactcatgtatctgatagccctctcttgatttatgccactcaagctaatgcttatgtcctatttgttctattcatcaaattttatgcaggaatatccttagtgcatcaacca

SEQ ID NO: 66138 - DNA, 694 bp, Cucumis sativus
  Intron number 1 from transcript Cucsa.360140.2 (locus Cucs a.360140) derived from phytozome v7.0 (chr-ID scaffold0358 8; pos 890708 to 891401)
tattttctcacccgagggccgcctatttcaagtcggtatgtatgcaattcctcttcgatcttcttttttttttactccttgtttcgatcgaatcagttgaactctctattggggtttgacactttcaattaatgttcaagaatggttgttcctgaagtgttcagcttcaatgttgaaatccctcgttacaagaaaggaacatcttccttctgaactgtgatggatggtgtggtaaccgaggcggattaattaaacgtattcagtgtagtttctcatttctggttctaatatataccgctcggaatttagacgaggtgggaacgtcaaatttatttatttttatttcctgcgggaaaactaggtttttctcatatacgtgtaatttagggtgttggctttgatctgtgtgagcattagtctttcattgagtgcgtgtatgtattaaattttttgaaaactattagacaaagccttggatactggttttgcttttagtggattcatgtattagaaaagattacgcaatgaattgtttccaatcagtaaattgttagcaaatcaaaggcgatggcgttccgtttatcatacatttttccatgtcgggttgagttttaggttgtcactttgttagtaatgtaatctaatgacttgtttgtttgtttttttttgttttgttgaaatcatcaactagaat

SEQ ID NO: 66139 - DNA, 572 bp, Cucumis sativus
  Intron number 3 from transcript Cucsa.325850.1 (locus Cucs a.325850) derived from phytozome v7.0 (chr-ID scaffold0313 2; pos 148467 to 149038)
ctattgcatctcgccaggtttgtgtggccaagattgtggtttaggtttgaaaaactatcttgtcttgttatcatggctagcagtttcatatgatcgtaaacaaatcttattaaggattactcgaaatttttataaaatccatttgtttgttagcttatcttatatgttttagttagttacatctttggctgtttgttagcttcggctgtggcctataaatagttgtatatgccctttgttagattcatccaaaacttaataacatctcaaattaagggtcatcagagtgcatctagatgaaataccaggtattaaatttaaactaaaaactcttaaccaactgaaaacagactaatttaaaaagaaaaccaataacatgtagtttggaagtctctgatgcctacgtcatgaccaacatttttcttccttgatagctatttattttcacctgtaatcctcttacaattgaggggtcatattaagttgttcgttgtcactttatagaacaggagaaacatgtatttcttcacatttatataatttgattatgggatatttttcaggatctttta

SEQ ID NO: 66140 - DNA, 555 bp, Cucumis sativus
  Intron number 1 from transcript Cucsa.325220.1 (locus Cucs a.325220) derived from phytozome v7.0 (chr-ID scaffold0312 7; pos 8558 to 9112 reverse strand)
gttacaaccaattgacccatcagctcttccttggggttagtatcaaacttctttttctttttttttctatacatttcttcacttcatattataataataatagtttataaaaaaaatagttcgcttaaatttagttaagaactcaagttaaaaattgggaacacagttttgaaaacaaaaacgaagtcctcattccataactagctacttgattttttttttttttttgaaaattttgttttatgaaatgtctatgtaggtttcaattttattagaaaacatctttcaaaaattataaaaacaaaaatcataaaattatttcattgttaaaaatatttataaatataacaaaatttcataatttttcatgtcagtattctatcagtctcgtatcaatagaagtctattagtatttatcgatgcctataattgataatagattgtgaaattttgtaaatattttcctttttttttttgtttattttgctatatttgaaggtgtttgaaactaaaatatctttaaattatcatgattttgggtgaaacagaagtttg

SEQ ID NO: 66141 - DNA, 944 bp, Cucumis sativus
  Intron number 2 from transcript Cucsa.390860.1 (locus Cucs a.390860) derived from phytozome v7.0 (chr-ID scaffold0403 1; pos 60534 to 61477 reverse strand)
agcttagaaaggtgtatcatttatgttttgtttttttttcttgtccaatatggttttgtaataaatatctgaaaaagacacaagaatgatattcatgtgttgtcataggattatggttcacttatttggcacctttcatttacattcacctaagaacatacattctagtgtgcccatgtccggcacgtgttggacacattgacacttgttgcatacatacagaacacctcttaggacaacaaacgtgtcagacatgcatagaacacttgttgggtagactaaaaaggcacttgtatgtttgataattataatgtttgagtgtgaaatacaaatacatcaaactaatatttaaagcatataaatgcggcaacccatttgctttgaaatttcctatgatatacaaatgatatatattttagaaaaatgtacattttaataaacatgactttgttgtgtctgtgtcgtgttgtactagtgtctcgtatccatgtttgtgctttgtagacattcatcttcttggtataagttcagcctgccatatgtaaggtttctggttagcccgtgttatagtcctattgcatgccaatagatagacataataatggttaagacaattggcctatatcagagattaaaaaagtggtattgtcttcttgatatttattaacaagtgctgcaaggagggggctcatccaattgtgtacttagaccacattttgctgcttttagttctctgcatttcataactgttcctcatgttttagtactaatgactgactgcaagtttgtttcgcatttataactcatgggcatatgtttccttgaatagaacattcttcaacataaccatgtatttgtcttttctattgtattgaaaattttcattttgattggacgttgccttttatcatgcatcaaatttgatggtttttgtgaatgaagga

SEQ ID NO: 66142 - DNA, 426 bp, Cucumis sativus
  Intron number 1 from transcript Cucsa.390860.1 (locus Cucs a.390860) derived from phytozome v7.0 (chr-ID scaffold0403 1; pos 61634 to 62059 reverse strand)
gcgagtcaaggttctttcggagttttggtaaatgttacttacaaggcactctactttctttttcttttttctttttatggtctgaagtttccatcacgttgtttcttgttgcttataatggcaggattgtagtttttgtttttggattttctcttggattctatatctattcattttttatattattcttgatggttgtttgaaatgaaaaactgaagatatcatttaaattttttgttgcaaggaatgatgaaaggagaaatttgttaaactaagtcaaactgcccaaaatgttcattcttggtttattcctgtgcttttttagtcttgtgattagtaagggaagtaatgaatttctcactgttgttgcgcattatgtttgtcgataaatttgcagcccaaaaaatcctgcacttttagggttaa

SEQ ID NO: 66143 - DNA, 565 bp, Cucumis sativus
  Intron number 4 from transcript Cucsa.327400.1 (locus Cucs a.327400) derived from phytozome v7.0 (chr-ID scaffold0315 8; pos 28474 to 29038)
aggtttgttttctactgccatttgctatgtgtttcatgatcttttgttatctgtgttgtattaaattattattccctttatctgcctttcaagggctcttggattgaagttatttttctcacttaaaatgttgaggcatgctcttaatatttctagtagatcagtcatcagatacatttgaactcagactgtcaaaaattaaaataactatcagattagttcttagtccaggtacatatcagaacatattctttgtgattgcttcccatagagagtttcttatctcaatgatgtgtaggtgaaactgaagattttacggctgacattttatttattaactaaatatatactcaaggtagcaagcgtttcaagagttgatggatctaatgaatatagaaatgttaattttttcatgtattgtatgcacgagtagcttgagtaatgacaatatttcgttagttgtaacaagactaacttgatatgaaactttctagcacttagattttagtaatctgaaagatgatagttatggtccaacgtacatcttttcttcaggtgaggaaat

SEQ ID NO: 66144 - DNA, 779 bp, Cucumis sativus
  Intron number 2 from transcript Cucsa.321390.1 (locus Cucs a.321390) derived from phytozome v7.0 (chr-ID scaffold0308 0; pos 1183361 to 1184139 reverse strand)
cattgcggcatccaaacattatcagattcaaggaggtaatgataatttataataaatgagaaatgggttgggatttaaatgtatttgaaatgtaatgggaataataatcttcttatgaggggttttctgacatcaaatttgacttcattctcaaaaaaataataatgaagtcaactctcagcccctaggctgcttttttttcgttgcctcttttctgttctttataatatcgtatctcagtttcttattcaaagaaaaagacttcattagcttacttatacctttgatactttttcttttttggtaaaaatgcgcaatgcaagattggtttttacctaggaggctgtatcacaattcttaattttcaggagagtaactaatcccctcagccaagtagattacttgcttatgattcatgtttaacaattttatttctcgatattcttgtcttgagaacttgtttttggttgttggctatgggctaaaagttcaaattgttactttaaaaagtaaatagaaaacaaactcgactttaagaaacagaaccgttatcaaacaaaatctcacttttctaccttgatccattgatctcattctctcagtataatacactaataaacaaaccaaaatccacaaagagcaaattgtatagcaattcattagtcagtttgtaatgttcttatcttggactttgtaaagattccacatgggtggaacacctcaatgagtgatgtttgcctgcaggtcttcttaaccccaactcatttagccattgtcat

SEQ ID NO: 66145 - DNA, 779 bp, Cucumis sativus
  Intron number 1 from transcript Cucsa.321390.1 (locus Cucs a.321390) derived from phytozome v7.0 (chr-ID scaffold0308 0; pos 1184176 to 1184954 reverse strand)
ttgttgcagtcaagtacattgagagagggaagaaggtaaataacttattgattggatttaatgctgttaaattacttaaacaatggtgggattttgagttttgtgtctgatttcattgttaggtggtgggatttctcctgttaattgtttctgattagcttttggcttgatactttagtggcttctctttggacttgatgcttaagttgcttaaacaatgatttgatttggagatttgggtttgattattcttttgctaatgggatttcatttgtgattatttctgattagtttctggcttggtgctttaatggcttcccactgtttgtaacctttttctctgttgacttgtggagaaagttatggaagttttttttttttcttttattttcaatggatggtggtgttgctgcattctttatgtaaaatctctgtgggagtttgttcgttagcttcttcaattgcattttaaaattttctctggatgatggctcaccctgttagtgtgttcaatgtgttatagaacaaagccggataatgattcatatgcatatgtctaagcaaattcaacaatggttgtggctcattatagatatttaatgattttgttaagttcttttccatttagacttgatggtggattcttcattgacgtgtttgttaatggttgatttgaaggcagagatcattctcaagtcttttaaagttctttctctgaatatttttttatggttgaacatttaagatgatagaatatatgcattgttttcttcagattg

SEQ ID NO: 66146 - DNA, 784 bp, Cucumis sativus
  Intron number 1 from transcript Cucsa.311580.4 (locus Cucs a.311580) derived from phytozome v7.0 (chr-ID scaffold0299 5; pos 1138453 to 1139236)
ttgctttgtgtttctgttctctgccgtttaagccggtgagttgtttttttttttttttctctccctccttttgtttctgcatcttccatctctcactcgatttcaatatgggggaagaaaaagttctcatttttgttagaaattaacagtagtaaccacttagctccacttgggtagcttctttttttagatttaaattatgggttttgtgttcttctagctattttgtgtctcatacttcggagatttacatttgctgagtcatatacctctgatttctggggtttcagccactgaaaactttgggtttcttttctttaaaaatatatatattttttccttcacttgtgatgttttgtatcttatttttaaatattttggctcaagttctggtgtcacttaccttttttttccacttttgaggtagttgatctgtgtgtatgctagtccttgtctttacatagttcccttggtttatggcgtagattttattttaggtctgaaaatttatgctttcaatgtttgaatatcttggggagtttctgtttaatttggatctcaagtaaacccttcgcctcttggcgatttcttaagtttctgatagttcgttttgatgtcttatacgtcaaatttgggtgtgtaatttgctctctggtttaccccaaatgttgcacaaaaggggggtttcttttttctcacacgagctaatgagtgccttacggcagcgatgaactgtttaattgacttgtgatttctgatttctggtttctttagtagactagag

SEQ ID NO: 66147 - DNA, 415 bp, Cucumis sativus
  Intron number 1 from transcript Cucsa.388760.1 (locus Cucs a.388760) derived from phytozome v7.0 (chr-ID scaffold0396 7; pos 1173205 to 1173619 reverse strand)
cacatcgatcaaacctcccaacctcctccatccaagtaagaaaaaaagaatttaattgattattgtgtttcaagtttatttaagatttagctagggtacggacgtagtgagaaaattggatcacatagtgattggactatatatatatatatatatataaagctccaatattatattagataacatgagatcaaaattaaaaacaagttaactttataatgatttattatcttacaaaaattatatgatggttctactcatctttttaataagagatcatcaacaagctgcgtatatattcttcatctaagagatctaatattcgaatctatcaactagttgagaatgttaaaaaagaatctatcaaactaataatgttaagtttttttaatatttgtagggcacaagttgttgg

SEQ ID NO: 66148 - DNA, 587 bp, Cucumis sativus
  Intron number 1 from transcript Cucsa.391510.1 (locus Cucs a.391510) derived from phytozome v7.0 (chr-ID scaffold0406 2; pos 2477 to 3063 reverse strand)
gaagatttcaaagcaattttactggttttgtttctttttctctcttaccatgctaccgattataacaattgaattctttttaggcaagatagacctccacatcaagaaaatagaaccacatataatcatctcaaaactaaatggaactttccttatatggagaaaattttctaaagtgtagtagaagaatccccttatgtatatatgagttacatgtgtcatcactatcatatatctttgtttatgagcaaaatgtcatggctctcgtgaactactatagtctatataaatagaaattagtagatatttagatttataaatactttaatgtggttagccatttacaatgattatcttttttttactaacaacttcctctgtcacatttagtttctattatttgtttcatggcctctctgatcttttgattaaatttcaactcttcaatttgttttttaaaaatgtttaactttcattttcgacataatttcagtccctggttttttgcaataactttcttgtaaattttaatctaaacttttttcactctcatttttattctatgactattattgcaaatgcaggat

SEQ ID NO: 66149 - DNA, 740 bp, Cucumis sativus
  Intron number 1 from transcript Cucsa.327730.1 (locus Cucs a.327730) derived from phytozome v7.0 (chr-ID scaffold0315 9; pos 83239 to 83978)
aaattgcttctcgtcgcttctctggcagctctcaggtgagttttccggccttctttccagctctaccttcggactcacttcttctccctccgtcgtcgcagtcaatcaaaataatctgcgatgtttaatctatctatgtttatttgccgagaaattgtaaaatgcagcctggaaattcaagaaattctccgacatttggggcttacattgtccgttgtatgaactttgtctcatggaataaaccgagaatgaagtttgttttcttttaagtcccccctgttgttaaccaaacaggggagtttcggttctttctgtttgatgcgattttattaatcatcgagcaacacaacagttctaaggggaaagtcgtttttttcaaaaaaaaaattcgtgattttcagtgatttaagatagatgtgttgctcttggcttgtgactgagccagtgcctccaaatgatagtggctagtatcgcattgagaaagaaataaatttttgttgaagtttttgctgtttcatgtaaaggaaactttgtcagtaaaaagcttctatgtttcgcaattagctgaagtcagtagaataattacccattcaatcattagtttttctggttcatgatcattcttgtatatcttttagtattaaatgacttccaatctgttttttctggtgggtgtttcattttctcattggccgtctagaataatcaatcttttagctgaagctgatcatactttgcag

SEQ ID NO: 66150 - DNA, 613 bp, Cucumis sativus
  Intron number 2 from transcript Cucsa.366970.1 (locus Cucs a.366970) derived from phytozome v7.0 (chr-ID scaffold0362 5; pos 435937 to 436549 reverse strand)
ggaaacggattttgtggacatttttagtaagtattaaggctccaaggccccaaagattctgttttgattgctgaaagttggatttataactcttatttgtggtttttatttacattgggtttttctttttgtggagtttggaagtgattttggatcaaagttaaacttcagttgtttggagatttttggaatgaattcttgtttggaattaggccttgatttgctcatttaagttgtggtttatttggccattgtttcatggtttctagtcttcttcatttggtaacaatgctacacctggcttcttcatttgttctacttttcccatttctctgggataattgtgatcgttgtgggatgatactgttgtgcaatcatactgttctggtttcgaattggattaatagggaatatagtgatttatacttctgaacttgagggcttttatcaatttaagccctgaacaaataattgtatgagtttaaaccatgaacttttgctagtatatcaatttacactctccattacagtaatctttgccatcgaagtttgaaaacattataggttttgttttcttaaatgctcaattatctaggagataaagggcgagagg

SEQ ID NO: 66151 - DNA, 549 bp, Cucumis sativus
  Intron number 1 from transcript Cucsa.311200.1 (locus Cucs a.311200) derived from phytozome v7.0 (chr-ID scaffold0299 5; pos 854426 to 854974)
ctctcgctttccgggaaaggttttcggatctttgcgtaagaatttaaatctcttcatctatatataccacgttcttttctttgagaaattatctcgtctatttttacctcgtcgtttgttgtttgatcggggactttcgggtttaatttttaggtgttacttgattcatttgtgatgcaatgcgggtttgattgtatcatctttaagcagattttaattttctattttaagtttaggaattaaaaacgaatacgttattggactaattacagaccattcatggcgatttcagaaatattgtcctgtaattttttttacttgtaattactcttttcttcattctcgttcactagcatttcgatttctgattcggagatacgtgaaatcatttcgtcctaccagtggaatatctaagcacggggatttttcggttttttttttggggggggggggggggggaggggtaacgagaatgttatattgttattgcatctcattatctctgatcttgatggttgtctttttcctttttccaggagttttagaatc

SEQ ID NO: 66152 - DNA, 542 bp, Cucumis sativus
  Intron number 4 from transcript Cucsa.311200.1 (locus Cucs a.311200) derived from phytozome v7.0 (chr-ID scaffold0299 5; pos 855419 to 855960)
gaggtaatttaatgtctttttgaatttatttattttaaatttatatgtacatgttatatttgtgtcgtgcaagagtcgtatctatgaacttcacacttggttgttaattaacatagtaagaaggacttgtttggaattgattttgaaattgttagattactttcgttgcataatcactttcaaacatatctttaattatttggaataacttcggttgtatagaaatcatgtttaaaagtataaaacgaaaatttaagttgattttgagtgacaaaagacatgtctggtagtgaatttgaatacgacagaagtgcagttataaacaaaatcactgtgaaacacgtcataacattagctacttttctctattccccctgatgcgattttcttcattgtcattctttcctttttccttgttttttttagtcttacattaggaattttgcgaccggaattttcctgggtacttattcccaaattgttaggaagttatgataattttttctctgtttttctcattcgcagtatctggagcatagaga

SEQ ID NO: 66153 - DNA, 884 bp, Cucumis sativus
  Intron number 1 from transcript Cucsa.397960.1 (locus Cucs a.397960) derived from phytozome v7.0 (chr-ID scaffold0415 8; pos 534298 to 535181)
gcaggaattcgacctacccatttcttgtttttgaggtataagctctgaaattgttcctcctccttgaggttttcttttaattctcagttatgtttctcctcccttcaaatctcttctttctgcttgtgtcactttgttaaggaattgtctggtctgcttcatcaatctaggtcggtatagcataaattgtctttcatttgagtttatgttcagtccctgatttttattctcgatatgcacttcgtctaatacactcaacttctcatttctttgtaaatcctgatcgcttcggcagatttatgtgaatacgtttctagttactcaattgactttactgatcagaaacagggtttaagtgatgactttgaggatccttagatctggtgttgaataagatcatagtctctgccaatgcatccatttgttgatctgaatatttcaactaatcgggaatgttcaaatgaaacatgagaaaagaagtcctctgtccttcattaggctgtaattgtgcccagttatcttcttctaaggagagaagaaattagtaactttcttattcatatttaggctagaatcaagtaagaaatgaacaatattaataaaaggcagaacagctatatttccatcttttgggtagtatcctttatacagcttcttcttagaggaaaaatacagtgaagctcaaataaatgtgtcctttcatttctctatctttctcaagtgattctcttacactcggaacatgctgtttgcttaattttccacttgtgcaaaagtaatgtgtaagttgatttggtgcaatttttttgttcgcaatgaaaacatggtttctattttatgtttcatgtcctaaaatattcctctcctctttacaggccttttta

SEQ ID NO: 66154 - DNA, 669 bp, Cucumis sativus
  Intron number 1 from transcript Cucsa.310660.1 (locus Cucs a.310660) derived from phytozome v7.0 (chr-ID scaffold0299 5; pos 406009 to 406677 reverse strand)
tagaggtgtggacaattacttttatctcgcgaattatgttgattaatttctgacatttgtatttgagttttgttagcttattcatgcccatgttaacatttcgtttgatggctggacgaggaagaagactgcattcagattttcttaaaaataaataattggtcacgagaatgacccgtaggagtatatttatgcaccattttgctatccatcatttagatactacgtctggtgaattgccgcatcacaagtctcatatcatatggaggaaacgatgtgaagtggaaggaactagcttaatttccatcacttaattatccattgcagtgcttgtgatgtttctgttcatgctaaaattggttgagtgggtagactggctgtgatgcacattgccttgtataatagtttaggtcgatcgtgctattacgaagattaacgacatgacaattgacagctgtgttttattttgcttgtcactttttaatggctatactcatttccgttgatttctgaaagttttattcgtaatagttttcatcaacagatgatgcataagacaggcattgcaacacccctaaattctatcctattgaataaaatatgtgagaaatattcttgtaggttcgcctcataaatattttctatggttgcaggagagtgagagtgacg

SEQ ID NO: 66155 - DNA, 375 bp, Cucumis sativus
  Intron number 3 from transcript Cucsa.360950.2 (locus Cucs a.360950) derived from phytozome v7.0 (chr-ID scaffold0358 8; pos 1431254 to 1431628 reverse strand)
cctatgtaagttttctaatgatggtttttacatttcggaagtatgagtaacttagaatgcccaaaaaggttggataccaggcaggcttcttctgaagttggttgtgcaacatttgtataatgaacccatttgttgaactgttgggattgatgcaaaatgctataccttatgatgaaagtatcttattaatgaaaaaaccatcaagtttgttgattgttcttcctcagtctctgtcactggcagtgatttgttttgagcatgttggtctttgattaagacataatcttcacgttatgtgttataatctttaagttcgtatctttgttgtttgatttctttctcaggaagaaacgtgtattccaaaagtcaattttg

SEQ ID NO: 66156 - DNA, 650 bp, Cucumis sativus
  Intron number 2 from transcript Cucsa.341330.2 (locus Cucs a.341330) derived from phytozome v7.0 (chr-ID scaffold0335 6; pos 3731419 to 3732068 reverse strand)
actgaacaatagctcggactgtaccgtaatttcttgtgagaatatgactcctacaaatgctcttgatacttctcattttaatatcaaggtgaaggacaatgaagtttcaagtacttctgatcgagctgggaatgacacttctgatctattatttcacgtgccattctctggagagggaaaaaaatcctgcacataaaatatctatggattatttctttcttctttctttttcacgaatactgtagattaacagtaataattgatgtgttgctttataagtgcataaccagttccttcactagtaatatttagtttattctgggatattctgagatatttcattcaatcaatcaaattgttgcttatccaaaaaaaaagagtaaatatttagattattcttgctttaacactgcatatgttgtatggttctctaggttctgaactttctgctaatcaaacttactgcttgctttagctgtgtatctccccatccctgtgcctttcatttatatctctctcctccctctggcttttctatttcgttttcaatttgttatgctttttccatgacgatagtgcaatttccccttactgggtattttctacttttctcaggtctttcaccaacattttcccttgggtgtgccatt

SEQ ID NO: 66157 - DNA, 523 bp, Cucumis sativus
  Intron number 1 from transcript Cucsa.377750.4 (locus Cucs a.377750) derived from phytozome v7.0 (chr-ID scaffold0380 6; pos 238637 to 239159)
ttccttttctcttcctcgattctccccgtttcaaggtattccatcccaccacttctgcttcttcaactttccttcttttcctcttcggatttgatgcttgatttgtttgatttcaaacccatgttcgtacttgctttcaccccttttcgaaatctgattggttctttcttctttccatctgtgttgatttgtcgggggttttttttttttttttttggtgttttaatggtttatctgctatttaatatgaatattttaaattgatgattcttttggtgttgtgtgattatgctttcgtgtttaatttctctgaagggttatgtgctatgcatttaggggtttttattttcttgggatatattgatattttgtgtttactttattcaatttggtgcttgagaaatgtggttatggaggagaaattggcgtattaactttctaggtgttatgtgatgataatggtttgttcatgttgtgtttggttttagataagacggggctttgttaaaaagaagagttggtg

SEQ ID NO: 66158 - DNA, 715 bp, Cucumis sativus
  Intron number 1 from transcript Cucsa.352240.1 (locus Cucs a.352240) derived from phytozome v7.0 (chr-ID scaffold0353 3; pos 142748 to 143462)
ttgcttagttggttcgtttgcgttcttctttcgcggtaatggaatgtgtaggttttaatagcttgcatgataggaacgattctttgaccagagatgagatcgtctcattctgcattttgttaagatatcgataatatgaaggaacattgaggatttttgttcgagctataagattttgcatgcatagttggagtttgagcaattattaagtacaatatactgaatctttttattaaactgcagcacctggaagggaatattgaggaatgtaaagaagaaaacaatggttcagattctgatccgaaggcaatcgattcctctgtgggaagggagctcaatcgtctacctggaaaaagagagaaaatgaaaggtatagagttggtttttaggcttaaaaatcaaatgtgcaaaaagaaaaaaaagaaaggtaagattagaaaggaaagtgttggagagattgacagaaacggaaaaagttctttgagagttttcacgttgagtcatctcaatcttttttctcacgttctccttcaatgttgggcagttgaaaaggaaaacagctatattgatgcgatggatggatgccaaccattaaatatggctagaaactccttttctctcgctcttaaaggtaatttgtaatctcggctaaatgataattgataattgatgctctgtcttgatacttggggaaaaatccaactgtctttacaga

SEQ ID NO: 66159 - DNA, 386 bp, Cucumis sativus
  Intron number 4 from transcript Cucsa.363110.2 (locus Cucs a.363110) derived from phytozome v7.0 (chr-ID scaffold0361 1; pos 731036 to 731421)
taccagtgtgacaatcacagttattttagtggtacgagtggctatgtttgcatttcaagtagcaaatattggtaacagtgcgtttggtttgatgaacaaatctctgggtgctgctgtgatccatgactgatgaaattttgtagcgtactggctcaggcagcagatgccattttttttaacaaacacctccatcttcttcttttatgtgacaatatacttacagagacttgttgttttcaataaacacctattggttggctatattaaatgaagtgtcagtttgtttgagaatgccttttccctctttttttagttagtgtctaagattgtcttgaataattacactgttatctcatttgatctaatttgatctcattctactgcag

SEQ ID NO: 66160 - DNA, 438 bp, Cucumis sativus
  Intron number 1 from transcript Cucsa.358670.1 (locus Cucs a.358670) derived from phytozome v7.0 (chr-ID scaffold0358 6; pos 288286 to 288723 reverse strand)
cactagagctttaggaaacatctctcacctcaaatgtaacttttctttctctaaaacctttaacttttcttatttttgcacaaattaattgttgttcttattatatagtttttattaaagtatgtctaacatgtttttctttcattcattatgtttagtttagttccaatgtaattaactagtggttaattaattcttccataataccatttgtttatttgaattgtgctttacgtgaattttgttttctaattcttacctgctgccattcttaaataatcaaataaatcttaacagagtttgttctttcaaaatcttaacagaaagtagtttagttctattttacttgaagttgttaattttgtatattatattttcctattaaagtgtattgttgatgcagtcatcgtttcaattcaaatttctagttgaagcttt

SEQ ID NO: 66161 - DNA, 969 bp, Cucumis sativus
  Intron number 1 from transcript Cucsa.310680.1 (locus Cucs a.310680) derived from phytozome v7.0 (chr-ID scaffold0299 5; pos 424727 to 425695)
aactgcaatagtttggtatgagaattccttacttatttgttcattcgcttgagaaatcagaaattcggacattaataaaatgtaaactgagtttttttccctttaatcagtggaatttccctctaattaaagttgaagaggcatatttaggttccaattcataagtggtaactggtaacttggaatagtgcctaagctgtattaaggattttttaccattttgttggtgaatgtaatttaacgcagagaaactacagggttgttgattagtgagagaaattggcaaagtgagcttgactcagtggtgtaaaacctttgtctctcacttcagaggttcattcccccactctatatgttgtattaactaaattagttggacaaacgccaaaattcggtaccaggaaactgtccccaaacttgagccaaataatcgatcaaattgattcatttgaataatgtctcagagttccacgtacaattagatttcaattcgatttatcatgttaatcttagtgtgtatatatagaggaaaaagctactagtagctttttgtagacagttcagtcaaacctaatgccagtaattcgccaggctattgttacatgattactttgaagtcagaagtcgatcctatgaatgcaatactgatagcagtctgcttgagcttcactcttggcaggttgtttgagtagttgaatatgttatcatgagctatcgagttaacaatgcacctgctattaattaaccaaaattattctttgtagcaaactgttaatttattgagagcatatgcaacttgagtttatttggacactgatatctgattctatacaatccataactgaaaattgagtacaatccttccttctgtttatatttatgaatttaatttgtgacatttatattttatttttatatgaatatccttcaacagggaccgcaatacgtctgtacaacgttcttgacatt

SEQ ID NO: 66162 - DNA, 664 bp, Cucumis sativus
  Intron number 2 from transcript Cucsa.348980.1 (locus Cucs a.348980) derived from phytozome v7.0 (chr-ID scaffold0348 7; pos 364345 to 365008 reverse strand)
gaaaggtaagttgaaaattccctactttttccttagtaattgatagccaatctacctttggttcttctatgtgtgatttgagttgcaatcccatttcccttgtagtcttcatgcaaaaatgtatttttgtttcagtatcttgtaagcatatatctatcagggctttgagtttcctttcggtcatttcaatactatgcgggaagtatttcattgaccacttttttcagtttggagaacattacctatcgagtcttggtgatttcagttccaaattggagaatctggtgcctattggtacttcactagctattggatatacaaaaagtgttcactgtcaaactcaacttcatgttgctaacttactattaaagtcagtcaaagtgctcttagttctgataagagttaacatttagcccatttatattcttttttaatcaaaattaaaaggtgtggccatgtagtctccaaaccttcactgctcacactataggaactgtaaactaagttcagcagtgttctttcctgcaatattcctaactagtatttgaacacaagaaaagagaaaagaaacaaaaagaagtaggtgatcaaactagcagtaccatttgttgtttaaatgtaccttcataacaacatagtgtcagtttttattttcttcaggacc

SEQ ID NO: 66163 - DNA, 810 bp, Cucumis sativus; identical to SEQ ID NO: 65441
  Intron number 1 from transcript Cucsa.311970.5 (locus Cucs a.311970) derived from phytozome v7.0 (chr-ID scaffold0299 5; pos 1438966 to 1439775 reverse strand)

SEQ ID NO: 66164 - DNA, 386 bp, Cucumis sativus
  Intron number 1 from transcript Cucsa.370400.1 (locus Cucs a.370400) derived from phytozome v7.0 (chr-ID scaffold0367 8; pos 128116 to 128501)
tgagcgtagctcaaattttttttcgcgctatcgaggtaattcaacgtttctatgaaactattgcttccagttagcattcgagaatggtagcgaagtgtaatgaattgtttgacattgagaactgaaggactgattttctctgttcgtaattagggcttcagtttcagcgcagctttagtttttgaattactgtattttattttctattcggtgagtttgcgattaggattagcaagttgactggagtttcttgtttagctggaagataattgtgttatggagttggtttatggtcgtgaagctctagagaactaggattgtttatttgtttactaatttttgttgttgcagtttttttgcagtttagtggacactgtttagctgct

SEQ ID NO: 66165 - DNA, 340 bp, Cucumis sativus
  Intron number 1 from transcript Cucsa.356600.2 (locus Cucs a.356600) derived from phytozome v7.0 (chr-ID scaffold0357 7; pos 1414064 to 1414403)
attgtttcctcgaaggtcccttcaattcttccactgtaaggtcctttttctcattggttgtttgtttaactttttgattttctgatgatcttctcaataatttcattccctcaactgtactcgaatgcccatgtgaatttatttgcttcttgttctctctgatttttcccttctgtttctgtttgatgctccttggttcttcgttttcagtttaaatctgtttctgggttagtggggttttcagttttcatcggcagtatgcgtttttggtttgggtacctgcattggttcttttttgtgataaacaatgtgtttacatttctgcagttaagaacacggg

SEQ ID NO: 66166 - DNA, 907 bp, Cucumis sativus
  Intron number 1 from transcript Cucsa.374350.4 (locus Cucs a.374350) derived from phytozome v7.0 (chr-ID scaffold0373 3; pos 254124 to 255030)
actccacgcatccggatttttcctttttcttcaaggtaagcatttttttctcccgacaattatggttaaggaatcgatttgagagcggtttttgtaccggatggatttttgttctccatgcagtgtttcttctgtcggttcctttggaatgagattttgtgttcttgaattaggtttttctgtttttggaatcgtttctggaattgcaggtgctagaatggctaaataagtaagagtagggagtttgtggtttataagagtactgtttgtgatgatttccaatttatcaggtttttataagattgagctatggggatgatggatgagaatgtttgccatcgagaatctcaaagacttgaaatgcaagaaatggagtatactatgaaaactttgactaaactagaattggacttggcgtattcatcggagaagttgatgaatcttcatgtgcttctgatgtgcctacttgctcaggagaatgattttgaggctatggatttggtgcatgattatataccggatgattcgtttgggaaggtgttggtgtttgattttttgtccggctttttggattcggaagtgagggagctggatagtttcatgaatacactcgaagcagaaacagttgatgcccgtggaatggtatctacttgcttacaatcaactgaggttttcagtgtgttggaaggaaaattgcttgattcggagaagtcgcttgttcaatcccgaaagcagattttggaagtgaagatgcagtcaaccaaattgcagagaattgttttaagcagtggaaattgttcgtgattttttctttttattcagtttttagtgaccttagatgatgaagaattgactactttgtaattctgaatgctctgcctttgtgacagggagattggaagatccg

SEQ ID NO: 66167 - DNA, 368 bp, Cucumis sativus
  Intron number 1 from transcript Cucsa.383740.1 (locus Cucs a.383740) derived from phytozome v7.0 (chr-ID scaffold0388 2; pos 853749 to 854116 reverse strand)
ttcgtttccgtcttcgttctctctgcttggcaagagtaagcaactcagatctactttaacttcttacccttttcatcattctaaggtttcttcactgcgaatttgaatttttagatgttaggttactttctgaatgtgtgttacccccccatttagggtttacttaatgacttcatgttatgagtttagatctgtgagtggaaattttgtggaacttcgtttttttctcttattgaaatggaagatttgaacctctttttgtttctctctgtaattatgttatctttttggaggtattgaatctttctgcttgggatgacgaaccctttttttggatcttgattttttttttttgttctttaggttca

SEQ ID NO: 66168 - DNA, 609 bp, Cucumis sativus
  Intron number 1 from transcript Cucsa.353110.1 (locus Cucs a.353110) derived from phytozome v7.0 (chr-ID scaffold0353 3; pos 733171 to 733779 reverse strand)
caatatcactgccctccttatcatccacttccagggtaaaaacttgtttatcgactcgattcgtttttaatgaattaccaaatgaactgagtgagctccataatttaggtatttttttaatttgctcaaagaggatttcaggtcttaaagagaagctaactgtgtgcaaatttcttcatttcttcctatagaattgttggtataatcgttttgttatgtagattgttgatttattttgattcggttcattaatttagtagagttgttaattcgtcacttagtttcttgggattttccttgttggggcgtcatcgtcggttgcgtgcgccaattttgttaaatttaccagtatccattagtttaagtttatgagttcattggtgatttaacatctattagagcatgtgtttggctttttattttcaattaatattgattttaacatggtgaagaagaggaagagaaggtaaagtactgactatataactcacgagtttgaatgagatttccaatattttgctcgctttgatccaacataggcttgaaattgttttatatttgcctatttatgcagattatactattcaaggggaaaacaactcttaatag

SEQ ID NO: 66169 - DNA, 639 bp, Cucumis sativus; identical to SEQ ID NO: 65503
  Intron number 1 from transcript Cucsa.338700.3 (locus Cucs a.338700) derived from phytozome v7.0 (chr-ID scaffold0335 6; pos 1471875 to 1472513 reverse strand)

SEQ ID NO: 66170 - DNA, 710 bp, Cucumis sativus
  Intron number 2 from transcript Cucsa.360590.1 (locus Cucs a.360590) derived from phytozome v7.0 (chr-ID scaffold0358 8; pos 1216378 to 1217087)
atctccccggcgtcgctccacgggatttccagactgtacgttctcaattcgatcacttctccttaatgtgtttgttttctttcttgtgtttcttcaacttgctgttgctttttcccattgaaatgtttttcacgatctgcgctgtggcgagtagttgcggtttttggtagtttgtactgcggggcagtcggatctaggtttctggtgcttgatctggtctttaattgcatatgttctcttcatatcgtggtatccggacatttctaaacatcattggatgctgtgttctgtttgcatatgctgtgttcaattatgtgtttatttaagggaaaacacatcgcatctgcttacttcacggcaatgaaacgtaggagtgatagtgataccacattatgtgtaaacgtgttgtggtattcgtttctgtcatttgaattgcttcaaattgtactcgctaccgtgtttcactactcgatgccaaaccatatcggtatagtaaaatggtaaaattcaactgtaatcgtcgtccacgctgtgttcagttttccaacactgttaattttcttattgtagtatgttcaggtcttagaaattctcacttttgacctctttttctaccttccatctgttatcatgtgctaaattcctacgaattgatggaaatggtcttccaaacagggtgatattcttccagtcaaagtgaacaaactgtc

SEQ ID NO: 66171 - DNA, 394 bp, Cucumis sativus
  Intron number 1 from transcript Cucsa.362160.1 (locus Cucs a.362160) derived from phytozome v7.0 (chr-ID scaffold0361 1; pos 136176 to 136569)
aactacgcggcagtctctgttctgccaccaaagtacctctcaatttctaatccttgattgaattttttttctattgttcattttcttaatgcatttcggattcaacctacttttgaattcttatgtttgctgtcgccgattttttatctgccctgaattagcttctgttctatttagttgaacgttgtgagggtgcatatcatcatttaattttctattctcgttgcaattctatgggtttcttgtgtttttgttggtaaacgtttatgcggatttaataaccgtaatgtacatgttttcatctcgtttggatatcttatgctttaggttattttgaaattaatcaaattgtgtcttcttgttccatatttggatttgcagccgaaacaaattc

SEQ ID NO: 66172 - DNA, 344 bp, Cucumis sativus
  Intron number 1 from transcript Cucsa.374750.1 (locus Cucs a.374750) derived from phytozome v7.0 (chr-ID scaffold0373 5; pos 215768 to 216111)
ttcttcagctcctcctccttatcactatcttggtaaagctcaaaatcactctcttcttcctccatttctattatgaattaaatattattctattcttatttcttatttcttattcttcatcataaaaacacagagattctgtttatattgttttctcttattgagatttgcgcagttattgaagttatgacttcgtctaacatttcagattttaaaccttgttgaagatgaaaataggcacaatattttgatgggtacagttttatgtgtgttttggtttgattctggtagtgaaagaaattgtttttgtgttgtgtttgtattttgatcaggtcttgtcccaa

SEQ ID NO: 66173 - DNA, 712 bp, Cucumis sativus
  Intron number 1 from transcript Cucsa.322200.1 (locus Cucs a.322200) derived from phytozome v7.0 (chr-ID scaffold0308 0; pos 1988167 to 1988878)
aagaaggggtcaatccattttcggtaatcttttcttttttccattttctctttctcttgtggcttaatctcacttttcttcagatctgtgcatctcgttacttttttttcgcattttcgtttcttgttttatacgatttatattcggcgagtgtttcgatcgggttttttttgttttctatttttgagtttgagggggtgagagtgaggttgttggattgttctttaagctggatctaagggaaattttgctaaatttggtggagtagggttgattttatagccgctgagaaatatctttggagaattatgggagtgatgtgaagtagttgaaggatgaagtaggtattcaaatttggaatttgaattatactaaacgtagacttaatggtactagttgttgttgttttggagtacttaggaagatgatttcatatcatcatttgggattgaaaatgagcgtcattacaatctgtgtggaattgttatttggatatgcataaattgaaagcagccatttgttgtttattgacaatgctcttcttgttggctgtagcttattatttatctgtaacatctgatatttgaaactataagaagtaagcaaatcaagtttgttcttaagaggatggaaatggtaacagtacggcttgtcattactaatttcaacatttgcagaaaggtggtggtgctcctggatcaaagtttcgaat

SEQ ID NO: 66174 - DNA, 431 bp, Cucumis sativus
  Intron number 1 from transcript Cucsa.336890.1 (locus Cucs a.336890) derived from phytozome v7.0 (chr-ID scaffold0335 6; pos 60371 to 60801 reverse strand)
ttctttcatctaattcccttacttctccttccaaggtattctataaatttcttttcttttctttttttattaactttgcatttgaatttttacgacgtaatatgtccatgagtttgatatcgatatttgagttttcccgaagtgtatagcatcgtggatgtgagtgttttaaagacaagtttaattttcgaaataaatcttggaattgaagtttaaatttttgaatttgtataatgaaagtatttggtaatagtgtgaaaaagcattattaatgttttaaaaaacttaaatgtttgctcaactaatattaaatactttattaatagatatttctatagatattttcattgatatcaatacttaaaactttgtttcacctacttttctctcttcaagaaacttgaagacaagggcgagaaagagaaagataa

SEQ ID NO: 66175 - DNA, 814 bp, Cucumis sativus
  Intron number 1 from transcript Cucsa.366880.1 (locus Cucs a.366880) derived from phytozome v7.0 (chr-ID scaffold0362 5; pos 362531 to 363344 reverse strand)
cttcaaggtttgacctactttctttttaattttctgttggcctataattacttatacagttccgttgtttttgttcaacaatttttgtatgaaaatcgacgaataattattcacttttgagatgaaaacgagtgtattatgcatgttttataatctaacataaagagggtatttatggaattagatagtttaatttgaaaatgtgcaatgacttgcctttgtcaagctttcacatgtgcttcatcttgaatatataaatattatatactcatataactatcgtggttttgcacaaagaaaatgtgtgacagaagaatattgttgaacacatttcggcaatgaactactagctaacgtgcttgagatcaaactaaatcatatgaattgttttgtaaagacggttttaaaatcacattggttgatcaatttagtttcacacaaaattcaaaccatataggaattaaaatggtaatttaacttaacttataccaacaaattcaaacctgcttcagtctaataatcattcggtttcaagattaagctgagaactaaatgctcactgctcagcttactttaggaaaagcaaaaaccatgagagattaataaagacgtgagataaacaaggatacaatttaaaaagtaaaaacaaaaaccaaagcaaagcgaagttttgaaaattaaaaaaaaatggagtagtttcaacatgtttttgtttttgtagtttgaattcaactacctaacaaacatgaaaactatcgtaagaaaatagtgcgtgttgatttctattttctaaattattgtgtttgaagggaag

SEQ ID NO: 66176 - DNA, 855 bp, Cucumis sativus
  Intron number 1 from transcript Cucsa.340200.1 (locus Cucs a.340200) derived from phytozome v7.0 (chr-ID scaffold0335 6; pos 2697224 to 2698078)
ataagcttcgtactcttcttccttgtaattctaaggtcatccttttctcttttccttttaattattttactcgttaataatttctccatctcttcttttctttcatttctccacaccctattataaacccaacaaacactgacaaattgttagaacaacagacctctttatatattatcattaacatagtttgtcattcattataaactcagaatcatcctagcctatttgatctgggattttgttttcctcacatatgaacttggctatttgtatacacagtcaaagaaaactggagtccgatatttagacgatggtgatgagattcaactcatttcttcttaacccagctttataaaaaaaaaaagggatacgagcgtatatgtgtacaagtaaaaggaacaagaatgaattctttttaaagaatctttggtgaactccaaccctaagattttctgaacactacaaacagatgtttgtttgtttgttggttgagtttagacaaatttagagacagtgtttgtttgttttcttcaaagcaaaaactgccaaaactctctcttcactgccaaaaagtcataaaatacaacctcacttttttgttctttctctctacttacaatcttcttacccctattattttagtgtgtatttaggaaagtttgaaacctttattatttccaacccttatctacactcatccggtgaatttagtatatgctcaatggatcgaactaatatatatataactcaaattcaagtttcgctccttacatttttttttccaacatacacttataattcacattttttcaattagacggacaaggcatctcttcttgcaaaagttgttga

SEQ ID NO: 66177 - DNA, 714 bp, Cucumis sativus
  Intron number 2 from transcript Cucsa.337320.1 (locus Cucs a.337320) derived from phytozome v7.0 (chr-ID scaffold0335 6; pos 417594 to 418307)
atcattcatcttcaagctttattgggtaacaagtataattttcttctctttttctacttatattcattaaatttctatatatgtgtgtgtgtgtgtgtgtgtatgtatgtacacacgtaacaccctttcaaagcctttgagattaattatttatatttttgtgtgtgtcggttggtaactttggcgtttttcctttaagttgaaggttcaaaaacttctaatcaaagtctatttagggtttagaaattttggtccaaagtattagattaagagatttgaatttttgacctaattcaaaataggaaaatatattaagagttttgaattggtaaattaaaatgttgtgtatggaagaagaagaagaagctacgccaagtgtttggactaaaagaaattgaagtttttgtttctcagaacgtgtaaggagttgaaagaattaaggttcggattaattaaaggaaaaaactttatttcatttttatttcaactgatcttcctaattaatggttctttaaataaagtgttttaattaaattattttgagtggtaattaaacggtttgatttttttgaaaataagttgttttcaatattcaacgataattgatattatttgattaagaaaagattgcatgtaaaaaaaggaaaaaaagaatggaattatgtgaagtttttggtttgtgttaatggaaattttgataattgaaatggtcag

SEQ ID NO: 66178 - DNA, 337 bp, Cucumis sativus
  Intron number 3 from transcript Cucsa.363960.2 (locus Cucs a.363960) derived from phytozome v7.0 (chr-ID scaffold0361 1; pos 1568103 to 1568439 reverse strand)
aaggaggctggtcacaacttctggtgggtttgttacatttcaaatcttgttctagagttctctgttattagtttttaagaatcacctatgcacaatttttagttttttaaaaaagctacatgttttgctttttggtatatccttttctttagtttgattcctctctttttgggcttggttatggtccttctggatacccttttattctttctttttttcttttaaatttcaatgttaatttggttcttcataaaaaagttcattttctcatatttttatattattaacaatgttaattatttaactccttagtgcacgggaaaggaagtaaagcagc

SEQ ID NO: 66179 - DNA, 454 bp, Cucumis sativus
  Intron number 2 from transcript Cucsa.363960.2 (locus Cucs a.363960) derived from phytozome v7.0 (chr-ID scaffold0361 1; pos 1568494 to 1568947 reverse strand)
cctgcattcctttggtcccctcaccaacgccacgggtatgctgcttgatttttttatgttttgtatgttctatgtgccattttttgtgtgtcaacctatttcaaatgaataataaacaaatcccgacatatctacatcaggattgtgatttcttttgcttttcgacctgcttagttgattaagatttattgccatcattttaaattttagattccccattgtttctgttcttcattggttagtttccatattatcatccttcattttattctacaggaatcaattttcgtgttcttttcttcatctttgtgtgtgtgtgtgtgggtggggggtgggggcggtggttgtgtttaactggtctaaatgtgtcataatagactgtatcatttttctttgtttgatttagaagttgtaccgaatggctgcaggttttctaacaacattctagaaaagt

SEQ ID NO: 66180 - DNA, 260 bp, Cucumis sativus
  Intron number 1 from transcript Cucsa.379900.1 (locus Cucs a.379900) derived from phytozome v7.0 (chr-ID scaffold0383 7; pos 283604 to 283863)
ctctactctatctacactcacttttcaacggacggtacgtttacggtacacttgaatggtatagacaactttaaatttgtttttctgcgtccatttctaggttttcccctgttcgaaaattcccacgatcttcgttgattcgctttgtgtgcaagaggatatggttgtttctttttttaagctttgagtgtttattgaaacgatgagttcggtctatggtataagtacagttcttttctcattaattctggtgcagtcaa

SEQ ID NO: 66181 - DNA, 651 bp, Cucumis sativus
  Intron number 2 from transcript Cucsa.379900.1 (locus Cucs a.379900) derived from phytozome v7.0 (chr-ID scaffold0383 7; pos 284026 to 284676)
ctttgaagttctagaagtatgaatttctaggtttgttgcttcaaatcgtttgcgtctgagcttagaagagtactatgtttgattaatggctatgttctaagaatttgagctgcatctcatgggatgcacgattgaattttttaatagaaacagtacccctcttttaatttgtatattaccatattcaaaaattaaattggggcatattttagggtttgaatcgtggtttttgtatgcttgcttttgattttcaaatttttgagtgggctttagcgaccttgatggcctggatattcaattggctttcctcttttcatttctcaaatgataagtgtttatgattgcaaaatgaaatcaatgtttttaggatttgagactagcacaatttactggagcataaattcaatgtttaccacctcgcaataggccttttggatagagaaatccttttgaaacaccatcaagatgagtggtctaagacttagagaggaaaaccgaaagtgtgacagtaaatagcctcttcgcattaattcttttctgatttcttctctgaataatcatttcttggtggacctatgattttggaaaagacagaaagaatccacttgctctgattatttgtgattttctgtccagaacaagggtttttgg

SEQ ID NO: 66182 - DNA, 348 bp, Cucumis sativus
  Intron number 2 from transcript Cucsa.352180.2 (locus Cucs a.352180) derived from phytozome v7.0 (chr-ID scaffold0353 3; pos 116485 to 116832 reverse strand)
gggtaaacaaattaatcttcttctgcgctatctatggcaagcgattttctatgttttggtttggttagaataggagttagctacctgaggaacattaatgtcggaagcatttgaggtgatattgaactagctttgttgattagggtttttatttatttattttatgttgctatgcagaatctgaagcatttgaggtggtatttggcttagtttccttccttttacgtttgatgttggccaattaaatcagttgatcgtgaaacttcatttttttcattgttagcggttgttgctgagctaattacatcttttaatttgttattaggtattcgccggagcagttatttg

SEQ ID NO: 66183 - DNA, 1022 bp, Cucumis sativus
  Intron number 1 from transcript Cucsa.338300.8 (locus Cucs a.338300) derived from phytozome v7.0 (chr-ID scaffold0335 6; pos 1245405 to 1246426 reverse strand)
acccctggcatacaacgagaattttataattgcaggtatagtcgaaacgattctgattaatgattatagggagaattgctcgtacccttttgatttttaaacttttgctttgtattaaacctcttgattatcgttgcaatagcatttgcggaaaatgtgctgtagaattctttcagtcctttaggggatgagtcatggaatatgcatcgtgaaattagggcatttttgttttctaaatttatgatgagaaatctacttcatctacttttgttagggtcctttcaagagtagagctaataatttgattgggtttggagagaataatttgattaatttctaccttcagtcttcgctttcagtttctatacacggtgaatgtaggaattatccctttggatttaatagagatcaagaggtccctcgtatgctatacctggctaggtttattggactttcttagtaacggcacagaacttgtgtaatagaatctagaagtattatatatttgaattaactgtggtatctctttttttttattttctttaagtctcgtattaagtttgaatgtaatgcaacattccatttctttctctccagtcaacaagatggaagagatgcagtcctttcgagagaaaataaggggggattgtcccaggtgatgttctaaaatggatttttcttagtataagatgtaaaatctgggagttgagtaatccttatcaccttgagcatttaccgaattgttatgtttcccgtcaagatctttgtcctcttatttatattcttgtatgatatgatttgtaacaagtcttttattttattttatttttctgttttttttgtttggtttttttcctcttcttttttttgtactgtaatcttaatcttaactattgttttcgattataatggttatttaatatattcagtggtttctgtttcttatataaaagaaaagaaaagaaaagaaataaatatattgaattttttgatgaaagtttttttcttcctttgtagtattt

SEQ ID NO: 66184 - DNA, 731 bp, Cucumis sativus
  Intron number 1 from transcript Cucsa.382200.4 (locus Cucs a.382200) derived from phytozome v7.0 (chr-ID scaffold0386 6; pos 290888 to 291618 reverse strand)
ttataagtaagatgctgcttcggaatatgaccttaaaatttcttcggtggatggtaatgaccagctttcattaaacttaagctgaaatggaagaacctacatactcttaacatggttttaaagagactcaaattgccagaccaggcttctgtttatgctttatctttgaaagagcaatccaatgagaaccattaaagatgtatgaaagtttgattgattaatggcgtacttgaatgtttgtctcctattttaatttgtgtccattatttggacaatcatagtattgtaggctctttttttcttagctcttgatagtaagtgtttgaattgatcccccaagatatgctggatgtgaccgtgctggtacctcctgttatccaaacttatgatctttgctttgtcaatgaaaagagactgtatcatttttaattatttgcttgatgtagctgaatgaattcatcgtagtgtggggtgattccaatcttctttatgattttactgtagttctaacatgtctttatattgaccaaaagatagtctcctttcagtttaggttaattaatgtaggttcaatttttcttttaaactttttgtgactttgaactaccactcattcttagttgttgaggttttatttcactttagtttctatctttcctgttatgccttgttgatgcttcccattatctaaatcttgctgatgttttcaatttcatgtaaaatcagagtag

SEQ ID NO: 66185 - DNA, 663 bp, Cucumis sativus
  Intron number 1 from transcript Cucsa.356830.1 (locus Cucs a.356830) derived from phytozome v7.0 (chr-ID scaffold0357 7; pos 1745083 to 1745745 reverse strand)
agtcatctgccgtaaattccaatgtacatcatgcactttttttattattttttttctttgtgtttcttctagccctgggtatttgattgatactttcgtgcttatgattgttcattgcattggtctcgtggttgaattttaattgctgcgattgcgttcatacgcgtcattgaaatgggacgctgttctttttttcttttttttttcttatcgacgttttagtatgtcttgaaactcgatgattttcccatttcgtacactttcttcctgtttgattgtttctgccgtttcacctgatcgtgttggtcgcagtttatataggttcaaacctcaagtttattatctgattattatagcgttttttcattttattgccatcttggctatcaatttaaacatccataatcagcgttgagacaaatactttctagctctgtgttgaatttgcattcagtgagtatatcttttttcctaactttagttgaaatcttcattcgtttaatacttctgtcctgtttttgtccattgccgaaaataaatctcttcttaatgaatacaaattaatttttttttatgtatttatcatttgtatgttgtggttcatatttaacaaggactatattgtcaggactcgtttagatcagaacatttgagctcagaaaa

SEQ ID NO: 66186 - DNA, 682 bp, Cucumis sativus
  Intron number 1 from transcript Cucsa.366580.1 (locus Cucs a.366580) derived from phytozome v7.0 (chr-ID scaffold0362 5; pos 135081 to 135762)
atcgcaaccagtgcaaccatcatctgtctctacaggtatgctgctatatgaactaaacttgttcgaataacatgatcttttttggaatgaaatctggggtttagaaacatttgcataatttgtttttggagttcttcttttcttcttgcttgttgttctttgagattaattggatatatagatgagggatttgaggaaggattgttaacaaagtttgaggatttgataaaattggttattatgtggagacgatatcttgagatctcaaatacaatgtttaacaattcaaatgtttatttaaacaaaaatggaaaccatgaattaaaaatggtgagaaaaacaaattaaattatcatctgcacaaaatctatgaatttaaaaactaattgttcacaaaataaatttaattctcctcgtggtaataagtttgattaattttgttagatttgtaactaatgttttattatttctttaaagaatgatacaaacaaatatatatatatatatatatatatatatatatatgtatataattctgatgaatagttgctatcatttaaaactgtttagagagatttgatgatggaagagacggatagtaaagttgtaaaaatatatgaattttcgtaggcagtgaaagttggagttgatttgtgcaggtaagacagttaagtaggacact

SEQ ID NO: 66187 - DNA, 506 bp, Cucumis sativus
  Intron number 1 from transcript Cucsa.365880.2 (locus Cucs a.365880) derived from phytozome v7.0 (chr-ID scaffold0361 1; pos 3772418 to 3772923)
tttttaagcgccgaagtatgtttcctttagatcttccttggtttgttgctccaagttctgtgttctgttttttcctttttatcggcgatttcgctttgactgatatttaaagttctaatgagcgggttgttattgttcttaagtttctttttcaagaatttctcgactttattgtgattggaatcatatatattttagttcggaagttccagtctttggctattcttctgtttatctctttaaaattttcttcattttctttggattttttctccaaattttcagaacagcattaagtactttgatgctgttttgagttttgtcgcagaatgatgattaacacgtttcgaatgctttgcttaaagggagggctcaatggggtttgtctatataatgtgttgatgttagcttatttgaattgttgagttatggttgtgtgtggtttttttatttataaaaagtattactttgtcattaggaatctacatcattaaccttgggaaaac

SEQ ID NO: 66188 - DNA, 952 bp, Cucumis sativus
  Intron number 1 from transcript Cucsa.362240.1 (locus Cucs a.362240) derived from phytozome v7.0 (chr-ID scaffold0361 1; pos 195000 to 195951 reverse strand)
agccggaggaattggatctcgatctcatcagatccgtaagtttctttaattatcattctctcttcggctttcaattctttaaattcaattgaattttccttagttcgttctatacaatattaatctcacgcgcccatttttttctctttacgatttgacacgtcagattaaataagtgggtcctttacgtagatctagactacagtagtaagggtagtttcggagtttcatctttctccatgtgtgaattccccattgtatccctttctgctgacgtgcccgccgcctcacgtgtttacttccgagctttatactcacgtgcggttggcggtgcccatcaacggcggaggtttctctctatctgtcagatatttttattttaatctccattttatagattatgatttttttgtgaattcatgggcaatgacaatacattgatattatgtcaaatgtatggtatgtgatactgatgttttttaaaaaaattgatttttacagttttttttattcttgtgattatttggatttacttatttattgagaaagtgaaagtttgattaaataaatccttggaacgtgagggggggagggggactctgatttttttaattttgtcgttacgtcaccgatttgatttttaaaaaagtcgaaattttcgctctttaaaatggtggttccgagcaagctgccgtgacgagggcatgcgtttctttatttttaaatttacatcattgttatatcatttgtttttcttttgcatatcaagttttcaagtttgacttggccagtagataaaagtcttcggacttgatttggaatctctttattgaaattgttgtcgttaatattaattgggtttgtttggattatatatttaatttaataaatgattgtaagaatgctgaatatgtatgatatgggttttgtgtttaggccaaaatctttcact

SEQ ID NO: 66189 - DNA, 497 bp, Cucumis sativus
  Intron number 1 from transcript Cucsa.340050.1 (locus Cucs a.340050) derived from phytozome v7.0 (chr-ID scaffold0335 6; pos 2590963 to 2591459)
gttgcttcacttttctttctgtgcttgcatttttggtgggtctctatcgctttttttttttagttcttgtactcttgaaagatttgcttgccgctgcattgtgtagttgttgaggttcgtggatatattgttgggtattttttagtttttgattttcattaaagatttgggggttatgggttgagtgttttttttttttagtttcactttcaaagaatcaaaatcactagttgaagctactggggttctcgtcttgtaaatctcttggaaatttagcttgtttttgttgttttttttaaaagagtgtttttggggaaattagatgaggtgttgatgcgtctgaggaagaactttgaaattattagacgggggattaaagaatatgttgccgttgtgtgattacaaagatatttataatttactttatatgattttccttttttttttcttttgaatttgtaggttttgatattgctttgattgtgaatcaaggttca

SEQ ID NO: 66190 - DNA, 679 bp, Cucumis sativus
  Intron number 1 from transcript Cucsa.312830.2 (locus Cucs a.312830) derived from phytozome v7.0 (chr-ID scaffold0299 5; pos 2126383 to 2127061 reverse strand)
ctcccgcgcatttcttgatcttcgctccgaagaaggtttttcttttcaatctattactctctctctattcttgtaatttgttgttttttattggtagcccttatgattggttttcgaattgacatgtaattagaaacttcttgttgaatgctgctgtgttactgttttatgattgtgattgagcttcccactagatccattcactggattttattattttctgcactctgagctggctattaggaaaaggggttttgttctattcattgtgtagtacaaccacttagtagtagtatttttaaaaaaaaaatttttgtttgaggattatgaatttttcatgatcagggatgattttggatagaagggagcagtgctttaaatttggggatgtatgtgaagagtgcccttaacggtgtagtttatgaggatgcttttaacccaaccctttcatttgatttttttttgttgctgctgctgctgctgcagcagcaatgaattctttgttgttgtttatacctgatatcgattttgctttttagtacttcttgtgcttcttactgtattttttagtgaaatactttttttaaaaaagaaagcaatcctgtaaacgcaacatgtagaatgttgatttatcttatttgcagagttactctcctgcatcaggagggaaacagaagct

SEQ ID NO: 66191 - DNA, 428 bp, Cucumis sativus
  Intron number 2 from transcript Cucsa.341240.2 (locus Cucs a.341240) derived from phytozome v7.0 (chr-ID scaffold0335 6; pos 3628322 to 3628749)
aagccaaaaatgtttgtatacctcatctcaatcttcttgtaattcagtcaactttctcgtaatctatcaacttaagttttattcatatatctttagataacgttatttcattcacaagaaacgagtccaataatatatatttgggcgaagtacaaagtatattaagaatatcttaaatagatgattaaaattttagggttaagaactgttctcatttgaaacatgggttgggtcataagttcgcttagaatcatattgtccaaagaagctcacacattcagaatcataattattagtcaaatctttttcatttttcccaattaagagaaccaaaaaacaaaaaaaagttctgtttttttttaatataaattgtatttgattaatttgtttcagattgcctttgaagtactagtaaagacactgatcag

SEQ ID NO: 66192 - DNA, 715 bp, Cucumis sativus
  Intron number 1 from transcript Cucsa.338240.1 (locus Cucs a.338240) derived from phytozome v7.0 (chr-ID scaffold0335 6; pos 1215322 to 1216036 reverse strand)
tccctgttgttgctggggttgtcatcgccagtggggtatgtttgagtttttgttggatcacttttaattctcttttgttgttatctattttttgcatcttttggttgtatatagtaaaagaaaataaggttccttaggattagcttcgaatttaacaggccagatctggaataatgctggatgcaaagctttagaatttcaatatttaggaatgggatcccagatcttaaataccattagtaatattgattggttcaagctatgatattgtcttccactttcaaataggccatttatggatcattggttataaacagatcaaagttaacgtatatcagggcaggcgtaagtaacctcaaaaaaaaaaaacaaatatagcctgctggagtgcaatggcaaaacaaatgtagcctgctgattgtgtttgtgactttaaggaggatagtttaggggatttattagaaaaaaatagaggatcagccttcaaattagcagattcctgaggcaaagcctgtgcctgtttgaatgcagtagttcgcatcgagagtattttattcagaacactgttcctacattgtgtaaattgcttttttttaacgtggttttattattataatgtatttgtgttatattttctctatggagtcagtaagattttgacttcctatgggtgatggcagggtgagccgggttttcacttgtttggatttattat

SEQ ID NO: 66193 - DNA, 1048 bp, Cucumis sativus
  Intron number 2 from transcript Cucsa.363810.1 (locus Cucs a.363810) derived from phytozome v7.0 (chr-ID scaffold0361 1; pos 1404756 to 1405803)
tcttcaaaagggtgtgaggcttcttaagcttacgggtcagttctgctgatacttttagattgtctacctagcatcgtctgtcagatactagttaagatactatgtttcaagttgatgaattcgaacattcactgctagtgaaccttcaatgattgtaaggtcaaattgcaagttcagtctttgaacttgtttgtaaccgttaatgaactttcagttgtgtcaacgggttattgaactttaaaaaccgtttaatagatctttgaaatttcagtttggtgtctaatatatcactgacctgctggatactttgagtctactggacactaaattgaaagtttagtattttatcgtacactaaatttaaattcatatctaatagatcattttttttaaaaaaaaattgaatctatcctggacctattcgagtacctataaaacattttaaaacttcagtgacctgttatatataaaattgaaagcttaggaacctattaaacactattcaaagtttgaaggccaactacacacaaacctaaaagttcagggagtaaacttgtaatttagacttattgtttctttcttttcttgaagagaattttttctatacatgattccacatctatgtacctatatctgcaaaaatatgatcaatgattggtaataaacgttcaagtagtacttatcaagcagagagttcacccaaggatgttaaaccttacgaagtctatgcaaaactgtatggcaaaaggaaacttcaagatatgtcaactggtaatgccttagtttataactaaaactaggaaatataagatctactgaaattatgatttttcatggaaaatatggtggttggaagtgtagccaatgacgttgtcagacttggttatttctggtggttgaacaatactgtgtaagctttgactgagttgtatatatcatctttgactgtgaataagcgagaaatctttcttcatgttaaatcataaactaaatggtgttttgattatgatcaggtggcaaaaaactgttaacatctctgcctcggttg

SEQ ID NO: 66194 - DNA, 385 bp, Cucumis sativus
  Intron number 1 from transcript Cucsa.325890.2 (locus Cucs a.325890) derived from phytozome v7.0 (chr-ID scaffold0313 2; pos 187224 to 187608)
tgcacgctccggcacctccaaaactccatctcgaggtctgtcacttttttgtttcttgtttttctttatttacaatatgatgatgaatgattagaccgatggttattttctttaaatgcatttactcctctaactacagtggtctgtcactctgaatcagagggtccatttcgaatcttcaagcgttgtatttcgcttcaaaagctaaatttatcccaattttcttcaacttattggaattttagtgctagcccttttattttgggctccatgaacaagaagtttccgatctaattcccatggggttgtctaacgagttattctcgattacgaactgataactagacatttgaattttggcacagagaagtcgcatcactttgaa

SEQ ID NO: 66195 - DNA, 554 bp, Cucumis sativus
  Intron number 1 from transcript Cucsa.343040.2 (locus Cucs a.343040) derived from phytozome v7.0 (chr-ID scaffold0335 6; pos 5309289 to 5309842 reverse strand)
aaagagaggacttgcgcaggtctcgccgtggcctttttctattattattattattattatttatttttgtttaatcattgttgtttgactcttttcttcatcgtgttcaaatgctgaattcgttttagggttttaatttgttcttgttttctgtagtatcatgcaatctccatcgatgttttgttattttctgattatataaatattattttatccattaacaattcgtctttcttgctcattgaatcttcaaattgtgtgcggtcttatgagagacaattgtgaaataggattttagattttttttttgtttcctctgcataataaacaatttcagttctgattttttgttttgttggatcttgccgtgtttgtgattgtttttgtttgtaatgttgtcgtactcatctttggttgcaggactttcactaaaatctcaggaactaacggcaatttttctagctgttagactttattgtagttttgttatggaatatgatatacatacactattggatacagcaactctggtaacgactctttgggttatttat

SEQ ID NO: 66196 - DNA, 536 bp, Cucumis sativus
  Intron number 2 from transcript Cucsa.383510.1 (locus Cucs a.383510) derived from phytozome v7.0 (chr-ID scaffold0388 2; pos 510062 to 510597)
taattgaccagaatcgggtaagcatactcgttcttattcattctgtttttctacttgttatccaatggttttagttaggcaagggtgatgaaattttttttatgttctttgttatttgaaaatagctaaatggaataacagtagaattcgtatcttctgcggaattttttacattgcattcgtttctaagggttcggtgctgaaactgctagataatgaacttgctttatttcggttttaagtcatctgggctgtttttgctttagaacttaagaagggatggatttgtgtactactttgtttcagttggaaagttttgataatggcggtagtcataattaagcattctcaagttggtggattttcaacttgggggggttttgttaccttattccacccgagttgatttataacttttaagtgattttgaaaatttgtgaaacgatagtgattaccatgacttgcttttcaatgaattcttttgttaaatcatttgcatgactagcttgattttatgtctggtcaggctttggtcg

SEQ ID NO: 66197 - DNA, 829 bp, Cucumis sativus
  Intron number 3 from transcript Cucsa.309420.1 (locus Cucs a.309420) derived from phytozome v7.0 (chr-ID scaffold0298 0; pos 155744 to 156572 reverse strand)
cgccactctctcccaagataagattttcaaaggtaaccaaactaaaataaactctttttttttcttattattcttttcagattcatttttatatactgcaaaaggattaaaatcattttattatacagttttaaaaccatttcattatatgtattgattgctaacataaacgaaactgaactgacatatacaaacaaaatgtgttagattcaaatctttccgccttcaattatattacaatatattttaaaaaaggatgatgttattatttaaaattcattttcaaatatggttttggtgtaagattatatttaatgttcattgaaaatgtttagtaatatatttataatgtgtgaacacccagttttgaatatcaatcctcaagctttattggcgattaaattactcgacgtattttgtgtcatgaatgttgttttgtatattttatttttattttaacaactgtgaaactattttgtttattataacgttttctgctgtaattcggcaaaagaaataaaataaaaataatgaaacaaatcgcgaatgattcaagtcttattttcagttttgttttgtttttttgtttttgaaaggtaagtctatttcttttgtatttttctaaacataatttaaatacaaaattaaagttgtaataacaactttttcttctttttttttaagtttggagtacataaacttaaaattttaaaaaatacaaaaccaagaacgaaatgattatgaaagggattaaatgagacaatactaaaatttaaacagtgaatattaataatgatactaatgtgttgaacaaattatattgcagctc

SEQ ID NO: 66198 - DNA, 831 bp, Cucumis sativus
  Intron number 4 from transcript Cucsa.363390.3 (locus Cucs a.363390) derived from phytozome v7.0 (chr-ID scaffold0361 1; pos 958870 to 959700 reverse strand)
ttcaccagcttaaaggaagcagttcaaggtataagaatgaaacttattaaaaaagcctctccctctagtacctgattttcctcatatgtttctgttaaaaaaggcttttaggagctaacaattagttttatggatttgtttgcaaagttatgatatttgaggaaacaattactcaacatgctttaaactaatttttttggtctaaaaagaggagggctatcttgcattagtagctgccaaacaaccagtttttctttccttaattttaaaacatagaggaataaagttttcatttggtagcttgtgataaactctctctcagaaccattttcaaattctaaagagaaataaatattgttatcacaaaaaatttaactgaatgaaggattttgtaacttttgtgattaacagcataggtgcacagagagttaaaaatgtctgtatagccatgcgaagcttctgtgaggaacagaacattgatgggtgagttcttatttattgaagactaagcagggttatatatgatgctgaggctcaagttttggttcttgaattttatccaggcccctaaatttcatgaagttcgtttatggaactagaacttttatctaccttttacatttaaaacttcaaatttttaccataacatacaatcattgtcaaagtttttctcatcattattttagcctgttagcaaaaaaagaaaaaaaaaaaaactgatgtattactattagaacaaaatcaaaagattttcttgttgaactccttcagcatgtgtggaattattgaataaaatcagcttatagaaactatgaaacatttttgatgcag

SEQ ID NO: 66199 - DNA, 1027 bp, Cucumis sativus
  Intron number 1 from transcript Cucsa.349440.2 (locus Cucs a.349440) derived from phytozome v7.0 (chr-ID scaffold0348 7; pos 705197 to 706223)
ctctcgcccttctgatcactcctggacccccaaaggtacttatgattctctttatatttatattcatatatgcacattcctttctctctctgaattctctcttctttctgctctctatcgatttgatccgttgtcttcttcgattcaatttctttcacttaatgtcttctttatctttcttgatctgacctgggtttgcttatgggtttttcttatggatttgaatctttatttttccactccttgaattagggttttgaatgtttttacttctttcaccaattttttttatctcctctttcttagggttttcagatcgtgtgcctttctttttctgaatttttactgctttcctttattggctatggttatctctgttctctgttcgttgttgtattggttttcgtttcgttctatggtgattggatgaaggagggaggaatttagatgtactgatgttttgggttgttgttcaatgaatctacattttctttttaaattttggtggctttagttttattgattcggtatttgctatctcaatcctctggagttcacttgtgggttctgggttgtttgtttttcgtagtcgaatttgtttatggggttgtaatctttactaaagagatgaccatgttggacaattctgaggccttttatgtttattataggattgtatttgttaggttattgatccacttattgcgatcgttattattattatttctttcttcttgtcttctaactgtgtttggatgtattgccactttattggttttttttttgttttgttttggttagtatgttatatttattgccttactaacgttgcaaacacatatgtccttattcgttgaagcttctggagggaatgatgaggagaaggtgctctcgggtttccttgatgagtctaaaggtatctttcttaaatattatgagtttgttcatttgtattgtaaaattaacaatgctaacatggtcaaattttgcagactctgtggcttcagagaacagcataccattgtcc

SEQ ID NO: 66200 - DNA, 512 bp, Cucumis sativus
  Intron number 2 from transcript Cucsa.325950.1 (locus Cucs a.325950) derived from phytozome v7.0 (chr-ID scaffold0313 2; pos 233703 to 234214 reverse strand)
tccctgttacttatcaaatccttgtttccactcaggttttcttctcattagacttgagatttgtttcttttgttgatggtggggggacagtgagaatgtaattagcaagtttatgaaattatgcatggtttttattatgaatttagcttaaattcatcgtctgcttgcttacgaattggtttcataacgaattgagttcactcgatttcatacgttgtttatgtcgttcacgttcacgtaacaaagtcatctcatttgtgatccttgtcaatttcggggagagaataatggcaggattttcctagttaattaggccccatttgaattgacttttcaagtgtttatgagcattctttttcaagagatacacttatataaagacttaagaaatcaatccatcaataatcttttgtttcatctttgtaattgacatcacttttgcctgtattgattgcttatttatattgttttctataggttgggaagcgtcttcggcacctcactaaacaccc

SEQ ID NO: 66201 - DNA, 977 bp, Cucumis sativus
  Intron number 1 from transcript Cucsa.359880.1 (locus Cucs a.359880) derived from phytozome v7.0 (chr-ID scaffold0358 8; pos 676938 to 677914)
tgctgctggagaccatcctgttccttctgctcgtggtaactttcttttcctaaattcatttcactttttggatcggtgttttgagcttgattttatgccttactgcttgtctgaagttgatcgtctgtctatgttctgatcagtggatgatgggttttaatgcatggcgtctgcttgttctctttctgttttcaacattcagctggtttatggtagatccgttatcgccttcttgattttggtagatgtttaggggagtacggtattttctctggaaattcactttctgatcattaggtatcgaactgcagaagtgatttttttttttttttaggaataaactgagaaatattctactgattttaaatgaaagaaaaggggaaaagagggatggagagctagatctagccaatagccatggatttagattttttatttgattatagtcaagcttttccgcctcaaatttttagatttttctcatttgtaccctaaatattgacgaaagaaattaccgtataattgaacttgttctatgatgtttattgcttttaattttataaatgaaaattctttcgtcaatatttttcgatcggctaacgtaattgctagataaatcgtggcttagtggttggtcattcctaaaatgcctcgaacctaatttttggtctctcgctttattctttctttttctttttggtggtccttctaattaatcatcttattatagctaataattggtatttgaaaaaaagtgaatcatcagttgaactttttcgaacattttctacatactctgtcttttgtagtttctgaatcccttaaaccctgtttattttcttgacagggatggattaatttttgttactatgttttttctgtcttcctgatctgtgtactctttattcttcattgctttaataaggtatatgtactttgcagcttcaaagtctgtagaattctctggacaagctgaa

SEQ ID NO: 66202 - DNA, 603 bp, Cucumis sativus
  Intron number 1 from transcript Cucsa.341370.1 (locus Cucs a.341370) derived from phytozome v7.0 (chr-ID scaffold0335 6; pos 3764927 to 3765529 reverse strand)
ctttgaggaatctacgacgaaacccatagacaaaggtgatcttttcttttcacatttcatctgaaattcaactttacgttatctattgtttctctatgaatgtaaattttgatccatgcgtttattttccgataataactttgaactctttccgataaggtttttaatgggaatggagtggcgattgctgtttatgatctttgaattctggaattagtttttgttgcgactaattgctcttgcccgcttgtaattttggctatgctaaatttagttggaccttaacctaataatttgtggccatgccctgtattcccgttggacttgatgtaggtttataattgggagtatccaattgaattatattctgtatgctgtttttggattttgatctcttaggaacacaacatttctataacgaactgcaaaatctttctttcttatcgtttatcatccttgtttgttctttaagttctagatgttctgacttttcattccttcacttttcttgtctgcttttagactgttcatttgacatcaatatttttcttcaaccaatatttatggagaagagaattgttaacaaactaacacaaacctcag

SEQ ID NO: 66203 - DNA, 895 bp, Cucumis sativus
  Intron number 1 from transcript Cucsa.364910.1 (locus Cucs a.364910) derived from phytozome v7.0 (chr-ID scaffold0361 1; pos 2361464 to 2362358)
gggttcggtggatttggacggaaatttcgggtcatgtaaatgggatgtgggtacctgttttgagtaagaggaggattcaccttttgcattcactgagtcactacaaacatcgactcaactaactcccatgtgggttacctctttacatattcaaacttccttcattctttttttaaaatggagtttcaaattttttaatttcttcagtctttggctgttgtattttaaagtttttttggttatttgatatctatgtactatacatattttattagtggttaatattcgaccaactagagttggttgatatgcattctcaaaattcaaataagactcaaatttgtcgaagaaattgacacaaaagctaagagaatcaaacgattgatacttttgaaaaaaaatactcttttgctatgccaaaagttttagtcaaaagtttctttctaactctctttactttcttcctctcttggcttactttgtttcattcacaaatcaagacacaatccttgtttacaagacgtgagatcgttagaattcaagcaaaaatgatccgtctcaaattttaactattttacatatttcatagtttactttttatctcaaggtagtctacctgaaatatttatttagagagtacatctatcagtaattctggagaattctaatttacatatttatgtcatattgtagatactttaataaacttttagaatagttgtattgtactcagtcttctactttaacataaatgatatcttattattagagaaagttgtttgatttaacacggtcttataattaaaaacataaaaatgattttaaaaaattcacttcagggagcatttgactagtaacaaaaatcaaagaatcgaattgagttgatactaattgt

SEQ ID NO: 66204 - DNA, 692 bp, Cucumis sativus
  Intron number 1 from transcript Cucsa.310430.1 (locus Cucs a.310430) derived from phytozome v7.0 (chr-ID scaffold0299 5; pos 247192 to 247883 reverse strand)
agcttgttcggattcgccacgattccgacagtggggttagtcttcttcgttcacattcaatcccagcttctaacactcaatttggtttttcattcttcactttatcatattagtgtcacttgtgtggtgtgttgatctgtgcagtgaaagttttagattggggaatttggaattgattgcgacttatctaatcatatgaaactagatccgttatgtgtttttttttttttggtactgtaatatgtggatccgagtgttgattttgatacttattgatgattgagcttcaactctaatgtctttgctggtgatggacttttggtttctccgtttcgtgggttatttggattttggcttttggggcttcgatttatgcttgttgtagtttggttcttatttggcactttccccctttcatttctttgtttttgttttttgaaatggggtatcggtctttgccattcttcacttcgtgtttcagtactgttgtagagctcgacttggtttgatagtactttttgtgaaatgccaaagatctgtgtttgtatttcttagttgagatctgtacattattttgcaattcttacttaatcttctttctatgttatggctgctgatattgtgacttatccatattccatttttgtttgaatgatgcagcctaaaccactgaagaatttaaacagccaaac

SEQ ID NO: 66205 - DNA, 530 bp, Cucumis sativus
  Intron number 1 from transcript Cucsa.360410.1 (locus Cucs a.360410) derived from phytozome v7.0 (chr-ID scaffold0358 8; pos 1098565 to 1099094)
aaagcttaaagatagtgcctattgcatcgaatgtacattattcctcatagtgaatgtagagaattaggatttgtgaaattttgaattctacttgttgcatttttgtttttgtatactcaatttataaacgcctcttcttgttcttcatcattatttatttacatatcatcaaatttttagtattttttcttttgaatgaattgggctcctagatctgcttttcttgatcttttctggaaaaaccactaaacagggtgtgagctgttttcatcaagctgggagattacaccactgaagtttctgaacgattatgtttgtgctatttgtgaactttgttggatacggtttttttttttcccactttttttcaaacttactacataaatttttagaaatgggcttacctttgtgatgcattttatctaccccactaattgttaatgctgtaacaaatgatcataattgtgttgctaagtttgatatttatgtctgcagatatttagattagacccaaaagtcagaggttcaga

SEQ ID NO: 66206 - DNA, 315 bp, Cucumis sativus
  Intron number 1 from transcript Cucsa.353280.1 (locus Cucs a.353280) derived from phytozome v7.0 (chr-ID scaffold0353 3; pos 852195 to 852509 reverse strand)
tcaggtatatatatatacacacacacacacttaattcttctctcatcatagactttgcttaaaaatacttgttctttcctttgcttctttttcttttttttaattataaagcactttattaatcatttcaaagttttatttgttttgttttcatgcaagattcacccaagtgatttcccaaattgtctgttttatttttaacaaacggaagtgttctgtttttataacaattccgtttttagttttctgtttaattaataattaagtgtttagtttacactttcaaaccataaattgtgttttaaacagccgggg

SEQ ID NO: 66207 - DNA, 468 bp, Cucumis sativus
  Intron number 1 from transcript Cucsa.312640.1 (locus Cucs a.312640) derived from phytozome v7.0 (chr-ID scaffold0299 5; pos 1994343 to 1994810)
ccttcgagttctccgtagtagacgatctggggaaggtgcaaaaattgaatttgaatgttgtttctttattctcgatctcttttagttaccttgtaaattatgatgtctgttctgttctgggtcgctggaaagtttgtgaatttgtgtctgaaattcttagttgatttgaatggtcttcgtctctttgctgacatgtttcttgcttttgacatcttttgaaaaatgtttagcctttttgtgattctggggccattttactttttgtgtatttattcgttcttttagtcttttttcattttacatacttacaccctgaaaaaaaattcatgtaagaaagttaagctcggaccatcatttcttacttaaggtactgcttgttttgattaattaagtgtactagttcctgaggttgttgttaagagttatgaatccatgattatgtctaatttaatttctcagtaccgctga

SEQ ID NO: 66208 - DNA, 732 bp, Cucumis sativus
  Intron number 1 from transcript Cucsa.375230.1 (locus Cucs a.375230) derived from phytozome v7.0 (chr-ID scaffold0374 6; pos 126257 to 126988 reverse strand)
atttgggaaggttgaattaaataatgagctctacctactcagaatgaagaatgaaagagttaattgcattaagcacactacactaatgtgtaaagtctcggcctctatgtggcgtaaatggatgggacatccctctatcagcagaataaatgagctagctaagatgatagaaaattctgactttccaaatattactatgacaactttccaaaaaaattaatataatcatcttttaactcaattaaaaaaaatgaaagtaataaaatcgtctttggccatgtttgtcccttagctaaacaaaaaacgtctctctttccctacattgaataatattgctgaaaatgtatttgatcttatacattgtgatatatggggtccttttaaaactccaacacatggtggtcattcatattttaccaccactgtagacggtaaatctagatacacttgggtatatcttttgaaacataagaatgatattctacaagttattcctagatttttcaagttaattgaaacctaattttcaaaattcatcaaagtctttcgatctgacaatgctccggagttgaattttaaggatctttttgccaaaactggaacaactcatcaattctcgtgtgcttacacttctcagcaaaattcagtagtggaaaaaaaatatcaacacctttttaacgtggcaagagcattgatgttccaatcaaaggtttctcttatcttttagggaga

SEQ ID NO: 66209 - DNA, 807 bp, Cucumis sativus
  Intron number 1 from transcript Cucsa.360920.1 (locus Cucs a.360920) derived from phytozome v7.0 (chr-ID scaffold0358 8; pos 1412826 to 1413632)
gagaagaattgttattctcgatgatatatagtttatatgttcaaaacattgatgatatattgaaaattgaaatctgatatataaatcaacctagattgatccataaatttgcaaatgattttaattaagttgaagtaagacttaggccatacattgataactgtcataaaatcatgaagtacttgaaaactctattaatccaatcaaacttgttgatgtaaagtcaaatgtaccccatcccatgtgcccaaagtacttaatttaaagggaattcctcttgtgttgactttacatcatcattacaagctttccatttatgtctcagcctgcaaaaatgagtgttttctgatgaattctcaccaatcaatgcacccaaagatacatacccaacataaagaggatgatgatgatgggagtatcaacccatttcttctctgttttgttcccaagtgctttggcattgacattgactcttctacttcctcttcaagcttcggatcaatcaggcaaacaaaattctctaacttactttcaatatttatatatataaagagaaacagagaaggttaaactatatgtgttaagagtaatgatttattttattctaatccatcctcttaaacttttgggcttgggttgatcggtgatttaaggtcgtatcaaagtaggaagtcgaggggaagtgttaaaagtattgatacataggaatatatggtaacttcacgcttttgagttgatgagtaatttgatgatatgtttttttgtttcttaggtttcgttagcttagattgtggatcaccagaaggt

SEQ ID NO: 66210 - DNA, 529 bp, Cucumis sativus
  Intron number 1 from transcript Cucsa.395230.1 (locus Cucs a.395230) derived from phytozome v7.0 (chr-ID scaffold0410 0; pos 841899 to 842427)
tttcgttgtatcattgaggaaggacctctctgtactacttctctttaaacttcccttctaactctttctctctctctctctttctctttctctttctcttctacatatttatatttctttctcttgatgtctctgtaattatttccttcatttgaagctttcaaaaccacccaacagcttaaaattttgatagtattactgggttaatcgatctaagatggctcgggtcattgacgacttttaaggcattgaaattgttgtaagagatgagataatcgacgggggggaatttgaatctggggtctgttttcttggctgattctgtaatcgatttttttttttaataaattcggagttgaatttttggagaagagtctttgagttttgaaggtttgataattgaaatcaattcactgtttaaggtctttgttgttctgggtttagatcttatcttctgaaattagtttctaactcttgaaattttcgttgtgcagataaatacagagcgattttagttgttcgtttgagg

SEQ ID NO: 66211 - DNA, 640 bp, Cucumis sativus
  Intron number 1 from transcript Cucsa.325740.1 (locus Cucs a.325740) derived from phytozome v7.0 (chr-ID scaffold0313 2; pos 42023 to 42662)
tttcacctccatcctcctctccatccttccctgtggtaatcatctcttttctttcatctttttgtcgttttaaacgaggaactaatgaacaatttgtcatccatggtttttccatttatttcgcgcctaaatttcctccacttattcttaatttctaggtttcttcgcttaatgataactatagacgttctggagaacgaaactcatatgacttcgttgtttttcttttatttctggaattcctttttgtttgaattttgattctaaccgtgtttactgcctccttacgcagaactagaacctatatggttcatttgttatattggagttcgctcatctagttacatatttggatttgtttctatctggttctattatttttccgattcattccaaatctcagttcttaagtagtttccgcattattgttcactctgagtagttagcaagattgcatttccctttttctcgtgcttcatgcgcttgaaagcacaactgctgcattcgtatttttcctgattctgacgtagtttgtttaaaatggatgacaattttagttaaaactgctgtaatgaataacaatggacttgtacgaacttctgtaggtcaaagcaaagaaccaaaccttctcttcctttga

SEQ ID NO: 66212 - DNA, 654 bp, Cucumis sativus
  Intron number 2 from transcript Cucsa.366750.1 (locus Cucs a.366750) derived from phytozome v7.0 (chr-ID scaffold0362 5; pos 262772 to 263425 reverse strand)
ggaaagcagtgaaaggtgaatttggctgaaattttgcaatctgtgatttgttgacatatcttatgaggaatttctaaagtctatcgtgtgttcatcacttggtgtgtgtttggtaaagcaggaagatagttatcacagaatgaagcataagatataagaaattaacttatcaattatcatcactgtatatattaattatttcaatgatggttagctcatgtttgacaataagcaataagtcatagaaattaagaactcgtggctttgacttcttcaaaacacttgtggaagatgtcttagacaatataatacatacaaaaaacttccagatacttcaaaaattgctcttgcgattacactttaagaatagtaggtattgttgataaaactatcatgtcagcggggagaactattttagatgttgaaatggtggtcaaatggtcctatattgtttcttgttaaacaaatgaagaactcacggaaaacaagggtggaaaatgctgaaacaagagaatgtgcaattgtgttttttaattctcatgattgttaacaacaataagacaatgccaagttatatcaaggttctattcatagcctgagtttagtattttatgttttgtgacttatcaattgcagacgaagaagctcacagtg

SEQ ID NO: 66213 - DNA, 625 bp, Cucumis sativus
  Intron number 2 from transcript Cucsa.388580.1 (locus Cucs a.388580) derived from phytozome v7.0 (chr-ID scaffold0396 7; pos 961691 to 962315 reverse strand)
attcattcttggcctcaaaatcctcctaaattaaggtaattaattttaaaatagcatgaaataattctcttctaattagtttacctcatgagctaataatatatatttttgtacaacattttgatctatgccctaaaagttgttctccaaacatgaaataattaatattgtttttcttttctttatttgtttataatatagtatgatgttattgtttattagtaataataaatgtattatgattggttgtttatgaatattatagacactaataaattatttccataaaatatctataatatttctaaaactaactattcaactacgtagggtaacattatttgttgataaacaaaatatacaatgaggatcaagattttgaatttacctatataatcgattacaatcaatcaatatgcatcaatattgagtgtctgatcattttagtattatagtaacgttaccaaacactttaataaccgttaaattattgtttgatccaaaagtacgtttaagttgtgggataaagataaatttaatatcatattatctaactacaaccaacaaaacttaaaatgatgattattattattgcagagaggtggtcggagcgtattgtattgca

SEQ ID NO: 66214 - DNA, 409 bp, Cucumis sativus
  Intron number 1 from transcript Cucsa.388580.1 (locus Cucs a.388580) derived from phytozome v7.0 (chr-ID scaffold0396 7; pos 962522 to 962930 reverse strand)
ttctcgacagtactcacgagttcggagtttttcaggtttgaaagagctcatgaatcccttttttttttccaaacaacgacagtttgtgtgatcttctaactatcttaaattttgattttaaactttttagtttttatcgtggggatatcaaatctttgatttcgaggttgtggagtatagtactatatggtgatatatagttgaactatgtttatattgatgctaaattttgacgaatgaaaattatgaaaaatgcacttgaccctcacttgatcctcacatgataccaataagataattatagaagtgggaaaaggtcaataagataatcatggatgagatgagaagttaatacaagataattatggatgacattttgtggccgtcaatttgttataggtgataaacc

SEQ ID NO: 66215 - DNA, 790 bp, Cucumis sativus
  Intron number 1 from transcript Cucsa.352590.1 (locus Cucs a.352590) derived from phytozome v7.0 (chr-ID scaffold0353 3; pos 384467 to 385256)
tgcttcaatcaatacccaggttcaaaaccaaaaaccacccttaaacatcagaaaattttcatttttccaccatgaactacaaggttcaaaacaccgatgtaacgaatataaatataacacaagaaaggaaatcttagttgcggtattttccattgccacctaaaactaaaagcgattcccacctatctaatttcttatagatggcaatgtactacaattaaagccctaattctactcggccaccaaacaaccagagccgtagcaacgaaacaaaaagaaaaaccctatgtaaggaaatgaaccattaaacgagacagggataacgagttagccacattctaatcaaaacatgtctaggaaaagaagatcatggacaaattatgtatgaaaaacgcaactttagattgtaagaatatataaaatagacagaaaagcataaaatgagtcaagatataagggggcgggggacctagacgttcagattaaaaggtaataattctcatgtaaacatcacagattcatacgcaatacaaacagatatccgtagaagaaaccctcaaaaaccattctgaaaacctaattcacattctacgagaacaaagtcctagacgaattaggattcttcaacagatggggtttcctcgttagtggtggtcgatacaacaggaggtgacgaaccgttttcagctgtagaatcagatgccgctctggccttgacagtctcgagcgtacgcttgctgatctccctagaatagagttgaaggatctcgattccatcgtcgtcggcact

SEQ ID NO: 66216 - DNA, 774 bp, Cucumis sativus
  Intron number 1 from transcript Cucsa.356640.1 (locus Cucs a.356640) derived from phytozome v7.0 (chr-ID scaffold0357 7; pos 1495174 to 1495947 reverse strand)
cagcttcagccattgcatctggaatagtacataaggttctaatcatttattacacttgttctgttactttagattttagattttcatttcttcagagatattgaatcctgaggcactatttttagtaattattttgtttttaaaaattaagcctatagatacttccatctaaaagtttctttgttttgctatctactttctaccactgttttcaaaaactcaaacaagttttgaaaactaaaaaaatttgttcttcaaaatctgtttttgtgtttataatttagttaaaaattcaactcttctatcaagaaattgagagaaaatgaacacaatatttagaaaaacaaatggttactcgacggcactttattcttcagttccaaatgtggtaatgtacaattgtaatatttgtaactgacttttgaattgaatcacatccataaggaaatctggatagttgagtaaaactaactagtacagtcaagtagaacactttgactgcgtgagcatggctcctgcgaaaatatgacaattgacatgcataaatcgagaaattgtccaattttcttttagtaagttatgtacaccataaattaagctcacttttgtggcttattatggtttcaattctatgatattaccctttagtaggacattctcttgtgcatttctacatgcaatttactcttttgcatatatttatagatcaccagccatttagacctatttttcaattcaggtttttgcatttgttgctcctaagattattggggg

SEQ ID NO: 66217 - DNA, 724 bp, Cucumis sativus
  Intron number 1 from transcript Cucsa.359520.1 (locus Cucs a.359520) derived from phytozome v7.0 (chr-ID scaffold0358 8; pos 413754 to 414477 reverse strand)
gaagcgagataaatcgacgggaggcggcgagaaaagtgaaaggaaaacggagattgagaatcccgttcccaggtttaacaatcccttccctggccgtcaagctcttctaaaacgggttgccacaattaaatcagatttgttagttaaaaagaaacccaattcctaagagaaagcaactgtatatagagaccataaccttgagaaaattgatagcagaatcttcgttcattactgagaattatgtagagtcactaaaataatatgtttattattgagtgagcgtttggaacaagacaatataaagtctcagctcaatccattccttgattcgatcactctctaacgagttagtagcagttgttatttaaaatcaaagattttctaacccataattgaaatggtcaagaagaaaaacttgtaaaaaattataccgagagagatatagcctcgaaaaatgttaatgggtttcctctcccgtttctcccataaccattgcattttggtctgactgaatcctgaaagtagcagaagtcgtgcaaatggctaagatggtaatccctgattatgtcttttcaacctaccaaatgcagttttaagattgattaatcagatcacctgcacgttttttttttttctcttttaacattcaaaaagccaaatcaatatgttttagtaattttaataaacttgttcatcatgttgccagcttcgatagacaatttgg

SEQ ID NO: 66218 - DNA, 613 bp, Cucumis sativus
  Intron number 2 from transcript Cucsa.341900.1 (locus Cucs a.341900) derived from phytozome v7.0 (chr-ID scaffold0335 6; pos 4334277 to 4334889)
ctgatactgtcattaaagccacttgcctggtatgctattaacacttatttattcatgagctatcactatatatacattcgaaaaaattacaaaaacacagtttaggttttcctttcaaaagtgaaacacttttaaagacttatgattttgttgtgatcctctccgagatttcatcccggctgggatgcattctactatgttcataaaaacttgggacaaatttctgatacacaaaattacatgaaatctcgaggatgatctaaatcgattgagattgctcgagaaaaacaaaagcctaagtttttaaaaagtgtcctactaattttgaaatgcaaaacttaaatagtattgtttttgtcattttgatatattttgtaaatatttttgttcatttaatattgaaaaatctcacgaataagatctgtatgatgtttattttagaattattattctcatagtaatcaaccagctgataatataaatttgagatattgtgtaacacaacttctctatcatacatttagccataaaatctgtcaataaccttggcaactgtatttaaagaatttcttttcttttatggtagacacttatttctggaggaaccgataca

SEQ ID NO: 66219 - DNA, 840 bp, Cucumis sativus
  Intron number 1 from transcript Cucsa.365600.1 (locus Cucs a.365600) derived from phytozome v7.0 (chr-ID scaffold0361 1; pos 3439210 to 3440049 reverse strand)
gtggccacgatactcacactgattccaaatctcaggtattttacgctttaatcatgcatctcaattcttttcttatattacctcttttctttgatttggagaattcatcgttctgttgcttctaagccgaaaatattcgttttttgagttctaattggagtttacttaccgtattctttagatttagtcattactgggaccgttgaggtttgatgttctgtcctagtttgagtggagtattctgaatgaatgaaacatcacctccaacctttcggttttattttgaatactaattctttatcttatttggaacgatacattttttttgtttggatgtttgctataaagtactagagaatgacaatttagtaatacggcgttccaatcatgatttgtaaattgaaaattcgaatacagtaaggttagaccagcaatttatacttaaatatatgaaatccaaagaaatctacctattcttgtctcgaaaactttttaattgaaaacatgattttatttttggatcttaaaccctactcttttttgggattagaaacgctggaactcgtttgaaatccattagtattttaagttactcaagatcttcaagataaaaatagaccacaagttaattcttggtggttctttttgttcgtttggagacaatgtttagttgagattaggcaattgggtgatctttgggaattggttttgtttctgcttttcttttcttccttagcttgggcccatcatttatatttaatgtaatgaagaagcagtttcctatacattaaaggattacgaagaaaccaaaaccttactaacaaactattcttttacagc

SEQ ID NO: 66220 - DNA, 570 bp, Cucumis sativus
  Intron number 2 from transcript Cucsa.359970.1 (locus Cucs a.359970) derived from phytozome v7.0 (chr-ID scaffold0358 8; pos 756045 to 756614)
acgattagaagtaatgaatttaaacatttagtttctttattcacgtatccctcgttcacatccaatcaatttgcatcgtctaatgtacacggatttgtatgcatcgtttcttcattttgatagaaatgagatttaagaagatatgttttcaatagatggattcctctttagaatgcacttactaacgttctctttcgttagacttgaatcatacactataaaatacattggttcataatccaatgaaagggaaaatgtccgtcaaatgcttttagaagaaaatgcaattagggtatagtatatggtttattatctttgagttactaaatgaatttcttccttctagttttcttaagaaatatagaaaatgaaatctgtttctatcctagaagaaaagacaccgtttctttcagatcctgtagttttcctctgttgatagatatttcaaaagggcataatcaagattgttctatatttttgtgaattattgtggaatctgtataagattaacctttagtctttgcatttgttgcaggacgccgattacagtctcattgtcgattcaaccat

SEQ ID NO: 66221 - DNA, 847 bp, Cucumis sativus
  Intron number 1 from transcript Cucsa.340100.1 (locus Cucs a.340100) derived from phytozome v7.0 (chr-ID scaffold0335 6; pos 2613089 to 2613935 reverse strand)
gtggacgatcttctctctcaggtaaattggtgttctggtattgtgtcgtaatttaagataaaggtgcaaggaatagaaattttacggattcagtcgttgagttgcttatgaatttcctcaaattgctcataattcatcattcgttggttagttttcatgttgcgagggatggtttttgcagttcagttttccctttgtttgtagattgggtggaactgtgtgtcgaactaattattccttcacttgcttgagaaattcattggttatatggctttagtctttcagtgtaaggtctaggtttggcaaatcaatcaaaatgctcactattaatgatgtcgaagatttagagaatatacaaatctgatattgctatcattgcattgccaagtttgccctaactgctatgctactttacatccaatttgttactcttaccgaaagatcaggagaggaaattgtcatttccgctaatgttagtatttctcaaccattttactccaccgactgctaaaaaatctgaaccattatacttataatcgagagccctatagtttcagtttcaaggtaagggctcgagagttgagggagggtagacatatccgcaaactgaaactgtagggctttagattatgagtagaaacttcataattgaaaattttagaaccttcttgtctcgaggaattgggcggtagaataggaaaattgaaggtgtcttgttgtgggtgaaacctcttttgaacctttttgctggtcactgcctacttttttcgcctatggctgctgaagtggttagcgatgtctgaagtgtaaactatgcaggtggaagctcaggacgccctcattagca

SEQ ID NO: 66222 - DNA, 830 bp, Cucumis sativus
  Intron number 1 from transcript Cucsa.334850.1 (locus Cucs a.334850) derived from phytozome v7.0 (chr-ID scaffold0331 2; pos 304689 to 305518 reverse strand)
tattgccattcgtcataggttgctccaactctaaggtaagttaaattatgaattgaaattccatctctatggttcaatttttaggttttattgaatttcttcttaatgatccatatatataattttagttatataccttcccttgattctcacatggaacatctttttttttggttgaaatgatttttatttttatttttttctaaatttgttgacaatgtattaaatagtatattcttttaggcaagaaagcaattgagaactttaccgtttttagttaattttgctataataaatcactttttaattattgaattttcaaaagtttgcactctataattatttttctaatttaatatatatatgaaaattattgtaaatgacaaaattgttaaaattaatacttacaaaatataataaaaattttctattagtatctatcattgatagaatttgaaagtttgtcattagtgtctatcgttgcctaataccgataaaatctaaattttttttatagtttgtaaatattttgatctattttgctatatttaaaaatgttcgcttcttgttgaagttaaataataataatactaacaataattttcataccagaaaagaatcaatattaaaatagatttataagtctcggagcacgaatataaacacatattttgaagaagaaaaagttgaccatcacctaacaattgaagggtcttttaagatttacagaaaatgtagggttttaatctaataagaaaaaaaaggattcataaagtacaattaccaaaaatataactctaaaattttaaatcattgaataggaggagagg

SEQ ID NO: 66223 - DNA, 1015 bp, Cucumis sativus
  Intron number 1 from transcript Cucsa.397260.1 (locus Cucs a.397260) derived from phytozome v7.0 (chr-ID scaffold0414 6; pos 83546 to 84560)
acaaaaagaatagacgctctagtctctttgacgtaaaatagctcgtctcttttatatatcgactcatctaaattacaatttcttgttagtttcctaattttatacttatttatgttccctttaggaattattttcaagtttataaatattactttctaagtttttcttttgtcctctgttttgatttaagggaaataattagtaaaatttattagaaaactaaatacaaaatcatttaccaaacaaacatgtgcttttctaaatcacttttctcaaatattgttacctttttcacttttcctaaacaaacaaaattttgaattcttagtcaaatgttcaattttgaaataatggtaccacatgaacaatacaactaagaaatctataggtacatgtaataagaatatcatttaattaactatataagcttaatttttaaaaactaaatgattattaattaaacccacatcaattaagtgttcataactaatagtttctctctattatctatcaatatcataaattcttctacttgatccttttatctccacatacatataaaactattgtttccttttccattaatttgttttgattctttttctttctattttgtgtttaaaaaaaaacaggttgggacagcatatgaaacaacaacaatagcactttctcaatgtttgaagatatcaacaaattctcaaaatgatgatgatcataataatcatattattattgatcatttcaataagaaggaggtgatgatgagtagtaatattacaactacttttgcaagttcttcccaacaattaccttacaataataataataataataatatggaagtaattaacaacaaaaacaataataataataatcaaatctcttcttcttcttcttcttcttcttcttcactttgggtttatggtttgattaattcgcaccttaaatcacctcctaacttatataataattattccaagtactctacccctccaaaatatcctattatttcttc

SEQ ID NO: 66224 - DNA, 949 bp, Cucumis sativus
  Intron number 1 from transcript Cucsa.321180.1 (locus Cucs a.321180) derived from phytozome v7.0 (chr-ID scaffold0308 0; pos 1017507 to 1018455 reverse strand)
tgtccggcttcaccgactttcagactctgattctggtaatttctgagctgaatatgtaaaatattttctttaattttgttttaatattataagctcaatggttaggtccccattttgttaatttatggtttgtgattaatgtttaaggcttcattttgccttcagaactgataattcgctattgttgtttcactggctactttcttgatgatttgattgtctgcagagaagggaaagtggagaccaaaacttttttttaaacagtaaaattagagtgtttgataacttcatgtcacttttgaaatagtaaaaaatggttcaaaattatttttttaagaaactatttaaagttgataattcgaaatgtgattgatggaagatgactttgtaatttttcttttggaaaaacaaggaatcactttatggtaattgacatttataaaagtgattttatttttagatgtagcgcaaccaaacatacttactcctagtatttttcatacattgggacctcttataaatgaataaaaaaaagtcaaaatgtaatgtaactaaacacccaagaattttcacaagaactatttacttactcctagtatttttcatacattgagaacttccatagtgtgacatgcactttctgacaaagtgttctgagaatttgttagttcatgaatgaagagtacataaccaactacggcttgttttctattctttttgttcttttgtccttttggttcttgggtcctgtccgatattctttatgcttgtccttggatggctcagacttccgatgggttccctttttctttatttgtaatgttatctatgatcatttcttttcaagtttctggggtgttcttgggctgcttcagttttgtttgaatggtgatcaactttggtttatcaaacaggaattgtcgagatacatttagacaggcctgaggcg

SEQ ID NO: 66225 - DNA, 653 bp, Cucumis sativus
  Intron number 1 from transcript Cucsa.322190.1 (locus Cucs a.322190) derived from phytozome v7.0 (chr-ID scaffold0308 0; pos 1984115 to 1984767 reverse strand)
gcagaacagggcatcgacgagcgcaaagtgcccttgtaagtaggcgaattaagttgatttttatttgcttgtactatctcgaatctgtgtattgccatgaatctgtggctgtttgtttcccttttgaggtttcgaagtgatgggttatccactgattgttatatatcttgcgcttgagattatcggttctgtttttgaagaatctgaacttaattttcatttcctggttttttcgtggctgctagattggttgacttttgataaattggattcttacttgcgttgttgtggtggagaatacgattctatgaggcatttttgtagaattctttgacttgggtcatctgaaactcgaatctagtgctgatttttggtcttttttttttataaaaaaataatattaatcataataaaggttgtttattccgtagtaatggatcagttaagcttttatgcttctgatttccatggttgtttcaagatttcatcatattttctattttacttgtcctgttttactttgaaactttaatggaggtaaggaaattaccatctgggttcatgttttcttttactcttttaggtttgttaaacatttatttggatattttgggtattttttatgttaataaagtgtgttcatatggtgcagg

SEQ ID NO: 66226 - DNA, 597 bp, Cucumis sativus
  Intron number 1 from transcript Cucsa.339810.3 (locus Cucs a.339810) derived from phytozome v7.0 (chr-ID scaffold0335 6; pos 2362893 to 2363489 reverse strand)
catattcacattcagatttctcacgaattcgagcggtaatcaattttcatatacatcgattttcatcattcatttctcaaagttgatctctctggaagatcttttgttgatctgaagttgtagatttacggattcattttacgcattttttctggtagattacaaattgttttcgtaacattggaacgaatgattgtttgattttgtggatttgcgatttaattttttaattatatgcgaagatctttcacacttctcgacatacgtatatatatgttctgttggttgcggaatcaatttggtcatgtttgtcgtagtattggaaatcaacatgggtttgtttgaaattctcattgcatggtttagatgtcgttagaggatccgtaacgatatgtgtttctggaaattttaatttatttggctgttcattgcgtttttacttttgaattcttctttttaagatgtttcttagattcatgataattcactgggtgttcgtagttgaagatctatttgtttaatatctaaacttttctaaatgtttgattttttattttaagtgatcttgctgtgaatctgtgatagaaggaagcggaa

SEQ ID NO: 66227 - DNA, 863 bp, Cucumis sativus
  Intron number 3 from transcript Cucsa.395420.1 (locus Cucs a.395420) derived from phytozome v7.0 (chr-ID scaffold0410 0; pos 991897 to 992759 reverse strand)
ggctttgggaattccagtaagtttattagcctttgtgtttgttctgaattcgaaagttgaactggttttagttgaattcttgttgcaatttggaaaaggccagcttcatcccttatctgaattctcattaaaggctataactttttggctttgccaagtacttcaaaccacgttcctttcagaattttcatgttcagtacttggttatttttactgctttggaagaagtttagaagtaccttgaggttctttgctaggaaaaaaaaaaacacgtggagtgttttttagtccattataaaatgctttggaaaaactgaaatcgcttcaagatgtttcgtgataaagtatttgtaaagtgtttttacacactggaaaaggcacttaaaagaatatatagaaaagaccatcagtgtagtttatcattatacacatagttctaaaatacttgtgattgaagaacttttgtttaaagtagcacacttccaaacaagagacagtctctaatccttggacgaaaggttcagtctgctgaacataatggattcctccattttaacaagtaaaggcttgttcagatttaagtaccattatacatttattctaagaccagtgacaaacaaatccatgcttttattgatctgttaatgttcatttgactatttgatcttggattgctcttatggagatggatcttagattcttaacttatgatagataatgctttcatgatacttgttacctggtcatcatataatcccaaagtctggagttatggatgagcttatcacagctggaaatataattattttctttgtatgcctactgcagctaggcctacttgttcgggcagcaacatccggcca

SEQ ID NO: 66228 - DNA, 395 bp, Cucumis sativus
  Intron number 1 from transcript Cucsa.383190.1 (locus Cucs a.383190) derived from phytozome v7.0 (chr-ID scaffold0388 2; pos 197426 to 197820 reverse strand)
tcttaccactagccgctgcatcaacaacccaccaggtttgttttcatctctacgattctcgttttatgtcgtggatctttgattcttctccctcatttcatcttgtaaatgttaagttcgtttaattccattgaatttcgtcttggaaatctgaaatttcggattcaacgttattgttaatctgtttgatggtcgattgagagaatacgcatcgatttcgtcattggcttctgggtttttacggaggcgaaatgggtgtaatgaatatgggaattgaatcttgtttgtgttagatttctgtgggagttcaaggatttgggaattcttttttcttatttttgatttggtgtgttcttgcagagctgatctgggttgttgaatctgttgagcgtatt

SEQ ID NO: 66229 - DNA, 645 bp, Cucumis sativus
  Intron number 1 from transcript Cucsa.352650.1 (locus Cucs a.352650) derived from phytozome v7.0 (chr-ID scaffold0353 3; pos 419915 to 420559)
ctagtaattattctctctctccttttatcattctcgattattacatgcaaattaacaatattcttgaaaagttaaacaacccatcaacaatttacatcctaaaaaataaacttcacatttttctcaaaaattaaatatatcatagatacatgagattttgaggacgttaactttttcctattattttattaaagtttagctaatataatatgtgcaataacaattaaactatataattgtcacatcggttttggtactaagtcaacttacattaattaaaatattaggaaaaaacaaagatgtgattaaaaacaatacaattacagaatcataaaaaatatacattaatataaaattggaagaacatgggatcattttgattccatttttggttccaaaatgtaattttacaatgtcattttgtcaaatagtaaatggcttcgggtagtataataaatatatcataaaataaacttcttggaaactcagaagtttgatcctaatgaaaacaacaatttctgtccaattacaacaaattgaaaatttgttaaactattaataaaaatagcaaaaaagaaaaaaaatctcttagactttaaccaatatttattagtgatatacttatatcgttcatatgaacagctt

SEQ ID NO: 66230 - DNA, 550 bp, Cucumis sativus
  Intron number 1 from transcript Cucsa.357550.2 (locus Cucs a.357550) derived from phytozome v7.0 (chr-ID scaffold0357 8; pos 734116 to 734665)
ttgaagtagaaacaatacggacagtagaggcataggtttgtgctctctctgttttttctgctgccatttgtcacgttttaatactatgatcattgatttgggtttaatttcttgtggggtttcattctttttcttcttcaacgttttgaaaatgatggggtggagctagatttgctgatcgttactgaattagttcgataattttgatgttggatcgggttgatattcgttcttagagaatcagatccgtgaattggagtggatttggattccttgtaatctcactttttttcattctttttgtgctctttgtgttaactttgacggaattttttttcagtgctttgtttcccttttgcatgccttctttttccattatctttgttctttctgtttggattaagtttattctcaggcctggctactgcttttaatgaatcttgtactgcaaattgagttatgattctttaactttttattcgattttgatatttgggtttcttgtccatatggtgctaataagggtggtttgtgtattgcagcttaaaac

SEQ ID NO: 66231 - DNA, 575 bp, Cucumis sativus
  Intron number 1 from transcript Cucsa.381920.1 (locus Cucs a.381920) derived from phytozome v7.0 (chr-ID scaffold0386 6; pos 125271 to 125845)
agaagagattttcttcagccatttggctagagacagttagattgaaaacactatttttggccttgattaaaggtcgatcggcggccatctccttagattcttgctaacaccacctgacttgattgccattttttgaattgacaaagctatgaaattggatgtagaagtatcttatcttaatgtatatttcttatgtcattggacatatttctttgtttacgatctatataaaagtaaaaagtcattaccataatatcatatctacgaacagaagtgacataaaatagcttctaagtgaatataatagtctactatcttccaaaactttggcctatgagctttatgggaacttggaaagaagaattgttgctaatggaggacacatttggatgtgaatgaaaattcttttttctttcataattatgatcttggtttgattttgtaggattggagtacgtctttttctgtagttagttcttgctttcttcttttgttaggcttgtttttctgtatgttgttgtcaacctttcattcgtttctcaactaaagctcgggttcttaccaaaaagagataa

SEQ ID NO: 66232 - DNA, 999 bp, Cucumis sativus
  Intron number 2 from transcript Cucsa.312990.2 (locus Cucs a.312990) derived from phytozome v7.0 (chr-ID scaffold0299 5; pos 2285289 to 2286287)
gtgctgctggtatgttccctcgtagtttcctctctctctccctttggtaatgaaatgattgtaaatttgtaatatgattctacattttaaagggaaatgttccaataaagaaagattatgtctctacagtctctcagtgattgttggtgtgtgattagatggaatctacatgaaatcactacttaggttattagtatataatatccattgctgttcaacacttagtctgtcggtgctcaacacttaaggcccaagccatggatgaagataatctttctaatatctttgaaagaaattggtcttatgatacgctataggttatggttacctctgctcaatcttgcttgactttcgttgtgattttatagaaaaatggttccttgtgtagcctaagcttgtttctttagtatctacacatgcatatgacataaatctttaatcgagtccatttactccccatacttcctgtttaattctgtattgttttactttaacaatgtaagattttctttcaacttgcaagattctgaaatcaactgaagagtttgtagataccattgttaaacattctagtgaagattttttcggattcaatctagaatattaaatgactttggagaatataaggaaatttttaagattctataatgctattgttcattaaatacatcttgtcaattaatacaaaaaagaatcaattttacttggggagtgttttcagaaagtatagaattctagttgagtattttttatgagaacttgttgtcaggctcatgcatatatatctaactagcctttattctttcccatgatttttgatgcttttgtttctttgagtcacccagatttatgtcaactttgatgtagccatataggttgagtcggttaaccgattaggatattgttgtgtcttgttgatcaaaaggaacgttgaatgagttctttagttttagtgcttttagatttaatactttgaattaaccacagaattgcaccgtt

SEQ ID NO: 66233 - DNA, 895 bp, Cucumis sativus
  Intron number 1 from transcript Cucsa.340690.2 (locus Cucs a.340690) derived from phytozome v7.0 (chr-ID scaffold0335 6; pos 3067099 to 3067993)
tccactgcgttgcaactctactctgatattgagaggtacccacttctcttttccttcttttgtgttgtgggcttcatttctttcttctcttttcgggaattttgttgctgtttccatgattatagtcaatttgtctggttgatatgctgggagttgtgattgttttgttaagtcaactcctgctagttcagcgttttcccgtacttctttttcagtttgctttaattcatccgcaatgtgtgtgtattgatgttgttgaccccttttcaattgggtcttccttagaaatccatgaacgtggagttcgagagagttagaataggcttgggatagggagagtgagaaaagtgataggggaggatataaatgagagggaggaaatttcttgtattacagtagtatatttatttcttaccacagcttttaaggtttacatgggcactatgcattaaatatttaattaatcaataaattatttaatgacatgtcaaatgctaacagagttttatgtactttcgtagtattagaaatattcccaacaaaaggtagcctcattgagcggtgcgttttttattcagcaggatttagtttggtagcaattggttgttgttttcatacaaaataatacacacacacatacaaaacaccgtgtgactaactaacataggagaagaaacacatataaggagttcagttagagaatatgaattacattttaaattttacattctatcattcatcaattactatttgagttgaatcatgaatcattgcttgtatgaagtaaatgggatccttaattttcaatgtttatcttcttgcataccgttgctaagaaaaagtttctcctatgttcccagattactaactgagacagttaggcaatcacaagagg

SEQ ID NO: 66234 - DNA, 668 bp, Cucumis sativus
  Intron number 1 from transcript Cucsa.394260.1 (locus Cucs a.394260) derived from phytozome v7.0 (chr-ID scaffold0410 0; pos 296435 to 297102 reverse strand)
gttggattttcttcccatcggacgcttaacaaaaagtacgccttttttttcttttttaatgtaggtttttttagttattgagtttttaaaaataagcttaatttttttttaaattggtttttcttttggtaaattgcagaattatccgtggggtaatacttataattaccccatcaaattttcaataaattaaaaaataattataaaatcaacaatataattcaaaatattttataaatttgttaagataaaaaaataataaatatttaaaatatttacaaactataccaacattttttaagtttgatccttgataaaatttacaatgttgtttgtaaaattttctatttgtgaagaaataaagtggtagggttattatttttttctgttgtcagtgtagatttagaaagccgtcttctgttcactctgtggacgtggataaggactgataatctcttaattaaaacttaaaatatatcaacgacaatcctgttgtttatgaacaacaatttaagcgccatttctttggtccctctcggtcacggatcacatcaaacctttctaagttgtatagtagagctagagcccttgttcggctttcggagaagctgaaactgtgatgcgaatggtcagtaaattcgcttccttcgtcagaactattactcctg

SEQ ID NO: 66235 - DNA, 671 bp, Cucumis sativus
  Intron number 3 from transcript Cucsa.337070.1 (locus Cucs a.337070) derived from phytozome v7.0 (chr-ID scaffold0335 6; pos 191445 to 192115)
ccccgaaggtctagagggtttagcccactttcttggtgagaacttggttttgttcctttagactttcattggtgatgtttacgattgcttattgttctctgatcatttgctagcttttacgtgttttgagaaggcttattcgttatttaaggcatggcaaaacatttgagagatatagaatgaaaccatttgtttggaagacataactaaaaacagtttctgaagcaaatgttcttttctgcgaggatagttttggaaggcagtttcaaaagcagtttttattggtgcttttgaagttatttgtttaatttactcattagttattttctaaagtaatttgttttgaatgaattggagaaagttagaatttagttcccatatggtttaaataaatgcaaagacaataacaataagtaaatatatattttaaatattggtttaatttaaaaatgaagaaaagaaatttgaaattgtagcaacaattcaagcagttttaaccaaatcctgcaaagtaccgacatgtagtgaaagaactacacaagggatgcttatgattggagttgctgagtcatgttttatagtagtatgctagttcttactctttattattattaattttttcactttggcttctttttgttaagcttatttacaatttcttgacagagcat

SEQ ID NO: 66236 - DNA, 1048 bp, Cucumis sativus
  Intron number 1 from transcript Cucsa.383570.2 (locus Cucs a.383570) derived from phytozome v7.0 (chr-ID scaffold0388 2; pos 580377 to 581424 reverse strand)
ttcactccccgcactcattttccgatcccgtgccagtaagatttcccttgctctttacttgtttttctcatttgggtcttctttttttttctttttttctttttgctttttggatcttaattgtgttggtttctggatcttgtttgttaattcgttaattttcattttgatttggtgatttgttggattggtgttttgttggattggaatttgtgtacgaggtgttgattagcttgttattgaacgggggtttttccatttttactattgggtgggattttacttttgggatttgtcagatctggggatttggttttatgcaccgacacacattgctttcgtctcttgggctgttttctttttgtgttttgatgttgatttgatgtcgacacgatctttagagtctattattctattagggtgaatcttgcttatgcgtgtcggttcatccattcttcagttggttgggttgtcaatgtactggatggagtttcgttggatgcagaaaaggattttatgtgttttcttttccggtgcttttcagacgttgaattgaaagaattattttttctttaacttactcatgttatggggtttgagattgagaatttcagatttcttgactcttctctattttctgttaagggttattggtcactcattgctagtttaagtaattaatctatactgacatttgaacaagagggttctttaagaatagaaattacgatgctcggatggtgacataaaggattgtaaatcaagtaataaatatataccagcgttctttaattgagtgcacttggcaattcagatttaggattgtccctatgattatggccataagtgattggaagtgtgaattcactcacttcaagtagaatttgttacatttgtgtaattcagctcttttttcctgtggtgaaactttatgctttcccaaccctttacaggttgggccttatgttgtacaatatactatacctgattcttgctatcgttttctactgtagcttcaggaggggaggttatctagtttccatttaag

SEQ ID NO: 66237 - DNA, 397 bp, Cucumis sativus
  Intron number 2 from transcript Cucsa.357480.1 (locus Cucs a.357480) derived from phytozome v7.0 (chr-ID scaffold0357 8; pos 568093 to 568489)
caaataagataactttaaaggtatggcctgtaacagttcagttaactgaagtctttatacatcatagattatcataagttataatttgtgagctgataattttggtttattattgcttttatccttatttgtttttcctttaattatagaaccactaacttatagtttttaataacttttgtctatatgcattttgtagttgatattatctctttatgttcaaacttcaaagaggagaatgtttgttaacctcaataatactttgaaattcttttcttatattgccagtcttagaacgaatgaatgagagcaatcagcgaagcagtaattttgatctccattggtgtatgtttaatgttcattcttgattatttattttcagaatataaatccaaga

SEQ ID NO: 66238 - DNA, 814 bp, Cucumis sativus
  Intron number 1 from transcript Cucsa.391800.1 (locus Cucs a.391800) derived from phytozome v7.0 (chr-ID scaffold0406 2; pos 184523 to 185336)
attgtctttccatctgttccttctctttctcattcgatatttctttttaatctaattgtgttcacattcatgatctgctgatgtcttaatctttactctcttttttcttttctctctttctttctcccgagttcttgcttgaatttatgtgttatgatttgccttttccactctccggaaatcaatttttgtttggatttgaaaattggcatgttctagtgccttgttcttttgctttcttttagttattcgggttcttagctacttagttgactgaaaaccaatgaattggttagaggtaagtgttggatatcttgttctaaggatgttaagaagtaggaatagttagatgtatttagttaccaagaagttcgaggaattgggcgcgataatttgaatggaatattgatgactgtcgagaatgattcttgaatttgataaagagaaaaaaatgaattgactttcttttcactgtttaaaacttagaagaagctagatctgctatgccggattgtgtatttgagagcttgtattctccgggtcacagttcatttttgccagagagtttgttcaggttatagcgtccgaggtccaggggagatgattagttcggcttctgtttaagtgtcaacattattgtgttaccatgaacagattgtttaaaatcccacttcactgatgaattataggggacgaaatagtgtagactaataggatttcagattttgggttctaagacttgttttatgagaacaacagtcgtattacattcttccaagttcttatttagtttcttcttgcagagactacctta

SEQ ID NO: 66239 - DNA, 759 bp, Cucumis sativus
  Intron number 2 from transcript Cucsa.339400.1 (locus Cucs a.339400) derived from phytozome v7.0 (chr-ID scaffold0335 6; pos 2016081 to 2016839 reverse strand)
tctttcgccgcttctaccctgtttacgagcaagaggtattcttcaatccctttttctgtttcctctattatttttaaatggtttaatattttttcaattttataaataaaatgtttaaatcttaggttaaattatgtttgcgtaattttacttttaataaatcttagcatggacgtgttaattaacatttttactataaattaatgattttggacttaaaggtccataggaaaaggaaacagtcttgaggtggtaattgttccacgttggaagatttgatgtttagcaaaggtatatatatatattttcattactttttaaaggtatgcctactcgagattgatacaaaccatattaagaaaataaaagaaaacaagcttagttttcaaaatctaaaaacaaaaagaaattgcatagttacaaagggtacctaagatttttccttattaagcttaaatgcaaaattgtagtaatgtattgtgtatgtactcttttttcttcttcttttacatatttcaattttaactatactttctcttcttcatgtagtacctataaaggacacctcacaacaggaaaaacatccacagttttttcttacacctttgttttactgggccttttgagctctaaggaaaaaaaaacagtggtaacagttcttcattatgattggtttaggcatttaaattgatggggatgcaatgcacgattttgtgtgtttcagatttcaaggctgatatccaatcccaacactcaaat

SEQ ID NO: 66240 - DNA, 341 bp, Cucumis sativus
  Intron number 2 from transcript Cucsa.322690.3 (locus Cucs a.322690) derived from phytozome v7.0 (chr-ID scaffold0308 0; pos 2358497 to 2358837)
ccgtcaatctaatttgcggagctaaaacccaggtgcttctttgatttctcttcttttggggttttaatcaggtagctgggaattgagttgcggttagggttatttgggtggggatgctattttttttcttctttttatcatgaaaaaaaaaaaacatattgcatttttttttttaatcaaaaggaaattagtgaattagtttcatgtgactatccggtgtgttactttcatatttttctttattaatgtatgattctgaagttttgaggaatgtatgtacatgatcgtttgctgttttgttaaaacagtctaacccggagaatacagtaggagttcttaca

SEQ ID NO: 66241 - DNA, 711 bp, Cucumis sativus
  Intron number 3 from transcript Cucsa.387870.1 (locus Cucs a.387870) derived from phytozome v7.0 (chr-ID scaffold0396 7; pos 247679 to 248389)
ccgaagcaggatcttgacaataaatctcttctctggtaagtttgttacccagtttgataccttgatagagtatttgtagaattaatgtgttttgattgaaagcaatcttgaattcagttttgaaacaagagaattaagagaatttatttggagagggagagaaataagggagtttttagaggtgcagagacgtactggtgatgtttggtccttaatgaagcctttttttgttacccttcgggcaatatttttacttcggtggagtccctttctttagtggggttctcgtgggcttgattttcgtgtgcctttgttttcttttatttttcctcaaggaaagcagttgtttccatttgtcaacgatcttcttatcattaggcctaattcttgtggtaaactaacacttctattgctatgtagacttcattttactttatccaattctcagttgttttctttttgccattcaaatgtttccaaaatttacgaaaatttccatttcctttttgcaatgcaaatctttcaaagttaagatttctaataaagaccctcaatttccatctactggaacatgacaaatgtatttaattgtattatttaggctgctatcagttttttttttgtttgtggttagcggtcttggatcactaaactgtttgtcttcctttttccttttcttttctaaattcctgctatcattcatgttgcagc

SEQ ID NO: 66242 - DNA, 707 bp, Cucumis sativus
  Intron number 2 from transcript Cucsa.337360.1 (locus Cucs a.337360) derived from phytozome v7.0 (chr-ID scaffold0335 6; pos 444860 to 445566)
ttgaagcaagcaaaggtaataccaccagataatcatttctaatgtttatttgaaggtttatgtttcatttcttcattctgttatattatgattacgactgcatcattccaaatcgttaatactgtttactgccacgtaatgcaatgattgtgtagaagaagcctaactgtgttgtacatgctggttatgtccatctatttatttattattgcagtcgtttgatgtattattagagttagaaatgacgatgaaggacgtcagaaattgcttcaataagtttgtgaatattgtccttcaataagtttgtgaatattgtccttcaataactgtgttgtacatgctggtaggcgaacctttcaaaaaaacatggagaaatggtttgggttgatttgatcaaaactttgtgatggggcattgggctaggaaggaatgactaaattttcaacaagtccctccctttgagcagattctatgatcaagtttttggattggatcttgggtgatatagatgttttttttttcttttcacttattataggtatatcgtgatgattttggcgattccgaagggcctgtaatttattcgttaaaaacagtctgagaaattctaggcaaggttcgttgaaattagtaacctctaacctaatgtgtatttcatattttcaactgtaggtatttcgtgacaaccaagttgtgaaagaaagaat

SEQ ID NO: 66243 - DNA, 929 bp, Cucumis sativus
  Intron number 1 from transcript Cucsa.314000.1 (locus Cucs a.314000) derived from phytozome v7.0 (chr-ID scaffold0299 5; pos 3127884 to 3128812)
acaagaaaattccctaaggtggactagtaaagagacttttacacgagaaaattagtaatcaatatgtaaacaacatgagaaaagattgtcattcgaagacaatagatttaagatttaaatatcacgataacacatgaacaataaaatccaattatttatgggaattaatatttttcaatccatggataattcttttcttctgtggagtagtcggtctttgttgagcaattgatttttggtgaagaacaacgataaattacaacataagaagagaaaaaaaaggaggaggagaagaagaagaaacccagaggtgaagtgccgaagaagatggaatcgttaatcaactcgcatgtgaagtacaaatgtaaaaggtgtaggttgggaaatgttaaaaattatcaatatgttcaacgtgacctttttttctttttttttcttctatattttgtgatttcttctactatatgcataataaattcgctttttaaaaaaataaaatatagttcaaaataaatatgaatagtattgacttaactatttattatatcttattttgtattatttataaatagaacaaaacattttaaaaatagtaaaatatgaaattatgtaagaaggcatttttttctcatttatattaacccatccaaattaagctcaaattccaatctaacattaaaacaataaagtcaatcaaagaatgatgagagagagaaatcatgtttgcatttttcccttgtcttcctcaacgtgctctcaacttcccactttgactcactacatatatacatttctcataaaacaacccacaaatattcccaacccacaaatggagaacacacgaatacgccgaccaaaaacccccgcccttcctcccccgccgtctcccggcagcaaaagccgctcctcccctgccataaccctacccg

SEQ ID NO: 66244 - DNA, 651 bp, Cucumis sativus
  Intron number 2 from transcript Cucsa.350590.1 (locus Cucs a.350590) derived from phytozome v7.0 (chr-ID scaffold0350 4; pos 74256 to 74906 reverse strand)
gtggttggaatattaaaaataagcattactgggctgtgagtttctttctaatctacctttgttttaatgtatctctgtgtgttttttcgttctctacattgtgtataacggctaccgactggtctttttttcttttcctttttgggttttgatttaaactcggttctgaatttaatattctatttgctccttccccacttgctctgttcttgttcaatatataaaaaaattccagttcgttgttagtttgcttctagggtttttttttttgccgtacctgaatttctgatgttatgattcaatatcaatatagttttccttggtgggtcattgagaatgatttagagtgtattgaatcaaagaagagggaagggaagaggagcttttgattttaacaaatgtttgtaaatctatgagtgggtcccaattgatgatgacaattttatttgaagactttgctgcgtatgtttctatggattgtcttttttaagtttgatttttatgatatatcgttctttattttatttcaaatgttattgaagtactgtattttgtgaactaattttgttcttgggttcttacttttttgttctcatcattgtcttgttctctgcagtctgttgcctttacagcagctcctttctttgtcat

SEQ ID NO: 66245 - DNA, 187 bp, Cucumis sativus
  Intron number 2 from transcript Cucsa.377800.1 (locus Cucs a.377800) derived from phytozome v7.0 (chr-ID scaffold0380 6; pos 284560 to 284746)
taagcgaacagcagctcgtagattgtgatcacgaggtttcatttctcctctcttcttttcttttctttttttttttaattatttcaagtgaaactaaaggcctgtttgaattcacttcaatttgtttttcaaagtcgaaccaaacatactttttaaccaattctgcagtgtgatccagaggaagaag

SEQ ID NO: 66246 - DNA, 605 bp, Cucumis sativus
  Intron number 1 from transcript Cucsa.391910.1 (locus Cucs a.391910) derived from phytozome v7.0 (chr-ID scaffold0406 2; pos 253137 to 253741 reverse strand)
taaagttccccaacgtagaaattattcaggttagtaacagacactttcccttcttagttactcgttacaatgttctttgctttctcatatcatataaatgcgatgaacataacattctgtcaattcctagtttgtaatcagttctctattttgtaagttcataccaaattatcaattcaaacttttccacttaagtgttctgattccatgagttttgttgctatgagcatacttctaaagcttgtgaaattctcacaattaagttcagataggcaaaaattttaaccaaaatttgtaacttcacaccaaagttcaaagttcaagtatgcaatttcttaaatgactgattggcctaaaaacttgattcaatggtgcttgaactcatgatcgaccatgtgttttaatactttctttaagtcaccaacccaaaggatgaagttcattgttaaaaacaaatttaatattatattatttaacacaattctaatcaatccaatatcctaggatggttataagatagttaaggaaggacttaaaatctatttgaagttaaaaagaagtaaaatgataacaaagaatgatgcgtggttttgttgaatagggat

SEQ ID NO: 66247 - DNA, 649 bp, Cucumis sativus
  Intron number 2 from transcript Cucsa.395590.1 (locus Cucs a.395590) derived from phytozome v7.0 (chr-ID scaffold0410 0; pos 1106483 to 1107131 reverse strand)
acacataccattttttctacatttggaagcataaggttttgtctatatttaagcctaaactaatttcttctgcaatgtttttctctgtttattttgcctgtcaagtttggtttgatcattagcttcatcttccttttttgtggtcttccaaattgatgcaagctcaatttatatggctagttcattgtatatttggtttactgtaggatctgagtgggttttctaccttgatcttctgcacattggtgtgaattgaggaatatattgcaccttataaagttgttacatgatataatattaaatttaccttcatccatttgcttaaacttttatgtaaattggtgatttaacatagtactagggttgttgatcctgtattcaaacccaccatgcaattttatttcctcctcaattaatattgattttcactcgttgaaaatgtggggagtgtgatataatattaaatttaccttcattcatcgatttaaagttttgggtgattcttttaggtcattttgtgatttaacaaaaataatgacgtgcatttttgctatgtatggttctttatgtagagttctattttgattcatcatcagcatgttttttcctaaaatacacactctcaggaatctaaatatcgccgtggacg

SEQ ID NO: 66248 - DNA, 852 bp, Cucumis sativus
  Intron number 1 from transcript Cucsa.362370.1 (locus Cucs a.362370) derived from phytozome v7.0 (chr-ID scaffold0361 1; pos 255756 to 256607)
attccttttgggttttacactgttcctttgtgatgctaagcagacttattcacttacccataaggcaatacatcttggcttctaaattaaatggaaggcctttctctgttttttttttaaaagagtgagattgaaatgttaatccgatcatagttaagtggataaagacactagttactatctcgaagattgatggttggattcgctatctctacaattgttgaactatgaaaagattgcaactcgttgaattcccgttgccttcatgtgcgagagttttattattattttgttttaacatctccaattctgcctcactgatgatatttctttgaaattttttcactttgttgatactgccttcttccatttgactcaatgaaacagtgacactttagtttgacactccggttcatgttggtgcattaaacatgtgtttaacagtagttgtacaaattgaatacaggtatagtacttgtttgacgcacattgcacatttattgaacgtaataaatagacataattagtgatatagattaaaataatagagggaaatacatcaatcttgaatgttttaagcagataagtatgtgggtttatggactttaaacttccttcttgtccttattgtgtctgtatctcagatttgattaaaaataactcattatcatgtctatgactgttccttttacccaaaatatcatagtttgcaatatcaattccattcttcttttgatttgacttcaaccaaccaagtttcttgtttgggaactttcttggagtaactgttttttctgatatcaaaaacagataaccaacaaccaatattggataaagaggtagcttctgttg

SEQ ID NO: 66249 - DNA, 912 bp, Cucumis sativus
  Intron number 2 from transcript Cucsa.397600.1 (locus Cucs a.397600) derived from phytozome v7.0 (chr-ID scaffold0415 8; pos 8272 to 9183 reverse strand)
gtgaaaccttcggttgatattctttggtaagtgaagtttagttgtggagtagaaaaaatgaggactttgtatttctcagtttgtttaggactttgtattcttctgttgacattctttggttaaacagagtataaacgtcttcaaagaaatttcaggttaatttcatttggtaacttgtaataggtagaagaaaaaaaggaaacccattatccatgtaaaaggaagtatttacacatgtacaaaactgaactctattgttcaatagtaaaggtcaaacaggttttctaggcctaatctaatctctcaagttctcaagaaggcgttgtagatgaccatttgaaattatcaacttactcttctaattttcaatgtggatttgggaagtccgggaaaaaaaacggtctgcaagattaagataggtaggagtatggatttatatggttttcatctttccccactatacatacatgtgtatgtgtatcgtgtttaattgattgaggtctattttaatgtgtttgtctggtcatgttgaacaagatctttcgtaactcgtagcttggttgtcacaatattgtgattgtgcttttaatatatgtgtgtacacactcacacatggatgtattattgttatccatgagtgcttgggctagcttccaaacattttgaactaatctcacatgataatcacctaaccaacaacatttgattttaaaagatggaaactgttatttgtaaccatatttgataaattaaaatttatataatattgttaaatatgaacagaattaataagggtcagatggggctctctaggccttttttaatctttcaacagtaggtttaatagaaaataactgtgttaattaagaattttctgttctctgctgctatggtttaaggttcacttggaga

SEQ ID NO: 66250 - DNA, 878 bp, Cucumis sativus
  Intron number 1 from transcript Cucsa.321570.3 (locus Cucs a.321570) derived from phytozome v7.0 (chr-ID scaffold0308 0; pos 1362638 to 1363515)
gttgtgtagtttcaagatccttcatacttgggcaggttcaagtttattgattcattagatcttagttactgttttctctttccttaattcttctcgatgcaatcatttgagcattttttttagcttcatttcacaattttcttactgggttttgtatttttcttcattatgatgatctttggttaaatgggtttgattctgtatagacattgtatgtgatgaaatggacgaaacttggaatttgtagtgaaatttgttaggagaaagcatgtctgatttagtggacccatttcaagtataaatttcgaccggagttgttagctttgtactgttgtgtacaaaaatgttgttcgatctgattattttttaaagtttgtttgagttttcctgaatctgattatgacagaggtaaaaagaaattgaagggaaaagtgaatctgtcgtaacttttcttggagaatgtcgagttttagacatccttttatgaatagatatgtattgatttgctagaaatgacaatgaatcaatgaccgtaatgttacgttggtaactttcatttatagttttcatttctacttattctagtatccaacttgtaaatgatggcattctgtctgtgtgttatagtttcattatttcttccacctctaatttctggatttttgataattctgatctgacaactattgcctattctgatcttgaaatacctagcaaagtgaaaattatatatctcatgttgattcgtgattcccatgaattttctattttggctatatgtgaacataatacaaattataatagcatgtactccaagtccatgcttctaacagttagataaaattgttgcagatttaaaagatctgtcaaatttaata

SEQ ID NO: 66251 - DNA, 590 bp, Cucumis sativus
  Intron number 1 from transcript Cucsa.365870.3 (locus Cucs a.365870) derived from phytozome v7.0 (chr-ID scaffold0361 1; pos 3767317 to 3767906 reverse strand)
tccctctctctcctctctccatttccctctctcaggcaagccttcttcgatttaatttattttcttttttctttttgtttcctactttgaatatgctacgagcacaataacaacaacgaactctttttctttcatcttcatgtttatttcctgctaggatttctgagtcgaggaagtagtctagggtttcttgatcttcgggtgcttccttttttttttttcttttttcttcttttgctttgacattcgttttttattggttcaattgtgaactctttgtgatactctgatttggggttttcttaattttttttgttttcggcttctgctttgtgattggtcaatttctctattgtttgggttataagcgtgcattgcgtaggacatttgctgttctccttgatttaatttaatctcggataacttttactttggaaagctggtatttttcgtctctcattgcaatttaagctgaaattctttgcgttcattggaatggacgagttgctcttgtaagcctctggaaatcttaacttgggtttcgttatttttgttatttgttattttttttttcttgcaagcagtttagg

SEQ ID NO: 66252 - DNA, 897 bp, Cucumis sativus
  Intron number 1 from transcript Cucsa.357250.4 (locus Cucs a.357250) derived from phytozome v7.0 (chr-ID scaffold0357 8; pos 132001 to 132897 reverse strand)
tcaccgttgcattccctgtttcacgtgctcctgaggtgaactttgtttatgtttctttttgcttgttacgttatttgtctattttgaaccatattgtggtgtggaactgactaactccattagtggtcgagctaaactgtcatgcattgttacgttttgggtgattggtcaaatgaaattggagtttgtaactgttcataatttagaaatggatttcattatctgtgtttagtacaaaccagtactgttagataatactacaagtctttagacttttactatcgtatctatgttatttcattacttaaaagtttctactaatcactggactttcaatgcattattagattattgcttgcactgattatttaaggactgtatccaaaaataagtccactatatggtctcttaagttacgtaattagtttcatctcacgttcctatgttattgttgatcgaataattaattgcactcacaataaattgaaagtggaggaccctaatagaaatcttttaaaggtcgaggtacttatagacatagcttttgaaagtttaggatttctttagaaacttctcaaaatatggagactaagtaaacacaaccaagaaagttttgagaccacacttattatttagctgtttataaatttctgttgacattggaaggcgtttgaagttttctttcaccgtctattttctaaatgagagattgtccttttgtacgcaattagaggcaaaccgttcgtgcttctctttctctaagaattgcttttctgcaagtgcgaagatttggggttttgcaactttcttttgatttttcccttttgtgatcaaagctgttgaatggttttttttttgtcaggtgaatacagttcaaagaactctgattgaggcttg

SEQ ID NO: 66253 - DNA, 751 bp, Cucumis sativus
  Intron number 1 from transcript Cucsa.323340.1 (locus Cucs a.323340) derived from phytozome v7.0 (chr-ID scaffold0308 0; pos 2789759 to 2790509 reverse strand)
tctgacggtaagcctccattcttctgtcatcgattattcgattgtagggggcagttcgtctgatctgcctgtgatacactttagttagcaaagcacaatctataggagaagaggaaatttggaacaacaaacaaatttatcaggtcctttttgttgcgctcttcagttttccgtctgctatgatatatcttcggttcttagtaagcaggaaacataagagcatttctgtcatctgaaacctacgaatagagtctcctggggaccatacttcccgtccccccatttgttttttaactttattcttgtgattctatctatacttctctgctcttagtcatgtcttctcatcggttgacattttattgcacttctgaagtaaaaaaactcgtgcacttccaagttgcgctctccgctccgtgttatatatctctgcgcagtatgttctgttctcggtttgttatttgtctctttcaatttcatctatttttgcctggaataggagcaacacgatatcattttgagcacttatgctttttaaatcgtctaaaagagaagtctttttatttagtttttgagttatgtatcatttccgccgactctgaatgattattatgtggtatttccccgaccctgtccgagttgtggttgttagaggaagttcataacttgctaagataaggaaaatgaacgtatatccattttttctttttggtcagatatctgggcaggttcctgataaagctggtgtgga

SEQ ID NO: 66254 - DNA, 794 bp, Cucumis sativus
  Intron number 2 from transcript Cucsa.310810.1 (locus Cucs a.310810) derived from phytozome v7.0 (chr-ID scaffold0299 5; pos 559558 to 560351)
cctttgtatttggagtagttgctgaaaacaagaaggtaagcatttgtaatttttataaccatttagtttttgaaaattaagcctaaaaacacaatttctatctattgaattatgtgtttcattgcctacatgagtgttctcaaaattcaatctgacgtttgaaaaccagaaaaaaaagtttttaaaaacatgtttttgtaatttgacaaagaattcaaatgtttccttataaaacttgaaaactgtaattaagaaattgtgtgaagcaaagacatttttcaaaaatcaaatgattaccaaacgtgtttgtttgatttttacagtagatattgatctgaaattcctacagcaagaatgaagatattgattgaattgtttataaatagttttgttctccctttatctcatatataattatgaaataatcgcaactgcctaatttgtctggtacatcaaattatgtcttgatctatctcaaatacttttaaatttattatagtatgcaaaagctttgccctggttgatacttgaaaattatatattgtatgtgcatctggttgcaaactcatggattactcatgtttcattttctttagcatgtagtctctctgtctctttgtgggaacagttatatgaaatctacgttggctgtgcatgttgttgtcggtggtatagcatatgaaattacgatgaatttttccccatcttttttcatttatgggctgacttcttttgttgtttttacttggatttggacagcctgcttctggaactcccatcccaggcaaaggcca

SEQ ID NO: 66255 - DNA, 413 bp, Cucumis sativus
  Intron number 2 from transcript Cucsa.360220.1 (locus Cucs a.360220) derived from phytozome v7.0 (chr-ID scaffold0358 8; pos 962770 to 963182)
cagttggagctggggttgctgatttagttgaagaggtgaggaaatattttcttgcttaattgatgaggcactcactgatgaaagttgattgtatttattgtgtctgagatctggatctgtaaccacacgtggagtttgttttgtgcctttaacttttattggagcatgtggtgaaatgaaatccttatagttaaattgtctgtctctctgccctttgtacaagaattgatctcagatgcttttgcctgctagatgcagtcttttgattttctagttttgcttttctcatacagttctataccttaattaatttgctttatatccttgtcgttacctcaaacttattgtatcctaattttcttcctgtaacggttttaggtgtctcaacttagtcatttgagcaagcttgcacg

SEQ ID NO: 66256 - DNA, 447 bp, Cucumis sativus
  Intron number 2 from transcript Cucsa.352900.1 (locus Cucs a.352900) derived from phytozome v7.0 (chr-ID scaffold0353 3; pos 573050 to 573496 reverse strand)
tttcggagtgggatttgtttgatttaacgcagaaggtatacactcttgttttctcaaagaaattctgttcatttgtcgtagtcttctcgacttctagtcaatggtttaatgtgttgtttctaatgttcaacaaagcgtctgtgtccatttaaatgttgcagtgacgtttatgtaatattcattcttctttaaatgctatctgaaacacaatgagtgcagcatttaaattcactgaagatatttgaatattggtacgaaaattattgccagaatggtgaaatttgcggttagtaatatatctcaacgtgactttgggtctttgtggagtactgtatttagtttgagaagtaaccctttgctttgttgttatcctaagaagtttgtttttgattgatggttattgattttgcagtccgcgttagaatcaattggtgtttccatctggca

SEQ ID NO: 66257 - DNA, 672 bp, Cucumis sativus
  Intron number 1 from transcript Cucsa.383250.1 (locus Cucs a.383250) derived from phytozome v7.0 (chr-ID scaffold0388 2; pos 250094 to 250765 reverse strand)
gcactacctaccatccaagtaacttttctttccattctttttttgcctttactttaaatgcaaatgctttcattcttttttgcttttactttaaatgcaaatgcttccgtaaaataatgtactttttgtgtttttaatcttttactattttcaaatataccaaaattcacaaatatcatgatggtatctattttgtaatgttttgctatattcttaaatatttttaaaagataattttcctttatattacattctaaatatttagaataatttcctaaaaaccatgtttccttaacagaactatgagcaaaattttcaaggatctattgaacttattataatttgaaaaatatttaacaaaactatgagccaaattttcaatgatcttttgaacctattatttgaaaattttatatgacagtttaaattagacgaaggaaagaaaattgattaaataactaaatcatatattatcagttctgtaattgtgtgattttgaggaggaaaaaaatattgctcagtttcccaaactggtcctaaatattttatctttgagttcgacagtgaagaatcggactgaacctttgagattgtgtctttacttgattatatatcgatcttgaaactaaaagaagagatgttgatggtgttttgttttggactgcacaaggt

SEQ ID NO: 66258 - DNA, 564 bp, Cucumis sativus
  Intron number 1 from transcript Cucsa.360700.2 (locus Cucs a.360700) derived from phytozome v7.0 (chr-ID scaffold0358 8; pos 1290363 to 1290926)
attgtcggagagttgtttggtttctccgagatccggtacgccggtgaaacttctaggtcgcgaagacgctagcatgtaattgcttcttgttattggttcattttaagttctgttcttcattgatttggtttgtgtggattgtattatcttcttgttcctggctctatctcgtcatttccaattcctttgtgtttactggttaacccttttcgttctgcaaggttgcgtatgatgtttgatgtccgtgtggttctcacttggctgttctttgaagctaaacgttgacatttgtggctttttgctttttgtttaacaatgattgcataaattctttttggtggcttatagctattagctagagatttggtctctggaaagcatgagtttttcccttgcagttgcatctaccactttttatgcatcctgattttcccctgttctctatgttttgaatgttaggtgccttattttgtttctgtttgaggtttttctctctattgtgactatattcttactcttgttggtttagtgactggtacaatcttgagaaatctaagagggtga

SEQ ID NO: 66259 - DNA, 348 bp, Cucumis sativus
  Intron number 2 from transcript Cucsa.360700.2 (locus Cucs a.360700) derived from phytozome v7.0 (chr-ID scaffold0358 8; pos 1292121 to 1292468)
aatttttaatatatacgttctctttagtatgtgtaggttcaaattttatgttctttaactgataaaattatgtttttggcttatttacatttctgctacaccttgattttattttacggattcttcttgcctcctggttcatgctgcctgtgatttatatgtggctgtggcatcgttgataataccttttttccctttcatgtatcattttagaattaactttttggttcatttgatgacattattattggtcctgatgatagttgataggttcagacagtgcttgtttctctttgaattactttctgtcaaggtgttctgctgtggcatagattggaaagtttttag

SEQ ID NO: 66260 - DNA, 866 bp, Cucumis sativus
  Intron number 1 from transcript Cucsa.383710.1 (locus Cucs a.383710) derived from phytozome v7.0 (chr-ID scaffold0388 2; pos 806029 to 806894 reverse strand)
acttctgttggcttctataacttcacagctttttggtatttattcattctcttcgcgcctttttcttcttttggtatgtttagtattgattgtatttcaaatcgaatattcctcaagaggtcttttttttttttagtaatgtacgactgggtgatactttgattgaattagaaattttgggaacgctgctgcttagtcttatcctatttgtgatccttgccttttactggtggtttggctgctttcgttatggcttttgccttgcaagtttgaaaatagctatgatttgagtagtccactccatttgagctttgattttatgaaacttttgaataattgtacggggaattttggggtcttaaggtaagtgtgggattattgccttggttattttctatcgtttgtgttccaagacctgtttttgcattcttgagcatagtatttgctgagagtattcttcttcattttcattcattttgatatgggaaaattttgttacaagttcaatttagtttctttcgaaataaccctttccatgttttgcattaaatcattaacatgccctgggaaattagtaaagataaatgtgtagaaagaactgtgaggtaccctctgatactgtacgaagatattggtctagctcgattgaatctgagatgaaatgtaaatttgcctgtcctacatactactctgtgcctttgatgtctcatttctctcaactactactcttggttgcttgagaatgttattattgctcattggatataataaaatctcaatcatacagtaaagtgttgtgaaaatttgggatgatattcggacacaaattgaactcctggtttatgattcactcatgatttgcagct

SEQ ID NO: 66261 - DNA, 831 bp, Cucumis sativus
  Intron number 1 from transcript Cucsa.398040.1 (locus Cucs a.398040) derived from phytozome v7.0 (chr-ID scaffold0415 8; pos 599835 to 600665 reverse strand)
cttttggattttctgactacaattttgggatccaggtcagttttgtattttctttttttctgggttgatcgtttctgttggttttgttgtttatcttcccttttgattttgattttgtgatttgattagtgaggtgtttttgggctttgggctgtttggtcactgagaaagtaggttggattgaaggaaattctttcttgaattgtttggttggaattggtttcacctaaagaaagtgaaattgttgagtttctgagtgtttgacggatgggttaatagaaaaaggagatgtttattgtttgaaactgttcattattattattgttgttgttgttattgttgttgttattattatttgatgtctctggctcaaagggattgatttctttttcttcatgtatttttcaactttttttttcagtatatattggttgacgaactcatttttctttttgtatcaatatgtctttttttttttttttaatttcacttttgggttattttgatggatgtgaaatactagatctaagaagagtaaatttaattatttgcgtgtttgtttggatagtactgcaacatggggaaaaagattgaataatcgaattccttaattaacttacagtcttggaaaattaatattaccggaatggtaaaagaattctttctagcgttccttcttaatactttcttatctggtagcatgtttttactgtttttccctttacagtttccaatgggtttagagccgattatgcatctgagaaacttatttgtcattttctcttctattcttcattcagatttactgctgggcaagtttgtgattgagat

SEQ ID NO: 66262 - DNA, 580 bp, Cucumis sativus
  Intron number 1 from transcript Cucsa.331960.1 (locus Cucs a.331960) derived from phytozome v7.0 (chr-ID scaffold0325 6; pos 134324 to 134903 reverse strand)
tgctcgctcctcctcctctttcatcccttatttcggttagcatccacttctcctttttaattctcctttttgcatctttcttcttgttgcttacactttttgcttcatgggtttgttcaattgtttgggtttttttttttttttttttttgttagtgcacttgcatttattatggtctatagttttcttgattttctttacttaagcggttgctcgggtttgattgaggttgatcacgtgttggggtttgattttacgctgccgtgttgtaataactgttgcagtaatcggacgagggaaatggaatcattatgtctgtggtagtgacgtcaacagactggttttagctctttcgaattaccatcattcaacttccagcctctgggaggggttctttttaagattagttgtttagttaggatttaagaattttcctgttgacttatgtttaactgtcatgcattgtagctttgaccagaatgttggttgtacttgtaaattttgcaaccatgaacttaacttttgcttgtttttagtatttggttggctctgaggtagtgttgttattgttattgcagat

SEQ ID NO: 66263 - DNA, 1003 bp, Cucumis sativus
  Intron number 1 from transcript Cucsa.313890.1 (locus Cucs a.313890) derived from phytozome v7.0 (chr-ID scaffold0299 5; pos 3033763 to 3034765)
gagcattttgtagcagtcaaaagcaaaaattggtgtgaggggtcaattgcacactctagattggaattgcaattgcaatagttgagtaatatatgattccgagatgactcgcttgattggattggttgagacttaactgcatgcaatagttagagaaaggcaattagagttaattatacttaattaagttgtcaatcttgtatatataaaataaataaataatagaagaatatggaagggaatatgtattatagagaaagctaaggtagtcggcggggcattgagagtgtaatatagcaatccattacgtaaagaaaactcattcccagaggccacaacactgatgatatgccacgttgtcttatacgtgtgcattatcttaatacttctcctacttcctgtcttccccttacacgcccacatgtatccatatatgcaataaccccccctcattctcctatatatttttgtcatctcatacaccctattatatcttataccctaattaacatccccaatttcatccatttcctttcattatcatggactcacaaatcccccctcatcaccatcaccatcaccaccatccccttggacttcaccaaagtatgactttctctgtttcctaactttttcttttttattttaaataacttaagttcatcattttattttaatttcttttatgtcaaattacatatttgatccatttaaatttgtatttagtttaaattttaattataaatttacactatatctagacctattcaaattctataattaaattgtagggtgaagtttacttttctttaggaattgtgaaagttaacactactacttgatcatggggcaaacattcctgactaggttccacacatatcaattacgaatgtttatatttcattagattaataaagaaaattatatacaaattaaaaagatttagcattggtaggtcatgtggagggaaaagaagaactacaagaaggggaccaggagcatc

SEQ ID NO: 66264 - DNA, 513 bp, Cucumis sativus
  Intron number 2 from transcript Cucsa.382220.1 (locus Cucs a.382220) derived from phytozome v7.0 (chr-ID scaffold0386 6; pos 301052 to 301564 reverse strand)
ttgttaagagggaagaacttttcattaccacaaaagtgagtttgattttgaattcttatttctctgcttttgaatccttctttaagttgggagcttcaggatgagtttttataattttttaaggacaagaattgattttagccaattataattttcatgacggatagagattgaaaattttaaaaatgcttctaaaagaaacgtttagtccccattgtcacctctcaatttcttacaatggttttccatctttcttaagttaaagagttgacttattagttaaattccataaaacaagaacaggtgtttaaaaattatttttttagattttaaaatttggcttagtttttttataaaaacatttttagaaagtagataacgaggtaagtaatttagtggtgaaaggggtgtttaaaagcttaagtttaataaactaaaaaccaaatggttaccaaccgagccaccaatgttggctttcatcacaatggcagctctggaattcagaccacggac

SEQ ID NO: 66265 - DNA, 573 bp, Cucumis sativus
  Intron number 1 from transcript Cucsa.382220.1 (locus Cucs a.382220) derived from phytozome v7.0 (chr-ID scaffold0386 6; pos 301613 to 302185 reverse strand)
cattaagattggttatcgccattttgactgcgccggtaccctcttctcatgcttcattccatttctcacttccttctctcttgatattatcatcttttcttccatcagatggatttggtttaattttattttccttgtgtataacttacgaatgaagtcgaaatcgtggattatctccgattctgggtcctatttttcaaattttcttgaattaggttgtgtagaaatagtaggagggattgagtgtcaaaatgcttgatacctgattttggagtacttacagttacagacaattaactccgatttaaatgtttattgagtcagaggactttgaaaaaacaagtggattattcagcttttttcaattcctatatattcaaactttgaatttattcgcttagtctatatggatatgtgtttggtactttttgtattactttttttctttaaagataaggttgacttcttattctttaaagtattaatgtgttgggaatacttctctgaagaaaacttgagtgacataggttttttaatagagattttgttgtattcttgcagctgattacaaaa

SEQ ID NO: 66266 - DNA, 1000 bp, Cucumis sativus
  Intron number 1 from transcript Cucsa.312960.2 (locus Cucs a.312960) derived from phytozome v7.0 (chr-ID scaffold0299 5; pos 2269465 to 2270464)
cttcctcgtaaccttcaagatcttcagattctcaggtattgttgtcatgttcaagatcgtttctttgtttttgttttttcgtttgttgttatgggattttgatgatggatataggaatttggatgttcggttttttcgttttattggctattatcggtagattgggtagtttttcttgtgatttgtagattgggtatacctttgtgttcttgttcttggagtaggaatggaatgaattcgcacccacattgacttggtgcctctgctttgtgaagctttcattggcttctcaatttgtcatttgggtttgtgttattgctgtagctcttcaatgattgataacttcttacttaatgggaaccttcaagatctttagagatgtctttcaaatcatttttatggttattgaaaccgtggggggaggttctttcaaattcaagtgtttgtatcagaacacgtagttattgtttatgagaaatcatcagatctggcttgttccttgaaagagcttttcgctattgagatttggcaggactgtcttgtatacattagagatagtttgtattgtaattgttcttgttattaaatcaatcgaaaaacaaaggacgtaaatattagagaatcgacgtggatgtacaaattgtatatgtgcttctaaggatcagatggttttttcttttggttcggagcaccatacaccaaattcaagccattccaactatcctcttactatgagccatctgaatatgtcctgcttgtgctatatctttgtgaatgcggaatgcagatttataaatgtcattttatcatcataaattttacttttgtgggtagcaatgaaatgtaaaagctagaatgtttcgatgtgaattattatttgataattttaagtgtttgattactggattggtagattttgaatcactttctgggattttgtttaaagctatctccctttcttttagagatcaccttgaggaatatacaagtgactacactg

SEQ ID NO: 66267 - DNA, 843 bp, Cucumis sativus
  Intron number 2 from transcript Cucsa.335530.1 (locus Cucs a.335530) derived from phytozome v7.0 (chr-ID scaffold0332 4; pos 71227 to 72069)
ctattactatccaaactgctttccgtggcttccttgtgagtacttcttctgactgtactttctgccttgcttcaatagaactagatttcaaaatgctgcaacaaattggtactgctactgtctgagttaaaaaagcagaacccatggagcaagattttaaatcttgtattctgatttttttctttttaaggaattgaagaaataaacattcaagaaattaggcatttattttgttttttttgggatgaaaatgagacgtatgagagataaaagcttagaaacaaaaacaaaaaaataaaaaataaaaatggaagttctatcatcatttgtggaaagttagacacactaggaagggaataccagaacttcttttttcttaacttggtatacacatataacaataagaagtagatatcatgtaaacaagtagttttgttcgttttatggatttggttttacttacgtcggtgtattggtgcaaaactaaaatacttcagtttccaattggaaatactttttctaatcacctattggtgtttggggtctgcccttatttcattgttttcaataatagaatgtttctcctctaaaaaaaaagtagagaaggtaactaaatgcacttatttttcaaaaacagaaacgaacagtaagaaatatgaaactagtacgttatcaaaagacatttaatagttaatcctaagacatcaaaatgtcacaactacttgtgtactcgttcacaaattgtgactctccaggcttgtctacttagtgatatttgtattattaagtaaagaatgtaaattttcaggcgagaaaagcattaagagcactgaaaggaatagt

SEQ ID NO: 66268 - DNA, 781 bp, Cucumis sativus
  Intron number 1 from transcript Cucsa.359600.3 (locus Cucs a.359600) derived from phytozome v7.0 (chr-ID scaffold0358 8; pos 478208 to 478988 reverse strand)
tgcttcaataatcagtatcacaacagcaacaaagggtgagtagcattaatacaggcaatctttcttcttgatttaaacactggcatcagatttatcgaaatcgacggtatttgatttttgttttttgttttcccaagcagtaaggtacttagttgatgtgtatgatcttatattctgaaaagattttcacattgttttatctcacaattttattgagagaatgttctggcaaatgtatagttctgcattcattaatggaagaatatcgattcactaataagcaccactgacatggcgtcgagtgctattcctgttctacttagttgtctacatctacgtgttagacgatagatatatatattttattcaccgatttttgttttatgacgtctaggattttgggattttcatgccatttcaatttatcattgtccctaaattgtaataattcaacgaatttggtgcattgccactccccatttttctactgttgcgaaattattatttgatcacgaatcaagaaatcttctgcgtttccaatgttggctattacgtatatacgatgcctttttcatttgaatttaaggaatataccatatgcccagtttctccatttgtatattgtggggttgcgtctcttcttccaagtgtaaatgtagaatttccatgaatatatcttgtgctattaatcggtcagttatgttgacttcggggtattattactagtcccctgttaacagagtgtgtttaatcatttttaattatctctttcagcacaaag

SEQ ID NO: 66269 - DNA, 422 bp, Cucumis sativus
  Intron number 1 from transcript Cucsa.319510.1 (locus Cucs a.319510) derived from phytozome v7.0 (chr-ID scaffold0307 8; pos 201862 to 202283)
gaacgtaagaagaaagaagcttagtgacaaatttgaaaattataaaaatattttagtttatgtgtatttttttggtaaatatttatgggtttttgttaaattaaagtgatttcacatatgcatcatctttccagaaagttgagaattacttggaaaattaggcatcattatcatttcatatatatataaactcaataccaatttcggatttagaagaacaaagctttcccaccaattattaattgatgttctgttcatactctctctttctttcgcgcctcagaagccgaaggtttggtttggctattcactctcaactcttatcaaactcatttgatccaattttccatccttaatctccatttattatcacttcttacattctctctgattctttaccgctcaagacttccacagatttg

SEQ ID NO: 66270 - DNA, 877 bp, Cucumis sativus
  Intron number 1 from transcript Cucsa.345990.1 (locus Cucs a.345990) derived from phytozome v7.0 (chr-ID scaffold0344 3; pos 278472 to 279348)
gaaacacattcaccgtaagtctagtaggtaatcatatccaatcaaaacatgatttcataataacctatcaaactttgatttagaatcatgaaaattccaatacaattataggataattaacaaaacacaaaaccatatatttatatttgcttgaaattatacataatgataatttttcagcagaaaaaaaaaactccatgattgaacttctagagcttaaaatttggactgtaagctgctctaaaatcaggatagtaagttgttctgatttcggttttccctgtaattaaattaattgggttaccgtttgatgttaatcaaatttaacccattttaactaacaaaattagtaaaatccacttctcccctctccctttcttcttcccaaccttactattctttttattttattctgaaactaaataatgttttcttttaaaaatcagaagtcaagctgataatttttcctaaactttaatttgtttaaaaaattctaacaaaacatataaattctttctaaacaaaactttcctacgtatatataattccttttagataattctccttttcactttcttatattaaacattcttcaaccagtaccaactaaaccatgttcattatttataagttctaaaagaatcatttccatcatcaactcccaataaaaaacttaaatgtggaaattgcgttcacaacctcaagtttcaaaaaacaaattaaaacggtacgtacgattatcaaatgaaagcctaaaaactattttttttacaaacttttaattaatcaaatatgatagatgcagttaagtattagtttaattatttaacaagttatcgtaacatgaattcaggtaatagaatatctacaaagccag

SEQ ID NO: 66271 - DNA, 899 bp, Cucumis sativus
  Intron number 1 from transcript Cucsa.367060.3 (locus Cucs a.367060) derived from phytozome v7.0 (chr-ID scaffold0362 5; pos 517503 to 518401 reverse strand)
gagtttctggaaattggtatgctgcttttttatgaaaattttctgtctcttttgattgattgttcttgaatcttttgattcctttcactatcccaaattggacctacttttcaaaagctggatcataacaacaactgagaaagataatgatatgttgtactgtgtaagaatttttgtgtgcttgaagttattgcttagtgtatacttagagtatgtggatgaaatgaagggctaaagttgtttgggtctttaaagttttatggcatctttgacttctagtgaaaggagctaatctggctatcgtcggttatggaatagaatcaacaaaaaggttaactaggttaaagtggttcaaatcttcacctgaactcaagaaaatagaaatagaaagaagtcaaaagaggaatcaggaaagttcttaagattagctttttgtgatattgtacattttctgcctcctcttctatttttttttatgctttttgaataataccgttttctgatatttcttgatcggaaagtggttttgtaatccatgtttttggtagggattacctttagtctgaccctaggatggtctctcttattaatttttgttaagctgtgccactatccatgaggttacattaatatctgagacagaggtaagagcaagatagtactgttcattttgataaatttggaatataagccaaaaaggcatagggattgaataggataatcttcaaacaaatggaatttatcagacaatctcgctttctttactctgtcttctgggattattgttgtgttttgtttgttacatgaaggatatgtaactcgttaccaggtacatcaagtttgacacgttcactcctgcagcagaacgtggacttccagtcactagggtaatcagtcga

SEQ ID NO: 66272 - DNA, 868 bp, Cucumis sativus
  Intron number 1 from transcript Cucsa.313280.1 (locus Cucs a.313280) derived from phytozome v7.0 (chr-ID scaffold0299 5; pos 2454812 to 2455679)
tcgggtaattttacccctctctctctctctctcttacactttcaattagtattcacgttaaaggggttgttcaaagatcactttggaggatgtattactaggctggggaaagtctggatatgattttgtttattgggttgagtttacttttttgttttttttaaacggatacgaggcgcttggaagagttgtttgaagaaatgggaattattgaggttctttttaattgagtctgagatgattatcgggatttcattttatatgatggggtttttatggtaatttcttgctttaatatgtttgatgctcgatcagtgtttttaagttgcaattatgcacctacgatgaggggctacgtgaggtgctcgtcttttgctgtcttagttgcaatggcgacaccaccactcgcctcactcattaagaagacgaagagtaagaatatgttaagagtggaagagaagaagtagacaagtaaaaaaagtaagaagttgttagttgagtaagaaggaaagagagaagaataagaaaaagaaggtggtaaattcccttgtgagttttgaggcaatgtaggaaacctttctaccctttgtggattatgtcatttttctttggtaaggaagccccttttagacaaactattatgcgataagaatggtggtatgctgaaatatgtgtggtgtcttatgtagtaatagttttgaaggtgtttgtttattctattgtctctgatatctacaggtggaatattattgcataaatggaatattgcttatttcagcttatgaatggatcttttgtgtacctctacatttctcgttgaattatgctgtttaactttctatatataattaattctttcaggggaaac

SEQ ID NO: 66273 - DNA, 301 bp, Cucumis sativus
  Intron number 1 from transcript Cucsa.328440.2 (locus Cucs a.328440) derived from phytozome v7.0 (chr-ID scaffold0316 9; pos 11229 to 11529 reverse strand)
agtgtaggactccttagggcagatcttgtgttttctaattttaattttgttgcttccctgcttttgaacctgtttggttgttcagattcgtcgagtcatttccatttattaaaagtttctataattttctttgaatcttctgaatctgtgcttgtattacccagatttctataatcctatcttgatttcaagtgtgttgatattttcaagcttaagcaatactgatgtgactaaaacttaactaatggactgagtgtttttttgtacgcgaactaatatggtgttttgttatgtttcagag

SEQ ID NO: 66274 - DNA, 711 bp, Cucumis sativus
  Intron number 1 from transcript Cucsa.368660.1 (locus Cucs a.368660) derived from phytozome v7.0 (chr-ID scaffold0363 9; pos 542969 to 543679 reverse strand)
agatacctctcagaagatcgtgaggctcgctcagtgtatgcatttttcgttacccttctcaaagctatgattctattttactcccttttgctgcctgtgttaattggttcaacaatggatggttttttggcttgatttttgtgtaatttagcaattgggtttttgtgaaattgtttcaatacttgatgacctccattagtggtggtatattttttgtaagtttggcaatctgcatcctgctgtctattatgaatatctaaactcgatttctttgcaatttgattttttttttctgaacaagatactgcaaacgaaagctagttacatgaaaggcttagatacgcgtagttaattaatgatagttatctatgccttgcaatgaatttacatgtactaatgtattaaaccattagtttatttacaaatcaggaggagaaagctttgaatcagcaaatattttgtaatttgattttttaatgggaataccttccgcacaatttatttctgcaataactagtttatgtattaaagaaaagggaataacacttcacattacactgattttcacatattttttgagttttgtttcttcctattatttagttgaagtgtactggttgaaataatcattggttacttgctacaagtacttgcaactaacgagggccctttcttatccttctgaactttgcagtggcgaaaagatcatca

SEQ ID NO: 66275 - DNA, 672 bp, Cucumis sativus
  Intron number 2 from transcript Cucsa.362810.1 (locus Cucs a.362810) derived from phytozome v7.0 (chr-ID scaffold0361 1; pos 541580 to 542251)
gtgtcacttccgtgcctatacttgaacgtcaaactgtaagttctgctttcctgaatccattaactcaaatcaacaacactatgtttctttaagtttcggtctcagtgatcattattaaaagataatacatgaaactcaactggttatgaaagcttgatatttcaaaactgattctctattccaattgggattgaatattgtaaattcatagttgagtggttagtcaccgataaagatctgctttaggaagagatagaatgtagaactaaataaactactttcttcccaataaatgcacttgtgtggattctaaacatctgatttgtttgagaggaaattgagttatatttcatgttctgatggcttgattacaaatgacaaatttgtctgcattttctaagagaacttaccagtacagaaaagaaaagcctagtgttgttctttggacaatagtaattcggtttcaaacttctatcatgtgagttgtgttggtctagttactttattgggtcatgcgatgaaataaaagaaactttcgggagaatgagtgtgaacactgtggtagtcacttattagctaggatgcgatactaaaagagtaattgcaatgggcaccacttttaggattcttagttgagtgaaacttccaactccagaaaagaacaccttgcag

SEQ ID NO: 66276 - DNA, 517 bp, Cucumis sativus
  Intron number 1 from transcript Cucsa.395130.1 (locus Cucs a.395130) derived from phytozome v7.0 (chr-ID scaffold0410 0; pos 766778 to 767294 reverse strand)
ctcctccttcaggttctatcaccctcctctcccttgcttatgcttttctttctctagcttcttggtgcctgagaaagttttactcgaaaagccattttcaatgaattcgatactgaattttgattgccgttggttaattctccacccattagggacgggagttcgtttttgaagattgggggcgatatgtttcatgacccaattctaattacttgattccatcatttgggttgaatatgatattttcttcttttgttcagtggcttccgtgttttctcaggcttatgttgtcatttcattgagaatgatggttattaggcttccgtgtttcctcaggcttatgttgtcatttcaatgagaatgatggttattaggcattctcaggctctaaaacttgagtgaactcgttagatcattcgtatctgaactcattaagaattttgttgacttttccttatatctacatggtattgggatttatttgatgttttagattgcagagagtgaggaaaagcgg

SEQ ID NO: 66277 - DNA, 826 bp, Cucumis sativus
  Intron number 1 from transcript Cucsa.334640.1 (locus Cucs a.334640) derived from phytozome v7.0 (chr-ID scaffold0331 2; pos 100924 to 101749 reverse strand)
cagttcccacgccccgcacgacaccgccatcaagagtatttctcttaccctttccctgtttcaatgtctatttgtttcttttcgtttcatttttatctttcttacgagcttttaatgtttgtggctgtgggtggttttctactctgtgatagaggccattttgtttgggaggaaggcttgatttttgcaatcgggatgcttattcactcttctgggtgtctgtctttttgtctccccgagctgggtttttgaattcatgccacatttatgctaggtgttttagtggtttgactgcgggattagggtttgttagtattttgtctctgtttgttgtccgtttgagtcgattgtaggttgtaactcggatgttagtagttctttgttagagtgaacacggaggaaaaaacgaagaactagtttctagggtccatgagtgtgtcaattcaggtcctttttttttactaaggtgtggtggccctatcgtctgggcatctctttgtacggccatctttcaagttcattgtgtattttgaattgagtttcgtatttcaatattttgttgtgcacgttcaagattcttatgtaatgtaatacattatcacctttaattgtttttttcggtgcatatcgtatctgatatatgttgctgatttaattttcgaatttagcatcaagtggtttataaaacatactttggttaataagaatcttgttgattaattggttacgtttatgcctttttttgttgtacttctttagttaacatctttggacttaatctcaacattacaattgacaggtattaacctcgagcacccagctgaag

SEQ ID NO: 66278 - DNA, 579 bp, Cucumis sativus
  Intron number 1 from transcript Cucsa.336870.3 (locus Cucs a.336870) derived from phytozome v7.0 (chr-ID scaffold0335 6; pos 47546 to 48124)
tattctcttctcctccaaagctagggcacacacaggtatttctttttctccttcaatttctgtttggtcctcgatctgggtttccgcctctaatcttctccctgattcctttatttgttggttgaaacttgtggggtatttgatttctgtgagggatttgagagatatattgcattttttgctgggtgattcgaatttagggcttgaattgagttaatctgttgggtaatgcttatttcttgttttttggtggtattttatcgtcttctttgatttacatttttttttctgctggaattgatggtatttttgggcatgctgaatttgatggtaatttgggtatcctgaattgatggtattttgatctgttgggtatgtttttggtggtattttgcatgttccatgattttattgcacgtatccgtgattatggttttctttatcattttttgttctatgaatcggtagagatctaaaattgtctaagatctgttgaatgtaatgttcgattattgactcttttttccctctcctttttttttcgtttccttttgttaataacaagttggttggaggaag

SEQ ID NO: 66279 - DNA, 793 bp, Cucumis sativus
  Intron number 2 from transcript Cucsa.321630.3 (locus Cucs a.321630) derived from phytozome v7.0 (chr-ID scaffold0308 0; pos 1465974 to 1466766)
ttacagataatccacatatatttcaaaaggccaaggttagactcttctccaattttctaacttatatgtttaaattattgcataataatgtatatgagatataaatgaaacttatttaagatatatatcatcaaggtttagaccgtagatattgaaatctaaaggtatgctattttgatttcgagatacatggataaagatactatgaatgtgtcaatctagttgagatatcctagtgtatctaccgtttttcgtccctcctgttttttcaaaaaagaaaaacatagttatattggttgtttgaaaaaaaaaaatcaatattaaacgttacttttataaaaatatgaatgaaagtgtatcattaaagtgttgacgcgggatgaatgttccttacaaaattataaaagcaaaagaataaaaaataaatttaaatttataaataagcatattatgatatttaaaccataccaataagcatgtttattattatttatattatatttaacataagtgacatgttgatgtttattttcttttattttcttaagttctaggtatcattctaccatattgattcacatctcatgattattaaaatgtaaaaataacaacatgtggatggaacccaaaaatttaatactatgaacatatgatcacaaagtggatgtatagcatagtaatctagtgttttttttaataattttattattatgaaataaattattattttgatggttaagtttaagaatttgttttaggaagaacaagaagatatcattaaaagaagagcatc

SEQ ID NO: 66280 - DNA, 788 bp, Cucumis sativus
  Intron number 1 from transcript Cucsa.334730.1 (locus Cucs a.334730) derived from phytozome v7.0 (chr-ID scaffold0331 2; pos 201173 to 201960 reverse strand)
gtctttcaatacagaaaattgctgtaagtattttgtttttttgactttttgaagttattgagagaaaaaggcttatgaagatgaacataacagaatggcaatttagaagcttattcacatggaacttcacccttgtatataaataagtctgaaaaaaaacactttgaatcagtttagactgcaaatatttcaactctggaatgctcagaatttaaatacttttcacctgaaagaagtttacttgctgaaaaaacaaacttcttgagttgttttggcttttcagagttacggtcttttttttagaagcacagtgtgtttagaatttttgaaatcacatctgtttattgtaaatcaaacaccatatgacttttgaacaatgcttttaattggaaatgaaatgcactttttaccattctagaaattatattagcctcgcccttaccatgttcagtgcatgtctggagtgatattgaaattgctaaaatcactattagcatgttcaaaatcaatatgaaactcgccttgaagcatgataaatcgatttattgtttaattctacactcttgaattcaatcttttatattatcaaaactgatttgaatgattaaaagaacatgttttagagtgagtttgaaaataacaatgattttaaccaatttaaaatcactcattttatgttaaacgttggcagatatttctcttttcccattaattggccttattctgatatatcattatttattttgaaaatagaacttccctggtagattggcacctatcaaagaaac

SEQ ID NO: 66281 - DNA, 714 bp, Cucumis sativus
  Intron number 1 from transcript Cucsa.337730.1 (locus Cucs a.337730) derived from phytozome v7.0 (chr-ID scaffold0335 6; pos 728194 to 728907)
tgggctcttcgtagagcttctactcctctcaggtatccttctcctccttctttatctattccccttttcttcacactacaccactctgtttctctaccttacttacttcattcttaataaaaacttttaatctcgtttttcgctgttaaacttttgaattcctttcatgggttttggttttcattggctctatgcatcaacaatcttcttgcctgcttctgatcgactttccagtgctaattaaagaaggaaatgaagtcaagagttctgcgtcttctgttctgttctgttcttgtagtttactttatgttccatttcttttttctcctacggataacttggaccgagtgatggcatattagaatcatggaaaaacgtagacattgaaattgggatgtaagcagcttgagaagaaaatgagaaacccttataatttgggcatttttcttcttattctattgttctaaacatgaaaccttatataaacaaatgttctaggcatgaaaatttctaccggcagtttccagaactaaaccattatcaatcatccgaaggactgttttttgtatgattgtacttctgtatacatatactacatgcatgaacgtgtatattgtggtggggaagctatgatacctctaacttttcaggccctctctctatgatctttttgttctcttttcaggaatcaagggtatagagtaagaacttcac

SEQ ID NO: 66282 - DNA, 720 bp, Cucumis sativus
  Intron number 2 from transcript Cucsa.355860.1 (locus Cucs a.355860) derived from phytozome v7.0 (chr-ID scaffold0357 7; pos 409615 to 410334)
tccaataatacttgccttatttgtgttcatattaggtatacttctacttccacctcctcaaatgtttcttttaatttgtaataaaaaaaagtgcgtaaaagaacacgatttacattaaaattatgaaaataattttatataatatgttttctaaaacaaataaaattttcacatcctaacttaacaactttgaaggtttgtttttctatattttagtttagtagtcaccatttaactatcttttggttctttttatgtctaatgataaagagtggacgaaagatcttatcggaacacctaactcactctattatattgtcaaagatatttgtaagatattggtaaccataagggattgatagtaaaaggttgaactcattatatccaagctctttattaaacctaacattaatttacggtaactatatcatatagtttaacaagatgaactatctcaatttacatgtacttaaacagattaagaaatgatcatatatctctaaccaaaagattaaatattttcatcctcacccctacattagtcatttaatgatttgttttttaaaaaatgtcaatccaaaagcccctcttcatgagcaaaataacaaaataagaaactaaagagaaaactttgagagtgcaatttatacttattttttcaatttgtattttgaatggatggcagcttcagtatcaacattcacaagattcttcccaaag

SEQ ID NO: 66283 - DNA, 875 bp, Cucumis sativus
  Intron number 3 from transcript Cucsa.358550.1 (locus Cucs a.358550) derived from phytozome v7.0 (chr-ID scaffold0358 6; pos 179226 to 180100)
acattcatcttagctcttctttgtaggtatacaatattaccgctttgcattgagataaaaactcgtaaaagattagatttttcttttaaatttaatttcgattttatgaaaatcatgttttaaaatgtcaaattaaatattaaattgatttaatgaaaacaattaaatgcatgtttataagtagttttcatcctaggcagagctattttataactctttcaaatttacttttcagacatgctctgcgttgtaaatttgtcctttaagtttcaccttaaagccttgtatgcaaaattgaacttcttgtatatgtatatttttcacttttattcaacttttataaatcacttccaacatagtcgaaaatttattatcaatttacttttaaactttaaggtttcctatctatattttcacttttaatccatttttataaccacttccgaatatttcttgataatcattttcaaattgcttttgaactctactttaaatttttgttaacgaaatcgaattttttgcatccgtgtatatatatatttgcacttttaatctacttttagcgatctctaaattctactatttatttttgaactctactttgaagttccgtatacgaaatcaaacttgctcttgcatacgtatatttacgttataaatcaactcttatgaattcgactcttaataaagtatgtacatgcatctaccatatcaaacccttttaaaaagcagaagataaaaaagcaaaactttctggttgctaataataaaagacttcaaaaagagagagaacataaaagtatatgattattattttgaaatttatttatttaaatttgtttgtttaaatgaaaaacaaatggaaacttgaaagg

SEQ ID NO: 66284 - DNA, 873 bp, Cucumis sativus
  Intron number 2 from transcript Cucsa.342570.1 (locus Cucs a.342570) derived from phytozome v7.0 (chr-ID scaffold0335 6; pos 4846258 to 4847130)
ctgttgtgaaagggttctacaagaatcatattaaggtaaaaatcagaatgcctgatcaaattttttgttctgatttctaaactttcgttttggatttttctgttctgttggttgattgaagctttaaaatggggttgtgaatgatttttaacttttatgcactgagcttgtgagggattggcggatgaaaagtggaaatggagtggttggagttctggagaagaaagaaagagtggttggggattggaattaggtcatttacagaggagagtaattgtggaagtttttctgaaacgatttccattggtggacgttctttaatcattacgttagaagattgagcttaccctaattttattttcaattgattgaaacataaaggtgaagttttgttaatttgatttatatatactttattagttgaatttggtgatgtttatcatttgtttgtattatatgtaatattttaggatgaaaagtgactttatttacgtagttgaccaaattgtgatttccaccttttatgactttattgtgatttccaccttttatggaaactttttttaagtttttcttttcctttctttaattttcaaacttgacaggtaataaattgaattaatagaaattggtatgaaattcaatgataaagtgcatttgctttatagtcccccttctttgcaccgattaccatatctatcaaatggcaagcatggcatagctatttagttacaaaatctctcttcgattccaaacccttttactcaatatggaaaagaaaagcatgatttataaatactgataatttcgtttgtaaaatactttaaaatgtatatagagcattttgacaagagtcaatagcattaccggagt

SEQ ID NO: 66285 - DNA, 486 bp, Cucumis sativus
  Intron number 1 from transcript Cucsa.319890.1 (locus Cucs a.319890) derived from phytozome v7.0 (chr-ID scaffold0307 8; pos 603570 to 604055 reverse strand)
cttttcgctttatcaggtttgctttttggatcttgtttattttactgctctaaagctgcagaaaatgctttggaacttgtttcttctttagtttaatcggataatcaatcaataacatttcaattttagttacgggagttgtgaatgtgttcattcagtggaattatgtctttctttctttaattcagtgagttgcagaggaccgtaactctttccccttcctctttgcttttttgttttctcctctccaactttttcactcattagttggattcatctccctttcgtaccatatcctttgttttttatccagagaatatttatgaaattgaggtgatctgtgagtatcaattttaattgttttaagcttggtgagattcgttcctcttttcatagaatttgattctcaacatttaggttctcttataattcggcctgtgtttgatttcaggttcagtaattccaactctgagcgttggagttgga

SEQ ID NO: 66286 - DNA, 685 bp, Cucumis sativus
  Intron number 1 from transcript Cucsa.383730.1 (locus Cucs a.383730) derived from phytozome v7.0 (chr-ID scaffold0388 2; pos 832345 to 833029 reverse strand)
caggtaactaattccatctttttaactaatacacttcaataccattttcatctccccatccactcaaattcaaaccttccgaattacatcaatatgtgaacatctttttaactttaaagaacaacatcccgttactacaatagattatatattatgtaatatattttaccgtagaaatgttttcaaatataacatagaataaaattttgtttctttttaatatcatattctcaaaattctacttctagatttgcctaccaaacaagcccttaccaattcacggttttaaaaaaaagttccaagattagttagacaagctgcatagctatcttaacatgctcaactatatatatatatcttgaaataatttgacccttgaaattataataatttattttagatgagtcttcaaatattcaagatgtttaatattctaagttagaaatggtcccaagtgaaacaaaatagttctaatttatataaatgaaaataattaattcctaaatacaatataattaattttaaaaatgaaaacgaaataatatatacaaaaataacaaaaagaatactcaccaagaaaaatcaacataatcatggacaatcaacgacaagatgttttgattattcattatatggaagtgattttactatatgttactatgtatattatatttggttgcagctg

SEQ ID NO: 66287 - DNA, 848 bp, Cucumis sativus
  Intron number 2 from transcript Cucsa.369220.1 (locus Cucs a.369220) derived from phytozome v7.0 (chr-ID scaffold0364 3; pos 36450 to 37297 reverse strand)
ccatgttaaaatcatagaacaaattttcccaacatttggctgaatagggggaaaggaaaaaagagatgagacaggtcttctccatgctgaagacatgatggacagattgaaggggaaaggcaactagttgacaattttcgctgcaatactgtagtcacgttcaattgaccaaacaacaaaacccaaatcagaatattcaccctttttgggcttttagtcttcaataatgccatgttccgacggtgatgatggggagagatgaaccgtaagagatttaaccaaaaatcttccacttttggtgtgaatcaaatgaataaattccttagttcgtaatcccaaaattacaaagttatactagtaattgaaatcctaagtgcgtaacaggcagacggttagctacaaaaaactaacaaataaccaaagtacttatctaacagaactactaactaactaatattacaaccaggaaacatatgcacggttgaaacaagaaggggctacatcacctacctaaaactaaggtacttcctcttatattagaatgacctaagaattaatttcctacgagtttccttgacaaccaaatgttgtagggttaggcggcttgtctcgtgagattagcgtggtacgtgtaagctggtttggacactcacagatataaaaaacaatgtgcttgcatgacaccagactaatgctattggctgtttatctatttagacgaagacacttggagtgacagtatttgtgctgtagttatttgaaacattatattacaagtatttttttttgaagtttttatccgtcacattcaacaaaatcctactttttgcaggtcttttgcaagattt

SEQ ID NO: 66288 - DNA, 557 bp, Cucumis sativus
  Intron number 1 from transcript Cucsa.362080.1 (locus Cucs a.362080) derived from phytozome v7.0 (chr-ID scaffold0361 1; pos 83876 to 84432)
aaaaagtacaaagaaagctagaaagaaactcgaaaagttatgcatagattacaaagacgcatgccagttaagtgatatagaagaaattctaccattcaaacaaaatgaaaagaaggaaaaaaaagttcccaccaaaaagctagtaaatttatttttttgaactttttaaagtactttagaaatacttttgatttaaagtatttagacaacaaacaaaaaagtgaagtaagtatagattcccatttatccatataggtgatgtattgtcccattcatgcatagtataataattaatattagttatccatatgtgtatatatagagaagagatttgggtattgggcatcagaagtgtgtaattaagaagacgaaaacccatatttaccatctctctcggttaataatgtcgtttcttcctaagtttgcaggattccagaaccacacagaaggaaagtaccttcaatacctttctgatggttttcttttcggtaacctacaatactcttctgatcaagctttgactccatttacaaagttcgagattgtgcccgacaagg

SEQ ID NO: 66289 - DNA, 850 bp, Cucumis sativus
  Intron number 1 from transcript Cucsa.321420.1 (locus Cucs a.321420) derived from phytozome v7.0 (chr-ID scaffold0308 0; pos 1200450 to 1201299)
tcgccgtatttcttggttctctctctctctctctctataattctgtatttttttttgcaatttctggcatggatttctgttgtatgttgattatttcatctgaagttataagatccctagcttactttatcgaattggaacaaaataaagggagattttgaaggagtagatttatgcttgttttatatggtagagtgtcagaattctgagtcgcatggttccatttagctcatagtgtaatggatgaaaaaatgacactagttacattagaagattgaactccatttgttttttgaaaattaagttataaacttacttccactttttctttgttttgctaagaattcaatttttggttgaggaaggatgaaaacaaaggtaagaaaatgctgaggaaacaaacaagtagaattttttagtattgaatgtttatcaaaggagactctgtagaatgaagcagtgaataccaaattataaaataatagtggttttaatttcttttcatgtgtttgggtgttttacagtcgagaggaaggaataaattttgatgcattagttcttttgttatttatgaagcaattttcttgtaggttttttgaatcatttttaagctttgaaaacgaaagagttcagcatctccttcatttgcacactttttgctactggaaatgaggggggaaaataactttggctttatttgaattatgggaaacaaatgtcttgaattcataacatatagaaactgatttggtaattagtttgattttaatccttgaatgctgcttctttctgttcattttaaatattctaatgtttgttgcacctctaacttcaattgatgtagaacgat

SEQ ID NO: 66290 - DNA, 1025 bp, Cucumis sativus
  Intron number 1 from transcript Cucsa.330290.1 (locus Cucs a.330290) derived from phytozome v7.0 (chr-ID scaffold0321 0; pos 9060 to 10084)
acggtattttatttctacataattcaaattcctcacccaccttcgtcttaaaattagtgtattgatttatttgaaggcgcggttatgccttagctgttgctgcatcctgcattttgctctgtttcctttttgaactttttttagtatgatttcagataatactaccggatgctcttttctggagccaagcaacttatagggtttaaatttggtagaatgattatatctatttggtgataaagtttaaaaaggtttcataatgttcttccattttcagttttgattgctagttggaattggaataaccattaataatgttcttgaattttcaactctcaacaatttgtgaggacatcgtactgaccaattttactcattggaaaagactattctggctgaataatgataaggtattttaggtccaatttgataatcatttggttctttaaaaaagtgtgtttctttctcacatttttttacaatggttttcatctttgttaagggaaccttgaattcttagctaaaatttcaaaacaaaagaaagttttataaaaccattttttcttttcaaaacatttgtaataagtagacaaccaaacaaagatgggtgggaccccaaaacccaaatgagtatgaaatagggcactaatctccaatttttgtcagagttttcaaacagttcatctttcatgtattgcaaaataagcatcatctaggtactacatgacctcctccaagaggtgtctatttttttcgttggtgaggtggggtgactggacatgggtaaagttttttaacttaaagaaagggaaaactgtgcgtgtggaatggttcattacaagctaaagatattaatttttcgattctcttgtatttggaagctggtttgctaaatatgagtaatatgttcaaatctatatttttgtggtgctcttttcatataagaacatttatagtttaatcttaccgttcttccatcatctcactcagtgttggaagccaatccgtggagagaaagttcgaaa

SEQ ID NO: 66291 - DNA, 563 bp, Cucumis sativus
  Intron number 1 from transcript Cucsa.317620.2 (locus Cucs a.317620) derived from phytozome v7.0 (chr-ID scaffold0305 4; pos 41648 to 42210)
cctgcttctcaatcactgtttcctcgcgattttaggtataattcgatctctttttcttttcccttcaatttcaagtcttgttgttcatcatcccatttctccgattctgttaatttttcttcctgatgcaagatttgatagaatttgaagtttgtggaaatgttcaaggctgtttaaatcttagatccatggtgggtttctttgaatttcaagatggactttctttttctctttgttgctgttctttttttttaaaaaaaaaataattatgttcaaattatgcaattagtgatgattttatcattgaatccatgtgcttatcgccgtcctttgtctcgtttcatgacgtgcaaatttatggattccattaattaaatactgatttcaacctcggattctttttttggaattctcttcatacttattctgtttgttttgcatgttattgtttgttgtactctctacatggcagttctgaattcatttttttaaagagaagattgattctgagaccacttgttgtgtttatgttcaggtagaagtataaaactggtctcttaaga

SEQ ID NO: 66292 - DNA, 492 bp, Cucumis sativus
  Intron number 1 from transcript Cucsa.397890.1 (locus Cucs a.397890) derived from phytozome v7.0 (chr-ID scaffold0415 8; pos 419522 to 420013 reverse strand)
tgcacacaagcaggtcccctctgtttctgtttcatagctcaatactttgacttttagctcctttttcctttatgttaataagatcatatatgttaagttagtagaagagttgtacatggtttgctttctggaacttgaactgttggtatttggaatctaccccccaaaagggactaaacagtcttaaaagttttatctttcttgattgaatacatcgtttcaatgcctggactgaccctttttctcctcaattttagttattggtttcttttgaaagttgtgagatatatttgttcacgttactgtttcaaaggctgcgttgaataacccttatatcatgtatctgcagtctattactgattaaaagcatgcagaactttgcaatgatgccaacagaccttttggtgcgcctcagagtagttgcccaaatataacttagtgctcttgctggtttcagagtcccagtggggtttggaacattttcggtggtaa

SEQ ID NO: 66293 - DNA, 329 bp, Cucumis sativus
  Intron number 1 from transcript Cucsa.350860.1 (locus Cucs a.350860) derived from phytozome v7.0 (chr-ID scaffold0350 4; pos 296758 to 297086 reverse strand)
acgggtataatcttcaactcaaattttatttattcattaattcatatctcattttcagcctaatataataaaaagcaaaatcataaactaattattatattcaattgtactatgttattattcaaatgatgcttcttaaatgcaaaaaaatatatataatataatagtttaaaaaatgaaaacaatgtctaaaacaatatttatatatgtaatatggtggacaaaaaaaaaagtcacatgatcaaataagtcaatttattgttctctctcaccatggcatgtaaaaccttgcaggcacacaattgaagaagcccatcttcgtcaaatat

SEQ ID NO: 66294 - DNA, 296 bp, Cucumis sativus
  Intron number 2 from transcript Cucsa.362400.1 (locus Cucs a.362400) derived from phytozome v7.0 (chr-ID scaffold0361 1; pos 273836 to 274131)
tgggtgtgtccaccagtgaggtatttgttgcttttcttcttttaaaatctaaaagttttaggttctgtaattgaattcatgtgaattctctataagatttgataatctgttttgctggataataatgtttaatgggtgtaaattgacttttcacaattagttgtaattgatgtttcctatcctttaatttgaggtataagtattggtttgtcacatattctttattgctttcctgttatttgatttattttggttgtcattgttaaatgatatcagtaagctgtttcaggaagcta

SEQ ID NO: 66295 - DNA, 510 bp, Cucumis sativus
  Intron number 2 from transcript Cucsa.379660.1 (locus Cucs a.379660) derived from phytozome v7.0 (chr-ID scaffold0383 7; pos 65935 to 66444 reverse strand)
gatcaggaaactaggcttgccattttctttgacttgtaagttctcttatgcattctcctcaaatgttggtttaatattatctactttagtataagtcttcgtgagtttgattttggttatcaattcctcttgttagaacaaccatcctccacatttcttttcaaatgtcattcttgttcgattaatattgatagttgttgaaatgacttgaatttgttatatggtgcaacaccaacaaccaaatacgaaggtcttgctaacatctagtagtgtcgttttgtattatgagaacattctctctgctctttcttttgttgcgtggacatagctaaatagtgtcagtaaaccatatatatcttacttttttttacgtttttatattattggcttgacgacttctaaccataattaagttattgagtaaaaaagaaagtgaggaagtatgaaatgtatgaatttaagataatttattcggtttgaaaacaaatttgtttttaaggtgtgacttga

SEQ ID NO: 66296 - DNA, 380 bp, Cucumis sativus
  Intron number 2 from transcript Cucsa.348950.1 (locus Cucs a.348950) derived from phytozome v7.0 (chr-ID scaffold0348 7; pos 341867 to 342246 reverse strand)
tctaacaatacactcttccatccggttgaagctgggtgagtacttcaattctcgaattataattttattattttgttatacatgtgggaagattggtttgtttatatgtttcaagaagttacacttttatctatgagttttttaatttgatcttcattttgtttctaggtattaagaaattgtatttagttttgagtttagatttgttcataggtttaaccaataatatactttttttggaacaaattcaaacttcgactggaaaagtagaaccttttaaagatcatagttgaaatctaccactgtgatatttggtgtaatttaactttttttttcttgtataattttggttttggttagaaataagaacaacgaggctt

SEQ ID NO: 66297 - DNA, 871 bp, Cucumis sativus
  Intron number 2 from transcript Cucsa.391710.1 (locus Cucs a.391710) derived from phytozome v7.0 (chr-ID scaffold0406 2; pos 138807 to 139677)
ttattgcccctttatctgcaaacacgctcggcaaggtacagtattttgaccaatgtttaattctgatctcattcttcaatatatttcaagatggggatgaatgttactcacacttagcacacaaaatatggaatgtggcttctccccaagattaggttggtccagaagtctatcgtctttgtgattatctgaattggtttatggtttgtttctttgttttgtcagttccatcttggtttaagatgtgttgatgtccagcctgtttgtgtacattttttaatgctgcttagtaactgttattatgtgtatagatacgcatccatctatattggatttggctcacgtgatccattatgactggtaccatatgtctttaggaattattttgctgcttttcatgaagcttcttcagctcaaggctctaatcactgaagaatgtagagtccttaaaatattttgatcaatggattctattcctatcgtttgttgcttgcctattgctttacgtttttgttaaataatataatattaaatttaccttcaaccttctcctcatgtttttgggttagtcggtgatttgagatggtattagaccaactagtttaaaagctatgtgttcaaacttctgcagtgttatatactctccaattcatattgatataataataaatcctcttgtctacatattatacattatacttgagtgagtcaggaaccctttttttcttattttgttctgtatcttttcatggtagcttctatctggatttgtgaatacttttcgagacataacattgctaccttaaaaaaaaattcctcttgaacttgatcctatcacttgcatttttttcctccagattgctggtggatt

SEQ ID NO: 66298 - DNA, 535 bp, Cucumis sativus
  Intron number 1 from transcript Cucsa.385080.1 (locus Cucs a.385080) derived from phytozome v7.0 (chr-ID scaffold0390 4; pos 468145 to 468679 reverse strand)
gtctctcagtgcttgaaagattgaagcttggatttgattgttttgcttttcactgtcttctttgttggcgagtgattttttcttttcctttttttatgctgttttgcttcatataacggtgacagaacaatgaaggtttgatcctttctctgatatcttctttcttctgtgttctacttagttgttgttttacagcctaatcatctaattgggagaactttttcgttttcttttctaggataagtactttatttaatttagttagataaaatgaaaactaaattttgtacctgccaatatgattgaagatgttggtttactgtcgtccatcttttgcacttgcaaaatatcatgcagggctaactctcccttctttagtatttataaatacttagaaagtcgattcagacatgtttttaaacactattgaagggttattgaaaattttgatttttaaaaaatgagctagtggtgatgaagtttgatctagaaacggaaacgctagagctaagttgagtaaaaaatttgaaggttc

SEQ ID NO: 66299 - DNA, 684 bp, Cucumis sativus
  Intron number 1 from transcript Cucsa.363460.2 (locus Cucs a.363460) derived from phytozome v7.0 (chr-ID scaffold0361 1; pos 1005720 to 1006403 reverse strand)
tcgagttcctttcaagtcaaactgttgttgatgtatgtaatgttatcaatttctagctatatttttctttgatattttcttcttggtcatgaatcttgatatccaggttgccatgttgaagattggtagatacaaacccgttagatagctatttggtttgctgtttttgaaagactcttttgatttcctcaaaatcttttggtaacattttcacaaaagatgcaccaaagccatcttttggagaatgttaggatttattctctattttagagctatttgcacgattttatcaaattatagagactatttagaaacgttttatcaaatcactaagactgatatttaatttttaaaattataggaaccaaatttgtaatttaacctcttttctttttgttgaatttttggtttggttttctaaaatgtttttaaaaagtaggtaataaagtaaaaaaaaatataagtgaaagtagggtttatagaaacaaaatgattaatagacaagcatactttttatctgtttacttgttgcttcttacttttgaactgctgaactcaatagaaacgacttctattagccaatttgtgagcatatacgtaagttgcgttaatatgttttaaccataactacagatcttaacacaatttctaatgtttttttcccctctatacaggcatcaagtt

SEQ ID NO: 66300 - DNA, 946 bp, Cucumis sativus
  Intron number 2 from transcript Cucsa.321070.1 (locus Cucs a.321070) derived from phytozome v7.0 (chr-ID scaffold0308 0; pos 929683 to 930628 reverse strand)
atataggtttttgttccatgtctgatttgaaatttatgcattgtgatttcaagctgtgcttatgaatgttgaaaataggaacttatgaaagggttaaagcaaacccattagtaaatcaaacaaacttaaactactagttcttgttcttaattttcatgtccgtctttatctggtctctaaactttttaaaatatacaactttcaatttgtgtataatgagtctttaaactttcaattctgtaaccgtgatatgttattattattatttttaaaatagttgataattgaaccttatgtctattggtatcctaaaatttaaatttgtgttccgtggatacacgcattttaaccggctgagaatctatgagatacaagatcgaaagtttaagacctttctagacaccttttagtattcacaaaccttttggaacaaagttgaaagtttagatacctatacaactcttttaaaagttcaacgatataataggtacacaattgaaagtttaggaactgaatttgtaactttaaccgtaaaataactacaagataaatagattgtaataccccataacttcttgctttcaaaatgtagcaatctttgaagacaccttgtatgctgctaaactattctaatatctgggttgcttattactcaaaacaataatagcacaagaataatataattactgttgaaacgcttatggttttacagaaaggtgaaaaagggtctatcatggagtatactagtgcccattttttatagcctgttctttctcattttaaattggacttctttcttgtaattcaccaataaggtgtttgagatttcccccctcaatggaatcgtttcttcaattaaaaaggctagtgcctgtgttttaagagaggacttgttagccaagcccattgaccagttcctattcaattgtttttatgtgaatagggg

SEQ ID NO: 66301 - DNA, 692 bp, Cucumis sativus
  Intron number 1 from transcript Cucsa.346290.2 (locus Cucs a.346290) derived from phytozome v7.0 (chr-ID scaffold0344 9; pos 8388 to 9079)
agttacagaaggttcgtatccaaattcttcgtcgatgtacacactttactttgttttacttaactataccaccactctgccttccattactgtctcaattttctgatttctgccttcttttgttgttattttcattcatcagctccctcaagttgcttgcttctatgaattggttctgatcttgtgttataattccattatgatttaagtctgagttcttaatcaacaatttggcttaaaatggtatgaaataaaccgtagatcgctgtatcaattcgtacggtaggatatggcttttcgatctggttgcatatccctgacacacacaagtgtgtgaatcctatgacgacttgaaaaaatctacaactttatattagctttccatttccttctttggttttgagtctttgttcgagttttgaatagtaatttgactgaaagcataatgaaggtcaaatatattctcaattctggaatcctggatgttaggtttctttctccttgctaacattgagttaaattgtagccattttcttattctactacttaaaatttgttagacacaaacattggtgttgttcttggatatcactgtctctccttgtataagaatttgtatattgtttcgtttgaaatagctggtattgtttttgttcgtagggagcaccgttcttctagatctgctctctttg

SEQ ID NO: 66302 - DNA, 967 bp, Cucumis sativus
  Intron number 2 from transcript Cucsa.346290.2 (locus Cucs a.346290) derived from phytozome v7.0 (chr-ID scaffold0344 9; pos 9155 to 10121)
atactttggaagatagagtttctattctgaaaagggtaaattttacgcagagagacgcttcttaattattaatttattcatctcctatcttttatataaaaggttgttatgattgaacacattatatcctatccttttgaagcaattaggataggttgaatgtcataagttgaagtgactcttgacataatgatactgtcttagccattttactaagtaaactgtttttaaaacaattattttgacattgaaatcctgctgcatgagcatcttaaattattattcagatggttttgcaatccagtaattcatcctcttgcttcagataatttaatcatagaaaatgaatgggaaaaaggatgcaatgcttttttctttcagaatttcttctatatttgtgcatttagcagctgaatttgagtgtgatgatgagctttccttcaagtatgatcataggtgttgcctgaaagtgtcgtaccatttgatgcaaatgacttgtatgctcaaagagctctggaataggcgaactaattgagtggtttcattagtttagactagtggtataaagaactctcggatataataagtggttataggtctaaagactccaaattcccttttaatgactaatgactgatggttaattttctgttttgtcactacctaaaatggtgaattggtgtaaaaggattgctgttgcagtgcaacatgagatagtacttaaagtaactctttgtttcatatagatacagtgcaaatgatcacttgatatctccgtcctcgcttaatataaacaccaaagatgagggttttcttagtacttccataatggtgcttatagtttccatttccagcaagaaagaattctgttccccctcctcgatttgtcttcttaattgagcaacttttgatgtatatattgtttgaaatagttgacaggtgacattcacgaagaagtggagagtca

SEQ ID NO: 66303 - DNA, 666 bp, Cucumis sativus
  Intron number 1 from transcript Cucsa.319750.2 (locus Cucs a.319750) derived from phytozome v7.0 (chr-ID scaffold0307 8; pos 429640 to 430305 reverse strand)
accccatttccagaaatcaaagccaattcgcgcaggtcagttctcgtatacttctttcacattgttatcttgcttttccattggaactgtgaagagcttaagaacgccaacttagaatcgaagttaggactcattattcgaaattttggtttctggatagatttgatagaagactgttctgtttcttcaattagaggaagactataacggggaagtttgaacgtttttcgactaggacgccacttatcattttgataagaaattgaccactttatgcttagttcgaacgtagaatagggaattaatagcttaatgggtacccctgtaactcagctttcgttgatcccaacttcaaggactctagcatgtgaaaagctatatttaagtaagcctttatttgagttgttggcgtattctagtttatatcagataaaaccacttattaatttactaacacattatcctcttctcttggctttgtattgtcgacacaatgcttggggcatgcacttccaatagctagtttttttttttttttcttacaagtaatttgttgttgttattttctggctgtctattccagtgctcttaactttaagttggatgactaccacatgctgacctacaacgtttcttgtttttcagtaagtgaaattgctgaggagg

SEQ ID NO: 66304 - DNA, 811 bp, Cucumis sativus
  Intron number 1 from transcript Cucsa.356610.1 (locus Cucs a.356610) derived from phytozome v7.0 (chr-ID scaffold0357 7; pos 1448038 to 1448848)
ctgctggcaggcagatttagcttccaggtttgttcttcaaccctttctctttcatctatttttgggatttttttggattcaggagtttgtaatttgggattttgatttttcttttctggaagttttggggaaaatctgaaatcaaatcaatgtaggttggtctgtacactttgataagatgtatgcgagaggaattaagaagaagtgtattttgattgtgcatttttttttttttttgtttacgagagttctttgcagctatactaaataagtgttttttgaagcatttgtgcaaggaaactgtagataatgagatgacttaaatactatttggtacgccattacttatcaaaaggttcattttggtttacatagtttcaaattttgtttattttggtactctattttcaaaaacaagaaccaaaaggtatatagaccaaattagtgtttgaacgtaatagatgaaggaagtgatgatattggagagaaccatgtggatggagaagtgttatgtgaaataggacctggtatttttttttttgaatgtaagatccactattgcaaatacatgtgggaatcttaaaactaagaaaagcaagaagcagtgtgtaaattgaatctacttctatatccactgaatatgtgaagcttgcaagagtgttggagagaggatctctgtttcaccgtgtaagaaattggtagcaatttttttctttaatatgatgataggtggattcgatcttttatattgtatatcataattataattaggtggaagttatgtcacagctaggtaggtttgtagcaacta

SEQ ID NO: 66305 - DNA, 673 bp, Cucumis sativus
  Intron number 1 from transcript Cucsa.321600.1 (locus Cucs a.321600) derived from phytozome v7.0 (chr-ID scaffold0308 0; pos 1406361 to 1407033)
gagtagtttgatttgaaggtgggtaactttctgttttttttttttgtctctgtttggataatgagttttctggatgaaattttgaagtattcaggttagtgaaaagattactctattcaaccttcttcatcattaactgggttgatttgtcttttttgttttgattttgatgtggtcaatttcttaagagaattttctacttttgaaaaggagaaaaaaaaaacctctgtcttctttgtttagacggtggcttatcttaactgtagtatgaattactttaaatgtggcatatttcttatgatgaaaaagattatattttattttaatggatctcgctttcagtttgtttacttttccaatataactatgtttttttacaaatataaaataatatttaacaatatggacgtgtggggaaggaccatcgatcataattcgtctttgtacaagttgggtttgtggatggcttctacgcattctgtcctttcctgtttggtcccaatatggctcttcttccatataaatggtgtcatagaagtctaccataaacctggttttgtagttgtcttgatttctgacaagccacataataaactattggcctcccagaaattgacattaaatttctgttgctgcagcgttgtaagcatttcatcactgcgaatcttaggat

SEQ ID NO: 66306 - DNA, 399 bp, Cucumis sativus
  Intron number 1 from transcript Cucsa.388540.1 (locus Cucs a.388540) derived from phytozome v7.0 (chr-ID scaffold0396 7; pos 925714 to 926112)
ctcttggaggagcttttgcaatcggaaggagaagggtataatcggaagaattgaggaaaatatttgtgcaaccccaatatattattttatttttcctaaaatggaaaaggaaaatttattttggggatttcaattttataatgttggattaatttgatttcgtttttacggttcttgtaaatttgttgtactactaaaaacaaatattgttatttgtttgaaatagttaaagaaaaattatgttcttttcttagttgactcaattgcatttgtttctaatgaacatcaaaactatatttatgatttaacttgcttggttaatacatactcatatatcccgacttgaaatgacgtattcaattaggacaagttataaggagtagacgtgaagagaattga

SEQ ID NO: 66307 - DNA, 793 bp, Cucumis sativus
  Intron number 1 from transcript Cucsa.355680.1 (locus Cucs a.355680) derived from phytozome v7.0 (chr-ID scaffold0357 7; pos 200193 to 200985 reverse strand)
atttctcaagctttgttagacaactcaacacttatgtatgactctctctctccctttctcgttctcgttttgttcttgttttttgtttttctctctctccctttcttgttctccttctcccctcatagctcattactagaatgtaagggaaaagaatttgaacttgtgggctgttgggtataggagaaattaaactacctgagatagctatgatgatgtagattaattcagtgatggggattgaacctattacttgtaaataaagggaaaagggcactagggcactggggcactggggtttaaatatttgagctatatactttttgcttcattttcttttttactaagggtcaatgtttaactagggttagctatctcttgatggcatttttaaattaaacctagttacctataaaacaagatcacattagctagtatcttcaattaccacctcagcattatctcaagcattatgcggatcgatcatgactcttttcgtaaaattcaacccctactacacctatatgaaaaagggacctaaagctaagtcatatgacttttgagttatatgtttaatgtgctctctcgtttgaagaataattccaacactaacaactctcgaatagaaatattatattaggagtgttagaatacgaattgattataaaaaatactgttaattaattttgtaatatgtagttttacgtattataatgtataataacaaattattgtgtaatactttggattttttttggctctggtagggattcaagaaaatagtagcagagag

SEQ ID NO: 66308 - DNA, 642 bp, Cucumis sativus
  Intron number 2 from transcript Cucsa.394030.1 (locus Cucs a.394030) derived from phytozome v7.0 (chr-ID scaffold0410 0; pos 116685 to 117326)
attcttgttgttattcctcttggttggtaactcttactatttttttagttatgttctctttcttctctcgatcatcccatttttgaagtttaattaattgaaattatagtagatttaatctcttatatccatacttaaacctcacttttttaaaattaagctcataaatgtcattttcacctctccattttgttagtaaactgtttttaaaagtcaaattttgaagaaggaaaaaaaaattaaaaaaaaaaactgttttcttaatttgaataagaactcatctgtagaagataaaaattaaatcatgccaaataatttaagagggaatagatcacataatttaaaaaaataatatggttaacaagcaaagtcttaaattaatggttttttttttctttttttttttaacgttaacagtatttagtattttgcttctaaaattaagtttgtaaatttttactcaccttcttctaccgttaaaaaaaaaaaaaaaccaagaaaattaatttccaaaagattgttttttttttttagaattgagctggtaattttcatgcgtaattaaaaaataataataagtaaacaaaaagaaattatgaaatgagagttaaatgatttgtttgggtgcaggaatattggcat

SEQ ID NO: 66309 - DNA, 844 bp, Cucumis sativus
  Intron number 3 from transcript Cucsa.367220.1 (locus Cucs a.367220) derived from phytozome v7.0 (chr-ID scaffold0362 5; pos 641170 to 642013)
tggcagggatcaccgacaagggtgttgtgcaactggtatgaatttgatattatcttagaatgaaataaaccttgatttgttattggagtatgagtttaggtggagttttgaactattgggatttctctaaattgttcatcgtctagaatatctgttgtttgtagttttggatattctagagcccatccaaaagtaaacaccagtttgagaaattctctttgtcctgaaatttcatgttctttacaggactttaggaggaagttttttgacaacattttcttgttctctctacttcagaaattttggaaatgcatgatttttggaagtaaggttccacttgttcttaaaaataaatcttcataagagaaaaaacaagaaactactttcaaaacatggtaattcataggtggaaattaactcacccaaagtatgtattctcaatcaaaatgtcatagacccaattccctaaaatcataaataaaagacttgaattcgataaaaggccaaaagagaacaagcataatccgtgatttaatattttacaaattttcttgccaatcaaacgtcgtaggtttaaccaaactatcttgtatgattagttgaagttcttgtgagctaatccattcatttgtagatattaaaaaagggaaaaaaactcaaatccctccacccacgtataaaaaatttgtatttcacatgtgctttcactctacttttgttctaaaatagactttttttttccacattttggtatcttacatagtgatatcacttccttttcctaaaactatattttcttgtgttccaagatttccagagccaactctttgcaaaacttgaacat

SEQ ID NO: 66310 - DNA, 773 bp, Cucumis sativus
  Intron number 2 from transcript Cucsa.322770.1 (locus Cucs a.322770) derived from phytozome v7.0 (chr-ID scaffold0308 0; pos 2411336 to 2412108 reverse strand)
gatctattggtattgtgattattatacatctctttcttttctgtttcctagaagaatcccctctttttttagcataaagttacctcaaatgcataaaatcgaatattttctatttcttttcaagttgtatggatcttcctttaggttccattgttttttatctatgggaggagaacttatagagatcctcaagatagcctgttatttgagctgtcagttatgaattactttctcagttacttgatggtggagttttcggtggttttttttcttcattctagtgtcaagcagttgtttcttgtcttaatgagtagatgaaactttcttgtgagccttttcactccgtgagggtattattaaggagtatacgtcacctacttttcttttttcttcttttgagttcccaacatgtggagctttggattttatctacttttagtaaaatggcctaaacctttgtgcttatgcatgtggtattcagcaattttagctagaactcagctgtatttttcttaatcataaacctaaaaaacccaagtttttaaaatttaagggcatgtttcacggcatagaagtttgatgcactcatgttgatctaatctggatacttgctgttggatcagtgtctgtactctttgaacgtgatcttacatgtaatggtattttgtagtataggatattaattttctgcgttgtttggctgccgatgttctaatgttttccatttgtaacttcaaggtgaaaatactttgccatttacaccacgaccaact

SEQ ID NO: 66311 - DNA, 845 bp, Cucumis sativus
  Intron number 1 from transcript Cucsa.338170.1 (locus Cucs a.338170) derived from phytozome v7.0 (chr-ID scaffold0335 6; pos 1159302 to 1160146)
ggaaaaagaagctctatataccgcggagtcactaggtaattctcatagtggaaaccgaagctggtgcgtttgattgctgagagttctgtttttctttctttcattttaaacgatttgagattcttttgcttacggattatcgaaaatttgatcggaaagtgtagaattgttgctcgtcgctcgcagactaatttgatactttgtgcaaaatttgctgtttactcatttggataagagtcgagtccttgttcatatagggagattttgatacgatgagacaaggatacgatcaagtgactctttgcatgggtgaacatttaagttgagctaatggctactgcagtttatgccatagtatcaagccttagttacgcacgaaaacagaatctgaactcgataattctcacgttggtgaaagagagagaaactgaaatggctaaatgatcaacagcatcttaagtagatctaggcataagaggaatttttcgtattgagctgatttgttgcaggtgtggtatataagaccataatgattgagttcgtgaggtgaggcaagtgctatttttaggcaagttacaaaatatatacttattgcgcattgtaactaatcatcattttgttgaagtcacccacctcgttaccttaccaagtcagtagatgtgttatcagatgttattatcacaagatgatcaactgttcttttcaactaaaagaattacttccttatttttatctagcgagaatcaattggctaacatttctagtaatgtacacttatttttttagttttacctttttctatgctgaactagcgcgtgtgaatggtttggtgatattaggcatag

SEQ ID NO: 66312 - DNA, 846 bp, Cucumis sativus
  Intron number 1 from transcript Cucsa.356490.1 (locus Cucs a.356490) derived from phytozome v7.0 (chr-ID scaffold0357 7; pos 1293083 to 1293928 reverse strand)
acattcaactctatcaaagcctttttctaagtcgagtttgagaatccacccttttttattcttggatctgtagtctttgacaacttcattagcaattaaaactggattcattatttgccttccttcgataaatgcacttcatgttggagcaataatgcttggcataactcttctcaacctctctgtgagtgctttagctattactttataaacaattgtggttagacttatgcacctaaggtcctttaacaacactgtatcctcctttttctgtattaaacaaataaagtttttcttaatacaagaatttagcttactattgctgtaaaactcttcaaacaactttaagaaattctctcttaattgatcccagaagtttagaatgaactctggtgtaaaaccatccggcctgagggccttattttaccccaacacttgaacagcccttttaatttcaagcagggagaatttcccttaatacagacaattgtgcgtgcaaacaagaaagcctaggctagaagcaaagcagcgagacaatgagtcacttaaagagtcatccctctctctcggaatgagtcactgaacataatatctaaaagagttccagtgatcaatgaacatccataaaagaaattagggaatgagttctcataagtactattctcgttgtaattgctttattgtattacatagtaagaattatagaatttgggtgtacaagttgtaacttattacacagaaacctaataaaattaaataatggtatatcaaacattttttagtttacctgcaaattgttttgtgtctcttctatgcagcctctttgtgagaaaggtgttgagaccg

SEQ ID NO: 66313 - DNA, 186 bp, Cucumis sativus
  Intron number 1 from transcript Cucsa.366470.1 (locus Cucs a.366470) derived from phytozome v7.0 (chr-ID scaffold0362 5; pos 84192 to 84377 reverse strand)
tctaaataattaatcttcttcttcttcttcttggggtgaggcaacttttgttttcacagtttttcttctgggtggtggtggtgttgttggttttttttttttttttattattattcaaatttcctttatggggatcttagatttgatgtgggttttcattttctcatcagaaagaagcttgtttta

SEQ ID NO: 66314 - DNA, 890 bp, Cucumis sativus
  Intron number 3 from transcript Cucsa.385820.3 (locus Cucs a.385820) derived from phytozome v7.0 (chr-ID scaffold0390 4; pos 1029647 to 1030536)
aattgcgattctatcaggtattggaagttatcatttgccagtcttgtccatcgcatccttgctatttcaagagcatatctataatagttcattgttgttaactaagcttgcaaagggcaattgagcaaaaaaactcattcacagtcgaatcctctaccttttgagatttgagagacatttttgtactcaaatgctaatttctattcacagtcatttctgtaataaccttatttatgtctatctgaccatggaagtctgttacattgcgatgttataggatcccaattcaaaacatttaggaacaacagtgtgggatgcatcactggtatttgtcaagtttctggtaatcattgctctacctttgcattctcatttgttattgaagtttctatttttcttacagtgtgtggatttatatgtattatctttgcttacaagggaaaatttgttagttttgttattctctgttaacagcatatgacaccctaggcaaatcgaacatattttgaagatgctttctatttgtgaaagtgaaagcattgcatgtcatttaccttgattatcggcagtgttgttatgaaacgtgagtttcagttctctttgatcacaagaagcaaatactaagagctgaaagctttgctgtattagatttttataaagcccctatgggcatagaatgtgaaatgtcattcaatataactaagtttatctatagtttactgtaaccccttcatgtgcaacccttattagattggatgtatttttttcatgggtagcgtgacttgtactgtaattggaatctggaagattatcattctttaataacactattgatctcttttttcactatttcaggagagaaactgccgaaaaggaaaatttagcccttc

SEQ ID NO: 66315 - DNA, 492 bp, Cucumis sativus
  Intron number 1 from transcript Cucsa.335580.1 (locus Cucs a.335580) derived from phytozome v7.0 (chr-ID scaffold0332 4; pos 112607 to 113098 reverse strand)
caaagtatatacattatcatctctagttattcattactcttaaaactgtgacttgttaccgttgataacaacttgtcgaaaagcatctccattgaaagtttttaaatgtttaacgttacatttttaccaaaatcattatagatttaatattttgacaattgcgacaaatgtttttctttttactgcttgttgttatagatctaaaacgaagctttctgaattctctacaaagagaggacacatttctatttggaaaaagacctttttcctctattttcatctctctttgttgcaattgttttttagacaatgatcattctacattctacgacacagcagtaattgattagttcaacatgcccaatttttataactttacttttattgaagacaactaaatctatttctagttttttttcttttcttttttttttttgatctcgtgatcgatatttgataattttatttgttcatgtatattaaacagtgttg

SEQ ID NO: 66316 - DNA, 544 bp, Cucumis sativus
  Intron number 1 from transcript Cucsa.388180.1 (locus Cucs a.388180) derived from phytozome v7.0 (chr-ID scaffold0396 7; pos 641704 to 642247)
aggtggtgaattatgtctgctttgcttccatttttttgttttttttgtttctctaaacgcctcacttaatattaaatgtttggtaccttttctctgaaatctaaaaaaaccttcttatagtagatttattagattagggatatacgtattacactaggattcttgtttcacgaggatattatactagttatataaaaccttttaatttaatcgattgtgatctactaataagttgtcatagtacatttcaaatgtattactgatatgatgtttcccaatcacattatattttaatcaaatcttcttgcacggtgtactttcgttcaagttaatgaaaattgatctttcaatgaaaaaaatattatgtttcaatgattattaaaaacatgtaggatagtaattattttaaacctgcgagtggtttactaattctatacattataatggaaagtggctgctatatattaataactcagtataaacttttccaatttgtgcaactgatgcagagcatccctccacaatctgaccttccaaaaggggt

SEQ ID NO: 66317 - DNA, 329 bp, Cucumis sativus
  Intron number 2 from transcript Cucsa.397710.1 (locus Cucs a.397710) derived from phytozome v7.0 (chr-ID scaffold0415 8; pos 134243 to 134571 reverse strand)
ctgcaattcaatctcctcggctattcatacgaaaggtagtctgatttccaatgccagtccaacagagattttcagttttattcttcctcttgatgtttgattaatttttgtgttttacatttgcgattgtatattttatttcattttatgaatgacaccaattttaagtttatgcagttttgaatggaccgtgccattgcttctaaccgtcagtaccattaaaattgcatatgcaaaccataccaatcctatgcaaaaatgtttttgagatgcttatagaagtctcattactgatcaggtattgttggattgtggagccgttcaagcag

SEQ ID NO: 66318 - DNA, 436 bp, Cucumis sativus
  Intron number 1 from transcript Cucsa.397710.1 (locus Cucs a.397710) derived from phytozome v7.0 (chr-ID scaffold0415 8; pos 134614 to 135049 reverse strand)
gctttggccacgctactcgtgttattgaggtcacttttcttcatccgttgatcacatttttaatcatcgttttcttttttcttatcttgttgaattctgattgaatatggttttttttttttattatagaaattatagtttttacttttcagcatggaacttttggccctcgagttttcaattttagctgaatcagtgatcaattttttttgtttattttccatgtttccgttgaatttcgattttggggttttgggttttacttgtgttagggaatggtggtatgggtctttagaatttccccatttttgtgtttgacacaattggtttgttttctttttcttttttcttcggcgatcatattctgattttcgaaaacgtttgatgtaatgtttatgtgaaaaggttgttcggcatcttatacttgctgggcacg

SEQ ID NO: 66319 - DNA, 953 bp, Cucumis sativus
  Intron number 1 from transcript Cucsa.311150.1 (locus Cucs a.311150) derived from phytozome v7.0 (chr-ID scaffold0299 5; pos 813818 to 814770)
cttcctcctcccgactacgtcctttcaggataaaggttctcatattctacctgttattcgttttatcctttttttttcctctgttcaataaatatttaaactgctgcatttttgttcatagaataatatggcaccaagtattttgaaaacttatccggtaatgatcaataatatatttctgttgcatttgaagagttacagtttctgtaagcgtttgatgttcgacttttttgttagttacttccgcttatttgttcgttttctaattgttttagagtgaatttttatatttgtcgcgttggtggtgtgtttgtcttccgatttttatttgctatttagtatgttgttttttgaattattttagttatactcttacattctgatttagagctctggctcgcgcatatattacttttagaaacttaagtgataacggtcgatacaatatccctagagaaaagttggaagagttgcaattttcatattggcttgtgtttggaattaatcaagttacactcttacattctgattccaaagtataaacttctggtatttgactttttggatttttctgaatgcgttgtgatggcttagtgagtttatgtttatatggcagtgtcataattagttttctatcagtctctctttgcagtttcgttggcatgtttatggattcgttttggacttttgcagcaaatgttagaaatggaattttatgaacattttaaaaacttatgtggtaatggtcaatcatatctcataaaaaaaaccattcaaagagttgcagcgtgaatgtctgtcagtgctttctgccatttgacaattttagttactccagttaactttctcttttctccaagtattctgcagtcgcctggtggtgatactgtgttattttgtttggcgtttgtgtttcagttgcagggcagcactcttcaaaattatactagcaa

SEQ ID NO: 66320 - DNA, 703 bp, Cucumis sativus
  Intron number 3 from transcript Cucsa.370300.1 (locus Cucs a.370300) derived from phytozome v7.0 (chr-ID scaffold0367 8; pos 14423 to 15125 reverse strand)
tcagttgttgaaggtaaccaggaatttcatgtcacttgtatcaaaaacattttcctgtataaacttgacctactttttgtattagtttgttgtactctgcctctgccattggtcgaactacatgaaaggtgctacatttggatatttgaaaactatggccagggtctcggatttagtgacaggttgattgctgctttgcctcaagctgtcatatctcacattgctcatgaaatgcaggaattgtgatttaacaatttcaaaagtgttggtaaactctcagtctcacagatgcatagttatatgcgatagttgatttaaacgcttctacaatgttgaggtccttcatttataggagccttagctccacaactccatttttcttgaaacatggaaaagaaaaaaagttgtagagtgaagattggcagtgtatttttcactgcattgggtccttaacttttggattatggtgggggttgggggagggtcttgactatttttcttcactggtttctctggtttgaatttgaatctttgttctttttacactttatctttgtacacagggacattgacttctgcgatttcatttttccttaaaattttaatggcatgtgtaacaccttttatttattattcaagggcgctcacatttcatctgtttagtgcagatattttatacactgcatcacttggcactgatact

SEQ ID NO: 66321 - DNA, 845 bp, Cucumis sativus
  Intron number 2 from transcript Cucsa.364710.1 (locus Cucs a.364710) derived from phytozome v7.0 (chr-ID scaffold0361 1; pos 2109625 to 2110469)
gtgtcggtacatattggaacccatactatcctttttagctttctgtttgattttcaaattggaaactcatttcccttcttctgccatttcctgcattttcaaatttgaagcctatcaacattaacgttgagggcttcataactccactatacttctattaattttaatctctgcaccgcgctctttttctctctctttttgttgggtttattttcaaggcaacattctgatttctgagtatgaatcccttcaattatcatctaatttcctaaatgcgaagattgtgttcagtaaacattttgatatttgaatgttctttcttacaaatatacattgttacttttcttgtttttcaactttcaagtttgaacttagttgagtgcttcttctctctctatggaaatgattgttttctaaatgaagttagttgaagttatacactcaaggggtgtttgggggcattgagctggttattatagtccgtgtgtacccatggtaggttatagtagttgaaaacaccgactgttgtaataggatctccaaagatggagtgaactataatagccgactctacacacttgaagttgcaagctgaaacacccacccagcgtcttttttttttttattgtgttgattgattcatggactttgaatgagtgaattcagtatttagtcaaaacgtgggtggctggtggtgtaatatgctcacaatgattattttaattgatataatgacttgatgatggattcctgatattctcactggttttattgattcctggtgtggggcttactcaattgcttgtgcaggtgtcgttcgagttttctttggatcagattttgtt

SEQ ID NO: 66322 - DNA, 680 bp, Cucumis sativus
  Intron number 4 from transcript Cucsa.312390.2 (locus Cucs a.312390) derived from phytozome v7.0 (chr-ID scaffold0299 5; pos 1811972 to 1812651 reverse strand)
caaccccacatcttggttcaagagggcataatcaggtaaacaatcattgttttatatgcttaaatggcacttatgctactgttatcacaagctgacatcatagtcataattgatgtagtaggattagagtaaatagaggtctcttggtcaaatccttgtttgaatagaattaggattaattttcttggttagctaggattaggatttgtttactagttttaggagtagttcgttttacaattctctacgaatagagaaattatctttgacttttaatcactaataaagactttgacttttattctcgattttcttttatctttcaggctacattcagaatgaaaaaaatttaaacactcctattgtgtcttgaaatagcatggccaaatacagattacgatactactattcaccatgttttatttgtttgtgctcaacttcgttttactattctcttgtgacaactaactcttttttcaaggaagatttataaacgaattgattgttttggtcgaatatatctaatctcagaatttgaagttagtttccatgtttaacaaaataacattttagttaacatacatcattttctatatttgctcaagactatagttcataatttcatagtcatgtatgtgggttcttgaattcatgaggaatttttcacgttttaggtccct

SEQ ID NO: 66323 - DNA, 557 bp, Cucumis sativus
  Intron number 1 from transcript Cucsa.312390.2 (locus Cucs a.312390) derived from phytozome v7.0 (chr-ID scaffold0299 5; pos 1813475 to 1814031 reverse strand)
gtctcgttggcaggtcactccattttcttatcagaatttttcgtttgttgttacgatccaagcagtttaagtcaaagttcatcaggctatgattccttccccatcagtattttcacttgcatttatctgggtatctgttttaatattagtcgtttgtatctctgaaattaccataatgaatccgttaaccgatgaatgatcttataatcaatggtgggtcgtattgttctacttcaattagttatcagaatattggcttgctagttgctgcagacaaattcattcatttggggtgtttgatagaacgtaatggaacagtgttataaaaactcatgttcaatcataagcgttttagatccaatttgtaatttaaaactcatttgattggaacagttttcaatctaactttctttttcattgtcctcgcactttccaatatttctcggatttccaataatcttgattagctctccaagcaattctgggtgtttatattgacagtttctttttctttcctttttttgggtaatgcatttgcagtgctaaagattggaaat

SEQ ID NO: 66324 - DNA, 399 bp, Cucumis sativus
  Intron number 1 from transcript Cucsa.318780.1 (locus Cucs a.318780) derived from phytozome v7.0 (chr-ID scaffold0307 6; pos 277828 to 278226)
gcggtacgtgttcaattttttgtttcttttctgttcattgtcttctcaatctgtttaatttcttgcgattttattgatctgatgccttagttctacttgttatcaatatcaattatgatttaagaatcaatcgccaattttcactcttctttcccgtaatttcttatgagctgtattgaggagatggaaattgcgttttttcggtgtcttaatggcaaaagactggaagtaaaatttcgaacgatgaaggaggaagttatgatacaccgaaacgaaaactgttgaaattcggctttgattttggttttttttttgttgaattgttaaagtttgtttgttttttttttcttcttttttgttgtttatggtggttacagacgaggacggtgagagttacca

SEQ ID NO: 66325 - DNA, 602 bp, Cucumis sativus
  Intron number 3 from transcript Cucsa.318780.1 (locus Cucs a.318780) derived from phytozome v7.0 (chr-ID scaffold0307 6; pos 278453 to 279054)
attcaaaaggggcagagacgtcgattctactctcggttgatacaattctctatcttttcttcttctattttgattatccttcttgatctccagatcttctgaatgattttatttgattattttccattctaatgtgcttatatttaaactttcattagaaattgattcctgaacagtagtaaatttattttgttatgaaaagtggttatacggggatgttacgttttgaaaattaaatagaacacagttttattcttcagagaaaggtgagatttaataagtttttcatacatttatgtataactcttgattcatagatattattctttcagtttcattctcaaacatctgaacaatggaaaacttctttttctgtccctcatgttaaataatttctttgctaccacatgtgaaagaggcatcttccattcatatcgattttcctttttctactccaatatttacattagtctcttcttcaaaccggagagctaagaaatttatgttataggcttcttcttgtttcatttgttatcttgcctaattaaacggttttgcatctctaagggagctacaattgtcgatcagccagtaagcatttc

SEQ ID NO: 66326 - DNA, 717 bp, Cucumis sativus
  Intron number 3 from transcript Cucsa.309470.1 (locus Cucs a.309470) derived from phytozome v7.0 (chr-ID scaffold0298 0; pos 193025 to 193741 reverse strand)
gcattcttggcagcaatccgtcaaatttcgtacaggtaggccttttcttcattttctgttttggtcaactccatgtttcagcgggtgaataatgtatttactggcctctcttattcacaaattctctgcatggaatcaatctaatccagcttctactgtaaaggattaatggagaagtgttgccaattaaagaaaatccacaaagtttcttaaccatttaataaagttctattaactatacttgagacctaatcctgttgtgttttctattttatgccatttgctgaaaactggctggtttctcttgggacccatgtctacaaagcccagcttcttcaagcatgtgactcttttttattggattagttgtttgcttcttatttgtgatgccagtatctgcataacagttgtgagaattaaggcttatcaattaatccagcctgatttttttcttcttttttgtcattatggtatatgtgcttctatttttttgtttgtgattttctgtttaaagaaattgacttgggccatgttactttaaaataaaatggttaaaatgtggaaattttgatgtaacctcacagttcttaccaacaaatcacagcacatgtctgtcaaatgagactttgagcatctggttttctgccatcctgagaatgtataatatattttgtaatctaatagatgctaactagctgaactgattctgccaccagg

SEQ ID NO: 66327 - DNA, 509 bp, Cucumis sativus
  Intron number 1 from transcript Cucsa.309470.1 (locus Cucs a.309470) derived from phytozome v7.0 (chr-ID scaffold0298 0; pos 194183 to 194691 reverse strand)
ctgattttcgacccaaatattcttcaatttggcgggtaactattctttgttcatttctgtttttttttctttttcaatacgtaaattagggttgaatcgaacgacctcttactgagtcgaatctttgatagtttctttgatggcacacagagatcatgctgaattagtaaatgacagaaaaacatgtttaagatttttccgaaattgtaaatagagtcctgatgaattagcttcggtgaactttgtgatcatcttatgatcggtacaatggttacaattttacttatttccaatgcagtctcctatttcctgaactgagtaagagggagtggaataatattgaacggtagcattacaaatgtattcatttcaaaagcccatatgattttttttccttctcggtatgttctgttttgcaatctgaacggactttatatatagggttggttcttcattgtgatttctttttttcagttgctgctaagatagttttggtggaagaaaagaga

SEQ ID NO: 66328 - DNA, 610 bp, Cucumis sativus
  Intron number 3 from transcript Cucsa.337500.3 (locus Cucs a.337500) derived from phytozome v7.0 (chr-ID scaffold0335 6; pos 583153 to 583762)
aagcgcatccgccatcttgctcgagttcttatcatgtactaaatctttcctccaaagttcatttagtgtagatgatatgtgatgaatgtccaaagtgaattttctgttgactctctttatggcacaccttcaatatgcttcctttcttttttattctgtccacatttgtcttcaaagttctatactttgctggtgatttgaattgttcactttgctcttcatttctttatggcaccttcaaagttctatagatcttttgtccgagttttatgtatggcttgctgcataggatcaacagagaatgaccaattccgaccattccctgtccgtcattttgtttattgagtggatgaagagcttttgtagctcatctgtttctttacaacttgttgcttactaggagaggcccccatctgccatgccccatcttctgaactttctcatcgtatagatatatccggtctttgataaagttcacattcataattcacttaatgcagttagtagataaggaagatatcattttcaagattcttgttgctgctcattgttactttactttgtttgagagtaaaagatctactttttgaattgcagggagtggaaagaa

SEQ ID NO: 66329 - DNA, 1067 bp, Cucumis sativus
  Intron number 1 from transcript Cucsa.394810.2 (locus Cucs a.394810) derived from phytozome v7.0 (chr-ID scaffold0410 0; pos 581475 to 582541 reverse strand)
ccaatttggttcattcaactccaattctcttttgggtacttcctcatataccattattgctacttgttttctgtcgttacgaggttttttttctttttttgtttcaatttcgggatttggcttgggttcctattcaatgtccagtcttcttcgtgcttttagagtattattgttattattttccttttggagacaggaaatgagcttttctgctggacattgttacttatagcgtctttgtgacaatcaatttcccgtttaatcttctgttttttaaagttaatcttgttatcaattgtctgttcctttcgattctatgcctaaaatcattctcaaagctctcaaattgttgtagaaacagaaagtgctaagcatatagttaatttcttggaaagagtgaactggaggctaaaactatttctatggatttgtgaggcgttcattgcttgatgctaagtcaagctgaattaaaaagattacagttttcaacttacaagttgccattgtgctaagtcgagctgaactaaagatattgttcttcggttttttctgggtatgtttctgtggatttgtgaggcgttgattgcttgatgcaactgaagttcatgtagattgagaagctatggaaagcaatcaatgccacaattttgaaatatgatcaaagtcccattccacatcttcttggaaataagatacagattcttcgaactctgttcaggatggaaaaagaagaatacatatcttgaattatcatttgtgaaatggatttataagctcaccattatacttgggaggatttcacacatctgattttaagttcattgcttacggcatccgatttacaaagtcacatatggtataaaaagggttgtaatttattgttttctttgatagtgggtaacaagctcatcaacactatcgctacatcaattgtttgtatgatttctttcaatgctgtaccagcaataactgtctaggtctattttgcttttcacttcatctacgcataacctttggcttaacttttagcagtgtgtgggttgtgcagaacgcttcgtcagagtagt

SEQ ID NO: 66330 - DNA, 832 bp, Cucumis sativus
  Intron number 1 from transcript Cucsa.363150.1 (locus Cucs a.363150) derived from phytozome v7.0 (chr-ID scaffold0361 1; pos 742029 to 742860)
ccctaagattattgcagcttcgtccagtcttcaaggttagtttttttctttttctctatttttctcccttaactctgtttttcttcgcagtccctttctttcgttttctctttctctgttccatctgtttgattgaaatgggtaattgcagaaatgtcatagaaatgaatttaaatgcctttgaagcttgattatattagtgaaaactcaaatcagtttgagggtaatgttgattttgttactttctacttattatttgtttggattttactgaagtttccaataacaaattagtagtattcttctaccagctgtagattgtgactctttccctaccttctcttcaaaggaaagtctctctctctctctctctcttaaatgggaccgaactgtaaatatagcaaagttagcagctttcccttttccttgcaaaatttggtccgttggatttagaacagttccactccaccgtcatgcagagaatagaaattttatgggattttgaaatataatcttgtgtcggctgttgtctgtagaagggacttgtgggggctttctttgattcttcgaagctcttctctttatgctttccccattttgtttttgtttcgttttaaattttttgatacctaactttaaagtaattccataagtaatttataatttacttgtcttatgattgcaactgctccactgcttttttctgattttttttttttccatttccccacatcgtttctttggtcaagtttattgctttatttctctgctggaggacacaattctgatctgaatttatttttcttttgattcctgtcttcatatcagaatc

SEQ ID NO: 66331 - DNA, 381 bp, Cucumis sativus
  Intron number 1 from transcript Cucsa.322820.1 (locus Cucs a.322820) derived from phytozome v7.0 (chr-ID scaffold0308 0; pos 2442656 to 2443036 reverse strand)
aagatcaggtattatatactatcttcattttttctttttctttaatgatttacatctatcaaacaatttttcgtttagttcattcacaaaagaaaaagggtcttctgttcttggtttttttctgttgaatgtttgaatctgttttttctttgaattaatagttctcccgattgaaagacgacccaaataactcttgccttattcctcttattgaacttcttcccctattcctcaaagttaacgattccatattatgtcaacgtaactatgttattaattattatatatgtttcatgtatttttcttttcaattctaatcttgttttattcatatctttgcatgtagggtattagaagggtgacatatactgaacgtcaacg

SEQ ID NO: 66332 - DNA, 950 bp, Cucumis sativus
  Intron number 1 from transcript Cucsa.322010.2 (locus Cucs a.322010) derived from phytozome v7.0 (chr-ID scaffold0308 0; pos 1819293 to 1820242)
gaattttgacgcccgcagcactggggccgaaatatgtaagaggatggcaaggtggggtcattagggatgatataaggcaatggatgttgcaaaactagaaaccaacttgattgttctctctacaagatcttaggacatggtgcccaactgaaaactgaagctgtggataattgagtgtctagatttgctgttctgcttcttgacacttgaagctttggccgataactggatcgcttagttcatgtataatgtcttgatacaaaaagaaaaataatagcatgaaactagagagtcgttagaggttgaatcaacttaagaaacatgtatgctttaaaagttgtgtactttttgtcatcattgaaaaatatagagaaggatttttggttaaatttttttattcccatagtatgtctattctccagaatttgagtcatcatatgtgcatgttttagagcttcgagaggacttatttttattaaaagaatacaattctatcccttcaaagacaattaaaatatcgatattttgaaactcatttcctcgatctttcatgcatatctaggccaaatttgaaatgtcgatattgataaaaatatcacggtcttaattttagaaaatgtaaatgttaatatttaaaaatattaactaaacatttaatccatttcttgaaaagttataaaaacaaataacactaataaatatttttcttgtttaatattttttttataatgttttgtcattttttacaataaaattaaaatgatattccattaaaattagaacaataagataaaataacaaggacagaagcgtgattttgaaggtctaagtccaaaaatctttatttttctcacatgggttaaaaatcaaatttagaattccaagttggaccattcttcggaaaaaccttcccagaattttgcctcattcctaaatccttccaacgtttt

SEQ ID NO: 66333 - DNA, 938 bp, Cucumis sativus
  Intron number 1 from transcript Cucsa.386720.1 (locus Cucs a.386720) derived from phytozome v7.0 (chr-ID scaffold0391 8; pos 276302 to 277239 reverse strand)
gtgatcttggtggcgcctcctcggctaaagcggaagtgagttcgattcttttaccgtttttttaatcttatcgtctcataatcggtcaaattcttgataatttgccccaggttaaaattttttctgattgcattgggatactgggttttgtctagctgagaaacgtttcgcttctgcctgaaactctataatctgccagatttctagattcttaaattgggtcatagttcactttccttgaaacctagttttcataaagatattacccattttgtgttttaaaactaagatgggtcctttcatcatcaatcaaatcgtgaacttttgtcaaatacgttgttatcataacctacgtgtcacgatatcttggctcaatgcataaaccttgatcactggattagtgaaaatgagtttacttactgtgcagctgtaagtattctcgaagtggtactcagtgagtcagtgttttataaagctctcccggcacatgcctaagcgttaggcgtaagtctggcgcttcttcttggaaaggcaagcttacgaaattaggcgcgtcttctatgaagtcccaaggttaaaaggttcaaagccctcggtcttggaacattttcattatttttataatatagtaataatggggggttcttttttctttaactataaaaaattaaacttactaatgttacgtgcaaaatttcttgtgcgaagggttctgtttttcttccagctttccacttaatactcaaaatgtgatatattgcaacttgagcttgttaacatttgcgatacttatgaattagcatagttcttctaattctaagcaaggaagatgctccttcatttctgttatgttactgctatctaactccggtttaaatagggcgatggggaagtcgttgggtgggacatgtttaactgcttgctctgttctatgtagg

SEQ ID NO: 66334 - DNA, 378 bp, Cucumis sativus
  Intron number 3 from transcript Cucsa.343010.1 (locus Cucs a.343010) derived from phytozome v7.0 (chr-ID scaffold0335 6; pos 5297126 to 5297503)
ttaatagagatcccaagttcacaaatttcgtcgaggtgtgaacttttttggtttgattctgtatgtttatgtgatggtacttgtatcttctaatcaagtgtgatgattacgggctagggaaatggctatcatttctggtttatgctggatttcttgttactaaacttgtgttccgatggagagttcgttttttactgttctttgttgggatttgttttgtttcagctgacattttttttagtttccctttttgggtatgaatcatagcatttgtttatgttgcacgtcgcgttcatctggtttttacgtaagctatagcttattccaatcttaactgctgtttgcagttccgaacacacaaggtcatctatagaagat

SEQ ID NO: 66335 - DNA, 890 bp, Cucumis sativus
  Intron number 2 from transcript Cucsa.360120.1 (locus Cucs a.360120) derived from phytozome v7.0 (chr-ID scaffold0358 8; pos 869954 to 870843 reverse strand)
tgtttcttccttgtcgctattgcattttctggggggtaagtgaatgccaatgcgtctagtttcctttcgaagtctcttgatcttctggttgcttaggttgtgtgtagagggacgacttagtatttgtcattaacattgataatcgtaccgtttttgtttgattagagaaagaagtaaaagtttacttggtatatatggacatcgttttcttgcatcttaagatagatttcctgttagatgatttagttaatcggacgtatatctaattgttagtgacagaaattaaaaaagaaaagcatggttggaaaattaaaaggccttggtgaaaacttcttttagcttatagatgattctatcgagtaattttcggaactgatttatttattacctctaaattcaaagacattcacctaatttcttgttgcgagcattaaaattactttctccaaatctccttattatcatcaactatattgacatcgcgctatttggagtgacactaccttactccgacatttctactcatgctagtttgatagcatttgattcttcttataaatattgcttttgtctattaagcattactagattttgtccatccacttttgactaatgtaaaaacttacaaccaagagtttaaaaatagaaaaatatttttaaaaacttgttttgtttttagatttgattaagaattcacatgtttcggtaaaaataaatgaaaactctaattaaaaatttgcaaagatacaagcataaatttaacaaacacgaagccaaaaatatcatcggtattgctgggacttacttttatgtttttaaagatttttcttctcttttacttggtaaataatctttaaaatatcattgccgcgcttttaggtttgcaagta

SEQ ID NO: 66336 - DNA, 616 bp, Cucumis sativus
  Intron number 1 from transcript Cucsa.316090.1 (locus Cucs a.316090) derived from phytozome v7.0 (chr-ID scaffold0304 1; pos 34930 to 35545)
gtttaaaggaggctcgtggagcacacgactgggtaaacttaccttctacaattcactaagaaacattttgatgttttgattaaagtatggtattgaaagggagggataaaactttttcatttggtggtaatttctaactcttgtaatgtatatccaaagcaagtttagagaacaaaaaagtcttaagataatatatcatatccaatgttctgaccacagtagtgatttcaagtcgggagcgttaaatttttcttagtaagtgttgggagaaacttagtaactgtgaaacttaatgtttttacctgggaagtgcggatatagtaatattgtctgacgaggttgagaaaaatgtaaaagtgaacttgaactgggtctagagcgttatacaaagggtgtatagctccggacttgcactgcaccggtgttctgggttaattgtatgaattacaatgtaatatatacacaaagaagaaatacaagaacggaggtaatgcacaatctatacggatacttttctaaacaatcacgaggaaatttgtttgtctaaaatattgaggccccattcctttattctattgcagaagaatagtgcaatcgcaggtgcggtgacgggcgt

SEQ ID NO: 66337 - DNA, 983 bp, Cucumis sativus
  Intron number 1 from transcript Cucsa.312030.1 (locus Cucs a.312030) derived from phytozome v7.0 (chr-ID scaffold0299 5; pos 1523071 to 1524053)
caactgccttttttgatctgagtgggaacaattctgtaagtccttaactatgacgctgatgctatagaactatcttgggttgtgtaacttcggagaatttttgtttggcagtgtttaagaatgcattgagcctttataatcatgtcttttgaagaatacaatactctgatgcaatagttttttttttttcatcaatgctaccgaggtatggatatttgtgaatgttcaaattgaagttaatctataatttgtagtgtgtacttagatagttaaattaggacaaatttaatcatttaatttacttgaaacacaactcttcacccctaaatttggatattgtttaatgaaatgcaaaacacaagctcttagaattccatagcattatttgaggttcaaaatgagacaaataagcacactttattagttcattcaaaatgaggtagaagataaaatctaatgatttgtatggatgaaattgtgaaaaaatgattatttttgtgatgtatgcttaataaagaagcttgatggctgttcagagaactggtatgcggacatctttctgtttttaattttcattttcttaaaaattatgattaaatgactatttaagaataagattattgtacatattcaaatcactgttacactgaaatgcaaaaaaaggaaaccagttatctgaaggtatatttacagaacatgtatattttcttacacaatatttgttctgaaagatggaaaattgttttcaaactgtttacaaacaacctcgtggatttatatctttgtcttggttatgggaatagatgcaatcttgcaagttctctttccaattgcatagtttaacatctaacaggttgatggcctcttctaatggttatatttattcttgaagcctttggacttgatgttttaccccttcctgatacttcagattttcttcatatgtaggggatcttaattaaaacacctgttcagtggcctat

SEQ ID NO: 66338 - DNA, 688 bp, Cucumis sativus
  Intron number 1 from transcript Cucsa.317130.1 (locus Cucs a.317130) derived from phytozome v7.0 (chr-ID scaffold0305 1; pos 451 to 1138)
caacgcgccaccgtaaccatcggttttcactcaaggtacactcctttatctatctttcacaaccactatctctctttcaatttcttactcagatccgttagttcttgatatattcacttttttagcggttcgtcttttgtaaaacccattccttatttgttatggcattttgatatttcataatactgtgaagatcaaatgttttgggtatgatctctaaactcttgcctagtgtttgattacctcgtatttcttgttgttcttgcactttctttcatttattttctaaccttgactgcatttcccattttcattgtcttgcatttttgtccattcaaaaccactcacatatgaattcggtgtttttttttggggggataatttagcaggttttgattataatgtattagatttatatatagacactggactttaactggtggcatgcttcgatggagtaaataatgattaataaatttatgcatttaacacgatgataatttgccataatatgtatcgtttacaaacaatttattttaacgctataataattcattaaaactgaaagtgttttttctaagatcatctattgtacagatatagattatcttttattctctaaatccaaaaaggcgtgttttcccaattgatagctcggacgacatttcaaccttcaacagtcgttgat

SEQ ID NO: 66339 - DNA, 638 bp, Cucumis sativus
  Intron number 3 from transcript Cucsa.317130.1 (locus Cucs a.317130) derived from phytozome v7.0 (chr-ID scaffold0305 1; pos 1511 to 2148)
ccagggttgttgatcaggaaaaataccctcatgtatccagacgtgtttatatttatgcaatatatttgatcaattattttgattttctacacttgaggcgaggccaactttgattttgtttttctttgtttaccatttctcataggcaccccttttcatttctgcttcttttgtattaaggttactttgattcatttaattagaagattctctctagagaaataaagatgtcttaaccattgagtcattgacattgttgttgttgtttttatttgatgatttgaaggggagggtaacggggtttctatttgagttatcttcatgttttctcttgttctctttccatgtccttgctatagatttcccatattgtaaagaaacacctcaattcttagttaaattctgaaaagagaaacaatttttttgcaaactactttatgaagatggtagtggaaagacagatgttggttgttgattattttaggaatggtatagattcttgtttttccatgatgttaagtcaattatttcacattttgtcagctgaacatgtaattttttgttggtggtcattaaacttatgtagttcaaatttgtcttcagctttctgtgagaaactgtttcatcaggggatcagt

SEQ ID NO: 66340 - DNA, 835 bp, Cucumis sativus
  Intron number 1 from transcript Cucsa.327900.2 (locus Cucs a.327900) derived from phytozome v7.0 (chr-ID scaffold0315 9; pos 203868 to 204702)
ttctgactgtgcttaagggttttgcaggatctgtggtatatgcctacattttaactgtttcttactttttggtcaagtgatcggtttttgagatgggtttttacgctagaacttagtactcagctcagctgggatattcttcttgtgttcctgtgtgggttttttactgtaaacaaattaaatcaaatcacaccactgtatgggattagtataactggttgttttgttttgaaattgatgctattgttaatggcttcatgtgtcttgtgttccgtttttcaatgtcttgtttgtcttggtataatctttttgtttggagatctattgctcttactatatcttctttaatttcatcacgacagctttaggccttgtcagtatcttcttcatttaggttgggatttatttatttatttattcagctggcagtctttaccacagaaacaggtcttgtggctagtttttccaatatatatatattataccatcgtaaaagaatattattattatctcagacctaactgttgaaagtatgagtcgttagataccaaagttagaaaaacccatgaactgttacgactaagggaattaacatgaaaacatggatcaagtgtgatgttcaaacatcaagtttgatgttttattatagtagaggcttgagttttacattttaactcgagatttctttggatacttgataggactatttgcaatatatgagatccttcagccatcgattttcactcatttatgttctcagtcttctgatctttattattattctttttcctggttgtaaggcaagcttctgagttgtgacatttcaaagaaaccg

SEQ ID NO: 66341 - DNA, 866 bp, Cucumis sativus
  Intron number 4 from transcript Cucsa.363500.1 (locus Cucs a.363500) derived from phytozome v7.0 (chr-ID scaffold0361 1; pos 1045307 to 1046172)
catcaaatttccaacacttgcaaagtaagatgcatgttcttttaccattaaggtttcatcaatgtggtatagttgatggtgctactttgctcttcaataaaagtttgatgctacattagaatttaggtaagaaatttctatagctccatataaagccttggttgacaagattacaaagaagtattatacaattttggaagtgcaagcactcattgctcattctatggacatgtttgtacacaccagtaactttagttcatatttttagcatttttgtatccttgaatttgggggcccaaagccatcacatggcaattgctggataggcacttactaatactatcattccttcatatttaataaatctataacgtaattgcataacagcagatcctgtttgtattctaaattgtcatagcgctcaagatctctatttgattttcatgtttcttaaacccattttctgaaattgttgaacatgcccctcttttagaatcaattaccttatgaatttgaactaaagattacccatgtgacatcatttagggaacttaacaaagtgattttccagtcattaaaagttatggaggcgagactcttgttggaaaattattcaatgtggcatgacagccaccctctaaatcattagatgagtggtgaaattgtatcttttagtttcacctctatattgaaaaatgcaaagcccttggccacattgtaccaacctcatttaataatctttccttttagcggtagacgaggaagctcatatttcagtttataagagggaagttcatttcttcacagtttatttttgtagtgatttctcaggtacatattggagtctgcaagttttgaattgttct

SEQ ID NO: 66342 - DNA, 928 bp, Cucumis sativus
  Intron number 5 from transcript Cucsa.393860.1 (locus Cucs a.393860) derived from phytozome v7.0 (chr-ID scaffold0410 0; pos 18474 to 19401 reverse strand)
aggggaaggtcaagaagccgcagtccacgttcaaggtgagagttcttgtctaaatgcatatgaactcgtatcagagttctggtgaagaattttatatgttcttgaggtaattgaattaccctcatgtaattgtgaatccaaacaaaaattcaatgtactcttttgcacagtcatttagagagagagaggcaatgctatcctctctggttatggattctatttccttggtagttcatttaggatggtgacttgcctcgttttttctgctttagatttagctatgcgtattgattttaaggcaaggatatggtttctcttgatattgcataaacaatatgaatttttagaaacagatgcattttgcaaaatgtacaaactataaggatatgatttgtaaccattccttcatttaacgtctgatgcatgaaggagttctgaaataccaatgctgcaatactgtatgttgcatcatgcaattaagttattctagaaagtctttttctttttttcatgagttggttcataaatgtaattgcttctggcctcgccttgttatttgaccagcttagtggttatacaacgttttgtggattgcagataagatataaacaaaaggagtgatgaaattaagatggtctgttgcttgaagcaatatattgcaaatacgaagtcatgctgcttatttttctttttctttttttttgtgggatcaccaattcttatatgaagctaccttggatttttttctgaacttgtatttgattaattggttatgacaaaaaaattatgggataaggaacgagtggttaataagacttgtcttaaatggaatttcttatcattacaggcagttgattgtaatctcattgttgcaagctggttattctacccttctcttatggattgcaaaaacatttcaggcaccgtg

SEQ ID NO: 66343 - DNA, 717 bp, Cucumis sativus
  Intron number 1 from transcript Cucsa.350730.1 (locus Cucs a.350730) derived from phytozome v7.0 (chr-ID scaffold0350 4; pos 202422 to 203138)
atattggaatttcaggtactttctgttctctatccagcttcttttgaatttcttatattctctccagaaaagtataggatcttcaggattatatcaggctgttcctttttcgtcgctcttttttttttttcttttggaggggggattggccaagactatatgggagagaaaaattagatgtcagcagcaacttcaaagcttttattcaattatccagcaaaaaactgcaaaaggttgactttctagcagagtgatttagctaacatacaggaaataaacaaaccacaaaagttataccaacttcgagagacgatggtgctaaaaagcacctttcgtgattttgtgattttttctcatgaaagtaatatagaataactccagaggacctgagcaaatgaatccctacagcccgttgcattttgttttctaaaatcaagccaatagacactacttttattttcatctttcattctttgttacctatatttcaacaacggttaaaaaattcacgccaaattttcaaaactaaaaagagtagctttcaatggttttgctcttgaaaattagcaagaaagatgcaaatctatgtatgacattgagatgtaatagacttaatttcaaaaacaaaaacaaaaagggaaagggttatccaactggcctttcttaatagaacattttgtaatgttaagttaatgatcaacaggtggggtgacatcg

SEQ ID NO: 66344 - DNA, 280 bp, Cucumis sativus
  Intron number 1 from transcript Cucsa.319440.1 (locus Cucs a.319440) derived from phytozome v7.0 (chr-ID scaffold0307 8; pos 158649 to 158928)
ctaccttttcaagtacatcatcattggtgatactggttcgtcttcctgtgcatgattttttcgttttcgatctgattcctcaattgggtcgcttcgattttccctttatttttgcttaatctacgtgattgatctgtttctctgatttcatgatgtgaatccttttctgcttccgaatttactgggctcagctttgaattggatgctgtttgctgtttctcgattgattgcggggattgaaactgaattctgttctctattctccaggagttggaaaatc

SEQ ID NO: 66345 - DNA, 1027 bp, Cucumis sativus
  Intron number 1 from transcript Cucsa.310820.1 (locus Cucs a.310820) derived from phytozome v7.0 (chr-ID scaffold0299 5; pos 563185 to 564211)
cttctgctggttttgattttgttgtcgctcctctggttagtattcttccagttttgttctgtttttatttcgattcttactgccggaaatgatgttcttaccttaactacctgagaagtgatgttcgatgattgtttttttttctcttcgtggccaggaagagcgctgtttgtctgtttccttgaaaaaaaaacggagaacgattgttgaatttccattttgttgttgttttacattgtttcttgttattctggtggctaattagccagtcacacgccggcttagtagctgtttgttctgtgtgaatggtcagtaagttcacctaaagcaacgttgtttgacagccttcatagtgaaggtagatcgtgtagtttcacttcaaggctgtcaaagtacatgtctcaaatcatgtttaattgtatggctgaatgtacagcagtaatcgtctgcttcaataatataagaaggatattatatttgatacatttcataagtggatcacctattatttttgtgtttgataactgatgccatttccttcattgttgttcttctttacatctatttactgctatgacatagaggttgaatcgtcatgtagctgtggaacagtaaaaattttctgcatgccagacgttaggttctagatatttggatttatagttttgttattatattcattagaaaacgttccatccatcaatgtaatttgtttgattctcctcacctgttgtacttatggtggccaattagctagtcacacatcagctcgtagctgactttttttgtgtgaatggtcagtaagctcacctaaaacaatatttattaatggtccgtgcagtgaagatagatcatgcagttttcacacttgggctgttaaatacattttgatgagttgtttttaactaattgttgggatgactactcaattttatggattctcaaatatgaggtgtagatatggcttgtgaggatatttaatttgcataatttcataaaatcggtttttggttaaatgttgcatcag

SEQ ID NO: 66346 - DNA, 810 bp, Cucumis sativus
  Intron number 1 from transcript Cucsa.355890.1 (locus Cucs a.355890) derived from phytozome v7.0 (chr-ID scaffold0357 7; pos 438073 to 438882 reverse strand)
actgttgttgttgtttttgaattctcagtaggtatgattacttctttttatttttatttttattttttaaacttttggctttttgacgctcttctctcgttgttgtctttgaagtttcagtgagtgttcatcgctttttacacttctttttacccaacatctaagaataaagcttaccccatgtggccaatctttttttaattaactcatccaagaaaaacaaaattcagaaatctttctccatctaccaagattttactggtcaaaagcaagttttatttgcttttaacctagttagcacaggtaattatgtttaagctttagacacattctttaagaaaaaaagatactgttaaacaatgttttgttagctaaatatactatataacaaaatttggttgtatatgatcagagctgcccttaaaaattaaaaatttgaacaactttacagtatatgatggaccacaagtgatttttgaaaggattaaaaaccattttattgttttcaaaatttgaatgataaaatacacattttggaatgattttaactgtttgaaaatgatcccttatcaaatatgtcaaaaacatgtttgttaagcaaaacactgttaaattgaatacactggaatgtaataaaaatgtgtttgaaaattttcaaacttattttaaatgaatggaagattgaaaaatatgagtttgatatgtgtatatagatattgtaaggaagcaatgcacaatgcatattatagttgtatgattgaaaaaataatgacaggagcaacagtgggaaaagggttgaatagggcattt

SEQ ID NO: 66347 - DNA, 960 bp, Cucumis sativus
  Intron number 1 from transcript Cucsa.120770.1 (locus Cucs a.120770) derived from phytozome v7.0 (chr-ID scaffold0099 8; pos 2811241 to 2812200)
tagagcaagaagaagatttagtgatccgtcatcgggtaagtcttccttttagaaaaagttctaaaattttgtttgtggagttaatgtttcacaatcttaattatttgttttaatgtttagttgtaaaatattttaaagttttcttttttttctttttacaatgtgtttaaatcttttttagtcaaaaagggtaggatgttttctcaccagtttaaagaaaaaaagacattattttaaactctatttcctataaaatatttggacagaaaatgtttttgagcataacaaaactcttatacgattttctaatattaaaaaatgatgtatgaatttgggatttgttggaacaaagcattttaaatacttttttattacaaaagaacaaaagataaaaacagtgaattagtttaaacatacctttctttcttagaaaaaaaaaaatctatgtattcaaacttagagagttattattattactattattttgttggtattgggtcatccattattgacaaaaccctattaatgagtatttctttaaaaaccctctcttttacttcatactatttttcttttctttttactcatttttattttgaatataaattacaaaacaaattttacgagtgtgttcaattgttaattacgtagtttttttattcatcattattattattagtatttgtaatttctttaataagattttaacacctatctctatggacgtccatattatgtcaatgagtaagctttataactttacatcttttaactaaagaaataaagatgccgaaatttattctatttaaacgtgggaagaaaaaaacatgatattcgtgagtgtcaaagtctagctacgacctcttattcgttattgacatttttatgtttgatggttaattatattttatgtttgataacgtaggaattgagacagagaattttggaaagttggggtcc

SEQ ID NO: 66348 - DNA, 487 bp, Cucumis sativus
  Intron number 2 from transcript Cucsa.123960.1 (locus Cucs a.123960) derived from phytozome v7.0 (chr-ID scaffold0100 1; pos 22084 to 22570 reverse strand)
cacatcaggcactccatttttgttccctaccacaggtaccatagttttgatgggttgtttgagctaataataaaactttgattggaatgccttgaatgtattatttgttactttgaacgaccaactacagagtcttcgctaacctttgagacttttcttgatttgtaatctgatatttaaactgctctctacctacataaatgtctttgttgattctctattgtttacgttttttttgtttatctttgattgttgatttcttgtttaacgttgtgattagttttagttttttctctttccaaaatcatgtcaaattcactcttaatgtcattgatgtaccattttggacttcaatgaaattttgtgatcaatgttactgaaagtttggtgtattatgttggattttaggttatgttaacaagaaatgtttagaaaactaatcacatttctccaacaacttcattacttatggattaggtactggtgc

SEQ ID NO: 66349 - DNA, 696 bp, Cucumis sativus
  Intron number 2 from transcript Cucsa.132110.1 (locus Cucs a.132110) derived from phytozome v7.0 (chr-ID scaffold0103 7; pos 159202 to 159897 reverse strand)
tctcttggagaattatagtgcccttaactttacaggtacaattccttcgttaaccttctcatttctactttttgacaaattctctcaaataaggtatgataatagttacaattatatcttcaaaattgtaaaaactaagcctccaaatttgctagaaattgaaccccaaatgtcaattgttacaatttttatcattatataaatttgagagtccaaatttagtattcatataagtttgaagactcaatttttattatagaaagatcaagaatataattacaatcatcattttctgtaactcgtttttctgtttttctttgcctttcaatcctatccctatatccctatgtactgattggttggcaattggccagcttgaatgtatatttataccctcttgcagtcaagtcttgaatatgacatcttttgtcgctttctttgggttttgtgaaatatcaaattatgtggtattgatgaactttatgctattttaatgttcttacggcacataatcatatctttaatattttagacactccaaattgtgaccacagactgttgaatcaattcctttatgcttagaatatgcttcggtttcctttaaaaaagaaacacactttataatactaaagaaattcttcactgctcacaacttgcatacgttttttataggtcttgtgaaaatcctaaagaagt

SEQ ID NO: 66350 - DNA, 541 bp, Cucumis sativus
  Intron number 1 from transcript Cucsa.132110.1 (locus Cucs a.132110) derived from phytozome v7.0 (chr-ID scaffold0103 7; pos 159963 to 160503 reverse strand)
ttgaaaaggaggaagagtatatcatcagattgaaggtgattttcttgttccattcttgttttcaattttcgttgtgatctgtgtttcgatttgttctagagagatcaaattcaattagaccttggattttgttcgttccgtttgcaattagtgaggttgatatgcgattcgattctggaatttgacctagccacatgaacgagaatgaacacctcaaaaatctgatttcttgatgcccttgggtcgatttaggcatttaatcctgttattttgtttaacaagattttcggagattgattgttcatgtatgcggtttaagtcgaggtgtagagctttttgatgattcacattcattcaaggtttcgagtagaggaaaatctttggattaagaaattttttccaatagaagattgaattgttgaatttcatctcttctcaagttataaccaatgatcattacaggtccatgctgatgaccaaattgcttccacttttgtttttgaatataattcaggagctacaagatagggtaggaaaagca

SEQ ID NO: 66351 - DNA, 633 bp, Cucumis sativus
  Intron number 2 from transcript Cucsa.061990.1 (locus Cucs a.061990) derived from phytozome v7.0 (chr-ID scaffold0065 3; pos 74991 to 75623)
ctccttcaccatacaattctcttcaggtttctaactctttgtattgctttaatgaacttcaatcattttcgttgtgtatggaagtgattttaaattcaagagcgttttgaaaactgagttgatattgtagtatgttgattttaatagttagtatttgaagttgtagctattttagatcggatgggaagtagtaaacattgtagcaaagagagaaacaaaggatgagtaagaaatatttaacaccgcaggaaagatcgatataaaatagtaacatagtagttaattgtaagttataatcgtttgaaacacccattattaccggaaatatggactgagctctaatagcaaacacccgctacgtagtttatgtaaaaatacttcaattataatcacttttttagtgctttcctaacaaatatgtgaaaagttctttataagttcttcataaagaatatcttgtattagcatttttaacacaattcagtccaattataatgattttgaggagggaagtacttttgagtaaggcacaagtgatttggcaggggttgaagtaaaggtttagattgcgactgacttattttggtacattttgcagagcaaattctttgagacctttgctgctccgttcac

SEQ ID NO: 66352 - DNA, 393 bp, Cucumis sativus
  Intron number 1 from transcript Cucsa.158740.1 (locus Cucs a.158740) derived from phytozome v7.0 (chr-ID scaffold0114 2; pos 838223 to 838615)
gcctgcttccaaatcccatctcacttgtacattttatcttctatccatatataattttgcgtgcatttttcatctatattacaacaatttggactttttatgacagaaaaataaagacaaattaggagagagaaaagtctgcaataaaacttaaactgactttttttctgtgaaaaaaacaattcgttatcaaaattttcaaaatttactaaaaatttttatgtcacaaatttacgatggtataaataattatcattaaagttggattataacaagctagattttctattttgatagcacgttaatttgattgttgaatttaaacttattctaaatcttttattcacattcttaacaggatttcttccgggaaccccatcgaaggcagtagct

SEQ ID NO: 66353 - DNA, 937 bp, Cucumis sativus; identical to SEQ ID NO: 63557
  Intron number 1 from transcript Cucsa.118660.2 (locus Cucs a.118660) derived from phytozome v7.0 (chr-ID scaffold0099 8; pos 528708 to 529644)

SEQ ID NO: 66354 - DNA, 467 bp, Cucumis sativus
  Intron number 1 from transcript Cucsa.196620.1 (locus Cucs a.196620) derived from phytozome v7.0 (chr-ID scaffold0135 7; pos 216679 to 217145 reverse strand)
cgatcagcgtggtttctgcagccccatactactcggtacgattcatgataggacacatggttttacatattgttccaacaaattatagtttaatttagaatctgataaagtcaacaccggtttcctctatttgtttattctcttttggaggctcatttttttcttttttttttgaatagttgctccacatgcattgtctgaaatcttctttaatgatatggaaggactgagaaacaggaacttatatgtatttatttgcaatgtcgaggaattaaaacatgttcctttgattaaattggcacagttagttagttaggtctttcacatagtctttgaccgatacgaattgataacacattgctttcgtgtgggaattatgaaattgtttctgttatctttaactgctatgaatgttagaaaatgattgagtgaacctaatttcaaatgaattgcagtcttaccctttg

SEQ ID NO: 66355 - DNA, 873 bp, Cucumis sativus
  Intron number 1 from transcript Cucsa.053580.1 (locus Cucs a.053580) derived from phytozome v7.0 (chr-ID scaffold0058 1; pos 604600 to 605472 reverse strand)
tcgttccgaggcctccgacgggtatccttctttatgttcttccttttatcttttctttactttaaactcaactgggtatcaccttttttcaattggggtttctgggttttcttccaatttaatcctaatcatgtttatctcaatattcttaacccctgcttcaagtgaatcctgcatttttctgtattttgtgaccttaatttctttctctcccctcttctgtgatggggtttagttttgtttcctcaagaatggtgttttttgttttctttccttttttttctctttgaggcatagttcaaaagattaaaagagtactgtgtattcagatgaaaaaagttggactagaaagatcctgtctttgatttaaggttcttgttttagctcagaaagctttgatttaaagggaagaagtcatgatccttactgatcaggttttggtggtgaagggtggggtctagtaagtatatgggttatgattttttgccagtctgttgatggacttctgtctcctttgagttctatgattttttaaggaaaatttcaactcaagattataaaattagaatctattggggttctcaggattaatcatgatgttctgcttcttagtcaaattcaacttttggtaacaagaagagaactcagtaattgaataatgttatagatctatctcatggtttaatttttaagggcttcttctgctgctctattttgttgaggattcttactttgttggcatcatttcctttgaaatctactgatttggaaatttctactcttaccgttaattttttatgcttctttcatggatctctgcttggttgtttgacattaatgaatttacctttgtagcaaaacactttatctgca

SEQ ID NO: 66356 - DNA, 527 bp, Cucumis sativus; identical to SEQ ID NO: 62092
  Intron number 2 from transcript Cucsa.130130.2 (locus Cucs a.130130) derived from phytozome v7.0 (chr-ID scaffold0102 9; pos 98124 to 98650 reverse strand)

SEQ ID NO: 66357 - DNA, 596 bp, Cucumis sativus
  Intron number 2 from transcript Cucsa.136620.1 (locus Cucs a.136620) derived from phytozome v7.0 (chr-ID scaffold0104 4; pos 1216304 to 1216899 reverse strand)
taaatcaattggtggacttccggacacattttgtggtaaaatttgtccatgttttttttcttgttagtttaatgatatcttattaagtatacagaagaaatttttggctaaaagtgcttttttgtttatataatgtatttgttagggacaataaaccttcagatatctagataattatatgatattgtctactttagacataaactctcatggttttacttagaagaccttatactattggatatagttgttctcaatagacccgggatcatcctcatatctagcaaatgtgaaactttgatagtattccgaaaggattgtattatgaacattaaggatattttaaatataatgtggtttgaactgtttgtttgcttctagattttggttgtggtaataaaaaccctctacgaaattgtgaccatcactggagcctaacaagtgaataaatatttgttagcgagtcaatgactttagagaggttttaacttcagatgttttgctcttctaccatgttaaatacttgaacttagaaacttaagttgttgggttacggttatattaaacacttgtggtgttggtgtatgaataggtgg

SEQ ID NO: 66358 - DNA, 843 bp, Cucumis sativus
  Intron number 2 from transcript Cucsa.075920.1 (locus Cucs a.075920) derived from phytozome v7.0 (chr-ID scaffold0078 9; pos 453001 to 453843)
tacgaagaaacctgtgccaaaggcctaaatattaggtttgatttcttttaacttctgaaaaaactttgagttttagaacttatattctgcctctgttgcctccactctctatagtacatgagaggcgcaacttcgttagaattgtctcttcaattaatcgtgttttttttccctagagatcatttgaatgttgactattctaatttgcatttttgtttattctgactctaggtgttgctatccatacttgggattttttttgcaatccttcaatcattacatgttgataaggacatttatatgacatccccaatattattttaagatcaatttgattccttcacagttcagtcacaacgcaaatggtggatgtacgtaattactccaaactatttaaaattgaatattaacgagtaaacctggatatattatttcaaagaagagaagtggagttttcattttgctaagattaagctattgtagttcatatatttgtaagttcacgagttcaagttttaatgttgcctcaggatatgtgtcctctggttttcttaacttttttgatattgtatggctatgtaagggtcctacaataagagaatatcggtgtatcatcagtctatctacaactacccatgacatgcctcaagtgaatattggttttgttgctgttgcacgatcctcttgcaatgtttattctttactatgttcataccattccttacctattcttgcatttaaatgacttgaagctgctgcagcactagtactctgagaaagttatgcttttgtttaacattctttccccaaaccatgaacagtgtggaagaagcaaaacagaag

SEQ ID NO: 66359 - DNA, 687 bp, Cucumis sativus
  Intron number 2 from transcript Cucsa.174140.7 (locus Cucs a.174140) derived from phytozome v7.0 (chr-ID scaffold0121 9; pos 99360 to 100046 reverse strand)
gttttggtacagttttgttctaaacaatatatacttaaatagtagtagtattattttgtgttgggatggaccataccttcagatggtcacatattttatgttttatcattcatgcaagttacatgcgagcctggtgtcacttagatgggaacattgttgatcttacacttttcttttaatcgttgattcttgactgctttattttggttttttttaattccctaaggctgatcttacttgtgaaatatcctgaatctcatataatgtccagtgtgttatcctagaattctgagttactttcatgcattagggttttgtttatattacttttggttagttatagtgacatctctgtttttgttgatatatgttagattaaactctcacatcttacttcaggcttcttagggctgaagaaagtttaatatggtataagtaaaggctgagtactaatcaattttctttctgagaaaaatcccataccacttttctttggtctctttggtttcaatcatgtatgttgttgcgatgcaactgacctgtgaagtgtttccactcatgctttttgtggttctcaagtgtttccattcatctaaaagaagcattgttaaactttaatttctctgtatttctaatgaattatccttgttaggtcaggtagtggagaagaacaaggagttagaagca

SEQ ID NO: 66360 - DNA, 725 bp, Cucumis sativus
  Intron number 1 from transcript Cucsa.032910.1 (locus Cucs a.032910) derived from phytozome v7.0 (chr-ID scaffold0042 9; pos 2165236 to 2165960)
tgccggcgtgagctcggaaatctcttcatcttcatgtaaatttctgttttattgtttatgtctcagtttttctattttggtttcctacaaatttctctctttctcgcgattttcctgtgtttgtttgcttgtctgtaatgatgacttcaccatcttcttcgttgtcgaatgatcgtgtagttctttaaaacagagcgtttgattgggaataactgtgaggaaagatcgtattgcaatacgaaagtgagaaacttagattcgttcgtttatattatttacatttttttttgagagggtaaatccagtctttcttgtgtcttttttggtgttcccgttgtttttttatgcactggaagaagggattttagttaatcaattctggctgtcgtcattgttgtgcgttacgagatgatggcgagtgggttagggttttctacgaaacttgatttagtagcgaacgcgtggattacatagttttcttaatggattgaactggtgaagctatcaagtggttatgctgagacggttttgatctgcatcttgccgttaatcttgaaacttcattcttgttgaatttctatgatattccatgaatcaaccacaggactgtttgtgcccttttgcatcttccttatttcttggatttggttttccttcaagtctctttttgatgtttccttgtttgtgcagtttggagatacaacattttattgtgttgaagaaaa

SEQ ID NO: 66361 - DNA, 253 bp, Cucumis sativus
  Intron number 1 from transcript Cucsa.161710.1 (locus Cucs a.161710) derived from phytozome v7.0 (chr-ID scaffold0114 4; pos 1542044 to 1542296)
tctcttcgatcgttggaggactctcttccgattaagtaagttggtttttttttttctctctctctctttttctttttctgtgttctgtgtgttgttttatcgattaattgattgagatcaagaaacgtttagagaaatataattgtgttatatatatcttcttcaaacaatcttgtggtccaattaatttgaaatttggtgaaattttgaatgatcaggagagggttatcgagtcatttctctggaaaatcga

SEQ ID NO: 66362 - DNA, 909 bp, Cucumis sativus; identical to SEQ ID NO: 62679
  Intron number 5 from transcript Cucsa.022970.3 (locus Cucs a.022970) derived from phytozome v7.0 (chr-ID scaffold0032 0; pos 263701 to 264609 reverse strand)

SEQ ID NO: 66363 - DNA, 597 bp, Cucumis sativus
  Intron number 1 from transcript Cucsa.045540.1 (locus Cucs a.045540) derived from phytozome v7.0 (chr-ID scaffold0054 2; pos 1393413 to 1394009)
gccgtcgccattgccatcctcatctccgacaccaggtatcatttgttttgaaaagttttgcgactgtttacaatttaaaacgtatttgaaaatggttaacatcactcttatcactcgtataaaatcaatttttgttggtgtgaaaaagaatgtttaaaagttagattactcacatacgtacgcttatttttcatacagtaaccccattaaaatttgtccctgctttttttttcccttaaaaaagcagtaaatagtagcagtacaggtagaagtagaaataaaagtgttgcagtactcgttgtggtggcgatagttcctactatcattcttcttgttgccattttcatcattttgatattgaggaagcgaaagcacaaaagaccattagacaacttcgaaggtatgattccctggttttctttatatatatatgagcaattttggtttcattgtgcagttcttttttatttttttaacacaatagcctacttttaggtgcatctcttgaagacaccgttgctgaaattagcagtgtggagatggttcaatttgattttgatagcattaaagccgcaacaaacaacttcgctagtgaaa

SEQ ID NO: 66364 - DNA, 657 bp, Cucumis sativus
  Intron number 1 from transcript Cucsa.006230.1 (locus Cucs a.006230) derived from phytozome v7.0 (chr-ID scaffold0006 7; pos 119249 to 119905 reverse strand)
tcttctgtttctcctcttgcaagccacccctgaaggtgagccatgaactcacttgccttttcttttccttttctctctaactactctttccactgaatctgagctgctgcttcttcttttttgatctgaacgaagggttttactggttttttgttcttcttgttgttttgtgcctgatttctctcatgagctgtttttattttatgaaatgttatgtttccatgtgtttattggagtttatttttcataaccatgtgaaacatgaggaacccagatgggaaaaaaaagagttccagcaaaagatgaaaagggaaaactacgcattcaatgagtttgaatttctgtaggtcaagtgtttggttaaatgcttcctgaggggtggttggatgggttgctgtcctgctctgtcattaatgatgatcttaatcaaacctttggagtttttattgtttgttctgttacactgttaaacttaaattagtattaagccaaatagattaatctagtaggtgagggtatgtttatttttttatatttatttttagctctctctctcttacttgcagctgacctattctctcggatgttatattaaattcattactaactctgaaggtttatgcatatattccttatactgtgatatgttttttgcag

SEQ ID NO: 66365 - DNA, 1021 bp, Cucumis sativus
  Intron number 1 from transcript Cucsa.143840.1 (locus Cucs a.143840) derived from phytozome v7.0 (chr-ID scaffold0108 0; pos 217937 to 218957 reverse strand)
tcttcctcctcctcgtcgacaaaagcacgaagacggtattgattttttatggttaaaattatgcattgtgattgtgttaaaattatgcatcctgattgtgtcaaccctaaactctcaaccacaaccaaagtgagtaatttaacctaaaacttcaaaaagagagagagagagagagaagataataaaagctctaaggtggatggaattgggtttggtaaagcatgggaaagggaaagaattggatgggcttttcctcgaagttaagtatgaaaagtgtacaatgtaaaacaagataatgcttctttttgtgtccttttcactttgttcatcatttgattaaattgtttaattttttaactccttaacatatttatttgttgagtcatatttgctttgttgcttcataactatttagtttcaattttttgaattttgaaacttgtgtaacttaataactaaacatttatacttttatctaaatttattcaaaaaaaatttaaaaattaattagggtttcttttgataattatttcgacccatttgattattactttgctctttttttaatttttatttgttttattacaactattttaccattgcatttcatcattctttactaaacccttaatacttagctttatttttttaaattaaaaatatactagtgattataagcttaactttttaaaagaacaatcaaaacaaattattatcgagtggagcttgaatcttttttttttttttctaatttttttagttaaaagtaaacttcttaggtaatagacattacattgattcataaatttctttgtttataatgttataatacccatccgtactattttggctttcaaaactttttatgttttaaaattatcgaaataaaattttaaaaaaataatatttatagggttatttaatttttatataccaaaagttgacattaatttatggctgtgtattgaactattgtagaagatttgtgtgttgacatgaaatggtggtttgagcagaaaag

SEQ ID NO: 66366 - DNA, 879 bp, Cucumis sativus
  Intron number 1 from transcript Cucsa.086640.1 (locus Cucs a.086640) derived from phytozome v7.0 (chr-ID scaffold0087 3; pos 20890 to 21768)
gataattccaccattacgaaaaaaagatcaattaggtacaaagctatcccgtttttgtaattttctctgctctttgatcgaaactgtttcctctcattctacacgagacgctattgctctaaaacaatgattagggcttgtagttggtcatatgcagcttcttcctctatgaattcgcgttttttatttaattattttttatctttcaagattttgaaactggtgttagtgcaagatttcgtgtgtatgattttatgagagtgagttagctttgaagtatctgaatatggcgtcacggccacttcagtttcgggaatgctcaacattttggccttttagttactttggttcggtttaaattatatgagtttgagaattatgttctagaagtatataggttgcttggcagcttggaaatgaataatattttattcgagtattgggaagttaatgaattggagggttcttgaagacacagaaggacctaattatgtgtttgtgccttcccacttgttgaaattgtgtttcttgaattttcacttacgaactataattagttattttgctatcacattcataaacggtacgtgttcttgttattctgccgtcccattatcgaaagagaagtgctttttatgatgtttttgtaatttgttatctggattcaagtccattcacgtgagcttactcaaagcttattcattttgattgttcgttttgagtggtgctggtattgggattgggattggtttgttttcaaattttgattgatatgtatgatcttcttgaaaatgtgactgaaactcgtgaatggttgattttcaaattttgattgacacgatcttgtaatttttgtcgcttttacaggttttcgtaact

SEQ ID NO: 66367 - DNA, 1008 bp, Cucumis sativus
  Intron number 2 from transcript Cucsa.086640.1 (locus Cucs a.086640) derived from phytozome v7.0 (chr-ID scaffold0087 3; pos 22007 to 23014)
aaggcaagcattaacatatagctactcctgacacttattgcttgcacctgttttcctcataagtttttttttgctgttgtacatcacaacatcctttttctagacgatgtgatataaaccgtattaggtgttttttgaaatccgtttaaagcttctttgattcttttgtttttttaataaaaaattcaacacaacattgagaggcaggaagattttataccttctacctcttggtcaagtacaatgttctatctagttgagctgtgctaggtttgtattttttgtccctttgttgggtccatactcaatacccatctattagtctactgggttacattcgtataaattttactttcacatgatatagttcttggatataagatgaattatcagactgttaaggaaaaaggaacataactattattctgttagatacatcattccccatttcaaaagctacaaagactctgttttccttcaaaacctttccattgaatggttttaatgtttgttggctatacttggtgggcatgtgaatttgatctgtcgttgcatttcctccttttttttcttttttttaatgttactttgaaatatgaattgtttttactccaagtactgtaggatttattgcaaaaaatacatttgtagccgaggtcagaagatgatctgtagatagttgaattagctagggatccacacatgtggttatcaaaaataaaatgattgattgatgccaaaacaatatatccattttataataatggttgggtgatttgtgatattcctcataatatcaagcgtttaactctttattgatagagaagatttttaatcattgttgtcttaaattctttttcacctttcctcttatatacttccctttattgagatgcttattcacttctcccatgtgaaggatttctgctttctcttgttaaacgaagtttttggaatttctgtactgagaaatatgtttgtttaacataggtcaaggtcaagggggtg

SEQ ID NO: 66368 - DNA, 943 bp, Cucumis sativus
  Intron number 1 from transcript Cucsa.106070.1 (locus Cucs a.106070) derived from phytozome v7.0 (chr-ID scaffold0092 9; pos 488261 to 489203 reverse strand)
gaacggtacgatcgctgaattgtgtctactgtcttgttttttttttctatcttaatgggattggagtctttataattgatatggcgacattatgcttcagttccattcggtttaggagtattttagaccgatgaaattaagtttataaaatctacttatactcacaaaaatgtttccatgttgtgctaattgctatcttttcaaaaggaaaaaaccgaagtcaaaattggaaactaagctcagtaaccattccatttgatgtttttggtttttgaaaattaggtccatatccttctaatttcttactcggatttgcatatatttacttgaattccaaaagcaaaaaataagttttaaaagctactcatgttttagaatttgggttggtttttgaaaacaatagcaacaagtagatggaaaagcaagaaatttataggtcgtcaagtggttgccttgtgggcttgaaaaaagagttttcaaaaacatgtttttagaattatttcaataacgttaatcttaaaatgaaagcgtgggctttaatttttggttttggttggaaattttagcatcttgttcgtttggaagtttttcattgcctagcctatgaactcagattctgcttaagggcacagtggttatgatatcactcatcagactaccgaatattttcaaatcctacaacttcatttcctttccaattgatattaataagtcacacatggacttttgaatcattttaatatttaaacgtacctgagagaagctttcataccctatactatcaacttcgggatagtggtacttcaacatttctcatacataatttggatttaggaagacataaggtatttttatttggaaaatgtcatcatataatggctcgtgctctgttttttcttggcaatggatattgacaatctagcagatttggtttttttccaga

SEQ ID NO: 66369 - DNA, 734 bp, Cucumis sativus
  Intron number 1 from transcript Cucsa.052570.1 (locus Cucs a.052570) derived from phytozome v7.0 (chr-ID scaffold0057 7; pos 31085 to 31818 reverse strand)
attaagaaagtatgtgtgttgcgaatgcttgattgcatgtatataataaataagtgcatgtatacttttctagctttgtcttcctttgttgctttgtcgggacttacctatgatgcacttagtccaaacctaacctagatatagttaaaaatggataggaggcactctttagaaattgagatggttttaacaaatttgtattgtcaaacatgaggagcctcttgtctagccacaatgaactaaatccctttagaaaagggtggacattaacaaaacttgttgtcactccaaagggagtagtcaaacttagaaactaagtctagaatcacagaaaggttagcccaccggttctaggaagtcctagctaccgcattgcataccaaagaaagaaaagagagacttgcaaatgtaaaacgtaaaacagtgagacaattaagagctaaaaaaaacaaacaacatatgaaatatacaacttaggaagctacttatttctactatgtccactgccacaatacgagcaatgaaaagaaaatcactctgataagattttaggctgcttatttaagtattcttgataaggctctttaaatatgtaggagattgtaggtttccttgattggactccttactgcactagaaatatagaatgtgaggccatgaatgaatcttttgttacctagtaggttcgtaggtaatggagctacttgaatttattttttcaggcacttaaagcg

SEQ ID NO: 66370 - DNA, 687 bp, Cucumis sativus
  Intron number 2 from transcript Cucsa.174550.1 (locus Cucs a.174550) derived from phytozome v7.0 (chr-ID scaffold0122 1; pos 213989 to 214675)
attttgaggttggttcttactctctctagtatttggttccctcttatctagtctattgtcatcatatgtatcaagttttggtggcattgacatatattcattggagcaatccattaaagaaaggtgtattaacatatgtgtgatggaatgcatcaataaaaatattcctcttctaatctatgtttctctctttatagaacagagaaaatgtgtattcttatgtatacataattagaactgccctctatcatagttgtattttgtctggaaatgtcttgaaaatgttatttaagttcctttttctgcagtctacaaagtttggatattaggacaagtattagcgcatgaatgtatagtgtgaaatggggtgacataatgttgcaattatttggacttaaagtttttctattagaataacatgttgaatcatcatcaaatgtaaaggtttgagttattgagtaaggtaatttactattttcatggaagatccaatgactgtaatcctgacatgcattgattactctaattgtcaacctatgtcacttcatagagttataccaagaatcaatgctcatccaccatatgatgagaactctaattccctcatagtttgttggtagtgttcttataactgtttaacattattttgtagttgaattggcatcctttccagctcaaccctactgc

SEQ ID NO: 66371 - DNA, 965 bp, Cucumis sativus
  Intron number 2 from transcript Cucsa.143310.5 (locus Cucs a.143310) derived from phytozome v7.0 (chr-ID scaffold0107 9; pos 1656018 to 1656982)
tcgatcgaaaacccttgtttttaagggttaaaggggtatgataatttcttttttcctcttctatgcctgtcttgcaacgtttctactgattgaataactagatatgtgttggtatacatgtttgaatatggatgttatttatgagcctagtgctggaagtattgatatatgtgtgtgtgtgtgttaggattgtttcactcttgaattttgattgtttaatgcggactctgtgggttgttgatggtatactgatcgaggctccgttagagatgatttgggaagtgtttaatttttcattgtagatttggattttttaaatcatagttggttggtgtcatttttctgttatgagtttatgtttttatgagtacatgagccatttgattatggttcagttgtggattcaagcatccttttgttgttatttttataacccacgacatgttttgggatcgaaggttgattgggatggataatctgttgctttggagttaagattaaattttttttaaaaaaatttctgatgagtattgtatgaattttttatttaactcaagagtgttcaagatatgaagactggggattggtggcatgaaactataggagcattgttggaatttgtttttatctctatagttatcaattaaattgaggtcttcttggtttttagcttttgatagttatgctggttttctcacaattctttaccagtcttcatctttcctaataaacacttgaatttttagcccaaaaaaatatattatttttatagtttttaaaacgtggcttggtgtttgaaaacactccgaaaaagtagataacaaaacaaagaaattgattgatggaattagtgttttaatgtttaattttcaaaaaccacaaactcaaaaccaaacgatgatcaaatggcgcctaaatctcttgattcttttggtcatctttaggtatcttggtttctgctgttg

SEQ ID NO: 66372 - DNA, 576 bp, Cucumis sativus
  Intron number 1 from transcript Cucsa.025160.1 (locus Cucs a.025160) derived from phytozome v7.0 (chr-ID scaffold0034 5; pos 41251 to 41826 reverse strand)
cttctctccattctttacgcggtagtgtaattaaggtaaacagattctactcccgtcttctcattttacaatctttgaatgtcatttgttttgattcatctaattgatcgcttcctggggttgctttgaattgaagtttttgtttcatctaattgtagttggagaagtgaattgaaggtaaagaaagtagtagaatcttaagggttaagtaataatgttcatttacgcagaaaaataagtgggaagttcttgaaatctatcctaggccggctttttcctgattgttttttctgagcatgtagtggaaatttttgttaatgtttatgttaaattaggagataaaaaggtgttaatgttaatgttatttttcattggtaatggattccaaatttaatttaatttaatttatctgtttttatttttggaccttctaaaacatttttgttgacttcagaaaattcatgggaaggaaaacaattgattgaacctattttggattgattaggtgagtgtttagtataatgattttagtttcttgcagtgtgcgcggaggacttgcctaatattcataattat

SEQ ID NO: 66373 - DNA, 488 bp, Cucumis sativus
  Intron number 1 from transcript Cucsa.098390.2 (locus Cucs a.098390) derived from phytozome v7.0 (chr-ID scaffold0092 3; pos 389873 to 390360)
actgcaagctgttgctatttaggtttgcttgttttaactcttttcagaaaattgtaattggatttcatgagccttctcttgcattccttctgagatcaagctgttcaactagaaactttgtttcttgtttatgttactttttttcttgctttcctttaaccccctgcttgtgttttttacttagctttttgagcgctggaatgattatatatggggtataagtttcattgttatatttctttatctcttcttttctttaactgttttgcttgttagaatcattgtgaccatcaattggagaaggtacaatacttgtacatatcctttgcacatatggattgtggtatgtgtccaagtttttaaaaaagtgatacaattcttaagttatatttacgattgcttgcttctgatggctatgtatatcactttcttcattcaggttgattatacctctgtgtttgcttttcgccttttgttgttcatagata

SEQ ID NO: 66374 - DNA, 532 bp, Cucumis sativus
  Intron number 1 from transcript Cucsa.049870.1 (locus Cucs a.049870) derived from phytozome v7.0 (chr-ID scaffold0055 1; pos 47273 to 47804)
tctcgccggaggaagcgccggcgtttatcttcgaggtctgtgctctgggatttttctaattttcttcattcgtctcctttcttgccattgaattatcattgaagttaatgttataaatgtataacataatttatgggccttaatgtttgaatttaattgtgattttaaattagcagtgtattagaacacacgctattattcttaaatgttatttcttaatctctaattaaaatttgtttatttgttcaagtacatcaattgcaaaaatgaggaaataagtattcaacttagacttcatactattattgatatctataatcacttattatatcattttaggatttaaaatttaaacaggagttgttttagttcaattattgttgcatgagtgtgaatggaaacatctaacatttttaataaataagttataatcttcgaattgatttgttttcggctaatttaacatctaacttataaatcataattaatatgaaatgaatatttttctttttttgtgtgcgtgtgtgtgaag

SEQ ID NO: 66375 - DNA, 308 bp, Cucumis sativus
  Intron number 1 from transcript Cucsa.102610.2 (locus Cucs a.102610) derived from phytozome v7.0 (chr-ID scaffold0092 7; pos 1618259 to 1618566)
ccttgaggttatttctccatacctgccttttttattgcctgcttcttgtttgatgaattaagaaggtagttaggtgatcctgtttctttctaaacaaagctgagtgctcgagtacgatttgactgtatatgatttagttagtaagctattaattgcggggcaaaaaaggtgaaaagatcaagattgtgcatgatgaagatattgtatttcatactccattttctctttatatggctgaataatttaggttgcttttagatcatgaatttgattatataggtatgaaatgatgcagaattgtgagcaaa

SEQ ID NO: 66376 - DNA, 843 bp, Cucumis sativus
  Intron number 3 from transcript Cucsa.152980.1 (locus Cucs a.152980) derived from phytozome v7.0 (chr-ID scaffold0112 4; pos 243891 to 244733 reverse strand)
gccaaagggaagtctggaaaatcacttgtttagaagttagtatgcaaccccatcaccacctcttcaacaactttcttctcttgctaatttttaaagctgttgccttctattcatatttagattagtgtttccctcctccaatctatagcacttcaagtctagctattaaaaattaagaattgtctaagaaatgtattatagggaacttttgtcattgaagcattgtttatacacagcatgactgaaggaagaaatctttttgttgatcccccggcgatcaaggagctaggctttctatagtggcacttaggctgttaatatctaacaaacttctagtatccctttaatcaattaccacagttagttctatggtacaattattgccatccggaataaactaaacccttgcatcaattcctttaaatagttcatttatttatttttgagtgtggtgatgcaggagtgtgggcggggcaagtggctctaaaacttttatgctgaggcttctgttataagacggacgaaactatgttgtttcaatgaaattgagctagccaaaagcaaatgagagtaattccatgtccataggataatgaattgtgttaagcccgacgtaggttcacttgtcagggagtcagaataatgtttgtcattgcctttagttgccaccttgttcctcttgactgtgttttattgctatgaagtacaaccagttatacatgtttttcaaatttttgacaggtttcatgtgttgtttcggtatttttatctgggaattcgtaataatactcacctttctctgcttttacagaaggtgttaccccaatttcttggcgtgttcga

SEQ ID NO: 66377 - DNA, 563 bp, Cucumis sativus
  Intron number 2 from transcript Cucsa.116860.1 (locus Cucs a.116860) derived from phytozome v7.0 (chr-ID scaffold0099 5; pos 685200 to 685762)
ctttggctacgttagaaaagctaagcgaggtgcggcctcattttgtgattttagttttttagattgatattcttttcatggaaacgatattttcttgtgtgtcgtttgttttgagctcttgttctatttcaacaattttgatgtatgcttgacttctcgatcattcatcttttctaaatggcagtgtttaggacatcggtttgattagttctcacgtctccttgaccgtgtattagtgtttatttggtttttacttggtcaagtggtggtttccggttgaaaatttttccgtgtttgaattggattaattgttactttttttgtttttttgttttgcgaatggtaatcgatatgttttaggtgaaattacacttatgtaagttaattgtttgttatttttctatgctaccataatgaaagaatagataattgaaatcatgtccgaaatgattgtaattgtgattgcatagacttttgtagtcttgcaaagtttttcgtaattgattccaatgtttctgggtactcttttttattgtctgtaattctctgtttagacacttgaa

SEQ ID NO: 66378 - DNA, 888 bp, Cucumis sativus
  Intron number 3 from transcript Cucsa.005270.1 (locus Cucs a.005270) derived from phytozome v7.0 (chr-ID scaffold0005 5; pos 338148 to 339035 reverse strand)
ggtatgtctccaaagttcttcgttgtgcatccaaacctaccaatatattcaaattttgttattttgtataactccaatcttttgtgttttgcattcctatatcacgacctttgcattttgtattatgactctgtggggatttgttcgctttcagaagttcgaaattatgatatttgatttatttttcatttctgattgccactaaatcttatatcaaatgaatggtatcgtctagttactttagatgtaattatgtaaatatatgctttcaggttgggtgtttcattttttgaggacagtaaccttgtcttttcttttggaccttatatcctagttttcattgtttcttaacatggttcatagataccacttggttggtatacattccctgcactgccaacttaatgttagtatttttctttgaagtcacaaggtatattaccaatcactacatgcagcattccttagggtatgtttctttgtcacctcccagaaatcaggattggtacctgatcagtgatgtggcacagtgtgattggtaattgcaggaataccatagaagttgtatgaggatatgtgccaagactaatgtaattgaacgggaagaagcatggctagtattattggtgaagtttcatatcttgttttctcttgcgttttatagtttatattaaaagtcaagttggtaggatttgaactctagtctctagttaattggggtaccaaatatttgtcttctggtatcacaatggactgtgggttgttaaacaatttcctcctgttaagtttgcattgttctgtttgtgctactacttaaatttctgctttcataatcctatcgcttggaaatatttaaaatgttttcaattattcgtttcctttgcagtt

SEQ ID NO: 66379 - DNA, 522 bp, Cucumis sativus
  Intron number 2 from transcript Cucsa.163020.1 (locus Cucs a.163020) derived from phytozome v7.0 (chr-ID scaffold0114 4; pos 2481972 to 2482493)
ctaaatcgtggtcttacagttgctagccttagtaggtatgtttctgagcaagaacatttgccttaagtgtcacatagaattttttgagtaagatctacgttcttaagtgataatgtaaatctgtatttctttttccttatcaagtgaactgtttgtacttggtacattttagttttaataaatgctaacatggaaagcacgaaaggatcagctaagaaccactatgaaccactaagaaccttttttttggaaaccacagcggcatatgctgccttgcaaatcgttattttctccatcagttgtagtgcttttcatttaatgtacaggaggaatactgcaggaacaaacaggattgtagataaggaaatatgatttgagttcccattttctgtttaatgaatgataacttcaacatctttgttcggttccctagtgttcgaagctctattctgaaattacaattattgcatttcgctattattgtcaggtcgggaagatcatcaatacgtgattcttgggcta

SEQ ID NO: 66380 - DNA, 990 bp, Cucumis sativus
  Intron number 1 from transcript Cucsa.123320.1 (locus Cucs a.123320) derived from phytozome v7.0 (chr-ID scaffold0100 0; pos 576507 to 577496 reverse strand)
gcctggctgttgccgctgagcaaagaagaagcactgtaagcttcagtttctctctctctctctctctcattccattgtcgttttcttttgtgctttttactgcaaattttgtcgatttggggttctttgcttcctgggtctgttttatttctctgattctgtttgtgggtcgttccgagtttgctgaaatttgtatggaaaatcgagaatagatgacagaagaatcttggcttttctgagtttttcttacctatcctaacaatgggttttaggtttctgctttaaatttttagtttttcattgttgatgaatgcggtattagtccatttccattcattagggttcataattgtcgtttagtagttacaaagcaggaaaatggaaaatgataatctattggtattaatattatgcaagtacaatcataatgtgaagagaaatggtgagaagattattgatattttcattatttgaagcaaactaaccatgaatgtaattcattagtcactgttttttggcttttccaagatgtaattctgaactgttcttaagtgaaatagaagggaacttccatagatttctctgtttcttactaagcacactaattcgaaaaggtgaggcgtttgcaatcgatctagacaatggtaaaattgagatagctcttctcttgtgtttccaccatctcccactcattcctatctccatgaatctgatcttgctgataagctgtatcaaagggaagcctgtatatttgaacaagcaaagtcgataacttgttttgttctgtacccttttggcttcttctttacttaacagatcaaatagttggtttcaactgattagtaatgcctatatgataatggtacattgattttgagtggtgttggtaaatttatttgcaaattggttgattgttaagaattaatcgcattgtgtaaaaattgtttgataacaggctaacgtcgtgcaagataaagaaaaggaatacaa

SEQ ID NO: 66381 - DNA, 909 bp, Cucumis sativus
  Intron number 3 from transcript Cucsa.047640.2 (locus Cucs a.047640) derived from phytozome v7.0 (chr-ID scaffold0054 2; pos 2586665 to 2587573)
gaaggtttgcttccaatgcccttcaaatttcttgagtattttaatttcaattcatcaactcttaactactatgaaatttgtgaagaaaaatataagctgtagcttagattgtcttgtcttaattttctaaataaactcgtgttacgccaaattgggaaaataaaatctcaacttttgccatgacggtagaaatgttacctaaaactcttataaatattcaaaaaggatttcaaaattatcattggactaaaaattcatcagaattttgggtgaaaatttagacatggaacaaatgagatggtgcgacacttcctattatgttcgtattttcatccgaaattgtaatcgatttcatttcccaatgtaattttgcttgatcctataggaggcctagaaataatgaacgcatgttatctgatatttcaatccaccatgctaatgccaatacctaaaattgaagatcacaatgtgttttttcatattgaactattatcactcatgaaagctgacaattttatacccaccgtggaatttatcacttggtttactaaccgaagagatctaaagaatctagatgcttttgaagtcgtaagttgagtatgcaaccacttgaatattaaagatcatactagatttttcgaagtatgagtttaaggtagttagtcttaatactgtaaattatttgaggtgtgcaagttaaagcttgattatctgatcatactagatttcgcaattaatttttagtgaaacacgagtatagctcgtccaaaattggcatacaccatataatgtcaacattacaaattaccactcatttgtagtatgataaaaatgaaagaaccaaagaaatcttaaaatgattacatctctgcaggttgacaatttgggcactgtaaacctagttgaagc

SEQ ID NO: 66382 - DNA, 529 bp, Cucumis sativus
  Intron number 1 from transcript Cucsa.120390.4 (locus Cucs a.120390) derived from phytozome v7.0 (chr-ID scaffold0099 8; pos 2498078 to 2498606)
attctttcctgggctaggattttctatgtaggttctctgttttcaactctgatctaatggaaaaattaatttttgtgaaatgttctcttcagtgttctttgatgttatatggttggtgtttcacttttagaattagttgaagttcatagaaataaagactaagaaaaatggtcttttcattctttctgtatgtgtcttgtcttgtatgcagagcatatgagcttttgtctcttctaaaatctttggtgtttacattctcatatgttgaactgagaaattttatggcagcttgaatatttagatgctatgagcttgtttgagctttggagtatgctgtctgtattttatttgttggcctctgccagattttagattagcaacaaactaatatcagaatgattgaattgagccaatttattctataatatgttgttttcttcatttttactaagatgggaataattcttctgctgatttttggttcatatgtgcagcagctttagataaaggtttagaacagcaactcttg

SEQ ID NO: 66383 - DNA, 843 bp, Cucumis sativus
  Intron number 2 from transcript Cucsa.122150.1 (locus Cucs a.122150) derived from phytozome v7.0 (chr-ID scaffold0099 9; pos 463245 to 464087 reverse strand)
ggccattcttgtgattgtggtcgagttttctccaggtacatatatattattggaacagtttaagctagcttttgaattcagtgataattcaaaacattataaagccctagaataatattagaatttgtgtttaattaattaatttttttggtttgatatacataatctataggttaatttcttttctggcggctactatacctttttacatttttgtttactattaatggctgctgaatgtttctgactgaaatatacaaacattcatcatcgtaaacaaccacaagtttatataatcagctttttgtgttacaatttggcacattttccaatgatcagttcatgtagagttaggtttattttttaaaaaaaattagatatatatatatagatatacatatttcaactagaatcagtttaaatttttgtcaggaaaacgaatatttttggtatttttacttgtcttattttttttattggtcccatagtaaataatgatattaaattatgtacttggtatatatcattgattttcttttatcttttcatttaaatgtgacactgttcatattcctaagtaattcaccacataaaaaagatgtattttcttttctttttgtttgtaaaagaataatcttttaacgatggggttgctttaagtttcttggattaaaatgggtttgcagcatttcagtaaatctatcaatatttgaagagaaaactaataacatggggttattgctaaacctagaaataatattacaaatttgtgtcgtttaattattattattttggattgtatttatagggtggagagtttcatagaacatcaagataattgca

SEQ ID NO: 66384 - DNA, 677 bp, Cucumis sativus
  Intron number 1 from transcript Cucsa.058410.1 (locus Cucs a.058410) derived from phytozome v7.0 (chr-ID scaffold0061 4; pos 555802 to 556478 reverse strand)
cgacggagattctccgccatcgtgtcatttctcaggtaacttttcgaaactgatgtctcattcttttaaaacttcattattatttatttcctcctttacttcttactaattctgattggtttttcgctcttttgttcttcttcatcacaattccacacctgtctttcaatttaaaatttcatttcaatccatcttaaattcaatccttactattagtttgtttacctcaaaccttttgttgattttctcttatcaaattttatgatagtttgtgcacaaactttcaaccttggaagtatatacacatttttcttaaataaatgacaaatttcaagtaaacttgttatgaggtgggtccaacaataatgaaaatatctattttgatttacgtggatggatgggacttttctataacaataataaaaatgaagatttttgaaaacatcctaatgaaagtaaaaaagaaaagaaaaaaaggtttaaacaatattataaaaagaaaaatagaaaatgttgaattgaagtaagtggtggattattaaatgataattagaattgaaatgaaaaggatggaggaggtttaattaaataaagatagaaatagtttggttaatgtgtgttgatgtgtttatgggtatttaggtattggagcttgggatagtggtacattcggtaat

SEQ ID NO: 66385 - DNA, 758 bp, Cucumis sativus
  Intron number 1 from transcript Cucsa.004530.1 (locus Cucs a.004530) derived from phytozome v7.0 (chr-ID scaffold0005 3; pos 88098 to 88855)
gtgttatagctcagatcaataagtaatctctcttctttcatctggcgttactaatttcattagtgtagaactatacatttctttcattgcctgattttcgtttgagtttggtttttcgattcttttttttttttttttctgtttatatccttttatcgctttgaattcagtgtatcttgcttgtctcttacggtctgctgtgagtaatttgaaagaaatgtgtagtaaagttagcgaaaatttagtgttttgttattgcgcggaggttccgaataatgtggaggtgtttaattctagagagtattgttttgagcgtcaattatgtacggaagtaccgactgacgaatggtttcgtatcttcttatccaaaactcttaataggaggatgattgtcaatcccctcgttttattctgaatttgtcgttaaaactagggaatggcggaagagataggattaatcatccgggctttttaagttcattatgtgaatagttaagtgagatcaaatgtcatggctaggtcataacttgtggaagaggattccattttggtgttgttggttagtttctgttctatgaggatgtacgagaaaaagagagaacaaaatgtgatgattgataatactttagtgcaggggagattgaactttgtagaattcctcgtttttacatctttcatgtttttacctatgcttttctttattatggttctcactcaagttcattaatttataaattttaggcatcttagtacagtag

SEQ ID NO: 66386 - DNA, 1042 bp, Cucumis sativus
  Intron number 1 from transcript Cucsa.164250.5 (locus Cucs a.164250) derived from phytozome v7.0 (chr-ID scaffold0114 8; pos 65372 to 66413 reverse strand)
ttctttctacattttggcgtcactttcttccaaaggtgaattttaatgtttttctctcttatcaatttgcttgtatcaatgaatattccgtgtaatattttttaaaaccattttttaacatatatatatatacatacatatatatttcccttcacggttgggaaatcggagaagacaagcaaaggtttagtcgtttcccttcacacggcggtgaagaaagaaaagaaaaaaagaaaaaagaaaaaagaaatccgtgtcttctttttcttttccttcttctttcctgacctttttctctcatatattccttccacttgtattctctctgccatattatttcaaatttaatattctcttacatttttttaaaaaaattggttacctaaatacaactcttttttctctatatttttttattatgctaatatattcccaaatagagcttaaattgatgaaatctttcaattaattgaaaattatatttctttattgttgactgtttgattgtcgtaaaccagtttgattcttcttgaaaaatataagttgatgctaagcaacgaatccagaactccaaaaagggtaataattggtcttaatttcactttgttatatcttaattaactgaatctaatctcttagtttcctttccccaacattggtacggttgtatttactcctattctttctagtctacttgatttccccgtggttttgtaaaaaatgccaaggccagcttcgttacagcttttgaggtggatttcttctcccccatggaagtcatatggttctcttcatccggaaaacataggatttcgccctaattgtagaaacttcggttctcttctaaagttcaaacgcttaggttgatgttagtggatgtccaacaaagtggcgatctccattttatcgtccgaatttcttgtttataagagcttaaacttttatttggtatttttgatattttgtttctacgctttctgattggttgataatgtttttttgtttgttttaatcttgttcagcaactgttcggtgctcaacc

SEQ ID NO: 66387 - DNA, 151 bp, Cucumis sativus
  Intron number 2 from transcript Cucsa.143200.1 (locus Cucs a.143200) derived from phytozome v7.0 (chr-ID scaffold0107 9; pos 1518429 to 1518579)
aagtatttgggatacgtacactcatcaacacccaggttctttgatcttctctctctttcaataagaaaaataataatattaatacttatttctctttcgaaatgaagaagtatctattcatgtttgtttttgtgaactacagagagaattg

SEQ ID NO: 66388 - DNA, 743 bp, Cucumis sativus
  Intron number 2 from transcript Cucsa.184460.1 (locus Cucs a.184460) derived from phytozome v7.0 (chr-ID scaffold0127 4; pos 167482 to 168224 reverse strand)
gttttaaacttgcttcagctgcaaggtattcttattctcttttttcctgaaacagattttcatttattactattgtctaatgctcccatgcatttggtttcttctcatagtaagcagtgtcatagtaatgaatgagaccgattcctttgtttttttacccagtgttagggtaaggattaagtaattgtaaggtccccaattattcatacatatatgagaaagagtagaaaggtaaacacaccaaatattaatgagaaggaatgatcggagaaaaagatcgtatagagtagggcccacatggaagaactttaggaaaggctataaatagtgattgatagggagagagtagctaggttttcttttgtcatctctatgagggtaggcggctgtagctgacaggggtctccattggtgtaatggggactggtatgctttattttatgttttctttcctcgttatctttatattgtggtttgtaaacatctttggcatttacatataaataaagaagaccagagtaccgcctctgttttgccactgttagggtgttttatttgatattcgagttggtagcctgacagtaatatcatgtggtccgtttaatttcattccttcagccaggcatgcttttatccaattttttgattttgtcctttttggttcattatctattataccatcctcttttcattttggtttctttccagagaagactcaccaatcactgaagtagagccttata

SEQ ID NO: 66389 - DNA, 760 bp, Cucumis sativus
  Intron number 2 from transcript Cucsa.041780.1 (locus Cucs a.041780) derived from phytozome v7.0 (chr-ID scaffold0054 0; pos 334668 to 335427)
tgtggtagatcagaaagttgctgaagatttagcaagtaaaatattcattttttgttttttgtattgaaaatgtgtgcttgttttcctcgcaacacgtagaaaaaactgtctcgtttgataactagttcgtttttaattatctgtttttaagattgatgtgtgttcttccaatctctttggtgtggtttcacttttcttcgagaaacattagaattctttgtcaaaatctaaaaacaacttttctaggtttggttttttaaaatattggaagaaaacatcaacaacatagcataaaacttttgaagtgaaagtagagttccaagctttattttcaaaaataaaaaacaaacgatgaaggtttagtttttaaattttaaaaaatatgtgcttgttttgctcataattattactcatgattttcatatttctaatgttaagcatttgaattcataaccaaagtgaggtgatatttataaacaacaatacataaaaacagtagtggtatttataaccttaattcccaaaaacagaaaataaaaaaccaactggatatcaaacaaaactaaaaaagttaccaaacaagacctatttttcttagttgctgaaaaatcgacttcaattttaaaaacatataaaaagtagatgacgataaaaaaatggttatcaaacaagacatacaatcttggggttagttttctacatcaatgtaataccaatggtgtttttctcctttttttcttttctctgttagaacaccctg

SEQ ID NO: 66390 - DNA, 982 bp, Cucumis sativus
  Intron number 1 from transcript Cucsa.172190.1 (locus Cucs a.172190) derived from phytozome v7.0 (chr-ID scaffold0119 6; pos 108774 to 109755)
cgagaaggctcgggagagtggcgctcttgattccggtaattgtcatttgttaatcgtttgtggtgtcttgagaattgagaccggagattcatgcacgaggattatttatttttctctgtttagttaaatgcagttttgtagaattcgtatgtgttgtttatcatccgatttcgataacgagcttcagttttttggataacttcttttccttctgctttctcctactagcttttgctgttattgattatcttccctaggtaatgtagcggcatttctccattaggatctgaatttaaaagttcatttactattgatctgatcattatcacttaattaactgttctccttccgtttttttcttgtttcacgacttctgtctttctgaactgaaatatctcctggttactgttcattatcgtctatcttttttcttagtgcatgattttgtagaagtagaattatggacgaagttactgttgaatgtgagcatttccttctggttacggttttatgtgatcttttttatcctaagcattgagttcacttgcttattagattgtgattgtcttcttatattatttctgttagttgcatttatggagacaaagtttagaagttttttgtcctctgcttctattgcgtatgtttttcgtcagcttccgttgatttagacttccggtgtctaaacatgtaaaaagaaaaaaacagaggccatgaaaaaacttccaaatgatttaggcttgcgtatgctctttttgtttgattctctttcttcggttgagccaaatgcagctcgacagaattcctttgagatctatataatcggattttgataacgagcttgcttttttttgcatgtgaattgcaaaacgttgtcgaaagtcacttcaaaatcagtgtgatgtgttttctgctgacaggaattgattcatagaatgcaatataatcgaatgataaccactttctattgttccctcaggtg

SEQ ID NO: 66391 - DNA, 970 bp, Cucumis sativus
  Intron number 1 from transcript Cucsa.122200.1 (locus Cucs a.122200) derived from phytozome v7.0 (chr-ID scaffold0099 9; pos 515035 to 516004 reverse strand)
gtattcatcggagtcttggagtacatatttcaaaggtttccctcacttctatgtggtgatcctgtgactactagtagatttttactttgaacttttcgagtttggcgtgaacaatttcttgtagttttgaatagattcttcatgaaaaaatatgaacttcaaatgatcttacatttaaataataaaaaaggaggcaagagttttaaccactcttttaaagattttttggttgttatttagaggaaatctccttgcacgttcatttcattggagaacatttgagaggctcaatggaactgagaatttatatatgcatattgctgatctgctaggcttgaaaatgaatttgttatctagttccaattatgatataatcggtgtaattgcctgcaaactacttgggtccaagtcatctactgataaacccaatagatctgtaaagcattagtttagcttgctctgtaatccttaggttgaaatagaggtaaagttgaacaatattgaatacacaactattttgtgaactcactgcaaattatgaacttagtaaattgtttgcattgcctcagcatacgttcttgcatttgctgttaaatgttgtttgtccttaattaaattttgatttaactatgttctttctgaaagtagagacaaagaacaaacacaagttttatgtggaaaccctagtttagggagaaaaaccacaatgcaaatatttcttataaaattaatgatacaagggagcattaatttataggcaatagaagcctaattaaatcaatgaaagataattagggcaacatgaaagactgaaaaacctttaggctttcaacatacaacaagccctctaattctaacatgactaaattcagtattttctaaactctcattatgctggatcttctttctgtttttctttacagttggaaatttttattttgtgataggtacggtctactactcttgatac

SEQ ID NO: 66392 - DNA, 624 bp, Cucumis sativus
  Intron number 2 from transcript Cucsa.117860.1 (locus Cucs a.117860) derived from phytozome v7.0 (chr-ID scaffold0099 7; pos 195354 to 195977)
tatcgcgccggaatagttcccgtcgcctaccgccggtcagcctctttcttcctcccctgttttctcattcattttctgttcaaataaccattttactccttctgttctaacctttttatgttttatttatatattattttttcaaaagattatctctttctttaattaaactaaatgtttggattttctttcttaaattctaaattaattttcttgtttatagatagtttctttgttgtgttttaaaaatgtttattaatttcaaggaaaattaaaaagggtttctttttttgtttcctttcaataataaaaaaaaacccaactatttacaaaaaaaaaaaaaaagaagtcggcagaagggaaaaatacgaaagtttattttcttggtctaaatatgaattagttgggactatgcatcttacaaatttgattgcaattatttaaaaatattcatatagaagtgagaaatttgatattagttgtaaaatttgaaagtagaaagaaaaaaaagtaaaaagtttgtgtaataaaattaataaattgagtagatggaacaatttaagaaagaaaagaaataaaattgtgtaagtaataatttgaaaagcgtgtgggtggcagagtggg

SEQ ID NO: 66393 - DNA, 920 bp, Cucumis sativus
  Intron number 1 from transcript Cucsa.078960.1 (locus Cucs a.078960) derived from phytozome v7.0 (chr-ID scaffold0079 3; pos 1484161 to 1485080 reverse strand)
cttcccttgccaggtgcaatggcatttaaaccccccactttgtttttctctgtagggaaatgtgtgaatatatctcttatggctaataagcactgtagttcaatactacactcttttgaatgtgttggcagctgttattaggtgtttgtttgtcaatatttcatatgctgttaaatgatagttagacattatgctggagatcttatttatttttgaagtaatcgaattattgtgcatgttgcaccaatagagtaccttgtgttatatgggtcagctcatgaagatgatgcgatcctacgattttcttaacattatgtaaaccaattactattcctcccctctttataagcgaacattgttccaccattctctgtttttggacttatcttggctagaagtcagtcttcaagtcaagtgggctggtgtattagttttgcatttctctgtaataagttgctttgggagatgaaacgaaggatcgatatcattctgtgtttcaggaagagaaaatgtgctttactacgttaaacatcaaacagatgcacttgggcaaaggaaaaatttggacttgactttgataatggataattgaactgcacgatcaccattatttatttgatttggatttggctcaagccaaacggagagaatttaataatcttcttgaccttggagggcaagcgtcttgttatttcgtcctttcttacctatgcctgtcttgcatggctcatctaataaaaaaattaggagtaattgggtttcattttgttatgtcacgagctttgtttccgttccacgattactgttgattgcaaaattttcacaagattttctgctttctattccatttgttatttttgctcaaattatgattacaatgtgcaggtgttcacctttgggtctgttcccctgaaaacgta

SEQ ID NO: 66394 - DNA, 545 bp, Cucumis sativus
  Intron number 1 from transcript Cucsa.136250.1 (locus Cucs a.136250) derived from phytozome v7.0 (chr-ID scaffold0104 4; pos 915010 to 915554)
cgccaccgaaactgacgatcacgatcgggtgagttttacttctttcttttttcttttttttcttcattctttgtaaagcttgaaaagtgtttcctgtttggtttactaggatcagtcataattataacgaaagaaatggggatccaagaagaggatctttctaaatcactaaactagctttcaattaaagaaagtcaaaccgccagtactgggtttttttcagcatgttacatgttcaatgtctgtacattacttgtttgagctctgctgcattggtggtggaacttacatgatttttaaaggaagttcagagcagactaccttggttctattagcatgtagagttttccattcttgagctagcaattgattgattcctctttaggtgtgtgattgcaaaatgagtctgataggtctgacttgcttcaacatgagaaccttttaattgctcttgatattatatatatggataaatctcttgtttcattaaatggctgttatgatcaacaggttgaagaggtgcccgaaggattcccatttgagat

SEQ ID NO: 66395 - DNA, 505 bp, Cucumis sativus; identical to SEQ ID NO: 62354
  Intron number 1 from transcript Cucsa.037180.3 (locus Cucs a.037180) derived from phytozome v7.0 (chr-ID scaffold0047 6; pos 138198 to 138702 reverse strand)

SEQ ID NO: 66396 - DNA, 629 bp, Cucumis sativus
  Intron number 1 from transcript Cucsa.105270.1 (locus Cucs a.105270) derived from phytozome v7.0 (chr-ID scaffold0092 9; pos 33881 to 34509)
gggaagcaggtattgtgagatccttctttcatttccattatcaatttacgattccatatgttttcaagtgacttacagctctccaagcaagaatgaatgcctcagcatgtataaaatgtttcttttgccattttcagttccgttacttgttccgagccctcaaattttatgcaataaatcaccttggcttgattcaaatgaatcctcttttgttttatttttttgtttttgacaattctggagtggagatcaaacttctagcctgaaagttgtcacatatgcttaatttcgatgcgcgatgctcattttggctcaaatgtatcccctttgtaattcttttttttttaaattatttgtgtgtatgtgtggggttgattttaggcttagaatatattaacactaaacagttattgcataactatatatactaatggacattctaactctgaaataggcaagatttacgaactcgaactataaatgtcaaccatatggatctacttattcatccctgcttgaatcgttttcatgaaatcaaaagttggtgattgtcaaattacaggcattaatatttccattgtcttctttgtttttggagaaaatagaactacagaagctcgagccttgca

SEQ ID NO: 66397 - DNA, 545 bp, Cucumis sativus
  Intron number 1 from transcript Cucsa.124130.1 (locus Cucs a.124130) derived from phytozome v7.0 (chr-ID scaffold0100 1; pos 174678 to 175222 reverse strand)
aggatacactgttagagccagtgttcgagatcccggttcgtatcagctcatttttcatcaatatatttagactccgtttgacaacgtttttatttcttgttttcttagttaaaaccacctctaaagtattgtggagtccttactatcaattcatggaccattcttttgacttgccggtgtgtgtagaaagggtgctgtgggtttttcgggatgagagaaatagaagtgagtttacgggtgtggagagggatcgtagggatgcttgggccctttttcgttttccggccattgtgtttcattttgtttgttgtgggcttagttttttgtatgttcgtatattctctctttttctcaattgagagtggttattttcattggaagaaaatggaaattcaaatttacgtgattgtagaaattgtagctaatatataagttcgagagtaattttatcaatttttggattcaatattttcttttattcaatttaagagtcgtaatgtttacgagcttagttctcaccagtgtttggattttgttggtattag

SEQ ID NO: 66398 - DNA, 577 bp, Cucumis sativus
  Intron number 3 from transcript Cucsa.152750.1 (locus Cucs a.152750) derived from phytozome v7.0 (chr-ID scaffold0112 4; pos 115480 to 116056 reverse strand)
gctacatatactacagcaagactgggatcttttaagtgagcgtgttacaaatctagaattgaacacctttggatcatattcatgaggctatggttttacttccaacatttgttcttcctcatgtctatgtagttttttttagaactttaagaaaatttgcatttcttagtccctacattttaggaatgatcaattggttcctatagtttgaaacatgacaatctagttactgtaggattaaatgtggttctcaattgccctcaaattattttatccagtgggtcccatgaaaatgtcacatgatcttatagtttatgttagttaagttcgtaggggccaagtcatttgtatttgagactcatcattaagtcaaaaccacacagatataatgaccatctaaggctactggagttaaatcgtcacattctgaactacaaggaccatgtagaatcatttcctggactgtagtggctaaatgttttttttttttggcttgtatatttggttgatcaaacctctgttcttctccatttcccttctaggatattgacaaacaaagcaattgaagccaacgagg

SEQ ID NO: 66399 - DNA, 884 bp, Cucumis sativus
  Intron number 1 from transcript Cucsa.124970.1 (locus Cucs a.124970) derived from phytozome v7.0 (chr-ID scaffold0100 1; pos 778476 to 779359)
attctcaatttgtaagtatacattaaatcatatccaaacaatattaactaataattaaaacacttttacatgtcttataagtacgtattatatattttaaatataaattgacctctcattcctttgcttttagaattacttaaaatatcctatactaacgtgcatgaacatgaacaacagtatctactaataagtttggtgatcattgaaaagttttcatgttgtatatatacactttttttttccatttaattggtcaatgagatattttcgtcgcatttccaacacaattctctcatcaatgccataagcctcctacgaatggtcaatctatcagattaacttctgaaatttatcctcttgatcagcgcactgcccgtttaaaaaacttctgaatttatcttctctttttgctttaccgtataggacaattctactaacatgcatagctaagttaaatagcatgccttcagatatggaaaaaaaatcacacttctaccgaggagtaagcagaaaaataacactaaaagaattaatgaagaatacaaaaaaaaattatgtaaaagactccataaccgtagaacaatcacggctatatatcaccgtgtgaaaagatgggagataacagttcaaacaaaaaatgaaaaatggcggtgaatgaaattattgtttgtaaattacgacttttttcgtgcaacaacctatgtggaagattgaaactcccatctctaaggatgaagaaaatcatgtcaatatcacttcaccaaactaacttgacatttgtagattacaattatatgattggttttaacctgctttgttttctctttttgggggaaaattttttaggtgttctcttttaagattcgaggagcttataacat

SEQ ID NO: 66400 - DNA, 599 bp, Cucumis sativus
  Intron number 1 from transcript Cucsa.119320.2 (locus Cucs a.119320) derived from phytozome v7.0 (chr-ID scaffold0099 8; pos 1226268 to 1226866 reverse strand)
tcaagaagttgagttcatagctaataggtaaagaaaacttttacttttggtgtgttctggtgatctgttggtgagaagtataagtggactagagactctcatacgagtatggggaagattctcgtctctttcttttcctcttatatttcgttatatcctcgtttgttcaagtacaatgtaactgacaaagtaatggtaaagaacaaaccaagcaggggaaaataattttttaatccaattttctatacatagttaactacatactaaactcttttttccctcttttctttttaatatttttgaattcttattagggtgtgattagagtggggtgcacaataatgggtgccaaggttcaagtattgctattcttttcctcctcattttctcattttttagaactctctctttttcttttttttttcagattttactgacttttttctacaaaatggcgttaatataaagcggctattccctatcatccgagtgcccaatatcagagtgaaatagaagcccttccttatatgtatatgttttcatatccacatgtatttactaatcatgtagctcctctaggcacaatccagagcagtgaa

SEQ ID NO: 66401 - DNA, 695 bp, Cucumis sativus
  Intron number 1 from transcript Cucsa.027760.1 (locus Cucs a.027760) derived from phytozome v7.0 (chr-ID scaffold0037 8; pos 605018 to 605712 reverse strand)
agcctaactctgctggtatatgctcttatctcttttatcatacaataaactcaattttaacttcaatcagtttcttttttatatataaattgattcttgtttgttgttttaagtcagaataatcttttttaatataaattgattagaaaattattttcttattgtgaagaagaaaaaacaaagaagttagtggtaatagatgagacaaagaatgcacccttaactactactttttgtaatgtttgacaccttttgcgtctatttaataacaatttggtttctaattatatgcattattgatacacattagtttctatttcacatcttaataataaatcaaacaaaattttcaaaaccatccatattaatataggtgaggagttataatggaacatggagagagaataaatataaactctaaaattgataaaaagctttaaaaagtgaatctaaaatagggtcttgtttgataatcatttacgtgtttcacctttaattttctaattttcgttctttgggaagggttgtcaaaaacccacgaaaaaaatagacttaattgtttgaaaataaaaataaattaatattcaatgggaccaaaatcgatatgaaatagatccgaacgttaatatagtatttatataaattcaaagttgaaatatattttcatggattttgtttgagtgtagtatttgtga

SEQ ID NO: 66402 - DNA, 591 bp, Cucumis sativus
  Intron number 1 from transcript Cucsa.170050.2 (locus Cucs a.170050) derived from phytozome v7.0 (chr-ID scaffold0117 4; pos 320042 to 320632 reverse strand)
tgctgtggagacgtcttgcatctctccgagtccaagtgagctcattaaccacacccctttccctcgtttatacttattctggactcaacaatccagatttttcattcattcttttacctttgttcttccttataagctcaatgggtttgtgtgatttatttgtagactagaattgaactttgacttggttataatttttgctggatgattcatgatttacagaattcttagcctatgtcacgtgatttatgagtaaacttttaatctatatgtcaaatcttacattgacgcgtgtagaaagtgaataatacgtctggttcttggatcacaactgccatttcattcctttgcatttaaacagtgtagccgaataagcacttcttaaaattcattttcttatgtttgcatttagtcccttcattattttgatgtgtagaactaaaattgtttttatagttgaatgataggcatacctttgaactttctcttatcttgaagattttgatacttatggctccctgtctaagcatttggtttggctttgtttttctcacgattttgaatatttacttgttatatttgcatttgtag

SEQ ID NO: 66403 - DNA, 723 bp, Cucumis sativus
  Intron number 1 from transcript Cucsa.090510.1 (locus Cucs a.090510) derived from phytozome v7.0 (chr-ID scaffold0089 4; pos 1751580 to 1752302)
tgaggaactttctccttcataccttacagttgcaggtacctttttccttgctcttcatggcttttgttatttatctcttttacttatttgtctgatttggttgttcttaatgtttatgtaacgtttttagaatctccctactttttagaatcttccaacttcttaatgattaggaaaatttcttctccataccctacaactgctagttcttacataaatgtgttaaattttgatcatttttagtaaattattcgatctcactcactctatgtgggtatttatgatatgggattccattgaccatttaaccaacattttcaaccaaaatattagtagcattcatggttttagccaagtgttctgcagctgcatagaagaattataaaatgtgtatcgagtcctcgggcacaaaggatataacttaaattttaaatttaaggatgtacttgcatgtgagatatcatttctatctcagaggtattgttctggcttgagtgtgtaattttagtttgagaaatttttcttgtcagtcgacgatcttttgtttattgcttatgattgttcaattgacacaaagtgttactgtttcataacaaattttgtatctggagttagattgattcaaaagagattcctatattgctactttgtattgtatgaagcttagaaaagacacttattttttcagagctgggagaaaacagttgattgttatagcccagg

SEQ ID NO: 66404 - DNA, 962 bp, Cucumis sativus
  Intron number 1 from transcript Cucsa.103980.1 (locus Cucs a.103980) derived from phytozome v7.0 (chr-ID scaffold0092 7; pos 2615065 to 2616026 reverse strand)
aattctcacctggtaaggtcttctcttctgtttgtggtgtgcattattctgttatttgatcccatgctttgtgtcatattttccattagtttataaatttgcttgtaagtgcttttgtgattttactataatttgtgctgcaattgagagatgagggaatgtttaggacctgggttgacattggggatgttttggagctgctttcagtaacgttgtttgttttatgtttgaagataaaattgatttttagattagcgatcaattacttataagataaagttgttttcaaaggaagcacttataaagggccaatgagttgaaaacaacctttcggaattctcgaatgtaatcagaattatgggaatcggaattatgaaatgtgtgaaaaagggaagagcatgtaatagggattacaaaccaggcccaaaagcctcaatctaagcgtggcttgggattacaacccattaaaaactaacctcccaaacaaggagtccatgttaaacaaaacagaatgcttcccagaagtgctctcaaacatttcccacatgttatgcattattgtgtttctacatttgctgaaaccatggtggatggatagctgaaaatgcaatgacttaaacaatacttgcacatattttcctttaatccttgttaaattaaaaaaaacagaatgcttctctaaagagcttctaaacattcatatatgttatcaattattgtatattcttcattatcttatctgttgctgctggaatcaagatgtggtgtatgaatggctgcaagtctgcaataagttatcctactcattctttaggaaaacaaatctttgaatctctcttttcagaggcagaactttctttatattgtattggacctgtctcttggtcatcttttgtgtgcattgcatgaattactctactaaatttcatgatttgaaggaagcaacatcagacaacttttgc

SEQ ID NO: 66405 - DNA, 470 bp, Cucumis sativus
  Intron number 2 from transcript Cucsa.104360.1 (locus Cucs a.104360) derived from phytozome v7.0 (chr-ID scaffold0092 7; pos 2915551 to 2916020 reverse strand)
taccttgaagatcgaacaattcggttgcagctttggtatggcgtgttttatttcttttcggtcatttaatgaagattgttttacgtattattctttgtttcaacatacagactcttatgttacaattctggttcttttcaacatgtatgttatggatagatatatgcaaccattgacataattcctacagaattgtgataaatacagatgggacatcctaaaattttattttcttctattgatgcactggcttgaagagagtttactgtaatcatataaaacatgacgtttgttgcattaaattgccaagcgaaagctgattgaacttattgatttgattttaaacattatttgtcaatttaagtattccaaaatgacatttatatattaattaacatgcacacgattttccccctaatagctaccattccacagggatactgctggacaagaaagatttaggagtctca

SEQ ID NO: 66406 - DNA, 661 bp, Cucumis sativus
  Intron number 1 from transcript Cucsa.104360.1 (locus Cucs a.104360) derived from phytozome v7.0 (chr-ID scaffold0092 7; pos 2916022 to 2916682 reverse strand)
tacgacaagtttgatactacctatcaggtctttttttctatttccctaattaattctttctttcttttcctcattttaaccttttctaattttacttggagaaattgtttagtttgtctcgtatctgtttctttatgtatacgaatctggatacatatttctggggattcatgtgaatccgagttatgtagcgttgtttctaatcgtctttgtttagttggtcaaatggaaaacgtattccgttatgtttatgaattttgtcaacacctttttgacgattcatgacttatctttctgcaatcgatcagatttatcgtatgatttagattaagtttttgatttagctacatctggtggtggctccagacattccttgttagtcaatggaatagtttcttttgttttctgtataaaaaagactacgtagaacaggggaaattgctaatattagggttggatatatgcattatcagattatctagatttgattagatccgagagagggagcggagcaggtggttcatgccttaaaaaacaaaatatatttcagaattttgtagtttgaaacgtttaaaatctctgcttgttgacctcatttcttcgagctgacatgaaatttattgcaggctacaattggaattgactttttatccaaaactat

SEQ ID NO: 66407 - DNA, 859 bp, Cucumis sativus
  Intron number 2 from transcript Cucsa.117940.1 (locus Cucs a.117940) derived from phytozome v7.0 (chr-ID scaffold0099 7; pos 255276 to 256134)
tttcggtatcgagtgtatcaaagagtatcaagtgcatgaagtgtatcaatcaaatgtatcgggtgtataaaaaaatatcgggtatatcaaagggtgtattaggtgtatcaggcgtgtataaggtatatcaaacatatattaataacgaaggtatttgtgacattttattttttgatgtgttggttgagcttcgttttttgccattttcgtaaataataaaatgtgtgtgctatggacttaattattataacttattttgtcatttgtgcacgtgccccttaattcaatgttaagtgaaataagaatatatgaaaagttatttaaaataattttttaaaaaattttacaaatatagtaaaatattaaaatcttcaatcaagatagactattttcccgtgtctaatacacacatagacaaataatagtttatgtttggtcaataacatgatatttataatagatcgtaatattttgtaaatattttagtttgttgggttatatttaaatattttgtaaatattttagtttgtttggctatatttaaagtaacataatttaaaattagaaataaaattattccgagagagagagggaagttccaaatctatacaaattattaaaattaattaaaccaaagtaatggttaaaattagactctaaattataaaaaataaaaaagaaaaagaaatcaaaccctcaaaattgattcaaattgatcatattatctctttaattcttccaacatatataatcttccaaaattcacgtctcttaagaagatcatcatcttccaaccgccacccttcaacatcataattgctatcttccgccgtcgtttatgatttccaacaaccaaaag

SEQ ID NO: 66408 - DNA, 760 bp, Cucumis sativus
  Intron number 2 from transcript Cucsa.075420.1 (locus Cucs a.075420) derived from phytozome v7.0 (chr-ID scaffold0078 9; pos 121265 to 122024)
aatcttctaagaccgctgattttagcttcttcaaggtagatgggattttaggaattacgttggctgttttaaacatggatgaattgagtattttggggggacattattcgttggattgtgtttttgaggaacttggatctttttttgcccatttttagtctcttcttaattttttttgatgcagctgaaaacaacagtcaaaataaaatgaaactaatgagtaattaaataaactgcaacagtgtatttatgaatttaaaatggtctaaggatagtaaattttactttcatcttgttctgtctttgattttatggagcttgacggtttacaaattgtaatgttgttgggaatgttgaatctttagtcttaattaagttgaatgaaattacggttaaggttactagtgaagatatagctcgagtacctaagattaacatctatattaccgttgttggtttgatgcaaattttaaatgtactcgctagtaaatgaagatttgaaactaatgtcttttgttcagtctgtttctgttcttgtttatgtatttcctttccaaaatcaaggagtttcaaccatcaaattcttgaaaacacccgactactcctgaagaccaaacgaaacttgattgattctttttatcttctttctttagattcatgtagttatgtaagcctgcacacaactaactaactcatttttcattgtttacatttccttttaaaaattaggcatactgcctatacaggcaaaataagttag

SEQ ID NO: 66409 - DNA, 551 bp, Cucumis sativus
  Intron number 1 from transcript Cucsa.032790.1 (locus Cucs a.032790) derived from phytozome v7.0 (chr-ID scaffold0042 9; pos 2021134 to 2021684)
aacggtctctgctggtgagttgctattaactctagtcttcatcagaaacccttttttgatgaccaagacataattggtttggacagtaatttcatgatgtgcagggatgttttttctttactgaagtaatatgtttttcttggtctattttctgttccatgaatttattcttacacaaaccaaatttttggtctccaagttgtcggattgatgtctatttgactctggaggtttgaaaataaacttcatcctcgagttctggaaaaatgattcttaagaattctttcaattagttgatgtaatggaatgcttatgtggctgttaaatggtatgtttagaaaagactaaggatattttgaaattagagagttcatgtcttattttccccttcccgttcttttatttgggtccttatacagaatgaaagatccgcctattgtctaaaattaatggatttctagtgttaaggtcttggaagatgaaactatagttgacatgaaacttcattttctgcagggcgattttctcttagttgttttgaagaatctgat

SEQ ID NO: 66410 - DNA, 412 bp, Cucumis sativus
  Intron number 2 from transcript Cucsa.101070.1 (locus Cucs a.101070) derived from phytozome v7.0 (chr-ID scaffold0092 7; pos 327302 to 327713 reverse strand)
gttgaattttgctgttgctttgcggtgatctcgaggtatagccttcgaaccttgcttccttgggttgtgattcctgtatttgattattcccatcacttcctcttattttggctccatttttctttctttaatctaaagtcgtgtgaactaattggacataaaaattttagaacatgcaaaaaccagtgtctttggtacattcctgaggttggtagttgagttggtcttctgcacataaaattatttgtatattatatttctgccgactcatttgttgtagaccatgttcagtgtttagtatattattactgagtaaaactcgggccgtgataattggattacgtgcatattaaagtagttgctgagttttttccttttctctcttgtagaattgttaagtgtttggcctttg

SEQ ID NO: 66411 - DNA, 556 bp, Cucumis sativus
  Intron number 1 from transcript Cucsa.124580.1 (locus Cucs a.124580) derived from phytozome v7.0 (chr-ID scaffold0100 1; pos 472271 to 472826)
tggctgctgcgatcttgtgagaaacgtagcaacaggtttgggttatctgattctgactgacccattttttgctttttgctttttgcttttcttggattgaagttactaatctgggtgctgctaactttttgaatatcttctcatgttgttctgtttagacctgtttctctttttgttacaacagatgggttgattttgatagttactttaggactaagagaaatgttcttttcttaattggtcatttctagggtgatttactactagtttatcatttgaattgtcatggagaaatgaaaatagaagatctgggattctgctgactccatttcttctttaatggcagaattatagacaattcttccaagttttaccctggattttttcagtttgttatgtcctcttttttcccacaaataacttcaacctcttcctttgaattatagttcatttccctgtttgttctggcaatttggcattgttgtccatgttttctgctacgtttagattggtaactgatagctgaagagtcaatgtgttgtctatttcaggagtc

SEQ ID NO: 66412 - DNA, 413 bp, Cucumis sativus
  Intron number 2 from transcript Cucsa.088230.1 (locus Cucs a.088230) derived from phytozome v7.0 (chr-ID scaffold0088 8; pos 611947 to 612359)
tgcttgtggcaaaggtttggtggtcttcatcattgattttcggtctctttaattttctccacgtttgaggttttaactgtcatgaatgttcctttctgaaattcctctaccaaattaccgggaaaagaatcttggtagagttgctttctagaaattgctgacgatatggccgatgcttctattttttcaattattcttttgttatttcatcaattattacatagcattcgatcttatgtttttacttcggcttcgtgtagttccatttctttactgttggttattatgtagggaatagtattatttatccatgcaatgtacttgtggagaaagtgccctggtccagaaattttaatttgtttgattgttgcttctcaggggaaggcagacgaccaattaaactggagagtgac

SEQ ID NO: 66413 - DNA, 312 bp, Cucumis sativus
  Intron number 1 from transcript Cucsa.048250.1 (locus Cucs a.048250) derived from phytozome v7.0 (chr-ID scaffold0054 2; pos 3090084 to 3090395)
gcccactccaccttttctcaggttgactttcactatctcttcttcctcttcttcttccctgcgtttgaactgtgggaaatggtgctgatttcttatgtttttttaatgggtctcgtctgtttttgtttttcttttatgggttttcgatttagtctcgaaatttttctcccccccctgagctgtggtttgattaataagtttcgcggggttttagggttactttttgattcatctttatatttgttaaacctcacgcgccgttgtggaattcttgcaggttgctgttgctgttccagttggaagtgatttgtc

SEQ ID NO: 66414 - DNA, 693 bp, Cucumis sativus
  Intron number 1 from transcript Cucsa.091180.2 (locus Cucs a.091180) derived from phytozome v7.0 (chr-ID scaffold0089 4; pos 2215233 to 2215925 reverse strand)
gcttgtatcagcaggtacgaccacgtgttcttacacctgttacttaccgctgctgtttggctgaggtttgagattgctgcattttttggtcgcgtttttttcttttgatttgtgtaatggcggtggcgtagttgtgtaggttgttgggcttgtgtgttttctgacggtgtaattggcttcaagcgtattttcatttttgatctagtcttttgtacgaattgtgatggccattctgattactgagtcgtctaaggtttaattgcttgtctccaaatagctggaaatttctttttgaaaattgttttggcattactggtgtaatgtgagctgacagatttactgaattatggcgttgatttggaagtttaaattgttaattttctggttatggaattcagaggtttgagtcctttattttctttgttaactcgggaatgattttggtggatctgaccgtgcgatttaaatttatgtctgggaagattgattcctgacatgctttgtgcttggaggttatagatcgggtttaaagcttgctgaattcacaaatttattaggaatgctaaatgtatgtcagtaccaaattgtcttactgagtgggtttattgtttatttgagcgaatcctgaattactgtaaggataccggccaaactcttaactgttcttattacaggctacagtagggcgttgta

SEQ ID NO: 66415 - DNA, 236 bp, Cucumis sativus
  Intron number 2 from transcript Cucsa.125380.1 (locus Cucs a.125380) derived from phytozome v7.0 (chr-ID scaffold0100 4; pos 114913 to 115148)
attaaggtcacaagagatctcctcttgatcaacgggtttgtgctcttcttcttttataaaaccccacaatgttcttttctttctttctttgataatagttgtttagtgcaaaatttggagagcaggatagggttgttgaatcatgtacgtttaagggtgaatatttgaaaatagggtgtgtttattttgatgttgagaaaggaaagataatagattattaaatggataggcaagcg

SEQ ID NO: 66416 - DNA, 871 bp, Cucumis sativus
  Intron number 1 from transcript Cucsa.120170.1 (locus Cucs a.120170) derived from phytozome v7.0 (chr-ID scaffold0099 8; pos 2186188 to 2187058)
ctcattcttttgaaacccatctctttctgattttggtatgcttttcttcttgcgtttccacaatttgctctgtttttctagattgggattatcatcttactttcatttgttgatttgggttctcgaggtttttggttctgttgccggattttctgtcggaatttgcaaatttagagttggctctccttggattcttttacatggttttggatttgatccgtgtggaattgattttcccctgcatcttttgtgttcttattcttgatcaatctttcatagtttctgggttgtttctgagtaaatctattgccctaatcttgatgttcaataatggaagctcttggtatattctgtttagcgtgtatgtgtgcgtgctggcggttggagtacgctctttgaagatataaatggaaacttttgatggttctattcaatgttattgactcttgcatctaagcagatctttacacaagaggtttctatttccagatggattttttttgttttcatcaatcttcattttaattccctgttgggagctaggatcgaaaaggaaggaatacattcatttattaatgtattgaggttttaattctatgtccactgttgaatattttggttgtctgtaggttgtttttttttgttttttcaaatttttttttaattttcttctgtcaaactgagattttcctccgctcttcatcggtcaacagatttcgctcttttttcttttcttttcttttttatacagtgtttgacgagctgctttagtattcttctctgtttacagcatggagctctaattcttctcttatcttcgccttttgcattttcagatcagatatcgaccaaaggatctgactacagaacc

SEQ ID NO: 66417 - DNA, 721 bp, Cucumis sativus
  Intron number 1 from transcript Cucsa.059800.1 (locus Cucs a.059800) derived from phytozome v7.0 (chr-ID scaffold0062 1; pos 394182 to 394902)
agactgatttcgagttttggaaatctttgttccctgtaagttttttctgggttctgattggctactgccttaaattatcatgaatagtcatgtttctttcatccgttgttgttctagtgtttgaagaaatactcccgtggttaggttttgagaaaggttaggaaatttctggttctgtttgactaacaagaaaatttaggacggttgagttttggcaaaacattagaagtgaaatttagttaaatgctttctttaaatttatctattattggtgggaggtttttcccaacaagacccaatgagaaatcaagtatttggaaaaaggaaatacccctgtttatgctgttgtcgattgctgagaagctttggaagtttttctggatttcttgtccaattttcatcggcaatcaatcttgttgatctagttgtggaagaattagcgcctatggttgctttctgagattggttaggataagggcaagagaactaattcaagtccttttttctttctttttgaagaaaaacaaattcaagtcaacttgctaactgctgtttatcataacttggttcctttctagagataactgacaatttatgtatacataagcttaaacgtggagaactcatcaaaattgtttgtagttgattgttgttttggaattttctgtctttaaatgtggtgatgattttgactaggttgctgtggcccacacaattggtc

SEQ ID NO: 66418 - DNA, 307 bp, Cucumis sativus
  Intron number 3 from transcript Cucsa.099170.1 (locus Cucs a.099170) derived from phytozome v7.0 (chr-ID scaffold0092 6; pos 52757 to 53063 reverse strand)
ttttcttactgcgactgttctgggtgttcaacaaggttatttctcagtttatgttttcaagtgtttatttatctgtaacatgatcttatgtttggtgatatgaaccctaaaaaccctcttgccattttattggttttcttcaatgtttgaaaattgaaagtaaacaactgaccttttatgtactttctatttttgaatttggggactggattctatttgaatagttacctttttgttgcgtcaaattgatatatatatatatatattattttttttattattatagcaaataaagctgtggaagtga

SEQ ID NO: 66419 - DNA, 882 bp, Cucumis sativus
  Intron number 1 from transcript Cucsa.065750.1 (locus Cucs a.065750) derived from phytozome v7.0 (chr-ID scaffold0069 6; pos 410921 to 411802)
gaaggcaggaggaagaagagtgtggaaagtaaagttctactaccaacagaacatgcagcctgagttctattgtttcttttttggcacataaagttatggctaagcaaaattagccgctgccattgattgggattatggggtttatgaagaactttagtttatattgcttagtgaaaggttggaaatgagtgttctggcactctttttctgcaggtagttctgatgggaaatcttgttcgtactgtttcttaatattttaaatcaaatcttattagatttaggagtggacaaaaaatcaaatactttctccaatttattaccaattcactactgcagcaattttgatactcaaacgcattacttaaaagagagatccaaagtttctcttttaccattactttttgtgtgtgtaaaatactaatcacaatgttgagggatattccaatttagtccattgtttaggctaaatttccttgattttccaaattggtttggctgaaaattaaaacttgaaaggtgtggtggtgacttggaaaaaattgaatttgaaacgttgcttcaccagagatctttttgttgcgtttcaaacacattatagtattaaatttaaaaacatttgtgaaagattgtaagctactgatatagaattttggtcgcatttttaatataccattcaaaattagattaatatatacacattatagtattaaatttaaataagactgatgtaaatataatataagtaataaaaatcttaaaagttattttaaaatataaaaatgtttgtttttgagattttggaggtgtaattcggttgaatgctaacggtctcatccgtacaaatttcacctatgccttgtaatgagagattgtcttcttcat

SEQ ID NO: 66420 - DNA, 875 bp, Cucumis sativus
  Intron number 1 from transcript Cucsa.012090.1 (locus Cucs a.012090) derived from phytozome v7.0 (chr-ID scaffold0015 4; pos 1537049 to 1537923)
ggacttggagggtatactacacaatcccttaaaatactttgtcttttcttttctttttttttacttttttcttttccatctctaacgaaaaatcgtaaagtttttagtgagcatctcgaaaatcaattttctacttctagataagaacgtcatatcaataaaattcatgtttcattttatatcagtatatgaagtcattagaggctaaacatattcaaccttttgttttccaaataactttttgacttaaacatgcatctacctctgttttggctttaaattttttgttacacactgcaaaagtggtttgattgaatataatatcttactatatataaacttattaatataaaagaaaacattctgtcaaagtgccttttagtgggtcttttttttttttataaaaaaaagccacttattcatccactcacataatagaaaaagtagaactctattataattagatcatatgttgattcttgaagagtccaaattagtattaataatttgttcaaagtatgaaatcatatatacttgaaacaatcattatttgattcttggtttattggatgaagaataattttataaaaaaataaaataaattatcatttttggtgttgttcgtaaggtgggttatgtccatatttagtgggcattttttagttaatatattttgattaaaccttaaatttagttattcaaaagttgattttttaatcaaaattagttaaataaataaaaacactttctaccattttattcacatcacgtgatttatatatgaatataagttgataaaatcaaagtgtaacaaggttgtattgaattgaaataatgcagatatcttgctgctaaaagtgaagctgatcattaca

SEQ ID NO: 66421 - DNA, 414 bp, Cucumis sativus
  Intron number 1 from transcript Cucsa.042060.1 (locus Cucs a.042060) derived from phytozome v7.0 (chr-ID scaffold0054 0; pos 544478 to 544891)
ctggtgaagcaggtgatttcactttcaccctttttaatcctcttttgtttgtatatgtttttctttagttcaatcttggatttctggcatctgggcttgtgtttttctttttcctttttattcttatcgattgcattgtggtttccaaatccaaattcattggtttgatttggggatttcatagtttttgcatcttcttcttgtagttgatatttggaattggaggttccgttttacattgtaatttctgaattgttctgtgtatgaagatttcatttattaataaatatgagataccttggctgtttcctattgatcattggtgttgttatctatgttttttcatgaacagaagttctcatactctataaatccacaggccgagcgctcgaagaaatcagaggttcgctttat

SEQ ID NO: 66422 - DNA, 550 bp, Cucumis sativus
  Intron number 3 from transcript Cucsa.042060.1 (locus Cucs a.042060) derived from phytozome v7.0 (chr-ID scaffold0054 0; pos 545299 to 545848)
tcaggtcttgccaatacaagtctaaagcataacaggtttccccctcggattctttttcctttcctttgtctttcacaacgagtcgttggtcgggttgcgcaagagggggggatattgtttttaaaagctattgaggcttatgcttaaggctcgcctcgaggcgaggctctaacttttagcttgaaatttaagcctttgttgaaccataagaggcttacgcctcccatagaaggggtttacacctttgtaaaagtgtatcaaggattaaaatctctacacctcgtgtaatggttggaaaaatactagtgaaaatttgaactcttttattactttttactggtgtaattaaaatgtcatcaaataccggatttgtgaaatgttttcatttcaatttgaggtttacgtctcatacagtctcgaaacttccacttcacctctttaagaagaaaagcctcaaggttgcttttagctttttaaaatacttgggaggggaagcgttttctttggtttcttacttttgaattcgatgtgcagtgttggattctaccag

SEQ ID NO: 66423 - DNA, 488 bp, Cucumis sativus
  Intron number 1 from transcript Cucsa.164640.2 (locus Cucs a.164640) derived from phytozome v7.0 (chr-ID scaffold0115 3; pos 38900 to 39387)
tcgcaccgggacggagtaaagtttaagcaagcaacgtgtgtctttccggcaaagatatttcctcagatcctttttttcactttatctctttcttcctctataaagaaaatcgacgctgtgaataatctatcattaattatttgtttctgcctttcgctttatctttcatttcattatctttttcttctctgctccacttgctataacctgcaaatacgtttgctgcatttcgttactttcatgatttgagagctacccatcttcgatttcgattgcttttcagctctaatcaagatcttgttccttcagcattttgatctgggtttgatccttttagctcatcggttttattttctgtgattcctaactcattggttgcagtttctttcttcgtcttctgaaattttgattctgggtttttgtgttttgttttgtttgatgaaatgacaatagaagaagggagttcgtttcatcgggatagcttggtg

SEQ ID NO: 66424 - DNA, 946 bp, Cucumis sativus
  Intron number 1 from transcript Cucsa.031490.1 (locus Cucs a.031490) derived from phytozome v7.0 (chr-ID scaffold0042 9; pos 511947 to 512892 reverse strand)
ctggttcaccgattttttgcattttgtatttattggtacgttctccctttctccctcgggatattgggatggggtgattaaaaagttttgttgatgtttgatcaagatgattctctgacttgggttttggatttgtgggattgtgattggtttgggttgttagttcttttttaaaaaaatccgtaatagcatgtatttttgttcttgatttctgtttgaacccaggatttctagattttttaaaattattttcttcatatcgatttaggtatgttgatgttgatccgaatgggatatcaaattgagggaatcgtgttcgtttttatctgaataaaatattgggtttctagagcaacatgttctctttcttagcctagttgtatgtattaatggttgattgcatggcgaagataacgagggggttcgcgtagtaaagaagactttacttttttgaatatgaaaaaaggggtttttgttttacttttaaaataatagagcaataataggaaaaagcatcatttgattttccttcacgggttttgttgcatattttgctttaatctgtttgctttttcataaagcgttatttcatgattgcagatctgtatcctctattattattttttttattatcattatattattattatcatcatcatcgttgttataatatcattttttacttcgttaggataacgttttgtatgaaatcaatgtttgtcctttaccccttgattcctccatttcgtttgctttttgttttttcatattgttcttcaattagattcagttttgccagattgtagttttttttttttttttatcatctcctaaggctctcatgttagggacgtctatgaatttgggtggtttgtttattgtattctattgaaggttgagagttttctgatttcatcttggggtgttatctctatttttgcagcga

SEQ ID NO: 66425 - DNA, 791 bp, Cucumis sativus
  Intron number 3 from transcript Cucsa.043670.1 (locus Cucs a.043670) derived from phytozome v7.0 (chr-ID scaffold0054 2; pos 403498 to 404288 reverse strand)
aaattgacaacaccggacttgtttgttagttctctctctctctctctctcatcgaaaatgttaggttttacttgttttagttcattaaatattactgtagtggaatacttgccaatttcttgtttgtcggcctgtaggtataagtatggtccgtcggatagaacaagatcacgtaggtgattctgtaaatttgactgagttcgaccggaatgtcttaaatttgtcgcaaagttcaaattgattgtcgttgtgcaatcttggtactttttttgtgtgctattgtttgagattttatgttttgatttctcaagtttgcaaatctattttggaatttgttgtcgtttagtatttaatataaattgtgagatgtttgttttcaaattcactaccagaacctatacatgtggattggaatgtaagtaacggttccatacaaattttttgttgaatgcagcacaagtttttgactaggatcaaaacaagtttttcgtagaaaggttaagtgatcaaaataaaatatttgaaaatatattttgcataacgaagttaatcttaaaatctagacataaatatagtatgaccttttttaaaataaaaaattgaatgaaaggtttttatgattttcttctcaggtccacttaccattttagtaaggttcagtgctttagccctgattgattacactgctgaacagacacttgttcttcttgctcatttagtgtattttatttttagctgtacgtctagtctgatgggcgaattttcctgcacaggtcattggccatcagaag

SEQ ID NO: 66426 - DNA, 559 bp, Cucumis sativus
  Intron number 2 from transcript Cucsa.161520.1 (locus Cucs a.161520) derived from phytozome v7.0 (chr-ID scaffold0114 4; pos 1424300 to 1424858 reverse strand)
tttcatttcttgaaagcgagatagaatctctccaggttggctctcatatgtttcttgactgaaaaaccgtactaatgcatgtatcgtcatgatgtttagatatttaataaagttgaattggtgatttaattgggaagaaaacaacaacaaaggtttgaacactgagcctctcagccgaaagctaaatttaatatgatatttgatgtccctcacttgtggacttcaaatacgaataaagtgaaaattaatattaattggggagtaaacaacaactcagtctcttgaacacggagaggtctgaaccactggaccacttgctcttgtaccatcttaaatcacgaattcaattcaaaaggttaaccaaatttagatattacaattcaattcaaaaggttaaccaaatttaatataatatctaacaataattatagagattaattttcttatactgttactgcctcgtgtaatgtgacctttactccactatattctctttttgggtattgtgaatttttatgctattgtaattcttcttttgagtagagagaagggaaattac

SEQ ID NO: 66427 - DNA, 1044 bp, Cucumis sativus
  Intron number 1 from transcript Cucsa.179880.1 (locus Cucs a.179880) derived from phytozome v7.0 (chr-ID scaffold0123 3; pos 245205 to 246248 reverse strand)
atctttggaatttagtcatctttggggaagtgttggtacatgctcattatcttattctcccctttcttaatttctcttataaatgtctcaatattggttgttaactttattttctgtcttgtaacaaaaagatacttttctcatctttcaaaatcaatttaatcagtttgattttgttctttttattttaatgaagttttctagttgtaatatttttaaagagtcacaacattttttcaaatctattttgaattagacttaaagacggttgatttgtcctcacgtaatagagatggatcgtgggattacaaagaacatatctcttaaaggcgacttagttggagttttagagtatgttttgagattgtttttagaaatcatgattctaatataattgatttattaagaaatgatttttttttattaaatatggtttttatattgtttggttgtagtatgaatttaaaggtgctttagtacaattaagaatgctttctaatgacttgagaacatgttaggagattgacttctaaattatttagttataattacattttgcaagagtgatttaaaattaattaaaagtatttttaattggttaatccatgtttttaaagatgattttagaataaccaaattgctaaagcaaaacattgcttttgtgagattgaaaagaaaaaaaagatgaaaggatatggtaaacaaaaattatatggagagaaatagaagtttgagctaaactttctttaaaaaaacattaaatagaatattttcatgatcattttctcataattgttgaacatgatttttattaaaaaataattcctaaatatactcttaattttgaatactttaaatttagtataaagtagttatagaattgagaagaaataaaatttaatttagactatagtagtatattaatttatagtgtgagagtttggttgaatagtttaatgttggatgtatgctataatgatcttcacattttgttgcataattcatccaggctttacaaacaataatccaagaaacaacgataaa

SEQ ID NO: 66428 - DNA, 600 bp, Cucumis sativus
  Intron number 1 from transcript Cucsa.185540.1 (locus Cucs a.185540) derived from phytozome v7.0 (chr-ID scaffold0127 4; pos 1020707 to 1021306)
attctgaagtatccatttctggtaagtattcctctattttttctctctctctctttttcttcgcttcccaagcctttatatttgaaaagttgaaggttattatggccatggtattctaatttggaagatttgttttaatttaattatttgctatttcattcttgggtttttgtttgatggtaacacttgtactcggaagaaagggaagttttatgagggacttgaagctgttgattggctgatgtgtgttaatgaagtgatttgttatgggcaagaaaagggctttgattcattggctgtattgttggttaatttcaaaagaacgtgggaacatgattattagttttggatctattttacttccaaaagtgaaatgcatttcggaattcggtcttgcttgttcttgttcagtttgatttatgtctgaggatttacggttttagttgttgctttcacttgacttttatggaactaatgagaaccaactgttctattggattcagcctaacttggggtccttcacattgtattttatattatctgacgatgttgctataatttgcagaactacgtaaaaagcagaaacaagaactcgaaaat

SEQ ID NO: 66429 - DNA, 1020 bp, Cucumis sativus
  Intron number 1 from transcript Cucsa.193960.1 (locus Cucs a.193960) derived from phytozome v7.0 (chr-ID scaffold0133 7; pos 98694 to 99713 reverse strand)
actccgtttggatttcttggattacaggttcttctaatacttcttgttgatcgtttggagtgtggctaatttagttgcgtacttgcttgcttgtttgacttgttgatcggttgaagtagcttttgcttgctcaaattaccaattctcccgttacgagattgaattatatgagattacttcatttgcaagcttcattgagtaaagctctggaaattctattggcaagcttcatttagtgtttgacaaaatgcgtaaaagacatccctcctggcataagcttcaattggagatagtttcgattgcccacggtttgacactctattggagagaaattgaaaagtgtaatatgaacatgcattgggtggtttcacgaactgatatttcttccgaggagttggcgatttttgattgaaagattgcatgttttgaacctatgaaatgcttcagtcaccctttaagtagaatatacactttagtttgaccagcgtcatcaacaaaagtctggacactacgataattggactatcgaacacttgacactagactcttgttagcacataatagaaactattgtacgaagtcaatataggtccaacatttgtaactgcacgtattgaacatttgctaactatactaaatagacatatgataatataggacagagaatttacagagaaaatttgagactaaaatacatcaaacgcatttgttttattgtataatcttgttgaggtgcacatttgagaaaagacgtccatgtcctatatttttttaaaaaattgcgtctcaatgtgtttatgtctcatatccgtatctatgcttttcccatatgaggaatagatgttgtctttagaaactctatattgctttcgccaatgatttgttcaaatttcattatacagattttttttttctccaaagagatttgaatttaacgttatgtgaagccattaattcaattcagtgagatacgattgatgtgcaggagactttcaaattggagacgacattcaaccacta

SEQ ID NO: 66430 - DNA, 201 bp, Cucumis sativus
  Intron number 2 from transcript Cucsa.156620.1 (locus Cucs a.156620) derived from phytozome v7.0 (chr-ID scaffold0114 0; pos 2363 to 2563)
aaccagaaacttgaggttcagaattctaaaccgaggtaggtgatgagtgattatcaacttcctctttgtttcttttctttttaatttaatgaagtttgtagattcgaatcactaactttctagttgaagtcaaactagtttgatgtcgatctgagttccttttcagggatagagctaaggagcagccttgggtaaaaatca

SEQ ID NO: 66431 - DNA, 1006 bp, Cucumis sativus
  Intron number 2 from transcript Cucsa.025360.1 (locus Cucs a.025360) derived from phytozome v7.0 (chr-ID scaffold0034 5; pos 207631 to 208636 reverse strand)
tgattgtggaactctcttttccaggtttttctctaaatcatatcatctttaaatagcatgcgattgaaattttgtattttttcttcctttattaatctctttgaattttttatcaattttttttagttttataatttggttaacttcaagtcttttcgtttcaaaaacatattacctattactattcgtaaataatcaagacactcatttagattgatggttcaatctttaaccaagactttagctttcatttttagtttgatgtgatcacaattttgttttaaattttttgctttttggaagtcaattttacatattaacattattttttgcttcaaaacttttatgggccatattaaaaaccataaaatctaactcatgtttgaaagtttgaaatacatgtaaagtctcctactccctattgtctttgttcaaaaaatagaattgagataataattttaatatgaaaaaataagtcgttagatgtaatctattgatcgtatatcattatctaggattgataaattataatattttgctatatttgaaaatattgttatttaaaacaattcatttatatataataaacaaatcctaacattttgttttgctaacaaatttgaccacacgtttcaagaagtagattataaaaaatgtaaccaaagaaacaacaaacaataagaataaaatggttcaaacttatcaacaacttatgaaaaaattggcaatttgtattcatagaataatacttgaaaatgataatttataattagcaataattatttattgttgacaataaaatatattgtcattataaaattaattgcgattatttttaaaagcgctaccaattctctaacttcaatgggttaattatattcaacgattgatcacaataactgtcataaaagatagttaggatgatttttaaagtgttgttagtaataataacctctcatgtttctttgcagaagggacagcttcatcacccacagagccttttgca

SEQ ID NO: 66432 - DNA, 633 bp, Cucumis sativus
  Intron number 1 from transcript Cucsa.095360.3 (locus Cucs a.095360) derived from phytozome v7.0 (chr-ID scaffold0091 9; pos 1257630 to 1258262 reverse strand)
tgaacttcgtgtctgcttggtctgggtgtttttgggtaatgttctttatactgattttgggtttttcttaatttttgttttcttcttcggtactttgaattctgttttttttttttaatttattgtgtgaactttgaaggtattcatttgatattggatttttatattgaaatgggattaagaaggaaaagtgcagctctttgcatattggtagtgaaagaattggtggttagggacaatttgtgggttagaatgttttaataggctctattgttagcagtttttgtttagagcctattttccttggctgctaggcgtgagtaatttctagcttgatttatgaagaagtggaacaatttcattagttctgttgtttgattccattaaaaaaaattaccaccacttctctctcattttgaagggttggtagatgagatgacttgagaagaattgaattattggggataagatatgctgagattgtgggatttatttgtggagtaagattccgaatatttgatatgaaatggagtgccaatttgattcttgagtttacaatttgtactgtgaagtctaattagatttgatttcatgatatattaatacgtctttcttttggattgtgttgacaga

SEQ ID NO: 66433 - DNA, 640 bp, Cucumis sativus
  Intron number 1 from transcript Cucsa.196960.1 (locus Cucs a.196960) derived from phytozome v7.0 (chr-ID scaffold0135 7; pos 515486 to 516125 reverse strand)
tcgagcaggctgaaaactttgcctctgttctaaaggtgcgctgttttctgttatgatttgtttgtgtttatgggagattggggtgattttggattttagcaagtggggtttcatctgtttcttggatgattatagttcagttttattgcctcataatggaatattagggtcatgcaatgaaattttgtgttcattctctaggtagtagttttttttttttgtctcattttcagttatcttttcacccgttttgctttttccatatttcaattctttaacataactcaattgggtaattttgaacaaacatatttatgagcaatagtttaaacaattagtctctacatgtgtacttccttacttttatttacatttcttctgtgaattctcctcctttgttaattaagctggtgttctgcttgttaaacagacatgtttgtgggcagtagtttaaccagctgctctctacatatgtatttccttactttttattacattaattttgtaagtctcttttatgctcttatgtagaattctacttctttgttaatttagttggtgttttacttgttatatgctcatgagttctagccggtgtgctgcagtttcaacttgaagaggctgttgagaaagaagactt

SEQ ID NO: 66434 - DNA, 506 bp, Cucumis sativus
  Intron number 3 from transcript Cucsa.176350.3 (locus Cucs a.176350) derived from phytozome v7.0 (chr-ID scaffold0122 5; pos 641152 to 641657)
aggctttaggggttttacatcatctctttccaaaggtacactgctgttattgttatctatttatacctatttgtagaaaaatttgaatgcaatagcttttgtttttgtaccatgctaaattagaatagaatcgaataatatatggattcttgacaaaacacgtttcaacaatatctaaatatcacgtttgtgcttaattgggtggatatattgaagctaatgtttttaagatatattgcctatcaggacagtgccaatcaaccttcattggtaatagtttactttggtggcaatgattgtatgcttcctttcccttcttctaagaacccttatgtaccgctttctgaatatgttgagaacatgaagaagatagccattcatctcaaggtcaactgctaatacatacactattaattttgcatcaatgaactttcccttttcctttgcttatttgtttctcacgtttgtcagagcctctcagagaaaacccgagtcatcttccttac

SEQ ID NO: 66435 - DNA, 930 bp, Cucumis sativus
  Intron number 2 from transcript Cucsa.047510.1 (locus Cucs a.047510) derived from phytozome v7.0 (chr-ID scaffold0054 2; pos 2513356 to 2514285)
ggacagaaggctgtcaagaacagtgcttatcccaggtttgattttaactctcagttaaacaagccttttgtttattcatttattttttggtctgtgttactttttacttgaaatctacccaataattaatagaaattaaggggaaaaaacgttcttcagtttaaagagaatatatgaagagatttattatgtgttcttaacctaaaattattagttatgagataattgatgtttatcgcgtttaggaattatctcttttgtatttgtaactgagtttgcttattattgtttagcttccctctttgtggctagctgctttgtcgaattattcgatttgttttgtattaggctttgagattctttgctttcttaaatagtttgagatgtaattaacaatgatcttagatatttggttccctgtgaattaatgaggtttatagagaagtctttattttttaaaaaatgaaaatctttttctgtgtgtaacatcaaattttaattaacttctaagttgaatgacaaaatgtttaatcaacaaatatgataaatttatatcttgattcacacttttgaagaaccttggtttatatccaaatgcacaagtaataagaataatatatgaatacaatggttttttttttaaaaaaatcaatttgcttaagctttttttattagtttcagtcgattaaaaaagaagtaaaaaaaaaaagaagcatattatttgaccaacgggtgtgaaatggagaaggaataatgcagctttccttgaattgacaaactgaagatgagaaattaaaccatttcaacgttgttaatacatatttcatgtgctaaagtttagtttacttaattaatcttgtattaaaaatttaatataaagggtctaaattacaatgtttttgtgtgatcaatttgcagaagctattacag

SEQ ID NO: 66436 - DNA, 782 bp, Cucumis sativus
  Intron number 2 from transcript Cucsa.091430.1 (locus Cucs a.091430) derived from phytozome v7.0 (chr-ID scaffold0089 4; pos 2453835 to 2454616)
aggtagctaataaagagacatgcatttattgaaccaagaagaaagttgtgctgtgttggttatctcgatgcttaatgttgtttttttagtaggatgagcttcatggcaatcataatttatgttgatcttaatttgattgttgttgggaacgactatcattgtagtgatagtcaattcccaacaattaatatctccgcatgcttaacattgtagaaattgaaaatcattttctgttgtttctgtgctagtagagtggataaggctgtttacctgcttacagacgagaaggagattgttgatcaactctccttatgttctcaaacaacttctgtgttcttattgatattctttgaatggcttgactggaagtcattaatttagtgagaaaaattgtctagaagttatcgaaagaaagtgtttagagagagaaattagtgaaaaaaggtgcaatagagagtaatcaagaaaaaagtatcattgaatattaatttgctggttagtttcgactctagttcattttgacttgtgttctactttcaacttttgtttgttattagttgttttgaaagtatagggaccaaaataaaccgacattgaagtattgagacaccaaaagtacttatttgattttttatctctctttctcataacttctagacttcgatcataagagaccgtaacaaggctagaagtgtttttgatttgatagccaacttgttttgccatctatgttgtagtcaataatgaaactctacagtgactatgctctgtaaaatatgcag

SEQ ID NO: 66437 - DNA, 725 bp, Cucumis sativus
  Intron number 2 from transcript Cucsa.146540.1 (locus Cucs a.146540) derived from phytozome v7.0 (chr-ID scaffold0110 0; pos 8461 to 9185)
gctgagcaagtacaagatccaggtttgcttttttgcttcttttagtaaatcttcaccataaatttttcataactgcaagttcttatggatatttaagcaatggttgatatatgaattagatttgattttgttagtgattcttaatatcttatcctaattgattatgagctagattagaacttaaactagctttgattatcttttctttttaatctcaaacaaagaaataacaggaagtcagaaagtaataaggatttcaagctttactttaaattgattattttttttgtaaaaaaagaatgttaaattgcaaatttggtcctgatggtttgaagaaagttagaatttagtcctttggttttattgaactcccacaaatagttcctatgatcatgacaattttttgggattttatcaaactatagagacaaaaattctaactttctccaaacgaaaggaaccatatttgtaattttagcaaaaaaaagaacaaaaaggaaggaaagaaacaaaattgtttctcattgattaccatattgacaatagtactgatacttatgaatgcagataaagtccctaccaactaggttttccacccagtaattacagttcaactcaataattatgtaactaactttaattatggatgcattattttcagttgtggtataactttttttctgcttttttcaggcgaagaataacagtcctgctgctcaaggaaa

SEQ ID NO: 66438 - DNA, 467 bp, Cucumis sativus
  Intron number 1 from transcript Cucsa.166080.3 (locus Cucs a.166080) derived from phytozome v7.0 (chr-ID scaffold0115 3; pos 1376522 to 1376988 reverse strand)
cagcagcagcagcagcaacagagttgcagcagcaggttttcttttttgaacatacaaatcttagctctcttcttcttcttgattttcaaaaacacaaacccccatttcatctaatggcggtgctttggcttttatggtaaaaaaaaactaaacgaaaaagcatcaaactttgactcattactcagttcttcatcaacaaagattttatcttcttctttcatgggtaattaaaaaattattacattttgtttcttcttcatcttctttctcattcttttttttttttttggtgggttttccctttaatgaaaggcaaactctttctttttcttttctcttttccctttcttttcatctaacccacacgagaataccttctcctaacaccaaactctctcttttaacccttcttttttgggtgtattgtttcaggaacaagctttttgagtgaaaaaggaaacaaaaaa

SEQ ID NO: 66439 - DNA, 378 bp, Cucumis sativus
  Intron number 3 from transcript Cucsa.139810.1 (locus Cucs a.139810) derived from phytozome v7.0 (chr-ID scaffold0106 6; pos 1097940 to 1098317 reverse strand)
gagttgacagaagacttgaatctattgaggaagctgtaagcattcttgtgtcaatctgtttagttatttgaatgtagtctgaacatagttgcgtttttatgagttgtcgttttgaagatgttctctcttttgtttcaaggaagttaatggaaaacaattacagccgtgcaagcatttttttatccatttttcctccagtatatgcatggttatgcttcattttgagtactgaaaatttgtaaaagagatttaagtcctatactatttgtatgctgcttttcttttaacttctttcttttgctcatgaacgctcttgtttttccatctcaccaacactaatagtggttagattcacattcttcaattttgtttttgcag

SEQ ID NO: 66440 - DNA, 594 bp, Cucumis sativus
  Intron number 3 from transcript Cucsa.056310.1 (locus Cucs a.056310) derived from phytozome v7.0 (chr-ID scaffold0060 2; pos 458671 to 459264 reverse strand)
ggtacttccttcttgtctctttttccataaactgcattgagatagatatggaaaatcaggtctagcatgtcgtgtttttattttccatttcatattgttactttccttttcttattcctacatgtttggagttaatttgatacttggaaataccccgattctttcttttacatcgtatatttgaatttcctacatatgttggttcattgtaagcacattggttatcatggtggagtattaatcactgactcggtttttggctagatttcatgttttcctttgggcttcgattttgaagcacttttgtaattactctataagtaacattttagttagttggtccctcttctgttagtcagggtcttttggtgggctgtttttttttttttgtatgtccttgtattctttcattctttctcaatgaaagctgtttggttcatcaaaaaaaaaaatcactgacttgtttgttcttgctgtgcaaaatcattacctcttaatttcaaaataaatgcacattacaaattccatatagtttttaattgagttgtttgtctgacaggttccgtggcttcttttggaaagcagccagaatag

SEQ ID NO: 66441 - DNA, 738 bp, Cucumis sativus
  Intron number 2 from transcript Cucsa.178590.1 (locus Cucs a.178590) derived from phytozome v7.0 (chr-ID scaffold0122 7; pos 895855 to 896592 reverse strand)
accattggctttgcttgggcatttgttgcaaaaaggtatttctatatcataagaaaaacaaaaagaattaaaccatagaccaaaagaataaaaaagattaatgaattaaataaaatccacatagtctttgagcttaaaaatagttgcatttgatagtgcttcttcatcaatgtgtagtttttatacttttccataaatcttaaaatcaatattcatcattagtttaatcgtttattttttaggattgttattacaatttataaaatacaataactaaattgttactcgttaaagttcaaacataaaattgttagatattcatattattaaaggacaaccgtttggccctcagatcaggaaggttttagcttcttccacgtttgtctcaagattaggactattctacttttttttcttatttatcatattcttcactctctcctttcactatttctcacttctctctttcactattcctcactctctcatttaactatttcttacttttccaagcataataatctgcacctcaaacacagattatagtaaaccataaattattataacccacaaactataataatcataaattataataactcacttcacgcctcaaacgcttccagagtctggaaattaaacaaaacatataattatatatatgtgttacaaggtaataatgtatgtatgtgtatatatacatatatatgaatgttttgaaaatttgatgaaggtggc

SEQ ID NO: 66442 - DNA, 603 bp, Cucumis sativus
  Intron number 1 from transcript Cucsa.172260.1 (locus Cucs a.172260) derived from phytozome v7.0 (chr-ID scaffold0119 6; pos 164160 to 164762)
accttgctttcgatcttcggacttctcaggttctgtttcatttgtaacgagtttacgtattcatggttgttgttttgtttgtgggagagtttagaaggaataaagacgagaggaaaaagagaactactttttgtttcctttcttttgttttttggttctgtattttttataattagaaatagtgagtgtatagtaagaatgtatgtttgtttttgctttacagatgagcttaatgacatacatttccgttcttaagaagattgattgtaaaaagaatgtacataaacgtttgaatgtactataacctaaataagcttttaagctctatgatgatttactatagtatcaaacgacggggcagtgcgttgaactcttgctcgaccgtgtatcccatattgatcaattatttacgtgttggcattgacgagttgaattgacactctactacttgacccatgtgattttaaaaatgtgtaaaagattaggtatacttgaaccttttagctcgatggtgagaaatttagagaatatagtatgattaattttatatttcttttcatgacttcagatatttcggttaggccctgttcagtcagtttgcat

SEQ ID NO: 66443 - DNA, 950 bp, Cucumis sativus
  Intron number 1 from transcript Cucsa.007810.1 (locus Cucs a.007810) derived from phytozome v7.0 (chr-ID scaffold0009 5; pos 10161 to 11110)
tcgttacggccgtgtaagtaattttgctcaatcttctttggttttcagatctccaatccattttttccctctaattgactttgtgtttaattaatgcttgtattacgtagtggtggttgtttgtttaatagtttattcgcagttttgatggaagggagcaaagtctttgtgagaatctgaatatctaataatacatatggggttttttattatatgtgcaacttgcttgtgctgccttttttggttttcgtttctgcatggaacttggattgtggttttgtaaagtaattgggtttgtttaatcattttttgatgatgattagtttatagtttctgtgttgggaatattttaaggtctttgatgattgcttaagctcttttgaatctaagtgctttctttttatgtaactttttaaattgttggagaaggctttagtggtttcctgctttaagtgagaacaacttgttgcttttgttggaagtgatgaactgaagtgcttcaaaaatagctcctcccttgttctggttttgtaaggggaaaaagtcagttatggaactcgcttgtttgacaattcatttagcttttgaagagtgtgtttgttttctcacaatttcttttcaataattttcagctttcttaaagtactaattgaggtcctagccaaatcccaaatcccaaaaacatattttttaaaagctacttttaactttgagaaccatcattgaaagtagataacaaaacaaagaaatccactggaaatagtatttataagcttaattttttaaatgggacttggatttttctaattatattttaaaggaataaatattgatgtaacaagctgaatgaacttttgaagcaagaatggggcaactgttggtttagtgttttttgctgataattgcatagacatgtattacagttcgaagaagttttgggaaaaggggcc

SEQ ID NO: 66444 - DNA, 934 bp, Cucumis sativus
  Intron number 1 from transcript Cucsa.054600.1 (locus Cucs a.054600) derived from phytozome v7.0 (chr-ID scaffold0058 5; pos 178294 to 179227)
gcttgtgatctaaaagaggtgaataattgacacgagtgaaattatggatatggttatactagcattacatacgagttgagatataattgtatgaaaatttatttttcttcattttttagttgaacatcataggtgggtgagaaatttaaggttaaatattttttaagaattaaagctaatacatatattaacaatcacttttttttttacgatcgtgttatatgaattttaaaattaagtatgtttagcttgaaataattatgctgagaaataaatttatcataatcatgcgagtgaagagagaaaaaatcttgaaaatattcatatagatcttatgactttgaatctaagactgtgttacagtaacaagttgtattttcttttggtagctcaaccatagaaacttaagagtttagttaaatatgtacaaatttgagtatttttggttaaatatgtacaagtttgagtatttttgaagaagcaggtgggtaataaggtgtgggaataggaagagaggtttgacataccaaatgccaattcaacaaaatagccacgtgctgttttccaacatttgtctaaggtggaccaaatttctaaatccttcctttctctatataaacaaatgcctccttctttctctcaattgtcccctccaagatttcaatctctctttctctctacaaattcctttttttttttaataaagaaaaggagaagagaaataaaattgctctctcttgaaccaaaagaaaaagaaaaggctatggtattctcatcaacttcaacctcaccccactttgtacttgatcaaaagggcttgggctttccaataaaacccataaacattgtgaagaaaaagcccaatcaaagaaaagaggtgatttcatcggcactaaaagtaaactccccgtttgtgttccattttccgaaacag

SEQ ID NO: 66445 - DNA, 576 bp, Cucumis sativus
  Intron number 1 from transcript Cucsa.146980.1 (locus Cucs a.146980) derived from phytozome v7.0 (chr-ID scaffold0110 0; pos 306897 to 307472 reverse strand)
gactgaagaagaagacaggtgatttcatttatgtgtatatatatatatatgtctcattttatttatttatatacatatatatataatttaaatacatcatgatcattaccattgcttgattatctattttgttatattatatctacaattgtaataacttctatgaaagaattatagtattattacactcaaaaataaaacctctcttcaagctatacatttcttgttaccatttcatgaaattttagggttttggaaagattaatatttagggcttcctttcctgtgaggatagagcttcaaattttttcatcttacatataataaaaaggagatttttttttctttttgtttttttacattacttaaccatggcaagaatagggatcaaactatatgttgataataatcaatgacttattcagtgagttatgtttggataataatcgttaatgtattattttttcttttacatcaaaatgttaatatgattattaatttgtttgattttatgttatttttttctgttggtgatgtgaaaattataaagaaaattgacaaggttggtgaagcaac

SEQ ID NO: 66446 - DNA, 497 bp, Cucumis sativus
  Intron number 1 from transcript Cucsa.048180.1 (locus Cucs a.048180) derived from phytozome v7.0 (chr-ID scaffold0054 2; pos 3006337 to 3006833)
aatcttctaggtgaattttagaggctgaaaatcaagtaagagtccataattttcttcttcttcttcgaacagctggttggtgttaggtcaaaatttgagggggttgaactaattttctgtcttgatttgctttcatccgttttttttagttctgggtgtttgtgttttctgggttgtggtgtattttggtgaagtgggtggttggaggttctgttcaaatgaattcagagctcaatttgtaaagggattttcctatttcttctctaaattgatagtttgtaaccgtttcttcctgtagtttgacagtgattgactagtttaaaacaattcccatttgtgtactgagttgtttttgtaagagaaactagtcaacgagctacattgccgctggtttaggaaatttgagttttgggtttctagggttctctgctgatttcggcctcggaactactaatttggcagggggtttgcttcagtttctgctcatacaaacttct

SEQ ID NO: 66447 - DNA, 786 bp, Cucumis sativus
  Intron number 1 from transcript Cucsa.165740.1 (locus Cucs a.165740) derived from phytozome v7.0 (chr-ID scaffold0115 3; pos 1069080 to 1069865 reverse strand)
ttgccgagggtgctaaaattctccaagatcgcattgtacttcctctgtttcattttcatttcttttgtttttttcttattgattttgttgggtttgtgtcattttaagctgtggtggaatttggaaatgttgaatgccttgttataatctggtttaattttgtgcatttttcttcaagtttatatcttgtcacgttctttttcttcgtttggtgtcattttttagcttgtgatgggattaggaaatcttggatggtttgtttattatttcgtttaattttgtgcatgtttcttcgttgatatctctctatgtttagctctttatgtaaagtttaagtttttggtgaaatgtcacatggaggcttttagaaattgacttgaatcttggaaaatactttgtgaaaacaggagaatggggtgaattttgagatagtaccatagggcgattaattatggtatttgaacattgaaacggagaaatgaaaaacaaagtcctgaatatcgatttcaggggctttccatggaaacaaagtgcaaatctatttgagtttctgggaactcacctagaattgtcttcatagaactttaataagattcagcgtattcatcgttcaatttagtattgatttttttttcaaccgcttagttcttttcgagtatctggttctgctgcttctggctgcttacaggttcataccagggagattggctattctataattctgttttttttttggcttttattggtatagggggcacggaatcttagaagtatcaagcagactat

SEQ ID NO: 66448 - DNA, 1068 bp, Cucumis sativus
  Intron number 1 from transcript Cucsa.073070.1 (locus Cucs a.073070) derived from phytozome v7.0 (chr-ID scaffold0076 5; pos 615318 to 616385)
attacaccgatcagatcatcaaagggcttgttctggttagtaatccaacctcttcttgtttaatctaatcggattttgcttttcagtgtgggagactgaaatagagttgatctaacttgaatattgttaagcaaatggagaacggaagagtttggttgatttcacttactttatgaactaatcaaaagtaaaaatgctcacttttaatctttcttctttcctggacgaacttccgaaactctgtctttttgtcctctttccttcttctgtttcttctccaacgcaaccaactttggtaaaactgttattttcttccctttttttcattctcttttcttcttctccggtgtgaccaactttatcgcaaaccacacaccacaactacgggtgtgagagaggagtggagagtgatctgtgactgaggaaagggagagagagcgaaagaaagaatgagaaagaggtagatgagcctttcatgggctgagtatattttgttaatttcaccaaagtcccttcccatcaagtttctccgctgctaagttgttttgctctcaataatttcaataactatactttatttctttctaattggaatattgcacttcatttactatgaaaagttcacacaatttcatcataaatttattttaaacagattctattttgtataaaaatgagtttttcttaccgacggcccaaaatgtcggaaacaaagtttcagaaagggagcggattccgttttaggccaaatattgtattaaatggacgattatctctatagcaatcgttttaaacttttataaataaggattgagtcatcaagaggaacccattttaatattaaaaagaactaaaatggacatttcaaaattgaggaactagaatgtatagaagttaaaaagtacaaacgaaaataaaaaaatttgaaaagacaaaattgaaccaaagcaaaacacaatgttttatccaagtcttactattttgtgctgctttggttttcaagtattatattaaaaaagacgttgttgtgtaggttttgttgcgtgcgggaatagacacgtcatctgt

SEQ ID NO: 66449 - DNA, 402 bp, Cucumis sativus
  Intron number 5 from transcript Cucsa.087890.1 (locus Cucs a.087890) derived from phytozome v7.0 (chr-ID scaffold0088 8; pos 369884 to 370285)
tggtaaacaatttatgtactgttgaaatcttttcataaagctcatggataccctttctcttccatatacttcttattgagtaaagttgatttgtttatcttggttttatgccgtgctttgtgaagtttttcaaaaggcacctctactaaaaggaaggagattcagctatgctaaagataattagtttaggcattgtagaatatacattaaaatattaaattaacaaatgcagtttcattttgtcttagtagttattctatcaaacaattattccgcacagaaaactacctttgatatttaaagaatcaacttattagtattgtgaagcttatatggagagtgtagattgagtttgatgcttgacagtcttttgttaatttcttctccaggttccagttgttg

SEQ ID NO: 66450 - DNA, 647 bp, Cucumis sativus
  Intron number 1 from transcript Cucsa.129540.6 (locus Cucs a.129540) derived from phytozome v7.0 (chr-ID scaffold0102 8; pos 423486 to 424132 reverse strand)
tggttcagtgaggcgaaaaggaaaaaagaataaaggttttgctctgtacccaattttggaattttattcttgttttgatttttttaacgaggtgggtaatgaaaggaatgctattagaatagaattagtgtatcagggtatgttgttaattatgtaaggagataattttttgttttttggagagttttgctataaatagagtgggctagaaggatatggagtgaggcatttggtgagtgagttcgtgatttagtgaatcaattagggcttgaggagtatctcaaaaggagttcagctcccctaataatttgtttttatcttctacatttcaatacattctggttctgttttggattctgtcagaggtatcaaatgtatcttgtacttgtacaagtctcccattaacgaaatgttatacatttcgtaggaaaagaaaggactgatagagtttttgcttgtctgttgtgaaatttcctattttgtttctgaagattggtcttcaattggattggaaccactccaaaaagtttagataattccatttgggatcattctctcgaaaaagtgaggattgaagtgaaagttattgcatttgagatccttctcaaacaggcctggcttgattgctgttctgagttctgagaaac

SEQ ID NO: 66451 - DNA, 1012 bp, Cucumis sativus
  Intron number 1 from transcript Cucsa.069490.1 (locus Cucs a.069490) derived from phytozome v7.0 (chr-ID scaffold0071 4; pos 275336 to 276347)
cgcgaagcttttttgatttggcttcttatttctatgtaaggtttgctttaaaatcttcttgtttaatttttggattgttgattctcattgttcgattcctgtgattctactctagtttagagtaattctgtgaacaaaaacaagaaactagatggcttagttgatcgattcgctcgttttgctgtttaccttcagtttgttgataattttctatttgttttctgcgttccttgttttgtcttcgaatttttcggactgtttagttttcttgctagttttggaaacaggaagtttgaaatgattaatcggatgttaagaatctgtgagtttgtagtttgaatgaatgtaatcgttgtgtaaatcgatgaatgtattaggcaacaagcatttctaaggagaaagaaagagatagtgaccagaaaaagaacgcaatgctttactgatctttctatctttaggttttatttcgaaatcttcttggttaattttcggattctagaatctcattctttggttcttcctattcagctgtattttaggtcaactctgtaaactgtaacaagaaatagaagacttatacgattgaatcgctttgtagtttgccttgagttacgtcggtggctttctatttgtttactgcgtgctttcattttcttattgattttacggacgcatatcctttgaaaaatgtggttagaagaatttgaaaatgatggagtcgatgccagttcccgtcaatttcggatttagaatatcgtggtttagttgagatgttaatattatgtcttaatcgatcgatgccatagataacatcttaataaccatatatcaagaaaaacggggcacgttatgctcccgatttatctcatctttgacttcattgtagtcatgtgtttgtggattatttgaaaggcttaagcctagtgaaattttggaatggtttaattctgacagttgatgcactgaatcacaattttgtatgctaattcattaagaaataaacagcttgcag

SEQ ID NO: 66452 - DNA, 683 bp, Cucumis sativus
  Intron number 1 from transcript Cucsa.185840.1 (locus Cucs a.185840) derived from phytozome v7.0 (chr-ID scaffold0127 4; pos 1248528 to 1249210)
ccaaaaaatacggacttgaagctggtctttggaaggtaccttttctcttctttttcttttctatccatatcttatcaactttattgcaacttataacttagaacacattcatattcctcgctctttctttatgaagtgaccttaggaagtattgatataattaaacttacaatattccattagcttaagcttttggatcaatcattagatcaaaattgcatcgaagaagtaagtcctgtaaccaccttagtagtaatattggttttcactaattgagcattctattaatcaagtttttgggtctgtttgtagtttgacgaatggtgttgtttcaattttttcatcttctgttcagaattccgctggttctgtcatggctttaattaatattaccacttgaattccaaatgcctgccaatgaaggtttttctaaagaaataaaaagaaggaaaccttggattcctcaaaaagttcaattgactagaacataatttgaaaatccaaagaagttaagaagaatacagagaataatctacattcacatttcttgcaatttgaagggttctttatcctttggtctctttacatgagataggaaagatactggttttgttagtgcttagatgaaaatgaatgttgattgtacagatatttagctctaaggaggagggtgaagggacaaa

SEQ ID NO: 66453 - DNA, 248 bp, Cucumis sativus
  Intron number 2 from transcript Cucsa.181000.1 (locus Cucs a.181000) derived from phytozome v7.0 (chr-ID scaffold0123 9; pos 28400 to 28647)
ctggaggtaattataatttaaaattcttcctagttttgtagattgatttcactttctttgatcatttcaaaatttagtgtttggttctgaaatgcttctatggaattatcttggggtatttgcagccatgtttttcccttaaaagagaaagttgttattgtatctcttctttttggttttgtttttcagttccatttcttatgtattttgtagaaactcttgagccagaggtgaagattctaagtctt

SEQ ID NO: 66454 - DNA, 567 bp, Cucumis sativus
  Intron number 1 from transcript Cucsa.101520.3 (locus Cucs a.101520) derived from phytozome v7.0 (chr-ID scaffold0092 7; pos 786370 to 786936 reverse strand)
ctctctcttctcgtctattgtccaaatccaagcaggttttccctttcccaccctggatcggttctgtttaccctacttttcactctctctgattcttcaatgttcgatgtttatgagtgatagtgataatcgtttttattttcgttcttccgttttctattctgaactggagcttgttattgccgaatgctcttatggatcctgacaatggtgaactccttgtcaatttctttgccccctaattcgattttttattcttggcttttgtaatctgttgcttttttaaggttttgggatctgggattttagggtttctttggatgatgatgtaaagtatgtaggttgctatggttttttctgatattagtgggctgccttcaaaattttatattttagacgcatcgtttggaaatggttgtctgtgtacattgaggaaatggtctcttaattaaatgttgcatagaggtgtaatgatcattgaattagctgcttaacgtgttttttttttttggactcccctttgtttttacaggtgcttggcagtcaaagtattttacaccaggggca

SEQ ID NO: 66455 - DNA, 447 bp, Cucumis sativus
  Intron number 3 from transcript Cucsa.098790.1 (locus Cucs a.098790) derived from phytozome v7.0 (chr-ID scaffold0092 3; pos 621007 to 621453)
gaatccgaatttgcgactctggtattttctttttcaatttatacgcaccactgtttaggcataaaagaggaatggattggtaccaatgggtaaaggagttaataacttgatttctctagaaagtatataaattttgtcagttttgttgtctatagaagttatggaggaattagctaacgaagtaatccatccacttgtgggctaagggtttaaaatgctagaaaaatgaaaattttcttagcagagagtttgattattccattaatttctgtcatcttatcttggaaacctttattgtaaacaccttttggtgtcgggtttatctctttgtttcattaatcaatgaaatgtttctatttccaaaaaaattcgtagataaggtagatattcattaccctggttatgatgccggatttgtgtttttggcagacgacggcgtgcaaagcc

SEQ ID NO: 66456 - DNA, 460 bp, Cucumis sativus
  Intron number 1 from transcript Cucsa.078020.1 (locus Cucs a.078020) derived from phytozome v7.0 (chr-ID scaffold0079 3; pos 222135 to 222594 reverse strand)
cctccactcactcttccgatctcatcacccttcctgtaagttctctttctctcttcttactttttattttcttcctcattatcctttctaattctttgtttatgtttctctcccttccgacaatcatcgtgattttactttgtttcttgtgttactggacttctcatttatggaatatcacttaaaatgtcactgttatccttgtatgataattatttattgttttgtgtttggatttttggatccggtttccgtagatgctctctctcgctttagatcggaattcttcgtgcattttcttttggcaaagttcactgtatgaaacgtttgattttcagagtttgatattttgttttttctttggaatttgtttggatgatgttttatgttgcgctctgaagtaaatgtgtgttgtgaaattttagggttacgattctgttccgtaccgaattaattccag

SEQ ID NO: 66457 - DNA, 977 bp, Cucumis sativus
  Intron number 1 from transcript Cucsa.135150.3 (locus Cucs a.135150) derived from phytozome v7.0 (chr-ID scaffold0104 4; pos 52590 to 53566)
gctctggtactcctctttctttttatgttttcttcatttttattttctatttctgcttcctttttctgtttgctttcatctaaccagaattgtatgattgtgattcgaattcacatccagcaagtcatttaatatgtatgcattttcttactcttcgtggcattgtaattctctttgagttgaactttctattgtttgctgaagactaagaagcgtattgaggggttctattttttagtatatttgacctgggtatttgctaaattttaaaattttcactgtggggttaagtttccatatactgttggctcagagatatgcaatatttgaaggtgggtgggtgctttatgaaaacttttttttttgctatggaaattcaaacccggttgattttatgtgttttctaaagtataattgtgtccaggcctttaggatcgtctaacctagaagctataatgtataattttggtatttttcttttcaatccttgctgcttaaatttcacaattcatcttgttaactgttttcgtttttacaatactttctcgtacaggattccttcaattctcaatgttacattatttgacgtccaaacctttaggcatttttcattttttcttgttttgaccttgggagttctgttttttatctgtactgggatgtggaatttaattttgaagatcatacctccatgggtaaagatcatttgggtcaacaaaaggcgtttgttccttgaaataattggagggagagtctttctattgattggcgttttatcatcttttgttgccttcttgttatctttatttgctggactatttttaagtgtttaatctctattaatattcttacctaacttaattgtcaaattaatagttgatcctccttactcaagtattggttcgtgtatagtaacatctcatgcaaggtttcagcttttcctatttttccttgaaggttgagtttttccacataat

SEQ ID NO: 66458 - DNA, 833 bp, Cucumis sativus
  Intron number 1 from transcript Cucsa.005540.1 (locus Cucs a.005540) derived from phytozome v7.0 (chr-ID scaffold0005 5; pos 608817 to 609649)
tcgagaggtgtatcaagatatcgaggagtcgcgaggtaatgccacttagaataataaacatttgttaaacaatatacatggtggaaaattcaaacttatggtctatgatattgatatatacttaaaccagtcgaatggtgctcatgtggacttctctttttttttatattgtcatctcttggagtaatgataaatttgtaatttaaataaattattttctagactttatttttttcactattttcggtaattaagtctacggttcaaatttcttatattattactgtcatccatcattgtcactgtatatttcgttttgacaacgtgaaatagcaacatattccacaccctctagatctatttaattcacatagattaaaagttttaatttaactcacatgttgtaatacatggtcaaaagtgtttgaaaattgttcatatctcttttgacatcttcaaaattactctaaaacacatctttttaatttaatcaatcaaaattaattcaatgtttaattctacactttcaaacacaaatttcatatcatcacaactaattttgaataattaatcaaaaacatgatttaaaaaatgtaacaagtattttaactattttacaatcactttcatcatatccttaattaatttttcaacatgaaaggcattttaataataatcactttcatcatatccttaattaatttttcaacatgaaaggcattttaataataaattgtgaatgttttgagttttcttatattattgtctaaaaagctatattgagagttaattagagaattgatattgaaattgtatttgtagacatcatcaca

SEQ ID NO: 66459 - DNA, 688 bp, Cucumis sativus
  Intron number 1 from transcript Cucsa.060650.1 (locus Cucs a.060650) derived from phytozome v7.0 (chr-ID scaffold0063 5; pos 142350 to 143037 reverse strand)
gtctttcccctcaaaggaaacgtttatccacttgggtattcattccatctttaatttgattcttctctgtatttttctctcttcatcgttgattattgattgtttctttttcgtttcgttgattttgtttcctttatcattcgtgtatctattctccaccattctttaaattttttctacttcccactggattttcctttttaagtaggtgcttctgtttgatccatgtccaatttgatttcctgaggttctcttattcagttctcgagtttttttgttgcttgttttctgttatattctatttagtttaagtgggtttttgtttctaaccttccaattgtaatttatgttcattaaatgattcttctagcatttctttttccgtcttttttgttcaagaatactttagataacgggtcgattaatctaacataaattacaatgtttagtacttgattttccattcatttcgaaatttgtaaagttctgttacagggaagtttttcaatcggatgttgcttataagctgtttaaaatgtttatgaattctgtttttccatgaattttccgttgtttgatttgtttgcatgtctattgtttgcttatcattccatttgcgttaactccttgtaaattctttttgatatctgtagttattactctgtgtctattaatattggcaaaggag

SEQ ID NO: 66460 - DNA, 540 bp, Cucumis sativus
  Intron number 1 from transcript Cucsa.070840.1 (locus Cucs a.070840) derived from phytozome v7.0 (chr-ID scaffold0073 3; pos 3829 to 4368)
caaggaagatcttcagttggccgttaagaagtactgtgtgacacaatactatgaaattgttatagtcgattcgaaccaaaatttgtagaattttcaatacaaacagtggagtaatggctgtaactagaggttatgtgctagtaagcgtaagagccatgaattatttgaaatcactaggatcgaaggagagcactcgtgtttgtactcaaatttaacaccaagatcactcatagctagattctaatttcacgagagttgaaattcagaacatagtgaaagttgatcatagtgttactgtgtgtatgcttatgaaaatcataaaacaacagtacggttacaatgttaagtacagacgggtgtggcaagccaagaaaaaaagctttgattgttgttttttgtgattgggagaaatcatataatgagcttccgtattggttgagtgtcgtcgtacattacaatccagaaattcgagttgattgattttttcttccaaccgatgtaccagctacaaccattttcgaaagagttttttggtcattt

SEQ ID NO: 66461 - DNA, 467 bp, Cucumis sativus
  Intron number 1 from transcript Cucsa.094750.2 (locus Cucs a.094750) derived from phytozome v7.0 (chr-ID scaffold0091 9; pos 865291 to 865757)
cgccctttcatccaaatcgcagagattcatccattgtaaagtttcttacatctctcttctaccttcaattcatccactctctcttttctcttgttctcaactatggcgcagttgcagtgtgttgtttaactcttcaatgctccttcttatcttcgctttaattttcttattctgaaccactacaaattaatatcctttttatgtctttacccatgtgtttctggggattatattgattctggatgctattttcatttttttgcatagaaatctttcatggggtgggtttatttcgtggcatttgtggggaattttggcaattgaattcaacccatttcggatttcatagtgttgactttgatcccttcttttgttctgttcattcttacatgatagattgtgataacttttctcagtgcatagttaattgacttggattctttcgcagaagttgaaaactgaaaacc

SEQ ID NO: 66462 - DNA, 474 bp, Cucumis sativus
  Intron number 3 from transcript Cucsa.094750.2 (locus Cucs a.094750) derived from phytozome v7.0 (chr-ID scaffold0091 9; pos 865962 to 866435)
ataactttggagagtggtattctgaggtgctgtttcttgcgcggtttttgttttcttcattgcaaaatgactttttgtgttttgtaaaattcgtgtgagtttggcaacgttgtttgatagctgtcgttgtgaaggtagattttgtagtttcactcctaggctgtcaatacatgccttaaaccatgagtagaattaattgtatgagttgagtttttttcccctcagtgacacttaaatttgacaggatttgaacagttttcctttaactttggagagaaatgtatattttagttcttaagttttattgatttttagaacttctatgttgctttataaaatgccattgatcaaaatggaataatttttttaagatgtctttttagatcaagctccccactaatattatgaacgggttctttacagtgacttgaatagttcttcttctagtttgtctaggtggttgtgagtggagaa

SEQ ID NO: 66463 - DNA, 614 bp, Cucumis sativus
  Intron number 5 from transcript Cucsa.094750.2 (locus Cucs a.094750) derived from phytozome v7.0 (chr-ID scaffold0091 9; pos 866673 to 867286)
gagagaaagatcatattgaaggttttgctcctgaggtgatgcttcatatataagcaacaatagagaaacttgtctatttgaatttgaaatgtttatcatctttttgtttgtttgtttgttttaattattatttatttttttatttacaagatatgggtgtttcatttatatgatgaactttgatatgcttacatctctgttgtgggtgcaatactattaaagtgatggtatagttgtcatagtcattagcttatgaatgtcatcgcaatcttcattatgttttgttcttccagcccctgacctgtttatcggcgatgctttagctcaagtgttgaacttctattgcttttattaaaacgtattatttttataagattttgaagacctgcattcttccgcctttttagcagtttattaagaatttattcaatgatgagtaatctttcttataaccttatgtttgtttctaagaagtcttttcatttcttatgttctgttcattcattttaaatttttatgttgataaaggtgccattgtggtttagtactgacagtttggtacttggcatttatttgaaggttgcttgggtgacaaaatctggggagtctgactt

SEQ ID NO: 66464 - DNA, 1026 bp, Cucumis sativus
  Intron number 2 from transcript Cucsa.048410.2 (locus Cucs a.048410) derived from phytozome v7.0 (chr-ID scaffold0054 2; pos 3158560 to 3159585)
gggtttctccatctccactgcattgtgcggaaaaggttggtattcgggagtcgggtgaatctttttatctaccttcagatttcttctctttttcttaattcgagtcagtgagggtggaatttttaatatctcgatttctttatttaatttctcatctgggtattgttctccaacttcggatgtcacaatattctgttccacactctagctcattgtgtgatgttgtgctaattgggatgccattgtcttgatttcttctttattgggttctgggtattctctacgttctttcttaaatctgttgatttaggttctttaggttcaacggtgaattcttcttgtgtttttgtgttctacttctttctttgctattttgggtcctcaaatccaatgcgggtatattttcagcttacgcttagtaaaactacaacttagtccttttttttggatttgagaaatgatttgaattgatctgctatttacgaaaatctaatcattctaatttggttagttaaatggtgatattgctttgcttggagcatcaagtttgcgaaatatataattatgccttttagtcatataggctcttttcgctcaaataaattaacttgtcacaacacataagattgccagcatatgcaaagtcacatcattctttagtttgttaagtttagttaattgcggaacaatgatttcggagactagttttaaacatttcgctttttagaataggtgacagaaaacaaatatttcttttaaacttgtgggtgttattgtattcaattttgtatcctttgtcgtaagctttcttatctgcccaagtgcatttctctgtactgaataaaattatatctcacgagtaagggggaggcaaaatgtttaagctgttgaaagtcgtttgaattgtcctatttcaactgttccattatgtgatgtttattttcttactgttggctaactttcgtatttttcattgtcctgtatgcaaaagattaatttcgaagcccctcagtagaagattccaag

SEQ ID NO: 66465 - DNA, 758 bp, Cucumis sativus
  Intron number 1 from transcript Cucsa.112040.1 (locus Cucs a.112040) derived from phytozome v7.0 (chr-ID scaffold0095 3; pos 727780 to 728537)
aacgatacagccattgaattacagtaagtttgtccactcctgatctctcacttgttatttgtatttccacttcacttcacaactctgctctagtgatccgattccccttctactccactagggacggttgagatttggattacctcgagacttctttggtatcggggtaaatagaaatgaactcattcattaggttaatttttggaggtaacttaaatcgtgttgggaaaattaggatgtaattgtgtgtatctatttattatcggtgggaaaattattagcgtatgattttgtatgtgtattgtattatttgtattaaagagggaggtagggtgggagtgtattaaattaaaagcgaacgcgtggacaacatagtctgaactggaggtgtgttgcggacagttgttaatttaatacaaccccgcgcgcctacacttcttctaaacgctaatgagatttattaatttgaaacccctacgtgttccgcgcctctttgatctctcttgtctttaataatgaaccatatttagtctttaatgggccttaaagaaagcccagttctgttccaattgtttgtattcatcgttctacttgttcaacctactaccgaactccagttcagccatagctgatttgatttgatttgaatttgttgagaaagtaaattgggtttctgtttcccttttctttggatcgtatgtatgcttaacttttcattttcagtttcacgttgctgaagctgccggaggaatcaggga

SEQ ID NO: 66466 - DNA, 581 bp, Cucumis sativus
  Intron number 1 from transcript Cucsa.096110.1 (locus Cucs a.096110) derived from phytozome v7.0 (chr-ID scaffold0091 9; pos 1840820 to 1841400 reverse strand)
tttgttcttgttttgttttcaaggtatgaacaatctctctctctctctctcttttcttttttttttctctctatttctctctctctgttcgtcgaatctattactttaaagataatttccccttttttgtttatttttttttctggatttgtaatttttttttctttttatgcttgacctgttaaccatcctttctctctccattatatgctcttttgcatcttcgattctcgtagggtttaaagccgctttctctctctgtatatagaaaaccctaaaattatttttacttttggcccaattttagttcctagcaatatgtctctcagctaattcttgtcgaaatctatctacccttttcgattttttgttgtatctattgtgttagttgttggaggtaaatttcttttggcatcgtgttctgatttttcggttaaaggaaacaaaatttgactgcccccctttttttttgtttttcctgtttgattctttaggtattttgttcgatctctctcatatatctctgtttgtttttttattttccagatctagcggttttttctgctcatactgataaaaac

SEQ ID NO: 66467 - DNA, 997 bp, Cucumis sativus
  Intron number 2 from transcript Cucsa.118620.1 (locus Cucs a.118620) derived from phytozome v7.0 (chr-ID scaffold0099 8; pos 497633 to 498629 reverse strand)
ttgccaccgcaacaacgtcgtctccttcgaccaaggttttttctctttcatcttcattttagggttagggcttaattaatttattgttttgcattcttgttgctaattatataaaagtgtgtggagggaagaagaagaagatgatgatgaagaacaataaacctcacactacctaaaaaaagaaagaagagagagagagagagaaagattgaaagaaaaatacccacacataaagaaaagggaagaagaaatatctcttaagagctttcctttttggttctttattttctttttcttccccatcttgaactaaaccaaaaagaaaaagaagaaacatcaagaagggtttatgaaaaagaagggtttatgaaagactctttggccataactttagataaaatgtgtgtacttaatttccctatctcttttcttaggctttagccctttacccctatacatacatatatatatacacacacacacatacacatatatccctttcctttttgttaaaacttgtttctcctcaattttctacctttcatcattgaaacaactaccaattggttgaaaaaacattcctttttctttttgaatatatatataatctctctagacaaataatttaaaccttaaattaggatcaaaattcaatatttgtaactttgtacacttcttccttcatgtataagttagttcaaatattaacaccaaagattatatcactaaaaccttaaagaccaatgacatgttagaaattactatggaataatggttttaataatttaaaatcaaattttaattgtagaaaatcacatttaaaggtataaaattctgagtaaatacatgcatatgtttttgtagtgatattttgaatatgacaaaaataattctaactgtttcaaaattactcctaaaaatggattaaattgaacataaataagagttattttatgcaaaaatgaaatattttgaccttgattcatgcaggactcct

SEQ ID NO: 66468 - DNA, 871 bp, Cucumis sativus
  Intron number 2 from transcript Cucsa.020770.1 (locus Cucs a.020770) derived from phytozome v7.0 (chr-ID scaffold0029 4; pos 14756 to 15626)
ttgaggtgtgtatagaaatcctgaattttcccctttaatttataggaaatggtgaaggtcatggtatgataaaatttttggtttatacgtgacttggaattgttgccaaataatgagttccattatatcattgggattcttttttggatgaactttgctccattttctgtttcttcaagtctaccctttgttttgtattttgtattttgtatttttgaagattaagcttataacaccactaataccaattgatttctttattttgttatcttatcgatctgtcaagagtgttttcaaaatcaaagacaaacttgtcttttgcttctgaaagctgaacaagaattgtaatccttatcaaggaaaaaattaaaactatggtaaagaaattgtgagaaaacatgaatgattttcacaatccaaatgtttattcaacttagtctcaacgaaatgttttcttcctttagtacaccttgtgttatatcatttcccacttgcatcatcaatgcttcaaaactttatgtcggtcgtataagcttcgtggttgatatttaatctcggtaatttcattgtaatgttgcccaaatttcaatagttacctacaaaactgccaagttgttaattctctacatctctcgtatgtgcgggtacaatgagtacttatcataatctttggctatccagtaaaaccaataattgtgaacaactaattttcatcattcagatagtagacctttgaactatacatgtttttcttctttgctaagcttttccagctacaatactttgtataaattctagcatgaattgtttactaagtaatcattgtattttgcttctttcagagagaaagagcttgctgctgtcaagataa

SEQ ID NO: 66469 - DNA, 809 bp, Cucumis sativus
  Intron number 1 from transcript Cucsa.124020.2 (locus Cucs a.124020) derived from phytozome v7.0 (chr-ID scaffold0100 1; pos 74156 to 74964 reverse strand)
cttcttacctacgttgacaatctccctgacgggtaatcttttattccgtcggttttgtagtgttttggattgcttgttattgatcggtgaggccagtatactgttatcgtcagaagattgttcaagagtagttaagtcttttagttttatggttcttcggtgatgatttaataatcgattccatgcgataggtaccatgaaatttccctaatttcatttcctcattattacgtacgagcgctgtccttgtggtttggctgataggttttctgtttgtttctcaatctctgtatcaaatcttcagcattttctccttgctcctccgggctctcgttaacttccaatttttccccgtttgtgtcatcacatgatcatctaaagtttcggcatctatctgtaaatgttggacttcaccaaattggttttcctgtttactgttacttcgccccctgtgggtcatatttcgtttctgtccattcgattttatgatgtgtgaacaattttgtcttgttaggtatcatttaaacatctgcttgttaaatggttctctcatctactctctaaacactcgctaaaacgattttgcatttagtttagaatgcctattttgcagcttggccatagcactgttactattgagctacagtttccctttttggctttgttttaactattttacttttggtctatgcatttatgttttcacggtatatgacttgaagctgaacctgtagactgtagttctcatgaaatgagtgtttttgatgattgtacaagcacttatgttgatgatactcttcacattagga

SEQ ID NO: 66470 - DNA, 742 bp, Cucumis sativus
  Intron number 1 from transcript Cucsa.169270.1 (locus Cucs a.169270) derived from phytozome v7.0 (chr-ID scaffold0116 3; pos 207394 to 208135 reverse strand)
accttccagccgccgtcatttccgtgcttcatcgggtaagggatgttggtttagtttattttcggattggattttaatgtttgaatatctgcaaatcttaattgaattagttcaatggtataatggaccatatgccacccttcaatggtattttatcattctaattcacttatgtgcaatgctctgcaaatcttaattgaattagttcgatgccaaatttactaggtagatggaatttgatatgtttagaacattattttgtgattagaggttttgagtatgattgcaattttgatttatttcggatataagtttttttgttaggagcattatagttggtgtcaagaaagctaagggttaaaatttgtaaagcttcctagtttagcttgaaatttgggatctatagttcttctcacgtttgttgaagaagacgttgtacaagttttaaaaagtgttgtttgctttgctagcatattggtcattaattagttttttcttttgtttgttgttgaagaaaacactattcaagataaaaaaaaaacgaacccaatattgtggccgcgattactactattacctgataggggttgtgagtgagtttcaatttttcaaacccttaaatcaaactagccgtctcacatgccatctatcattattttttattattttgaaggatcatgttactcaaattgcagttgctgttgcaggtgaatcgagcagtgatttagaggaagttgttatt

SEQ ID NO: 66471 - DNA, 504 bp, Cucumis sativus
  Intron number 1 from transcript Cucsa.161960.2 (locus Cucs a.161960) derived from phytozome v7.0 (chr-ID scaffold0114 4; pos 1720837 to 1721340)
ggattcggatctcgcgtctgtggggtaatttcattgttcgtatcatttgttttgttttgtttttcttttcgttttgtctctgcaaattttggtgatatggaagaattatttggtttagatatattgtggttgatggtgtaaattgtggtttgaattattggattgatatgcaccgacatttttctagactgattggaatagggatatttgctttgaatccagtttcttcgaattattattgttatttttttgttttctatatgaatgcgaatgctttatgtatattagaagaagcgatctgaatttttgaattaatatggattataaaattgtggaagtaagcgagaaatgcttgtggcgacggaaaatatattgggatagatgggttttattttgttctataggagcttaagacgataatggttcaatgttcgagaatcaaaatccattgatgtaaatgcttttcatgatgttgttgtagagcttcagcttactgcgttgaag

SEQ ID NO: 66472 - DNA, 567 bp, Cucumis sativus
  Intron number 4 from transcript Cucsa.160370.1 (locus Cucs a.160370) derived from phytozome v7.0 (chr-ID scaffold0114 4; pos 563016 to 563582)
cccatccctccattttctaggtacctccgcatgatttcttttgtccttaccctctgctttttcaaatattttgattccttcctttgttttttccataacaaacaaaccactcaacaaaatttgtcattaatctataattttctaccagatatacagatcgttgcaattgactatttttctacatttctcagtgtcttctcgttaaactatacgttactctactcattcacttctcgaccatctaagtagttttcataggaaaagataatgattttattaaaatgaatttgagggaattaagtccatgaagaatataaattattattatattcttctaaaagtaaataaaaaaagaaaaaggctaattgatttctaatggtcctggctgaacatgggaagttgttaaatgtgaaatcacatttattatttaatttaagatgcacttatttgttttgaaatgtttgattacaactttcattctaaaattataattatttaatcaacttataaaacttatgcttaaagaaattttgtaaaataatggtggcaggtgaggaagacttctta

SEQ ID NO: 66473 - DNA, 747 bp, Cucumis sativus
  Intron number 1 from transcript Cucsa.078330.1 (locus Cucs a.078330) derived from phytozome v7.0 (chr-ID scaffold0079 3; pos 643643 to 644389 reverse strand)
catcgcctccctttctctacccttctcaggttcgtccatttctcttttttttccatcacttttctaatgggtttcttgcattttccctctttattgggattttaattctcttcctttgttggtcttttgcaattttcttcatcttcttttctctaatcctcgagtttgaatctgagttgggttttcagcaaattgtattcatctcttgaaccttattatacaatacggatctttccttatgtttaccctctattttggagtccggtgtattggtaatgcgcgtggagatctgtcttgatgcgttagttttaaggtgctgtgttttgtgaattgacttgaaacagaggatgttgttctaagattgaggaggctttccagaatcctctgttccgtttgccgtgataataggattttggggatgtggagagagatctatgaatgaggttgtaatattgtgaggcttaatgtttctatatgggtttagggatgtctttgttaagttgaaaatcgagaagggtagttttggtttttgaatttgactaagaattcaaatcttacgtttagaaagatgaggacccttaaagaaattctaagaaaacaagatcaattttcagaaattaaaaagcaaatggttatgaaatgggattgttttggtgtgcgttttctttttcttgatattgtatctcatcttttgtcgttgtgatttgtacaggtcatccgtttcttattgtcggttgcttccttgag

SEQ ID NO: 66474 - DNA, 957 bp, Cucumis sativus
  Intron number 2 from transcript Cucsa.047900.1 (locus Cucs a.047900) derived from phytozome v7.0 (chr-ID scaffold0054 2; pos 2772018 to 2772974 reverse strand)
aagagcttcttgagctccaaagaaagtgggacgaggtttgtaattcagccttctatttcttctatttcaatgtttttttttcttgggacgatttatcaaaatgattcaatacttggaactattcgaaattttcttccattgagctactgtacttgtgaaccactaatctccaatcatttttccatgaaccagatgtttgaactagagatttcggccaaaactaatagtttgagttttaagtcgtcccctctggccagtatccaaatcctttaaccttttaatgtatacttttttagtccttttttcattgccttccatttagacttgattaaaaaattgataattgtttgattcattttgaccttattcgatcacatcgctttgtctcctcgcacttcctttgtagctcattttaggcctgacaagtttgaaacctgatcacaatgattactatttctttcattgttggagaattatttaatttgggtgcctcatgcgttctctaaaaaacctccagatctaaatttgaagtagatttctctcatgaaaccactagtgttggccacattggataatttatcttcattgcaactctggcatatatatttgcgctgtggacttttatgtgattccagatttgtaaccttcaattattcatcggtgcttaccacaaggattataatatactaagtctcctttttggatggcaatttatttttggtagttatacttatattcaagatgataagacgttaaggaacatggctttaggtagcaattggccatagagaaaatatatatggagaatccatatcaaggtagataatttgtatggatgcctgaccttaactaagcataaagtccattttcacgatgtaaaatccaatgatttagtttgattttttactcattttgtcttaatatgcttgcagccatatattgagttaaaagcacctg

SEQ ID NO: 66475 - DNA, 557 bp, Cucumis sativus
  Intron number 1 from transcript Cucsa.047900.1 (locus Cucs a.047900) derived from phytozome v7.0 (chr-ID scaffold0054 2; pos 2773018 to 2773574 reverse strand)
gccaccgcctccgcctcgctttgatcccagtcgaagtaatgtttttctatccatcttgatttcctgattttgaaaattttcgtttgttggggtttttaggtattgaatgtcgttttgggaattgatagggttgggttgttttgatctttattctcgagtaatggggtttttgttttcttaagcacatgagattccatggatttatagattctaggtatgggaatgggcgaatttgctcccctcttgtttattatatagtagcaacaaactttaattgctgatcttgttcgtcagttttcgactttgcgtttggtcattcaggttttgaaactggtttttcaatctttgggtttgctactttgtcgtgtgaggtggtatagtagaattaatcttgatccattcccaatttgaatggtagagcaagacattgttagagatgttttaagggacatttcttcttaaattttccagttccatgtattgtaattgagcttatcgtttttccccccctctcttttgaagtgattggtatcattagaaggaaggcattgataaaa

SEQ ID NO: 66476 - DNA, 910 bp, Cucumis sativus
  Intron number 1 from transcript Cucsa.158020.1 (locus Cucs a.158020) derived from phytozome v7.0 (chr-ID scaffold0114 2; pos 181896 to 182805)
tctttttctccctctttgtcaactctcattattaggtaggtacttaagttatatgcatcttcatcctctcaatccaagggcaatttatgtatatatagattttcgttatgttctttctctgaaatcaaaatctcaggtgcttcttgttgcgatcgttttagactttatgccaatatattgatctagaactcagttacttaatccatggtttattgcttgaaactgtgttgcgtttctaaactgcttcacttacctttctgtgcttaatgttgcttttgtcttgattcaatgaaattacgttattgtttcggggagttgttggttaacttctagtagttgggggataagacagcggtgatttaagactatgttttagctgtttggttctgcctcgtttgaaattaaactctgaagggtacctatatctatatgtgagttatcaaggaggttgtcttattcaaaatttaacttcatgatcttcatcctatctattctcgaggtggactgccagatatatcttccattgtaaacagggaggaaggaagtatgtgtggattgcaatgttgatttgagggatatccttactgggcattagatgtggctatttcttatgcttggttgacttttggctctgggttttgagttctgagtctccgaccactatcgatgaaatgggaggagaaagttgaggtcaaagtttgattaagacaatccacccagattgcaaatttagatgctactagaggaactaagacatttatgagtttccctcgtacatcaaattcaaaaacaagaagttaattgtgctagtttacagtatcaataatgctgcccatttgtttgatgctttggttcgatgagttaattcattcactataggttgttttgtttttgtttctttaggcatata

SEQ ID NO: 66477 - DNA, 894 bp, Cucumis sativus
  Intron number 1 from transcript Cucsa.177370.2 (locus Cucs a.177370) derived from phytozome v7.0 (chr-ID scaffold0122 5; pos 1395098 to 1395991)
gccacttcgaaattagggttcagctcaccgacaccgtaagttttcacatttctatttctcgttttttccccaacattctttcttgatgatatttggttttcttttttccaatttattaatgtagccgagtacgcaagcatttacccagctggcaatattgagcttagtttaattgttttctttaatataattggaacagtgtgaatgtactggaggaattttgtggaattagaaggattttgaaatttggggctctcatgttacttaatctggaagttgctttcatttctgaacgacgatcattatttttttaaaaatataaattatttgaattgttcgtgatctgctggattcgcattgtttgcacaggctgggggagtttaagatatcgtgtagtgcgcatttcttgttgtgacgttcacccagtttttgtaaatctagaaagttcaaaaatgattttaatccttttatttgaaacccaaggggtgattttaagctctttattttgtttggaacgtggaagttttgaaatgaatgtaattaaaacgttgcttggatagtagctgggaaaagaagattaattgaatgaaaattgtactattatgggctttgtcttgatttattaaaagaaaattaaaatatgtcaaggttaattaagtaatttacctccaaattctatgaactattcaaaatccattccatttctgttagaaattttttaacgtaaaagcaagataaatcattctcttttatacgatgaaaaacatcataattcctttaaaatatgtcatgttttgaaatccttcgaagttttgagcgaccaaccaaattatagttttgttttttgttttttgttttttgaaatttctaattgtaaaatttatggtgtaggtg

SEQ ID NO: 66478 - DNA, 624 bp, Cucumis sativus
  Intron number 1 from transcript Cucsa.166370.1 (locus Cucs a.166370) derived from phytozome v7.0 (chr-ID scaffold0115 3; pos 1587141 to 1587764 reverse strand)
ttctctggttttaactctcttttccggttttcaaggttggtagtcaaactctcttccttcttctgtcgtctttcctttaaatggtcttttatttaattttgttcttccttccggtttttttttctttctttctaatcggttcggatttggatccttcctcacctgctttttctttatgcttcttcttcttgcttgatcttttgccttttcttcgattttaatgctttaattttaaatttaactgtgacttttgggaggtccagctctctctttctttcaaaatttgagccttgattattcaaattggtgtttcatttctcaagtggcttgctatataatttcgtttctgttaattatggttaacataggccagaaatttggtgttgaaagtttcttgtttgaattatgtttttgtttcccatttgaggctggttctctacttgtgaaatgttacttatatgtggggagctgttctttccctttttttttcttttgaatttttatagtggtcgttggtcgttggtgggttttctttttttccttttcctttttctctgctaatgttgttgttatatctttttaaccttagggacttctggatattgttgaaatagtgaccgggat

SEQ ID NO: 66479 - DNA, 556 bp, Cucumis sativus
  Intron number 1 from transcript Cucsa.004170.1 (locus Cucs a.004170) derived from phytozome v7.0 (chr-ID scaffold0004 8; pos 30789 to 31344)
atagtctcagctaaatcagtgggagatttaaagttgtattttataaatagatatgtcatacttaagaatgtcttgttgtacctcaaatgggaagaaatttaatatctatttcttgtattttggaacaaatgtatagaatatcttttgaaattaatgaatcgttcattttctataaaggtattgtagtttgttctgctatacttgaagacaacttatacaagttaagactgactagagcaaattttgtcttaaatactgaaatattcagaacaactgaaactcataataaaagacaaaaagtttcttctaactcctatttatggcacttaagacttggtcacataaatctcaatagaattgggagattggttaaaagtgggcttctaagttaattagaagataactctttaccaccttgtgaatccggtcttgaaggaaaaatgactaagagatcttttattggaaaaggtctaatagccaaaggacctttagagctcgtatatcatacgtttgattctcttgaaaagttcaaagaatataagcctaaagttaaaaa

SEQ ID NO: 66480 - DNA, 772 bp, Cucumis sativus
  Intron number 3 from transcript Cucsa.182670.1 (locus Cucs a.182670) derived from phytozome v7.0 (chr-ID scaffold0125 6; pos 29691 to 30462 reverse strand)
ccagggccattcgtagaaggctcaccaagcaccaggtaaattgtttcttctttatccgtcgtttaatttcagtccaaattgattttgtatgttcctcgtttaactttttaattgaattttattacggattttatgtgtaattgttgccaatgtgagattttctacgatccctagaaaaaaagaatggcggaactacttgttattaatggaaatgctatcattttcatatatgaattgtggatgggtttgttagtttaaatcattcatatatattgttgaagttaagaatgtttcatcagtcatttaaaatttttttttgcttttttgtgtccactatccctgcaatggtttttatccttgaataaacctacgaattcttgtcaaatatcagaaacaaagtatacttttttgggttattgaaagcaatttgtagggatttttgcttttatgagattaatttttggttatcaaattggaccttcatttattagaattatgatttcttaagttcaagttttcatccttgtacaactctgagttctaagatttgatacttttgagtattggtaggttttgagttatactgactgatatatttataaaaaactttaccctcatttattttctaatgatgcaattatcatgctttgaacgtattggcggcaggccatttttttctatttagatttcttttgaggttcgaccattttgttgaatgattccattttctgatgcaggcgtctttgaaaactgagagacagaagaagaaaga

SEQ ID NO: 66481 - DNA, 917 bp, Cucumis sativus
  Intron number 2 from transcript Cucsa.131990.1 (locus Cucs a.131990) derived from phytozome v7.0 (chr-ID scaffold0103 7; pos 93788 to 94704 reverse strand)
gaacctggttttgctagggtgagctgatcctattacatatgcaagtttccattaattccctaagtcgattgattctaactttaactatgcatttacttgaactatcgatacagaactgccttttgttatataaaatttttagttttttcatcttttgtatcaacatttaaatcacgtgtgccgtggattttttggatcttagatgttatggaatttcaccatatgaaacagacattgttggagtcgcgttcttacaactatgaactatagatagtctgagattgaaaacatattatcttgaaacactttattgtcgattgaacttgcttcgaatctctaggattttgtggagggcatgcctgtgaacataatgctaagactcaatagcttgttattaggaaaaaggaatgaaatgaaaagaaaaaaactttggttcttaaatattagactctagctttttagttgattatgttactggggtagaatattaattcaaaaggttaaatcacaagttttgtctctaaactatgaagtttgtgtcggtttggtttttgaattttcaaaatgtttaataggtcattgaattttcaattttatgtctatggatccctcctaaatttgaaactttcaaaaagttaattgatctattagatataaattagaattttatgtcaaaattcaaagaataaatttgaaaatttgaaacttcaacacagacctcaaagttgaggggctttgtaatttaacctaattcatacttctccagtgcttcatattggtttatattcacccagctctgctagaatatctgatagtacacagtggctaacagctaatgggggaaagcttatgatagttttggtttagcttcctatgatgagttttatctggtgcagggcgatattctattcctccac

SEQ ID NO: 66482 - DNA, 685 bp, Cucumis sativus
  Intron number 1 from transcript Cucsa.131990.1 (locus Cucs a.131990) derived from phytozome v7.0 (chr-ID scaffold0103 7; pos 94777 to 95461 reverse strand)
aatcagaaaggctctatctcaggccgttagttttggtacgtaaactcaccaaattttgattgttacatatcaaatgagtattctcattctgcagggaagctttcttttgtttgttttttttgctgattcagtttgaagtttctctattccattacaaatgttgagtgtctccagctttgttcttcattttatgattgaataagtgcgagttctttctccaacttggttttatgaattgtctgaggttacatcacatgtttagactctaactttggtctgcttggtttcaatgtctcaaaaatttaagttgtgatgctgtattactcctacttttacaccgttaactgaatggtgacgaagtgggatggatgttgattcaatatatgctaatttgacatgagttgatagattaatagtagaaaaaaacggacaattatgaacgggatttagaggcacaaatgagtgttttaacttcagaactaaatagatacaactgtcaagttttaacaaaatttgagcacggagcttaaaatcttagttcaaatatcttcattttgtctgtgttttgtttctattcaaacttcgaagtactggaatccaactacaacatgcatttgacttctgcattcctttgctctaagaacagtatcgtaatctatcaggtttgatcgtttcgtctgcgttg

SEQ ID NO: 66483 - DNA, 804 bp, Cucumis sativus
  Intron number 1 from transcript Cucsa.100850.1 (locus Cucs a.100850) derived from phytozome v7.0 (chr-ID scaffold0092 7; pos 155426 to 156229)
atcgtgacgatcaggtagaatacactatgatatggtcaactttgattagtttcttccaatttcatatttcatattctttgtttttataaccccatatcgttttagataagatacctcttagttttttaatctttatgttgacgagtgagattgtgttcttgtgatgactgcatctctataattatttttctcaaaatgggatctgattggttgataatgtagctttagactttgaactgtatttttttttcttttcattctgcttgtcaactccctcctctttagtgtatgttagactttgagacatttctatttgaactgagagagatattaataagtaaaactttgagggaaatttctgtttttagagtgcgccacccaccgagttacatgtcaatatggttgttcttccacttgtgtagtgtggaaggtggaaaatgtatgccaaaaaagagcagaaaaagagattactttgttcattgagataatgtattttggaaaatatgcatttcaaaaagaggagccaagcaaccaatagcaaaaaggtgctccaatccagtaaaataaggtctagaaggttaatcgtgaaaagacctcttcaccgatgcgcaaagagaaagatagaatctatcaaggtcaaacatcgctctgctatttctcctgccatgctcaaataaagacatcctctcaaagtcttatcttaaatttctctgttcttaccaattgtgaacaagttcatgatattcaacgatattccattatgtgcaaggttttggagttcccaggaggaaaggtaaaatttac

SEQ ID NO: 66484 - DNA, 700 bp, Cucumis sativus
  Intron number 1 from transcript Cucsa.083480.1 (locus Cucs a.083480) derived from phytozome v7.0 (chr-ID scaffold0085 8; pos 313017 to 313716 reverse strand)
cattatttcaggtaattatgttcataatattaagtgttattctattgttgttcctttgagattcagagtgagtatgaagaaaatgacttgtatgcatatatgacacacacataaggatatgaatcaagattatgatatttcagggagtcatgaagtaatcatgattaaattttttattttacgatctcatgaaaaaccagagatgtgcagtgccatgcaatgcaacttttaattatttggatatattgaaagagtggctttgaagttattgcttattatacatctgtatgtagttatggacaatcactatctaaaggagttgcttaaagttaaaccagattatacattacatctacagaaactaattagtttgtaattgactatttataaaatgttttgaattttaggtatttgaacaaaatgattccctagctactgtagcctgtgggctagggggaggttcgctagtgaatgctggagtgatggttccaaccccagttcttgtgagaagggatccgaactggccaaaagaatgggaaagggattggaatttctgtgaatctgctgcaacagccatgttgaaggttcaaagtattcccatcaagtttccttccgccaaagttttagaagaaattgttgacgaagagattgaaggatgttttgagtcttcgctgaatcttagcattaacttcgatattga

SEQ ID NO: 66485 - DNA, 397 bp, Cucumis sativus
  Intron number 3 from transcript Cucsa.032350.3 (locus Cucs a.032350) derived from phytozome v7.0 (chr-ID scaffold0042 9; pos 1682784 to 1683180)
aggtgcaagatcgatgtgatcgatttggactgtgagtcgtattcttcttcttattactggagacctacttcagtgctagacatttctggttgcaaacacatccattatgatttcttaattctttgattggttataatttgagatcttatacaatgcaagttttgaagcaacgtatttgttaaaatttaccaaaaggctaatgttttgaagcaacctgttagcgttagcttaaatattgtgtcttctgggttaatgtttcacaagaaaatccatgttttataatactaaaattagaatagagatttgaatcataatttatgattaaagtatatgtttatctgtgccccatatgacatggcaactgtaaccaggggcctaagaattatccgagaaggga

SEQ ID NO: 66486 - DNA, 850 bp, Cucumis sativus
  Intron number 1 from transcript Cucsa.031540.1 (locus Cucs a.031540) derived from phytozome v7.0 (chr-ID scaffold0042 9; pos 579111 to 579960)
acgacacattcatacccaattacctagaacaaccagtgagattgatggtggaaaagttgtcaggatgcactgtctaaacgaccactactattgactgttagatcgagacacttgagagaacattccaaccttctaggccatagcaaaaatacgaggcctatcatgcagtgggttcaaatggatagatgaggttaagtgcataatcgttgagaaggaattgtttgatagttgggtcaaggtaggaaaataatttagtgtgagtcattattcattcgcttgtaataaaataaaaaaactgacaattgctttgaaatttttaacagagtcatcctgcaacgaagggcaagatatatgttcgaaaaagattatgttacaggagcacgcgcaaagatattcatgaatgtcgggtcgaatatgtccgacaggtaccagagatttccatatgaagatgaaaacgatacagagattcctacaatgtatagccaacaacttaatgccataatgtggaaagtgtggaagttattgtatatgtgcatgaattgtgggctatcaaattaagtaagaagctagagatcaatcttaattgagaagattaaaaaaaagaaagaaaagcattagctattttcacccacaaggtgaaaagaaggatggattattttgaactaagtttcctacaattgattgtgaaaaaattatgtaaattataatttgcaacttctacatcttttggttctccttccctagcgtaaccctagcccccaaaatttccttcgcacttcgggctctccatcttctgcgcaatggttcagcagactaatgcatccaaattgagatgggggggagcttgaag

SEQ ID NO: 66487 - DNA, 548 bp, Cucumis sativus
  Intron number 1 from transcript Cucsa.078140.1 (locus Cucs a.078140) derived from phytozome v7.0 (chr-ID scaffold0079 3; pos 381970 to 382517)
ccgctactgttgaaactattgctaatctcttgcaggtaatttctcttacttctttttcattttcgctgcattattcgaatttcatttgttcgcttttcatttgttgtgttacatgtactgaaccttctattacctcattttttattagctttaattgatttgttcatgggaatttattttattgatattttcgaggtataggatcggcgatttttgctttctttcccattttgcatgtttagttgtttcgcttttttgacatttggttttctgtagctttcttaatttgattccttttcttgttttttcggcttttcatggatgcacgtgttcttttctttctgcaactgaaactgacaaaattcttttatctcttccttttgtatgattatggccacctcttacttaattagttcttttgaattctttaatctctattgtacaatacttatagcattaagtttaatgataattactcatagatcccacttatatatgtacagagttttcctttgatgaattcttcatgcaggaggttggttgcaacc

SEQ ID NO: 66488 - DNA, 907 bp, Cucumis sativus
  Intron number 2 from transcript Cucsa.118350.1 (locus Cucs a.118350) derived from phytozome v7.0 (chr-ID scaffold0099 8; pos 162016 to 162922 reverse strand)
gccgttaagcagtcgaggtatacatttactcgtatattgctgtgcattctgctgattatagttaaccattagcaccaataatttcttcacaagacctttgatagtggcttgatacatttgttggagagcttgaaaatgatttggggcaaggagtaataaatttactcaatgactctgaaatctcaagaaaatccatagatcaacattgcttcggtaaatgttaaatgatttgttggatatctcaaaaaacaatctttttttattcatggacagagtaatatagtgagacagaaaactaaatctattgaaagaagaaaatagaagaaacaaactgttttacgtggaaatcctagaacaggtagaaaaaccacgatgctattttcttattatttttctatatctcataatgatacagtgaacatttatttataagttgtagaacccaatataaaaataataaaagataactagggcgctataaaatcttaacaaactctcgggctttcaacagattaggttaagcttttggatcaattgatgatctaagatgatattagagcaggtggtccaggaagacccagtgttaaaacttctgcattgttattttctccgcaattaaaaattgattttcacttgtggttcattcttcgtatttctagcccacaagtgagagagagtgttgaatgacataatattaaatttaccttcacccatcaacttaagtttttgagtcacagggtgatttaagactattattatattaacgtaggcttcaataatatctaaggtttacagatggtcatgattttcattgtggttctattgcttttttcctaatttagccatttattactattactattttattttattgaacctctcccttcaatttgagtagggcttcttc

SEQ ID NO: 66489 - DNA, 983 bp, Cucumis sativus
  Intron number 1 from transcript Cucsa.053370.1 (locus Cucs a.053370) derived from phytozome v7.0 (chr-ID scaffold0058 1; pos 150752 to 151734 reverse strand)
tctctttgaagatcctcctgactgtaaccctcaaggtgaactttttcattttccttctctccatttttttttaacattaatgtcttctggcttgttcttctttttctttatttctatcaatggttgtttcttttcctcaattgatggatttttccttttattgatggatttttccttttgccactctttttttttttctcctttcgttctctttcaattgatggggtttcctctcttctctcatcaatgtcttcttttagctctgtttttgcctttgattctctttaaattgatgggatttctttgtcttctctcatcgatggcttccagtggctctgtttttcccttggctacttctttacttcctctctgtttcactctaaattgatgaatgattaatgggttcctctggctctctgtttccatctgtttttggcctctgcacacttcttcttctatctctaaatggatgggttctctctatcttccatcatttttcttataattaatggcttttttttgttcttcttcttttaatttcattccactgtctctaagatagcttcacaatcacaatgaacagttatgtttgtttgccttcctctctctgaattaattgctttcttcttatctttcattcaattaatgtcttgttttcccaaccaacccataccttttgctttccctttttcttcttcttctgtggatccatttctcaccttcttccattttcaccattaatggcttcttcttcttcttacctctctaaatcatatttggtgaatcccattaatttgtacttccaaaacaaacaatgaagggaaaagtcatagacaacaaaacatggggaacttgcaacttcaaattcattattttagacacagtaatagagatttgttttttgttctgtaattaatggttgggttttctttgtgtttgtttttgcagttacattgaggaatcctttgaggaggcaaagaggc

SEQ ID NO: 66490 - DNA, 1014 bp, Cucumis sativus
  Intron number 1 from transcript Cucsa.139650.1 (locus Cucs a.139650) derived from phytozome v7.0 (chr-ID scaffold0106 6; pos 929200 to 930213 reverse strand)
tcaataaatccaagagaaataatagctctgatcaggtatagtttcatactacacaatgataatctcatttatgtatgactctcttataactatttagttttcaatttttagtttttcaagattgtgtttgatgctcccaactcattgactatgattttcattttctaatgtaaacattgaattcggagcaagtttcaatagaaaaatgtttttaaaaattactattctttagttttcaaaacttggcttaaattttgaagactcacataaaaagaagaatataacaaaacatagaaatcaataggtttaagtaatatttacaagcttaattttcaagaaccaaaagcttagggtgtgtttggcccaaggagttgtgaaatataaggtaagagcttagaagtagtagttgtgaacttcactccttgtttggctcgaggagttggtgggtcctactcctaaataacttcaattttatatggtggacctcaaagttcacaactctctgagtttcattactccttagtcctcaatatttcactccgtatcccaaacacttgtctggctcaccaacttctaagttagtgttaaatatttcaacctcaatggttttcactaccaaagttgcacatttattaaggaactccgtcttgcaattctgtaaccccaaacacatggttaataactataacatattaactccaaacttcctcactcaacttagcaccccaacacccctcaattgttataaaacagggtctcattgactcatgaaatttattgtgtatttaaacatgtttaaactttaccttaataaagggttgcagtaagtttcctcggaagaagtttctatttaagtcattctcaagtactgttactgtttgacatggaaaatagttaactatcgaaaaatatttaccacatttatataaagcttggttatagggatgcacaggttatttgttaacccttttatttgtttccttcttttgatttatgactcttttacacagatat

SEQ ID NO: 66491 - DNA, 723 bp, Cucumis sativus
  Intron number 1 from transcript Cucsa.133640.1 (locus Cucs a.133640) derived from phytozome v7.0 (chr-ID scaffold0103 7; pos 1300950 to 1301672 reverse strand)
gcgccaaatcgctgtaactaattttcaattctctccttttctttttcttaactgcatgcgtttagtggatctgttgtacgattacgttgttttttttgttctttctgtatagtcaattgcctcggaactgttcttagtttcaaccattctgatctccattttagcgtcgttttctctcacattgtcgttaattacgaagtttggagcattggcttgaatccgtgttgtgattgtatttgcatggctatgaaacgtatggatgatggagtttgtatcacttctttgatttcagaatgtttcatatctcttaattgttttgtttcatgtactaatttgaatttcttcccgaattttcacggctatttggggccggaggggtagaagggaatagttttcgaattacttgctttcccagggagtaacaggtccaaaaaaggcaacagaccataaattacgagcgatcttgattaatccttacgtatataatcgtttaccgttttagttatgatgatcagtcaacttgatgtcctgaaaaattatctgcatgctttactgaatatgtgtgtactgttaattatcatttgtttattgttctttttgagtttctgaccttatgagactatataggtcatatatgttctctgattaattatcattttggtgaactgttgaatttcttggtaagcagggaacatccaagctttcaggttcaaggagggtttc

SEQ ID NO: 66492 - DNA, 936 bp, Cucumis sativus
  Intron number 3 from transcript Cucsa.163100.2 (locus Cucs a.163100) derived from phytozome v7.0 (chr-ID scaffold0114 4; pos 2532060 to 2532995)
ataaatttgacggtgagaatctgaattatgcataactaatgtggtgtataaacatcaaacatttgtatcaaatggatttaaggtgtgttcaagggtgattttaaaatagtttagaatcatttttgtcaggttcaaagccatacagaattctgttcaaaagtgtataatcaacatgaaaatgattttgaatggtttaatacatgttttggagtgaaaattcacgacacaagtgattttctaaacatgctcttattctctttgctttctgcccttttcggtgttcgaggaagcaacttgagtgtgagctgtttgctgccttcaaatgtccattggttttctttgttgtaaaatgtggatgaggtgaattttgaaagaaaatttataagttgtgctcatgctccattgctcttggtctttttgctcactttccctatatcatatgtataataatttgtagttcaaccattgtgagttgacttagtagtaaatagatgtcatgaccttgttacgaggttacgaggttaagaggttatgggttcaattaacagtggccacctagacatgatttaatattctacaattttcttgacactcaaatgttgtatagtgttagacgggttgtcctgtgagattagtggaggtgtgtaagaagaatttgttgttgtctcttagtttactcttacccagaaaacaagtggtatttggagagcggggttcttggcctattccagttattagcaccaagtataagaaagaaagaatgactgaatgacatttttatgctttggccttagattgcatccttatagtattgctgctctccatgatttctaagttgttttactggatgagcagcccattcatcatgttgagtttttggttcatgcttttttcaggactgctttgacattgatttggtgtcggaatgcagcttct

SEQ ID NO: 66493 - DNA, 771 bp, Cucumis sativus
  Intron number 1 from transcript Cucsa.132790.1 (locus Cucs a.132790) derived from phytozome v7.0 (chr-ID scaffold0103 7; pos 659174 to 659944)
tcaccctggctcgttccggtgtagtcttcataaaggtataatttcgcaacctcctgctctgtactcgccgagtaggttgaatgctcgtagatcggcgatgacgaattctcttgttagaattggaggcgttgaaggtgatctcgtgaaacgagctttagcggctttgattcgaccttcttctcatcagcaacgtcgtcgagttgattttaggccaaaacgtagccggctctcgattatgtccaaagccgatgaaacattattataatcctctttcggtatgttgaaaattgaaatggcctaatctatgaatttccggagttgttctaattctccggcggcggttcgtgacggtgcttatctttttctctccggagaccgttacagacattcatcactacagaactctgaaatctgcttttgtacaaattaatattttatacatattagattaatagatgtgaaattgtttgtgttggcgttcagatgagacctaaaattagagaaatcttatcacaaatttaatgaaattcatatgaatttaagaggtgtataacctcatcaaatcggaccacattttagaaataggtttgtgaaatcctccattagcattcagttctatcttcgccgtctcgttttgatgagcataaacagcgttaagaggcccgtttggtttgttgcttttcccttctggtgtttgtttatttaattttaatacattgtttttgtgttttttcagggatatcattggggattcattctctcaccagccat

SEQ ID NO: 66494 - DNA, 807 bp, Cucumis sativus
  Intron number 3 from transcript Cucsa.169980.1 (locus Cucs a.169980) derived from phytozome v7.0 (chr-ID scaffold0117 4; pos 218291 to 219097 reverse strand)
ttaccaccagagaccttttattcaagaaaccggaggtttgtgctaataatgctaggcactcttgacttgattttatacctttcaatctggtgaagcattgctagaacttattaaaactttaggggacaatttgacccaccaattgggtctcaatttggcaatttattgattttaaaaatgacactccagggtaaaagtttgtccatgaatattgttaaagtactgataattaacttaactataacttataaacttaagcttttgggttgatgggtggatttaacatagtatcaagcaaaaggttttgtgtgtttgaaccttttaatgtcatttttttaaatcaatattgattttcagttgttgggcctttaacaaattgttcaattgagggagagtttggagtattgatataattaaatagtataatcgaaaaacagtgagatttggatatttagttatttgtaaatctgttcacttttcaaatgctagatggtatttattcttctctagttccagtttgtttaccgttttaaatatatatatcaacaatgaaatagtcttttgaaattttgcttaagggtgaaaaaatgaaattaaagttccaatgtgtacgcatatcctctttgatctaccgttctctttataaacggatttaaatattttcactgaattccctagtttcctttccgtgtgatttgtacaactttctttctggtcccaaatgccatagaatattggattatatagatcacttcagtagcattcaactctaaattgtgactctgatgttgtttcttgtgtaggata

SEQ ID NO: 66495 - DNA, 398 bp, Cucumis sativus
  Intron number 1 from transcript Cucsa.169980.1 (locus Cucs a.169980) derived from phytozome v7.0 (chr-ID scaffold0117 4; pos 219614 to 220011 reverse strand)
gaggacagtggctgtcagtggaggacagaggtggcgacacaaaaacttagggtttttctgtttttaagaaaattatggtttttaggatttcattgttatttctgctctgataccaacttaaatttgcgaaagttattgttttcccttattattaaaaatatgcaaggtaggttttcttataaggagaaagaccttttacaaataagaaaagaataaaagcaataatggttaaatatttaaacaataataagtatgtacaagtataggaatgtgtcttactttgtgataattgcatttacaatataattcaaatggtgtgatactttttgaactgatccatccgttcttgcaaatgcaacaaatacttatttctttattttctttcctttttcttgtag

SEQ ID NO: 66496 - DNA, 514 bp, Cucumis sativus
  Intron number 1 from transcript Cucsa.176480.1 (locus Cucs a.176480) derived from phytozome v7.0 (chr-ID scaffold0122 5; pos 728088 to 728601 reverse strand)
tcatcgacactccgggtatgtataactattacttagacttattttgagataataactaaaaattagctattaattaattagtaacattattttttaactatatatcatataattaaatactatttttatctctaaattttttgttttactatgtttcatatttttttacgcaggtttaaaaaatcaaattaccttaacttttttgttttttattttttgaaactaattagcttacaaacatccattccatcttttgttttctgggttttgtaatatttgtttaagattattttactattttcaaatttaaaaccaaaatttgaaaaataaaacaatactacaagttacaagttaggaatggagagaaaacaaataaaattttataaaaccaaatatttggctgaaattaattcttataataattcgacaaataatcaaattaagaatatatacaaaataatagtttttaacgttcttctcacaccatgtaacaaattacaaaaaatgtgtagga

SEQ ID NO: 66497 - DNA, 791 bp, Cucumis sativus
  Intron number 2 from transcript Cucsa.161880.2 (locus Cucs a.161880) derived from phytozome v7.0 (chr-ID scaffold0114 4; pos 1662398 to 1663188)
tcctctcatatttggaggtaaaacttaaacagttttgctgttttttgtttgatatatttgaatatttcatctactcatcttccttatggagcctatattcgagttttgtatccgcataaagaaagttcaaggaatgatttcatatcaccttatttgaaataccagaaatgatttgaattctttatctagatgtttgctgaaaaggaaatgggggaaaaaccgatacagtccttcactcctgatttatgagaaggttaaactagctgtttacttgaaaatctacgaaatcataagaaatcaaccacttttgtctgaatttcttacgaagaaaaattatgctttaaatttagcatgttttaaaaccatattggttaacttacatgcttagtctctaaactttgagattttcatacacctagtttcaaactttctccattacaattcaatgtagctttcataattttctaaatcgatgaatctacaagacacaagtcagaaagcttagagcttcgtttgatatcatattcaattttgtatttaatagatcaattcattcttaaaaattgtaaatttgtcgtagatgctcaagaaacaaatagacgaaaacctaaagttgataattgaaccaattatattatttgaatggataacaaatatttgaattgatttgcaagtccatccgaatctaaaatcatttagaccccaaaaagataatatttcatccaagttgtttctcattttccagcaatagtttggctaacatgattaaatgcttggtatctcagcttggg

SEQ ID NO: 66498 - DNA, 669 bp, Cucumis sativus
  Intron number 3 from transcript Cucsa.012990.3 (locus Cucs a.012990) derived from phytozome v7.0 (chr-ID scaffold0016 4; pos 769786 to 770454 reverse strand)
ggttagattctcccaccattctagcagtgacatatgtaggtgttaattattagtaaattttaatctatccaatttctaggtgatatgttgttaactgttaagtttcatttaggtcccatttgttaacattcttttttctattttttaaaatgatggttgttttctcaccaatttgtggtgtgcttttcagctccctttaaaagacatttgaattctcaaccaaatttcaaagaccacatcaagtttttgaaaactacattttctttgttttgaaattttggtttagtttaagaaaacgtttttaaaaagtagcaaagctagaaaaatgcaatgtataagtattgtttataagcttaattttaaaagcaaaacataaaaaaatgaaatggttgtcaaacagccccttagatgattgaagattttaaaaaaaaactttgagattcatcactctgccaaacgactctaagtttcaactttatcacccaagccatacatcttaattaattttgacgcttgaattcaatcattatcagagagagcatagttgatgctaatctttcaaattaatccaccatgcatatcttacagatattataactagtagagatatttacttctttccatttgggtgcaggtcacggtgggtcccgagctgcagagtttttgaag

SEQ ID NO: 66499 - DNA, 639 bp, Cucumis sativus
  Intron number 1 from transcript Cucsa.012990.3 (locus Cucs a.012990) derived from phytozome v7.0 (chr-ID scaffold0016 4; pos 771004 to 771642 reverse strand)
tctattctgtcccgattcttccattttctacctgagtaagtatattcatccgatccccctttttcattcccaatttcccagatgggatcattcttttttatgttctccatcatcccttttgatcccatcctctaatatttctgatttgcccttgatttccattctttttcactcaatctgtatcgattttgttcgggactgattttttctcacgattatctgcattctaacgcccctccccccatttttctgggttctcttttttatgtttagccatccaggtagcttctgtaaaaaagggtggtggagtttttaatgaggtgttacttgggtcgatcatgttggggttgaaacttgtactttaccgtttgattggagatcatcatagcgaaaaatcttgtttttgtttttgtattatattttgtttgctatttttggttgttgcctatctcttcagatcttggtatcattctgatatcaagaacatacaagagagatagaagttttgaatgttccattgtttatgatgcgaggatttatttttgctgcatctgttctttgttattgcttttgaatatttcatcgagtttgctttttttttattactgcaatgatgtgattgtgcagttgctggcttag

SEQ ID NO: 66500 - DNA, 931 bp, Cucumis sativus
  Intron number 1 from transcript Cucsa.074420.1 (locus Cucs a.074420) derived from phytozome v7.0 (chr-ID scaffold0078 5; pos 285031 to 285961 reverse strand)
aaacaagttcgtttttttgctcgtaatttggttgatgactatgtatgtttctaaggttgactctctactttggaagattgttttatcgtgtttctgttgtgttttcaacttgtgtatatgatgtttttggttctttgagatggatgattttatccaacactaagaagagggttcttacacaatttttgttaacaacttaggctctgttttttaaccacgtcgttttttgttttgaaaatgaacttattttctctcgattttttagaatagttgacatcttccttaagtactaagagttaaaatgttagccaaacttcaaaaacaaaaacaagattttaaaactactattttagttttcaaaatttagcttgtttttttttaaaaaatggtaaaagttagatagtaaagcaagaaatttaaaggtagaaggagtgttatctattgactccattctcaaaaaccaaaaagaaaaaaacgaaaaatggttatccaattggactttagcttctaaaccttcctaggtaatgatttagtctataggaagaaaaagtattggtatgattcactaagactttctttcatatgtagattcataaattgattagggaccatatgtgtttataaaaaacaaaggctaacgaaaactaagtacttaattttgatgaaaattttaagaaaatttaacatataggggaaaagctgttacatactaaagcacaacaagtagattgttataaatttacaactgttaggactaaattgttattttcacaagtgttcaagaatcagaagtgtaaaccttaatctttctgttcttttttatttaattgttgactgttaaaagttcttgttgactatttaaaagggtatggttatacattgagggttttgaacatatcttttacacattagtttctatttggcagcggtc

SEQ ID NO: 66501 - DNA, 514 bp, Cucumis sativus
  Intron number 1 from transcript Cucsa.131910.1 (locus Cucs a.131910) derived from phytozome v7.0 (chr-ID scaffold0103 7; pos 40217 to 40730 reverse strand)
gccaatctggtattcatagctctttttcttctcttttttgtcttaatggtcaaggattatagttcttttatctgaatgaaacccaatagttggctttaacatgtgaattagagttctgattagccatttgatgaactgacactcatgatatgccttgagtgatctttattgttaacataaccaatgtcaatcatttgtttcttaatttgtttaggccatgttcggtaatatgattttgtgaaattttagccaatttttttttaaaaaagggagttttaagagctactttctttgtttttgaaaatgtgaggtaacaaagcaagaaatttagtggtcatatggatattagaaaaccaagaaccaaatggtttctgacagtggatctagtatttatgttgtgtcttttatgaagctttgaacattgtgattaatgatttgcatactactttgagagatgctgactgatattaatgaatcagagttacaactatatattggacgtgagggggaagta

SEQ ID NO: 66502 - DNA, 486 bp, Cucumis sativus
  Intron number 4 from transcript Cucsa.047820.1 (locus Cucs a.047820) derived from phytozome v7.0 (chr-ID scaffold0054 2; pos 2725209 to 2725694 reverse strand)
atcttttgcttctctccaaggagaaggtgagggaaaaaataaaataaaacttctaccctcattcttcttccccctcccccaacatcatattgaagtttagagaactgaagagaaaaatcgctttgtagtggtttttgttccctagacagtcttcttatggaacatttttcttcaaattctgctggctttctcccctttcttctttcaggtctgatatagctcaggctaagagaaaatcgagtctaatgaacactgagtttgaaaaaaataatctggaaaatctaaatgggggaatagaatgagcaaagagttagttcacatttgcattgttatcctttgcagcgtttgattctgtttcaggatcttcctaaatgttttgattgtatggctattaaacttggtttgtttatttaatttttttcttcttatggctgacatccaagtatatattgcagtttcaggaaaatacaaaactacccaccacgt

SEQ ID NO: 66503 - DNA, 877 bp, Cucumis sativus
  Intron number 1 from transcript Cucsa.101560.1 (locus Cucs a.101560) derived from phytozome v7.0 (chr-ID scaffold0092 7; pos 819329 to 820205)
gtggcgatcctgatttgatcacacggtatcattttcgttatactattattgattttaattttgtttaaattaaaacattttagctcaattacgtaacaacttttacttcttatattggtaacttttttataaaaataaaaattaattttatttcctcttaattatttcttaccgtaatttgaatctcatttcagccaaattgatcaaaatttcaaagaccccttttttgagttttcagaatttaacttagatttggtaaaaagtaaatagaaaagtgacaaaaaggattgagaatcaattggttcttttatttttcatcttcagttttaatttcagaattcaacttagttcattgttaataaaatacaaatttatctcttttctaattataataataaactttaagatcatttaattttatattattgtgacacatttaaaaatattgaaatttaaattgaaaactgaatgaatgaatatacaaaggttttccctttccaaagatccaatgaataaacaagaaaaggagctttgttgttatcaaatgctaaacgtaggctcttgcaattgtcgccagggctctaattcaattcctatacaaaatttaaaagcagcattaataattaataacaacaacaacttaaagccactattattatttattaggtatatttaattagcaaagatatagtttataaacccactaaatgaaataattgacataaaactagcttcttagttgagctaaattatcatgtgaatgtgaatctctaagatatggtgtgtcaatccttttatataaatccatatagattaaattaatattagattagaaaatatctaatctttttaatttttccatattcttattaggtat

SEQ ID NO: 66504 - DNA, 866 bp, Cucumis sativus
  Intron number 2 from transcript Cucsa.076030.1 (locus Cucs a.076030) derived from phytozome v7.0 (chr-ID scaffold0078 9; pos 527267 to 528132 reverse strand)
ggttaatcttcttaggaaggtaattgttctccggtttcttatctctctctctgctctgcgttatttttgttgattctgctgtaattacgctatttaacaatcttatttactacctttatccgcctacgagattctaacttgtgttaggagtgcaaatgaagtttcacattggttagggaaggtattggttattggtgtatcttaagattagagcaattatctctgttggtatgaagtatttcgaagtcgtactgttatggggataggtgtaggttatgttattcttatcagattgttgtaattagtcctaattggatagtatggcctagtttatgttagcaatttgcattctttctgtccccacatttgaacgaactacgaagctagatgatttgaaatttataatctcactatgtttctttgattgatatggaaatttgcttgtatctttgtcaatttgtccacttaagatgatgcttcataagataatttataagtcttggatctaataaaaactaaaatttgtctctatgtcagtggtctaaatgaactgacttaggaacctgcttctggactctttccttaaaagtttctctcctcccctctctctttctagggcatgggggagatcttcacattcttgtgtcttgtggattatggttttgttttgtataatataacctcatgatatattcaagacaccttaatttgttcagagattatttcaatgtcattaaaattttgtcagcactttccctgtatcattttttttatatacaataatgtcaaacaatgaaaagtcagcatgtttcttgattttcttttttgcagtcttttgatcctaaactcagttatcatcccaacac

SEQ ID NO: 66505 - DNA, 712 bp, Cucumis sativus
  Intron number 1 from transcript Cucsa.096250.1 (locus Cucs a.096250) derived from phytozome v7.0 (chr-ID scaffold0091 9; pos 1949223 to 1949934)
ggtttgagtctctggactttgaatcccaacaccaggtaagtagatggatggatggatattgatttgaatttatcgaaatattatgtgaattaagaggctacaatataattcatgaaaagaaggtattaattctcaactttttcgtgtttttggggatgaatttcaatttggtctttgatttttttccttttgaactctagattgtttatttatctacaattgaaaatatagtcatcatgtagaaaattaaatttagcaaacattgctcaataccagaaagaaaaaaatggtagatatacttaattattgtcccctagagttctaacattgcaattacttctcttttggtattaaatcaaatctcttaacgcgaaagatcaaaacaactccaaaaagaaatgacaatggtgtaatggaaagaagcaaagttagttattaaaactaaaaatacaaatttatattgatttggagtataagatatattgaatcaatgaaaataagcgcgagaaactaaatttgtatgaaaggataaatttgagacttgggaaatggatatgaaaggtagaaacgtgtagtaaaatctgaatttaagcttttgcagtgttagaaccaattagaaatgattctagtagggaatgataaataatttgtttgaattttcaactgatatgatttgtctccatctgctcgatcttatagcatattagattgt

SEQ ID NO: 66506 - DNA, 650 bp, Cucumis sativus
  Intron number 1 from transcript Cucsa.066160.1 (locus Cucs a.066160) derived from phytozome v7.0 (chr-ID scaffold0069 6; pos 714958 to 715607)
tcctggattgtttcgagttgaaacaatatattgcggtaactttttggatgttctaactctccatttgactgttttattgcttggatcttttttttccttcttattgagttatttctttgtttataatttgatttttttttttatgaatattgaaagattctttcgagtaatgcttcagttgcttaacgactggttccattgggcatattgttttcctggatgttcttaaatcagagtatgagttcttgaaaagattctgggtcactgatcggcccgtgatttgccttcctctggacgaatgttatcgattttacttgtgactaagttgttttctgaaatatcagaaagaatcatttgatttccttttgtaattgtaatagtgtacgcttcctccaaaatgctgctttcatatgttataggtcaaggatcttagctgcattgtagaattctggagaacaagattgatgaatttgaagactgattgtttttctcatatattagattcaggagcttagcatattattttcttcttcctagctctgaaagaaccgttccagatttccttgcatcttttcttcggatcgcttaatttatttttcttttatataagtttgatgcaatctaaaattctgttgcagacactataaaag

SEQ ID NO: 66507 - DNA, 503 bp, Cucumis sativus
  Intron number 1 from transcript Cucsa.144280.1 (locus Cucs a.144280) derived from phytozome v7.0 (chr-ID scaffold0108 0; pos 672902 to 673404)
gctggtaaagaaattatttatctgccactttctatagattggagtaactagtaagtttagttttataatttttggcctttctttgtctctgttatacttggagaaagagttgttctggcacatcagcacatgttttcaagaagttcagacatcgcattgcattttgtttgtttttttctatttgaaaccatatctggaagtttatgtgttttgtaagatatacaatccctaaggtacacatggcctttgaggtgttactgttgtatcaagctgttggattcttatcatagctgattcaaagaaacactgactaccatagttgttgaagtagttcatcagaactaatgaatttgttcgtttttgtgttgcagagaataaaaatatgggtttgaaccaagttagtctgtttagaaggagcattattgttaatagcaaagacccaatacaactgacatctgtccaaacgaggcaaatcaaagaaggggtctaaagggggagcagct

SEQ ID NO: 66508 - DNA, 396 bp, Cucumis sativus
  Intron number 1 from transcript Cucsa.067210.1 (locus Cucs a.067210) derived from phytozome v7.0 (chr-ID scaffold0069 6; pos 1612673 to 1613068 reverse strand)
gaaatagcgctctgaagaagtcggtgatgtttgccttagaattcattttttatgtaactgtttctctaattcgtattaccgaattcttttagttgatagaatgtattctgtttcgtattgctatggttttcgtgataccagtatctctcttgaagcaattttacgtgttagatgcatttcgtgtgaattaaaaaacctttccgtatgctttttgaagatagatagaggttcaaattaattttaggataaaattgatggttgagataattatagatcctgtaaacatatttagcatagtttatgtctttgtgatatggtgtacctttttcttctaacgagaggttctataagagtttcattttgggagatttgattccatgaacaggtattttctag

SEQ ID NO: 66509 - DNA, 772 bp, Cucumis sativus
  Intron number 1 from transcript Cucsa.167350.1 (locus Cucs a.167350) derived from phytozome v7.0 (chr-ID scaffold0115 4; pos 716653 to 717424 reverse strand)
gttagacgatacattttttcttttaaggtaaatggaaaagtccttgtattatcttgttggttatttttaatattcatatattactaccagcagtgcacatcttaagttacaagtacattgcaagtttgtgtaaagactaatcttaagttcgtaaaataaaagatatatatcagtcgttaattttttttaatatctatttaacattctagttctacattattatttgttttaaatacagttagcagttattagttctctgatatgtcaaagagtgcaacaaggctcgaagaaaatgtccttggcatgatcagatcttgttttgtgctctacttgtaattttttcaggaacttttttataatattcgatgcaattccaacccaaagtaatgtcatgtactaaataataaataccaattttttgttgatatgcttaaaatttccttcaatatttgctttgatgggaaaacttccttcaatgcaaaagttaccaagatcaggacaaggaggaaagttgataaaggtccaaacaaagctctctgatgacggttgtaccttcttgcatgttatactcaactctctaaatgaccaagtgcactacaaatggacgtttttactaaattgatttttatgccattttaatcacaataattttgttttgtttccttctttcatccttacctcctataaaccttttgatgtgcctttgaaagtgtcatttctctttttaacctgactaggtctgaaaaggattccctcccaagtattagttggg

SEQ ID NO: 66510 - DNA, 760 bp, Cucumis sativus
  Intron number 1 from transcript Cucsa.058110.1 (locus Cucs a.058110) derived from phytozome v7.0 (chr-ID scaffold0061 4; pos 368348 to 369107 reverse strand)
cattccatctgtctatcatactatccaacgttgtaacactttatcccctatttttccttctcatccttttcttcttcttcttctttatctttttcttcaaacaaataaatagaaatcagggtttgatttggtattgaagggctgtgttttatatgattagataatttctatttattgtttgaaaattaattttataaacatttatttcatctctgtatgttgttctattatcaactatctgttttcaaaaacaatgcaaatttttaaagattttaccataaatactggtgttattgggaggcttaattttattttatttttcttaaagaaaaaaaaacacttttgattcttatactactttggttttgcttgtaacgatttactttcaattgtctaataatttaattcatctaatatgtccatatttattattttatgtcttagatatactgtgtatttggtaaagatattgagtttatcgatttttttttatgaaagaaatcctattagattgtaacactaaattctgcacataatttaaacaataataactagatttttatacaaggatgatacacaatggactatcgcaacaaataaaagcttaagggggctaaaaatatatatatcaaggatcctaaaagttatgatcagcagccaaatcgcggcaaaaatggatatttacatctatcactttagtaaaacggtgcctaaaatggctcccaatatgttgattttgaactgtgcaggcaagaattca

SEQ ID NO: 66511 - DNA, 431 bp, Cucumis sativus
  Intron number 1 from transcript Cucsa.149900.1 (locus Cucs a.149900) derived from phytozome v7.0 (chr-ID scaffold0111 0; pos 841837 to 842267)
tgggctgactcacaaaagcaggaaaatcaatcaaggtgcactatgcgtgatttgtttttttttgttcttctgattggatgattcatgttaatgtcttagattgtagagcctattcatgccagtttacattatgaatgaaactctcttaatttgatcctcgcgagcaataaaaaaaaggtttatatgtatggtttgatccatgcatttcctaaaatgaaaagtcttgttgtgcactttctttttggaacctattctggattctctgttatacatttgctggttgcctttgttccacattttctagattcactcatatcatcttgggcgactcattattattgagttgtattgcatgaagttttcctatatttctcattccaaatgatggtcttatagggccccagaaatagacatctctgaacttgaaagtc

SEQ ID NO: 66512 - DNA, 850 bp, Cucumis sativus
  Intron number 1 from transcript Cucsa.092260.1 (locus Cucs a.092260) derived from phytozome v7.0 (chr-ID scaffold0090 5; pos 197482 to 198331)
ggcccatctgggtcccttcagtgtgatttatacaggttccaataacattctgtcattgtagcataccacgtagtattgattattctattagtacttagtactgcataaccatctttcatgtttctttctatttttaaattaagggtggagcacaccacatggagactttttaccggttgcaaaaatggaaaaatgccatggctaattattggctttccgaaagaaaatttcacttctttagttaaatttcactaccatgggtaatcgtcaaatgtgtaactaatctgaattcgtctcagttggattctggatttttgtagatgtgccaatgccaagttggagccttttgaagataacattttctcttaacgtgttagttacttagtttacaagacctggaccctccgttgctcgcattgtctggtgcaccctgttgtttgtaatgaatattctgtattttcttatcatgcaaacgacatcttcactgaggcttttattatgctatttgtttcctgtgcctctttttttccattaaaaaacttctctttgagtttcctttatcttgtaaccctttttgcggcagggcatttcggtttactgactagaatacgaaatgctaaatgtattttgttttgttctttatattctgtgactctgaaatctataatcgaactttaatgagtaagaaatcatgataaagaatgagttgtttatatattttacaattttctcagagtgatggtgttaaatcatgctttgtatatagcatgtaagtttacttgagtcccgagtttcagatcttcatttctttctatcaggtcttttcgtttaccctgccttcttgtcggtg

SEQ ID NO: 66513 - DNA, 507 bp, Cucumis sativus
  Intron number 1 from transcript Cucsa.161380.1 (locus Cucs a.161380) derived from phytozome v7.0 (chr-ID scaffold0114 4; pos 1286387 to 1286893 reverse strand)
gattggtgagttctcattcctcagttgttattggttgatgaaatttgtagaaattcttagattggagaatttcttatccattcaaatatacctcatgcttgagctgctagtatagttgatttagttgtttctttatgtatttgtgtgtatattcttagaatatttgggtttttgggaattcattcgagcagggttttcatttggattcatttgttgatttatacttttcttcgaattttccaccagtatgttaacaaaacaagggaggcccagtttaagatgtatatctagtttgcgcctcgtggattctattttgactctaatactgcacgtaatgaacttggaatgtctttcatcgatttcctattatcaagcaactgctttgcttttagtttttagttgaattttaatagcttttaactggtaattcgttctatttgttaaagagtaataatcgatccctcgattgcaggcgtcagcagtacttgggaaaagcgaagcacgcgt

SEQ ID NO: 66514 - DNA, 391 bp, Cucumis sativus
  Intron number 2 from transcript Cucsa.044470.1 (locus Cucs a.044470) derived from phytozome v7.0 (chr-ID scaffold0054 2; pos 810404 to 810794 reverse strand)
taagtcttccctcaagtcttccgctctcaagggttcgtatcgttaatatcttttcactctacctggaatgggaggttgtgtattgttttcaacttcatgcatctgttctgttgcccccatttgattcaactgaattcactcttgtccaaattacttatcaatcttcaacgaaaaattttgttttgagaatctcttggattttaaagctactaatataaatgtttgtacagaactgaaaattagtgaatccttgttgtttccagctttccatgtgattatgcttgtagtttgccaaatggatcatgggacaggaatacatcattatatataatatgttatgtttctatcaaatgcttcctgacttattgcatagcttctctaaaaggaaagg

SEQ ID NO: 66515 - DNA, 1015 bp, Cucumis sativus
  Intron number 1 from transcript Cucsa.089750.1 (locus Cucs a.089750) derived from phytozome v7.0 (chr-ID scaffold0089 4; pos 1138232 to 1139246)
aagaaagcctctttcaaaagtctgcgtgctcttgtgtaagttttctctttttcttgctcttttatcttttcatttcactgatctttcgtcgtcccctagattgctttggttgagctttcgtgtttgtgttttgatgttttgaaaagtacttgtaatatacaatataagtcatgtttaaattagttgtaagttagaattgacaaaagctttaattgggatgaataagtgacgaagaagaagggatagttgttgcttatacagtcccttggtttgaagaaattatttaaggatacactcaaaaacctcacttgttgtttattattttttatgtttgtttaatatggtatcaaataacatgaatttctcttcaaattctgagaggaattcaattaaactttttttgagatttgatcgaagaaggttgatttgaaggaggcactcaaggggagtcgaaaaggattacaatatatgaggcttttggcgtaaaaatgacactactttgaaagggcaaattgaagttggttgagatggaattgatcacatgtttatctaatcgaaataattcaatttgaatacatatcgttagtggtatgtaatttttttaacagaaaattagatattgatagacacatcaataaacttccatctacgtttatcactattacttatatagtcattttgtcatcttcaataaatatgtttttaatttgttttatattagaaaatgtaattaattaaacttttaattttaattttcctctaacagaaatgaaagattaggttaaacctgaccaaatctctcaaagaaaatagtctcaccattgcctctatttattttggtctttggtaaacaaagtattagtatttcctaaattcaaattgctcataatatgataattataatggaaatgaggtctgtttaaggtcttactaattctaaacccaattaaaagaatatatattcttttatgatcattttattctttttcttgtttttgtgacagaataattatat

SEQ ID NO: 66516 - DNA, 756 bp, Cucumis sativus
  Intron number 1 from transcript Cucsa.098490.1 (locus Cucs a.098490) derived from phytozome v7.0 (chr-ID scaffold0092 3; pos 477566 to 478321)
tgaagcagcaattggaggttgctgccaagtccgaggtctatctctcttcttttctcttcctctcgctactgcgatttttgtaaatcaatgtgtttaagcgagtggaattagttctgtaggttcccattgtgatatggaagtatagatagttttccttttaatcgttgctgatacatcgtattattgtctactgccgctagattatcttttgattgttaaattgattccatacacattttctggttaagaagccttgtgatacttatatacgttaattatgaccagatatgcatttccgtgtgctcttttattttctctttgttggagttctctaatgtccgttcggttattcgttctattttgtttgtagcttctttgtttccatattaaatatggttgaataggaaggcaatttcgggactggatgccgttttgcaatctgaacatgtttgttaacagaattgggggtcgagaatttgggggaagagacattcactcgtttcctcatttgcccttgaagtttgattcatggcctgaaagagttcgagtttccggttagatgtattctagagtttagatgtttttgcccagcaagaaacttaaagggtcccccctccccccgccaagaaaaggaaaaaggaaaaaaatacatatggaagagtagtggaggcgaaacatttgtaatcctgcagctttcaaatactaggttcattttacggatttttcctctgtatatcacttgtcaaatctaggact

SEQ ID NO: 66517 - DNA, 755 bp, Cucumis sativus
  Intron number 1 from transcript Cucsa.087950.8 (locus Cucs a.087950) derived from phytozome v7.0 (chr-ID scaffold0088 8; pos 423944 to 424698 reverse strand)
ttccactctgataagctcagactcttcttcgcttggtatacgatattcatattttcttttccctttgtcttgtgacgtcttgtaatcagccctcattttgggggtttcccctgctttttatgttgttgttataatgccttggaggaatgttgttggatctctttgttgttttaaagtttttggtggtggcaacgcctttcaggtttgtgggttttcttgttactggatttcccagttgctaaattcaaaggaaatttgaattgcttgaactttgtgaatgattggcctgtctatcggttggatttacttttgaattatatgtgttgtttgttttttgttttttttttgaagcgggatatggatctatcgaaattgcagagcttttatatttgatttgatttgatttggaaatgaaaaatgttcttcttttgactttagtttttttcttttgataatctttccttgaaaattcttcttttaattgatcaaactgtttgaataaatgcccgtaagaattgtttggctgcagagactcatatttataatcccattcatttggtggaagccttcatgattaaggttttcttttgtttagggtaattatacgaacaaatataattgtttggagacttgttaagatctctttttaggcacttttgctatataactttgagttgaagtaagttttctggagtttttaacaaaacttttcctctgaaggttttgttggggttatttaggttgtatcacaaacg

SEQ ID NO: 66518 - DNA, 1021 bp, Cucumis sativus
  Intron number 1 from transcript Cucsa.122880.1 (locus Cucs a.122880) derived from phytozome v7.0 (chr-ID scaffold0100 0; pos 203355 to 204375 reverse strand)
ctcccactgctggtctcccccaaactagaaggttcaatttctatttcgattttgttttcacccctgttcttgtgcttaattattgtttgcttcttttgatttttgagggttcggtgttgaaaatcgttaatgaatcaatgaatgcatgtatggttttgttatgagtttctgaatttgggtttgttcttcattgttgttattttgaatattcgtagcttattcgtatcattctgattctgacccttttttggctattgtttctcatttgtcctcttgttattaactatagccaaccaatgttgaagattctttcctaccttttttctgcttttagttgcttcagttactgggtatttctgattctttctccaaaattagatgctgggttgggttgctcttttgcaaatcttttgattttctgttcaatatggtgctcttcatctgggtttctagttaaggaacataatgagttttaatttgtttacttcatccaaagcttgtatcatattcataccaaccgattagacggtccgaggcaatttatacatatacatatacatattagtacaaagacttcctctctcatgtcatcacatgacttcctatttctgatcaatttctatctcttttgggagtttttgaagtacttccttggcattttgttcctgcaattttctttacatgttgagatgctgccctgcaactctccaatgttaggatttgaactttagtacttgatgaaacaagttgcgtggttctcagctgaagatagaatttgaataggtttaggtaccttttagttcagtttgtattgaatatataacttaaatgcatcaatttttaaactggtcggctcacacgaattgaaatctacatctatggcgtaatcataactactcatgtttcgggtaataattggcatgtagcatcaaattaaggttactgtcttcttttctaatttctgagtttaaatttcccctgatcagagcgattgctgaatatttatctcgagatcttccgt

SEQ ID NO: 66519 - DNA, 745 bp, Cucumis sativus
  Intron number 1 from transcript Cucsa.096590.2 (locus Cucs a.096590) derived from phytozome v7.0 (chr-ID scaffold0091 9; pos 2141637 to 2142381 reverse strand)
ttggttagtattgacttgtccatgatgtttaattgtaacccatcttgttcgtgagctgtaataacagcaatggtgtaaaaggttttgcatgtcgattaattggttttccatcttgctctggattcctatgtctcatctggggaccaagtttccattccattccacccaaactagcatattgtttcatccttcaagtgattatgtcttattggtgataaatgattagagaccaactctcctttagcttctgtatgctcctagcctcttcctcttccatttttcaattaaagacatttcttcttcttctttctttctattattcttttttttttccttttttgaaggaaaaaacttcagattaggctttctttcggtgctaggatgcttagaatagaaagctgaaacttttctctttactcgtttgttctgatgattgtattacaatagttacaaaactagacctgaaaatttcatcattggtgacatttcatcagtgcagtttctctttcctcttcgtattcattgtgaaagttaataattcaaaagagcttacaaatatttctatgttatataagaaaataattagtatttcatatcaaagtttgaaatcttttacattatttatctttgttacaattttggctaaaggagtctccttgatttatttattagaggatgctattttttcttttgcacctctctatcaaagacaataactttccattcatggaaatcttacttgcag

SEQ ID NO: 66520 - DNA, 502 bp, Cucumis sativus
  Intron number 1 from transcript Cucsa.161940.1 (locus Cucs a.161940) derived from phytozome v7.0 (chr-ID scaffold0114 4; pos 1708472 to 1708973)
tttcagagctctttcagcagatttcacaaacccaggtaaagattttctcctttcttgtttattgtcattccctttttcgtgttcttcaatctgtcgatgattctttgggttttcctctttttgattttcaaatatttatggaatgtcctcgagaaaacgagggtttctgtttgtttttacactgtttggggtcacccctcttggtagtttaatctctccatcgtatttgattgtcttttctactcaatcgttgggatttctcatctggggatttcccatttttaatcgtttattgattgaaactactgtcgttttctattgggggatttttttcttaatggaaattgggaaatgatactgcatatttgagttttggcgttgttgttgacagttttcacagggttgtttcttgtgccattggatctgattttgcgttctcactttgttctaaatgcgtgaaatgtcagtttctgctacttctgaattgattctgtggactgtg

SEQ ID NO: 66521 - DNA, 481 bp, Cucumis sativus
  Intron number 2 from transcript Cucsa.166740.1 (locus Cucs a.166740) derived from phytozome v7.0 (chr-ID scaffold0115 4; pos 94148 to 94628 reverse strand)
cttcgactttgagatatccaaacaaaccaaggtcaagaagcaccctgttgatcgcattaatgctgataagtgactacttcctgctcgagtttataatagaaacagcagctcacagccgcgataattcctagtccaaatcctacttttttttgtttggaacaacaatggggatggcctcgagtgtgagattagtgatggtacattgacaccttgttttgttgtgatcatgtactgttcaaatgtactagttcagttgctctagttttaatgtactgtttgaactttaaaccaatcaataattcagcaggaacttctacttaaactactttcccttcattcactttttcttcaatcttacaatgacagcataaccaattttgaagtaacatgacatacacaacattgtctgttttcccgtcttgcttcgtaccgaaaacttgaaagaagacatcatggtctaaataattttcagagaaaatag

SEQ ID NO: 66522 - DNA, 595 bp, Cucumis sativus
  Intron number 1 from transcript Cucsa.119010.1 (locus Cucs a.119010) derived from phytozome v7.0 (chr-ID scaffold0099 8; pos 926758 to 927352 reverse strand)
acccaattccgtattgcttttcggttttcttctagactatataatttggggttttcttccattttctgtctcgtctctttttgcttctgtttgaaagtaatttcttcaaaaatgggtctgtttctgggtacaaaatgcattccttacttcatgctgattgatcgatttctttttccgaagaataatctcaaataatgtgatggaaaagaacgtgcctttgtattccatctttccctcctaagaagaaggaagaagtaaatacataacctggaagcaaatctaaagattgttcatgacgttcattattgactaggcaaagtgtaggaataatcttcgtattcatgactcttttttgaattatggttctttgtagaatagcatccaaaacctcatagatatattaatatgcatctatgaaactaaacaaacgtgtaaggagaattatagcagttaatatggatgagatttgggttatgtggcagttggttggtaggaacacaatgggataccaccagaactgtcatatgtagcttacaactttggtcttgcttaaattccaggttcacgtacagttttcttggcctaggaattcttt

SEQ ID NO: 66523 - DNA, 775 bp, Cucumis sativus
  Intron number 1 from transcript Cucsa.087950.10 (locus Cuc sa.087950) derived from phytozome v7.0 (chr-ID scaffold008 88; pos 423924 to 424698 reverse strand)
ttccactctgataagctcagactcttcttcgcttggtatacgatattcatattttcttttccctttgtcttgtgacgtcttgtaatcagccctcattttgggggtttcccctgctttttatgttgttgttataatgccttggaggaatgttgttggatctctttgttgttttaaagtttttggtggtggcaacgcctttcaggtttgtgggttttcttgttactggatttcccagttgctaaattcaaaggaaatttgaattgcttgaactttgtgaatgattggcctgtctatcggttggatttacttttgaattatatgtgttgtttgttttttgttttttttttgaagcgggatatggatctatcgaaattgcagagcttttatatttgatttgatttgatttggaaatgaaaaatgttcttcttttgactttagtttttttcttttgataatctttccttgaaaattcttcttttaattgatcaaactgtttgaataaatgcccgtaagaattgtttggctgcagagactcatatttataatcccattcatttggtggaagccttcatgattaaggttttcttttgtttagggtaattatacgaacaaatataattgtttggagacttgttaagatctctttttaggcacttttgctatataactttgagttgaagtaagttttctggagtttttaacaaaacttttcctctgaaggttttgttggggttatttaggttgtatcacaaacgagaccacagctttcctccat

SEQ ID NO: 66524 - DNA, 643 bp, Cucumis sativus
  Intron number 1 from transcript Cucsa.184880.1 (locus Cucs a.184880) derived from phytozome v7.0 (chr-ID scaffold0127 4; pos 544681 to 545323 reverse strand)
ttttcaccaacactttcgatagcttggaaccacaggtaattgtcaatgttaaatatcaaattgaatttactataactcattcctttaccctctcttttcataaagatttttagtttagctttttgctttaatatttcattttatgttggttttcttccaatgcatttctttaaataaacagaacttggactattagtataattctaaaaacaaaaagaactaaaattttcactttctttagattcaactattcatcaacttttaccccaaaacttaaataatactttcagaaatcagaaacgtccgtagaaaatggataacaaaacaaatatttcattcactagaaataataatagtttttaaaaatgaatcgcaaaaacccaactgatatatatactttgtaaatattttggttgaatttggtatatttgaaaacaagtgttttaaaaacttctttctgtttttaaaagtctcagtaattaaagaattgaaatattgaaatgatcaaaaataaaaaccatattgtaaagaaataaaaggaaatagatttaatttaaaaataaaaaatgcatggtatacgttgaagtttttgcaacaaaatagagaagttatatatatttgtatctgtcaggaggtgaagtgg

SEQ ID NO: 66525 - DNA, 749 bp, Cucumis sativus
  Intron number 2 from transcript Cucsa.088560.4 (locus Cucs a.088560) derived from phytozome v7.0 (chr-ID scaffold0088 8; pos 837638 to 838386 reverse strand)
gcttctgcttttgcttcaaagttttcacgtggtatgtgattttctgacacaatggatacttaaactaagttcattgatttggagctgctgcggctataagctttgtagcctaatattttagaagtgctttgcttgtgttgaacctagatgaaaatctgattctcaattgtttttgctcacatgtatatttgtttgatcctgtttcactgttactgatttgttttttgaattcttttcaggttatactttttttagttattctatttgttaagaaacatattttgtgaaaagagacaatgtgctaaaaagagaggggacctccttaatgctagttttctgttgtcatcaactatccacagaacttataagctgctagtcgcctctactttccctcccgttttttgaccctcaagaaatcacatagaactattgagtagaagtggaatttatacatcgttccatatgtgattaaaaaaaattagttttaaatgattctcaaattagtttttttcataattattgcccatttgaacttgataatttgtgtacacactgtacaccttgttgtaaaatttatcttagctatgatatttcaatcttttatttgtcttatttaagttttgtttttctagttgttgtgaaactcatttagctcattgtttcatgctgaatgtttctgaaaaactaaactagttggtcgttcattgttgggaggacttggaaacaatttgtctggttcactgaccaca

SEQ ID NO: 66526 - DNA, 684 bp, Cucumis sativus
  Intron number 3 from transcript Cucsa.111730.1 (locus Cucs a.111730) derived from phytozome v7.0 (chr-ID scaffold0095 3; pos 443648 to 444331 reverse strand)
aggattaattgactgcaaagtgtgtaaaggtgcaggtatttacttcaaattacttcaaattacttcaaattacatcaagtattcattgtttttttaccacatctgatgaccagcctatgccctaaaagatgttgaatgttggggaaaacacaatgcatttgtgtagaagttttacttttagtccaatgaccactttttgagagagatatcaaaattgacctgtttttaaaaaaatttcaaaatggcttgatcaagctgtccatttattctatagaagaaacttccccttacccatttcaagcttcagcttaagagatggtatcatttggtttctaattttgttataaattccattattcttggcttgggtgcaagtatgattaatatttaaacttctttgcctttttctttgaaacttcttttcctttcaatttcttcattatttaattttccctcgtcgcaatttaaatctaagaccgtaagttttccattcatgtgttaaaggtatattgatctcacacatacatatatacatttttatatcttgtatgtttaaggctttagatattcacttgttacgttgaataaccaatgttttagaacaattaagtccgtttattgaatgacttttttttccattcccctgtaggattgatcttctgcaaaaagtgtgggggttctgga

SEQ ID NO: 66527 - DNA, 906 bp, Cucumis sativus
  Intron number 1 from transcript Cucsa.111880.2 (locus Cucs a.111880) derived from phytozome v7.0 (chr-ID scaffold0095 3; pos 556727 to 557632 reverse strand)
attcagaaaagctcagaacgatcaggtattccatacatagtatatacatataccattgattattgtactcactgttcatttcaattctagtattccaacccagaagagaaaaaataaaaccaccatcaggtaaaattgaaattacttttgagatgtgggtaatatatcttataatgaataaacaatgttcatgagcagagagagagggtcttaaatgctaatgtcagtctgagtattagagcttaaaagaagagagagagagagagagagaggccagatggaaggcatattattttcagagattttggttttgctttaaaaagtagtttcaatttatgaagataaaggaaactatttaaagggttaatcaaaattcaaggtatttggggttgtttaaatgagattattcagtgtttttgaaatctgggtgtttgatttttgaagaaataatttatgggttttttgcagagaggagaaatgattgaagggtaagagatagagaagaaaaaaaaaaattaagaaaggagtacagaaaaatttaaggtggactttgcttttggaagaaaggggaagaagaaaaagggttaaaggatagctctctctctttcctgacttggaatgtgatatatcaatggagagaaaaagggctttttatcactacacagccaaagtactctgtgagttatcatcatcaatatgtataggacagtaaccccacctgcactccattcaacctcctccttcttttaaagtttaactcagaagccccattttttttttttctttttctctctctcttaagagtaaaaaaaagtataatggaatccactgtgttgtaaccataggtcaaaagaggatgttgtttttgtataattagtctttgtttcagaaaggaatgaaagtggt

SEQ ID NO: 66528 - DNA, 680 bp, Cucumis sativus
  Intron number 1 from transcript Cucsa.002640.1 (locus Cucs a.002640) derived from phytozome v7.0 (chr-ID scaffold0003 3; pos 202043 to 202722)
gtatctatagcacaaaaattagttaaaaacttacgttcaaccaccatttttaaacgttcttctcgaatttctcaaattaaaagttatcacatataacacctatcaatggtaacatctatcactgatagctttcaacttgaaaatgatagtttcacgcatttattcaacatttcttcttcattttctcatgttggaagatatcactaaggtgaatatcgatcgctagtagctgcactcaattgttatcaacaataattttttatttgctatcattgtaaatgttttttctcatattgaaagttgtcgttgatagtaagtgatataagctatcagtaatatagatgttaagttgttgtcactaatagatgttatcattgataggtttcaatttaatatacttatcaggagagttgtcaaaaatagcaaatttgacaaaaattttaaattctattaataaaagaccttcataatcattgatagaagtctctcactcaacgagatagaatccaaaattttgttattttaaaaattgttaacgattaattcaaaatctaaacggatatttttccaaaaaattattataaaaagaatatttgggttttttttatataattttgaatattagcgtggaatgtaattgcacagcacagccctcaaattcccaatcccatcaccaccat

SEQ ID NO: 66529 - DNA, 864 bp, Cucumis sativus
  Intron number 1 from transcript Cucsa.167480.1 (locus Cucs a.167480) derived from phytozome v7.0 (chr-ID scaffold0115 4; pos 816454 to 817317 reverse strand)
gatatctatcgagatctttgggtatacttattttttctaaccgcattaaatatcgtcttcgtttctatattttgaaatatcaattttctaatataacaaaatgtcacaatttagaacatccatttaatttgctatatatttatttgtaagttagttaacttagttgattatatttgaaagcaggttattagttctttctcctttcaataagttttaatccatattgttagtttatggttgattttacataaataaataaactctttcttatgtataaacaatattaattttcccataaatttagaaaacacatattcatgtaagctacatttaagatttattatggaaagtagtttattaaaattaaacaaaatttaaattacgagaacaacatttgaattggttttctttttctttttctttttttatgtgttgaaaaatgaaatgatgaattatggaaggtatatactgagataaaaaaaaatgaaaaaataaaacacaaaagaagagatagattaggtttgaatgaatgaactttaatcttcattatttatttactaatcaaaattaaaagggttgtttgggtgtaattttgtgaaatggttttacggaacaaagtagattaaattagtctctatgatttgataaatgtttcactaatgaaactactttctaaaaattgacaagattaaattgaacttaactttttgtgaaaccatagagatgaatacgaggtttaaaaaatatcataagtagttttttttaagtagtcggtcattattttaaaagttgtttatttgttgatgatggtgtaaaaaaactttggcagtaagaaaattgacgtggctgagcttgtaaaagttc

SEQ ID NO: 66530 - DNA, 927 bp, Cucumis sativus
  Intron number 2 from transcript Cucsa.141880.1 (locus Cucs a.141880) derived from phytozome v7.0 (chr-ID scaffold0107 9; pos 231909 to 232835 reverse strand)
agacttggcatttttacttgggagaaccacttacggtagatttctaataattgagataacatgaagtggttcaagtgatgtactattagtttgtctatgtttctgatcgaatattttgttgttctcctgattatatttccttttttgtttacataatcaaaagattttgtgcttctgatctggtttttagattagatatgattttcttttatcatgtccacacttctcgagagatttgtatgctatgctagacttcaaaagatgagttcgatctactttgtaattactttttattttcttaaaagtgattttatttacaagtttgtttggttctgctagacttcatttttccaaatttctctaaagtgatacttagactaatttttttttggagaatatgttttgaattgattcttcaaacaatgttctttaaccaatctaaaactttcaaagttgatttcttttcgttgtccaacattgtagacgttctaaattacttaggaagtcaatatgattgatttaaaaacctaagcttggaggtggaaataacattgtaggggtggtttgagcatagtaccttctagatcacttgatctgatacatgttagattctgaattgacctaaaaccttaagctgattatggaaagtatatttaatagcatatcgtctaaaacaaggcgatgctggaactaaggtacgggacatagttcaagaatagttgcattaatgtgtatcctcatgataatcaaaatcaggtgacttctttgtttaatggtagttttcttataatcagggggtaaaatttgtaatgaatgctggtttttccctattcaactcatgtatgctgtcttctttatccttatctcacctctatgatgatcctaattctgtatttatttcctcttaattataggtattagagttga

SEQ ID NO: 66531 - DNA, 833 bp, Cucumis sativus
  Intron number 2 from transcript Cucsa.177250.2 (locus Cucs a.177250) derived from phytozome v7.0 (chr-ID scaffold0122 5; pos 1264556 to 1265388)
tatattttgggcttaagggtctctaccactcacaggtatttctctctctttaatatacttccttcaatctaaatagactagtttaatctctctactaaatagttttcgcagttggttatttgacatgaacaatgcctcttttatcatttcagcataagtttatcccgtcgaaacgttcagatagttattatcctggaaatgattctccaagaatggagaaacgatgttctaaataacataaaattatatttgaagctcttaaaaatgttaaaatgagttttgatcccttcaacagtaaatcacacaaagtactctgttcccacaacataagatggagaaacaaaaacggagtaaataaataaataaataaataagacatggatcaggttccaccataaagtaaagcaaatgtcttggtatctaggaaaaataagagccaaagctttttatgtggccaactatttggcttgttattggacacttgtatagaggagactgccttaccattcaattaaaaataagacaacatgtttgttctctttgttccttcataatacaaaaaaatattccttcagctttaaacacactttggtccacaagaatttgcttaagcctgacagctttggtccacaagaatctactttcttttcttctctctctctctctctctctctcaatgtttcttacatcacattacctgtgctatcaaagaaggaaatacgattaaacctagaaatacaaaaaagtggatagtaatactcagaaatcctaacattgttaaacgatcgtgcaatgcaggaggcttggagttggcacaaaacttgttcaacata

SEQ ID NO: 66532 - DNA, 694 bp, Cucumis sativus; identical to SEQ ID NO: 62381
  Intron number 5 from transcript Cucsa.119950.2 (locus Cucs a.119950.2) derived from phytozome v7.0 (chr-ID scaffold00 998; pos 1908636 to 1909329)

SEQ ID NO: 66533 - DNA, 877 bp, Cucumis sativus
  Intron number 1 from transcript Cucsa.189540.2 (locus Cucs a.189540) derived from phytozome v7.0 (chr-ID scaffold0130 5; pos 356629 to 357505)
caatcacttgccttttcatcttctcccccgacctggtgcgattattactatttttctttctgtcttctttttcttaattatcatttttattcacatcatcctatatcttcagattattgggttcagacttattaatttatgacttaacattctttttgtagctcgtgagagagttgattatacttttagatttcaacatgaaaaagggtgatttattttcttttaacttttgtattatgtttaaactcaaaaggttttttgagctatgctatgcaaacatgtagtcctctaaactatagcttttgaattattgctcatgcgaaaacttaattgtgtttcaaactaatgttttttattattattattattattttttaatatttagtggttgaatgtgctacacttgttttgtgaagtctagtcagatatttaataattaaaatttattctgtgcaatataatatttattaaataatttcatttattttttaaaatgttgcataagaggagtacactttaattaaaattggaacagtcaatttttatgattttcagtttcagatatggagaacatttgaatgtaaatggggtgactcatctattgcgcaacccagacagcatccatatgctcctttcacaacttttgttttttagtttaaagatggagttttcattagatgtttgatggaatagaaacgaagggatttttttttttttttcctttttctcatcttttccttataataaaataaactgaatatagtgacacatgttttattttagcttattaatattaattctatggcatgtttctctattttgttatgaaatggtgaatggtaatggacacagcaaattatggacagattctcttgga

SEQ ID NO: 66534 - DNA, 511 bp, Cucumis sativus
  Intron number 4 from transcript Cucsa.096340.1 (locus Cucs a.096340) derived from phytozome v7.0 (chr-ID scaffold0091 9; pos 2004297 to 2004807 reverse strand)
ccttggagaactggggatttgtcaagaaacaattggtaaatttttttctgttctctaccatatttcatcatggaaagattgaatgatttatctttatagaagaataagataatcactataaagaatacaagtgtttgttgatccattgaaaaaaataagtcttgaaaagattcttcatgagtgattcattttgcaatattgcataaatattttagttgttttgtcaattaaaaaaatttcttttgttttaaatatttttattaagaattcaagagtgtttcttagaaaatacatgaaaactgaatttagaaggaaaaaaaacataaattttaaaaacaaaatactaaaatcaaaatcattacaaaacaagatcttgtgtatgtcatatatttttgctctaatttatataaataacaaaaccatatatgatttaacttggtatttaccataatatatatatttgggttgtttttgtttaaaggttggtgggtttgacttcatttggggaagg

SEQ ID NO: 66535 - DNA, 764 bp, Cucumis sativus
  Intron number 1 from transcript Cucsa.160610.1 (locus Cucs a.160610) derived from phytozome v7.0 (chr-ID scaffold0114 4; pos 761204 to 761967)
tttccgatacctcttctccttttttcattctccaggtaatggtttataggatttcaacctcatttctacccgatattttttttttctttataatttcttaccctgcttgcttgttttttcagcttatctctgtttgtgtttgttgaatcatcgataatgtaacttgtatgtttgatttcagcctctgttagctgcatatattttatttagaagatttggtggcggaaatggggattttgcactgaaaatgtagcgaaggattagggaatttgaaatattagggtttctttcgttgtttttttaggtttagattttaatttaatggatggatcatatggatgatgtcaggatttggaataaaatatttgggggaagttatataacttttgatcgcgggactttattattattattattattatcatcatctttccttatgttcactgtttcaaaaagctactaatactgttacaatattttttattgtcagtttgagtttgttgctttcagttatttcttttaagtttagccttttatcattaatataatccaaagtaagtagatgtatatgtaatcttcctaactttctcatggcatctgtctaagaaatattgtcgatttcatggcgaatgtcttattggggaaagctgaatcatctttgtgaaatgtgttagtagattgttttccctacttgctggctttaatagaattacctcttggttatgacaggtgcttgacattctactgtatattgctgagctctg

SEQ ID NO: 66536 - DNA, 838 bp, Cucumis sativus
  Intron number 1 from transcript Cucsa.099290.1 (locus Cucs a.099290) derived from phytozome v7.0 (chr-ID scaffold0092 6; pos 137699 to 138536 reverse strand)
gttgtgattctagttcgttttcgtcggcagcgccggtagctgaaaatgaccggccggtgatgatttgtgggttttgatatatgattttttgtgaaggaatttgaactttttactaatcataattattaacttatttaatcaaactcattaaacttcagtgatttatatacacgtttttgtttagtatcacaatgtacctccggcctctagcaacaaacatattaacattattgaatcatactcacttgtgcgatatatatttatacattctttaaattacatacatttataatttaaactacataaaacaattagattgaatatcatattatatgcatttggagataattgagaggaattttgaagtattttttgttagttcaataatttgggaggtgcatatatcaaattcattcatatttgaactggtaagtgatcatgtatttacatttatccattaagtcattgttgagattgacaaactttttaaaagagttctattgctttgcttgaaaagtttgagtgttagtgttgattgttaaaacattgagataaatgggctctctttttttaacaagaaaccaatagataagaatattattaattaggtgtgtggatgaacattttaactactttaacgtattctactaagtataagaattgctgttttggtgttacacaagaattctatcacccttaccaaagacatttactttgcaattattgttatggtcacataggaactgtcttttcaaagattattgctcggcttatatttctatccatcttcatgcttaattttgtaatcaaggttgatttgagtctattgtgtatttga

SEQ ID NO: 66537 - DNA, 333 bp, Cucumis sativus
  Intron number 1 from transcript Cucsa.090380.2 (locus Cucs a.090380) derived from phytozome v7.0 (chr-ID scaffold0089 4; pos 1700715 to 1701047)
aactcttgggatttctcatttcaacttcaaaagtgatttcattttctctctaactcatatcttcatctctgattatgggtttgttttattagaagaatattcattgtggggttgtgggttttcatattctctttatgtttgactgaactttcctgagaaatttatgggtttgtctattgggttgtagttaaatatgggttttgaagctctgttgaaaattttgagtgaattctttcttttaatcatttatttctttattcacttatagaaaattttatttcctttgtccatactttttatttaatgcacgcaactaccctcttccacatgcag

SEQ ID NO: 66538 - DNA, 478 bp, Cucumis sativus
  Intron number 2 from transcript Cucsa.097320.1 (locus Cucs a.097320) derived from phytozome v7.0 (chr-ID scaffold0091 9; pos 2614880 to 2615357 reverse strand)
ccaatcctgaagtgcgttaatctcttctttacttttatgctcaggatttcttctaattttagtgctgtagttcaaattcgatggagtctccactgtttttggaatagtacaatgaagatgcatttctgatatataattgttctttgattctttttacctttctaaagcaatgtgattcattgaagaaaaagcacccttttagtgcttctagagtgatttaaaatattataagtgtttatagtaactttcaaagttattttctgtgtcaatttgtttttttttttaagaaaaaagttcttcaaatggctcaaaagtactttttcagagttttaaaggtaccaattcgtgcataactctgttgataatgatatcaattaccatctctaaagttgttgaactcaaaagtaatttacaatttttgaagaactttgtttctttgacagggatattggttcagcttcctttgccgaaccacata

SEQ ID NO: 66539 - DNA, 749 bp, Cucumis sativus
  Intron number 1 from transcript Cucsa.026920.1 (locus Cucs a.026920) derived from phytozome v7.0 (chr-ID scaffold0037 0; pos 68200 to 68948)
tctgtcacttccatcagtagaggtattgattttaagtcttttcatcttcggccttgataccccgtgcttcgttttcaatggacatcttcaacatttctgattttgtaacttgggttgtgttgtgtttttctttgggtatacgtacatactattaggaatccatgaatgttttatttttatattgaagtttttgggtaatgataaattattcttcctttgttgctctgtttttcaatcattgactgagaaaaaggttactgatttactcgaaaacgaaaaaaggaaagttatacaatataagttaataattatttccctattttcgttactaaacttcattttatattttattatattaaataatattactaaaggttgataactcctaaggggccgtttgataactacctcattaaacttaaaagatccaagtttgagatttgccgatgatctgttaagttttcttaacttctaacctcaccccctccccatgagaccaccaccaagccatgttggttataacattctccaatatatttgaagtaactttcaaagataacatttttaaatgataactcaaattaacacttgtttgttgaaattaggagatcacttttcaacttccaaaactctcatctagtacaaataacttaagtttagaagataatgaagtgtgatagtatcatctcatgtgtgatcaaatgcaatttgcagctcatttgggtcaaacctgactacaagtagcagtt

SEQ ID NO: 66540 - DNA, 619 bp, Cucumis sativus
  Intron number 2 from transcript Cucsa.078810.1 (locus Cucs a.078810) derived from phytozome v7.0 (chr-ID scaffold0079 3; pos 1259924 to 1260542 reverse strand)
ggtcagaaggatattcttggatccaaatttcccaggtactttactttttcttaacttgttatcttctaattctgttcatgattttgttccattaatgtcggactaagaatgatttactcaaatctgaactctgttcatggttcgtctgtgctcggatttggctctgtttcataatcatttgaattttgaagtttaaagaatatgtctattttctctcatttaaggaaatggtttgcgtcattgttaagggttggattctaaaacattgataaaaaggtttttgttttcggcaattgtgctggtttctctccatttctttaaaattggtttcaatctttagaaacgtttttcaaatttcataacaaagcttttagaaaccatattatatatcaaacagaatcataaggatgttttaaagtgaacagttctgggttttggttgatttatatttctatatctttgatacagagcataggctacttcaaatatgattggaatggaaaaaaaattgtgtatgtatatttggggtttagctagtgatttcgaactttggttgcattccgaacagttttgagctgaaacattttgttgtatttgggtaatgcagaagctattttag

SEQ ID NO: 66541 - DNA, 739 bp, Cucumis sativus
  Intron number 1 from transcript Cucsa.058960.1 (locus Cucs a.058960) derived from phytozome v7.0 (chr-ID scaffold0061 4; pos 1075606 to 1076344)
cgaggatctcaagcgttttggagccaattccacgggtattttttttcttcttgaaaccttggtacttcagatccattttgtttcaacttctttttatttttaagttggctagatgaagtgggtaattcagaaatttgagcttgagtggtggtagttgttgtgtgtttattatttttgaactattgtgtccatgaatcttctgaaggatgtcaggattttttcctcgtcttgttatcgggatggaacaattgtcaaggattaagtagataactatttggttggggattatggcagttgtctcggatggttctcaattctctatctatgaatttcgtgtccatttctttaagggaagcgttcttggtttcgaggaggaatggctgttgttttatgacgtaaatgtttagataatcaatggagtttatttgtgttattgcagcagctgcatttcaaattgttgttttctttttcttttttgaaacttcaccagaataatgggagataactatagaggtggtttatttgattctttaatagaactcttgattctgtagagagaactcttgacgaatatttttagacgttttatcagtccttttatttggttggcttcttgcatttacttcatttacttcatttatttgtttatttatatcttattagatctgaaaaatattttaatctctaattctataataaagatgcaagcattgtgatttaatattcaatgttgcagaag

SEQ ID NO: 66542 - DNA, 714 bp, Cucumis sativus
  Intron number 1 from transcript Cucsa.091210.1 (locus Cucs a.091210) derived from phytozome v7.0 (chr-ID scaffold0089 4; pos 2231200 to 2231913 reverse strand)
ctctgagcttctccgttccacagctcactctcaaggtaaattatgcttcccaacgcctttcctcttatcgcatttgtaattgctgcggaacctgctagaatatctacgcgattattgcataatgttcaacgtaatcgccatttgagatagcttgtttaggtttgctatatttcacctccctgaattttcttctacctttaagaagacgattgcgttctttttttttttttttttttggtatatatgctttccggtgaaacgtttgggcttaaggaactattctgaaacttgttatttggttggacaattttctacggatgcttgggaaatgttcgttgattattttagccgaaatggattaagacgctgaatactgaatagttcgttattctgaagagaatatcgtcagaaaattaagtttatgagattatataaggataattgaggatgttattctaattttgttgtaaggatggattagcgagcaaatttgttatggttcatacgtagtgccattcataactgtaaatttctatgcagcatcatcaaaaaggttagttcagatgctaaaatcattgcctgaagctcaatcgttaatcctggttaaagatatatgagttgtttatttctctagattttaaggttttgattgcacactgaattgttttcgatgcgtcaggaaatcccaccacgaaaactggctaaagctacggt

SEQ ID NO: 66543 - DNA, 972 bp, Cucumis sativus
  Intron number 1 from transcript Cucsa.051070.1 (locus Cucs a.051070) derived from phytozome v7.0 (chr-ID scaffold0055 7; pos 262056 to 263027 reverse strand)
tccgcctcccctcccacatttttcttcactgacgggtataatcactttcctctctcgttcatctctctagatttttatttttattttattgttatttctattaccccatagtgtttcagattccaccttcaaaacatattcagaattcctcttcttttttttatccaagatttacttagtactttgcatcatggtctaactggcacatgaattgtcatttctttttcagtttctcacttgtattcttgtttggataaaccattgggatcaaatgggagcctctacctttttatcgtctcctcatctttcaagtttgccaacttttaagagaaacattggccttctctagccattattttacctagttgaaaatcctttcttttgtggggtttttctgagcttgttttttttatgcccttatattctttggttatttctcaatgagagtagttgtttctatgtttaaaaaaaaaaaattgcccacttttagttcatgaattatcttccgaacttttattttgcatcttctcttacttaaatttatgaatggactgctaatgtactacgatttttggataatcactttcctgagtacacagtgtgacactgttatgtcttacatccattggtgatttgttggttatttttataaaaaaaaacacgtggatatgcttcatttcttattattgtcgatttacttttttttttaatattttaatgctttatgagttggaacttgagttttgctgaggcgagattagtgactgttttgaatcttgcttgcaaaacctttgattcagttgtgaaccatttccattgaactgttatctttggagtcttgcattacactcctgctgtttaaaattcaaaaggaattttactctccattttgttatgaatcagaggaaagaatatgtaatagactggttctcgatgcttaggtcaacttaatttgctgtaggttgaagttgc

SEQ ID NO: 66544 - DNA, 891 bp, Cucumis sativus
  Intron number 1 from transcript Cucsa.031660.1 (locus Cucs a.031660) derived from phytozome v7.0 (chr-ID scaffold0042 9; pos 788232 to 789122)
tggtttaaatattgactttcccatgtaagatttacaaagaaaattttctctccctttttggaaatcttaacctttagagtgagaaaaacaaacacctcaaaaaggatgaggaccacacttccttgtaatgacttgacaccacaaatcctttggctcttgaaagaagcaccgtaactacttggtcaataaacttcttctagttaacttgagcagtggaatgaaagcacattagtggcctttatgtgttctcatatgtttttcatagttattatgattgtggaacaaaccgttatttatatttccatgcttttattttggggtggtttaaatggtaacaatatcgaaatttgttatttcttcaatctattttcaatacaattagaatgtgaagcccgatgatcaggtctatgagatacgaaataaagccttctttttaggtatggtggatagacactaatttcttttagctaattgttttggatggatagatgcaatctttaactgtgcccagctgcctgatttgcactcagaatacttttcatgacaacttataatttatttattatcttagctaacaacttgttttttaggttttccttatatggccaggaattgggtgctgaaggtgccgtcctttggtttatttcataaggatgcctctagatggtaaattactgattgttgaagaggtttaacttggagagttcacctgttttctgattgaaataaaatccttagttggagccgttgtctttgttcttctatttttactatatcaattgagtccataagccttgtcaactgacttatcaattctttgctaaaaatagttattgttaaaactttttgatctcattggttccaaaacatttcagttgtgaataagttggc

SEQ ID NO: 66545 - DNA, 837 bp, Cucumis sativus
  Intron number 1 from transcript Cucsa.108700.1 (locus Cucs a.108700) derived from phytozome v7.0 (chr-ID scaffold0093 1; pos 949684 to 950520)
gtccactcctcccaagaaatcgaagaaacccaaatgtcatatatttactctccttttccctgtttttgcttgttctgttcgtgtcaattgttataactgttcttaaggatcattctgtttcgcattttggattttttttgtatacgatctcttcatctctatggataaatctcctgaaagcgtgcctctggacctatgttcttatacttcttcgttgtttctgtattttttttttcttttgtgaagtttatgagaagcattcccgtggagcaaattttggtttgtgcttctgggtctaaaatatttctgcatctttgcattatattctttttaaatgcgttcattcttgcatttttatgcttcattctcatcttatggagttctgtatttttctttaagttttttttaccatattgattgttattggttggttggtttccgtatacaatcccttcctctctttggtttaatcttctggaagttcacttcttaacctgtgttctcgtatttgttcgtgcttcttttggcattgtttgtttaattcatgtgaagaacacccatgtaagaatctttttgtttgtggttctgggtccatttgaattcatatttgtgcatctttacattataataattttaaatgctagccattcggatgcttcattcttatgacatggcgttctgtatttctgtttgagggggtgttctgtaattctattatgtctcatcaaagtaaggtcaattcttttggcaacgtgataggcactttgttgttgctgatactttatttttaatttgattgcagattctagatttacacagcaagagcttcctgcttgc

SEQ ID NO: 66546 - DNA, 703 bp, Cucumis sativus
  Intron number 3 from transcript Cucsa.056280.1 (locus Cucs a.056280) derived from phytozome v7.0 (chr-ID scaffold0060 2; pos 436822 to 437524)
aagcccgtggctcggacctcagagtccactttaaggtaggttttattccacttcgttgctctgttgtcgtttggattaacaatcacctagggtatttttatgctccaattttggttatggatcctaatttttttttctggagcataattgtctgtttcctttgatgtgctcctttgtgttattgaatgtctaccaaatgtataaatatactcgatccaataccatattctctctttgactcaagtaatcgtttggtctaagtgaaaatataatagtgtttgttcttgacgccatcttaagacattcctttctcgtaacaatcggtttccgtataggagcttcttatttttccaggcttgagagagctaatgttggtattattcttgtgatgacttattctgatgagattagtataagtttcttaggtgaagaaataacttatcttagacttgtgtaacctgatgataaaagcagggctctgttgcctttagtgaacagggctctcgtaaacttcagggaaattatatgcattgttattgggtgaacctctgtaaacaataatttctgaaggttcagtaaatgatgctacattacatatctaagcttgtactttgatttgcatattttagcaccgaatttccgttgctcggactcatcacaatttttccatttcacatattatagaacacaagggagactgcac

SEQ ID NO: 66547 - DNA, 1014 bp, Cucumis sativus
  Intron number 1 from transcript Cucsa.166850.1 (locus Cucs a.166850) derived from phytozome v7.0 (chr-ID scaffold0115 4; pos 236771 to 237784)
actacgaaggtctgattctaaaagcttaagttgacatgctataattagtacattaattgtttcatgctaaaactaagtacttattgaaaattttacggtaattgagaaatattttggtatttcttttagtgagtttaaaatcacacctttaagtggttaaaatctctttttttttttcattttcggaatcaatttaaatttgttttagttttaatcctcgaaaatcaattttaataatatatatatatagtactttgtgtttttaagagtgtagaaatttgttttagctttaatccttcacttagaatttgttttagagttttaatccttcacaattttacagtaatgaaaggcaaaattgtttgttaaaaaggttcatttgtatttaaacatttttgcaaaatttgtctaaaatacacattaaaaaaatgttttaaaggttgtacctttcaaatttttctaaaatgattcgatttcattattaaacccttaaaaattcaagcttaagcatactctagaaaacctacataagagtaggcaaaaatagaaaaacaaattatgataatagaatccatgtcacttatatttttaaatttgtaaaaataacaaatttgcaagtagattactgatgattaccataatatttaccaaatttggaatatgaaaaaaatgtgttataagctgttttttttaaaaaaaaattttgtaatcaattccaatttcccaaaattatatcatattaatttattatttcaatgtaacatgagtgatttttaaattagagtcgtaaaaattgatttttgaccaattaaattcttaattcttcctagcatgtgcactagcacaaagcttaacaagtgactaccaatagtaatcaaatatggaaaacctcactccctcactccaagtaccatatgaaattatatcattaaacctaaagctttaagttgattagttacaatatatatttttaaaccaggtctctcttatatatcgtcacaagctccattcatt

SEQ ID NO: 66548 - DNA, 864 bp, Cucumis sativus
  Intron number 1 from transcript Cucsa.148050.1 (locus Cucs a.148050) derived from phytozome v7.0 (chr-ID scaffold0110 7; pos 305842 to 306705)
ccttggtgcccttcaaaaggtaaattatttaatcaaagattttacctggaaattatgtttagagttctaattagttgtagactatttttttatatatataaaaaaaaaaaagtcctttttataattgtattgggattagcttattctagcaacttttttcttttttcgaaataaaattctatttcacacatgctttttttttagtaatttttacgtaacatttcattttttaaaagaaatctttatatttattttttataaaaagaattttatttctatttatgatcaaaataaagctagaaaagaaaacacgattttagattttattcttgttaaaaaaaaagggcaattttataaaattgttttattaagaaagagtaacttaggggggggggggggggatgtttgttgacatttttccattcttttagacacataaattaattagtaattattcaattttttttttcatttatcctttaaagaaactggtttagaattatgtaaggaaaaaagaaatattaatgaaaaattggagctataattaggagaatatttatttgtgttttgaataataataaaagaagtagagtgttgttgtatgtaaacaacgagtttaaggggaagaaattattgtttagggggtgggggttggaatgagaataaaagagtagagtaagggtaagcctacccatgtgactatagtccctgaatattacaatatatatttgctatttggaaatcagtagatgacatgatacagtatgatttgaaaagtgtgtttggacacaaagatataattgttctttgtctggattgataattccaggttacgggcacaaagaagaacagtagcaacgatag

SEQ ID NO: 66549 - DNA, 1056 bp, Cucumis sativus
  Intron number 1 from transcript Cucsa.109350.1 (locus Cucs a.109350) derived from phytozome v7.0 (chr-ID scaffold0093 4; pos 287192 to 288247 reverse strand)
aagtttgagatcattgataagccggatttcagtatgttgggttttttttttttttagttgtgattggttattgtttatgttagagggttcttttatgatttatttgtgatttgggtgttcagaaaacttgctaaagggaaatgggcttgtggtgttaatgggtttgtgttgtgtattgtcgttgtaatggaagtgtttgatgaattgccaaggtcaaattttttagcagatgataaaacttagagagaagattgttgattaggaggtgaaaacattgggagttttcaatagccaagtgaaaagtgtctttgaatgtgtgttatattatttgtctctgcttgccaatgttgatggaaatatggatattcttgtaaaaattataaaaacaataagttaaaaatagtaaataactattctacactttttcaaacaaattaaaatgtttattatttatattatattcccattagtgtttcatggttttattgtatgatattatataatgaaagtgttcacccctcgtgtaaacaacgaatctatgtaagtgaaggagtaccaatcaaaatctaataccattaatagacaccattgaaaatcagagaaaaaggatggcacttgatttatttttttttttaattttttaatttcttgttttcaattcttctagctctaggcattgattctctttttagaaggtattcattagagaaaaaggagaaacaagaaaagaggtaagacatattttctcacacaatataaaaagcctccccagttggcaaagttgagattacatggcataagtttttgcccgggaatttcatatcaagacattcgttgttaatgtacaacaaaatcgggcattttcttttacaccaatgagtatgggtgtctcgtctgctacattttcatttgatatagtttttcacttttgatggtgcacaactggttggaagctcatttccggtgctctttgtacctaataacaaaggtctaattttggggctgttttctgcatcaacaggtcctgtgactgtggctgatcaagcagcagaggag

SEQ ID NO: 66550 - DNA, 439 bp, Cucumis sativus
  Intron number 2 from transcript Cucsa.169570.1 (locus Cucs a.169570) derived from phytozome v7.0 (chr-ID scaffold0116 3; pos 309258 to 309696)
ggtcctctattggctgggtttcccaagtagttaggtgactttgttttcccgatattattttccaagtagttgaagattattatctagagtacactaccatgtgatacagtatacttcacaagtacatgtctcctaattgagcccattcatagatgtctcacctgccaccactcatttcttagatcaagctagtggccacgtctgctttttaatctatatatacatgcttattcaatttccaagctactcaaatctcaaacttccaattcaccaccaaatattttcctctgtttctctcaagcgatattgtgcaacttctagattctaaaattcaagactccaacttcttcttgagagggaaaaaaaaccatgggtttccgtttgggaagaatggtaaatgtcatgcaaaatattagactttcttccctaacaacacatc

SEQ ID NO: 66551 - DNA, 589 bp, Cucumis sativus; identical to SEQ ID NO: 62780
  Intron number 1 from transcript Cucsa.078400.5 (locus Cucs a.078400) derived from phytozome v7.0 (chr-ID scaffold0079 3; pos 755887 to 756475)

SEQ ID NO: 66552 - DNA, 807 bp, Cucumis sativus
  Intron number 3 from transcript Cucsa.122420.2 (locus Cucs a.122420) derived from phytozome v7.0 (chr-ID scaffold0099 9; pos 650018 to 650824 reverse strand)
acttacagggtatccgcattccatctctggaggtgattcactttcttttccctagtaagagtctttagatctagttttaatatcaggttttttctgtatctataacgcctttggtatagtttcatgttaatctttttatttattattcaaggttcttgcaatggtctcattggatttttgttttcttttgaataatacatatagaaaatggaaatggaaatgaaattagttcttcgtatcatggagaactaattccatttccagagctctaatttgtttgccttttgtcctccatcccttttaatttttgcattttgaatgtcttttttggttcgtttgatgtgggctgcatcttttcaacttgtctgtgtatttatttcaagattcctgtttctttgatttctcatggaatgttaccttgagcaatgatcaaaacttgtgttggtggaataaggagttttctctcttctacagttgagctttgaaatttcaatgttttgtacctatagcttgctggcaacttccatttcgtttctcattataatatctgctgtgataaaattttattgagtgaacaattctcccaattagttactttattgtagatgttcacgcatggtagttatattatttgtgtttgaagaaggctcgagattattgttgtgtcttcgtactgttttttaatccttttacacgaaattttattttggttatttttgcaacttcattttcttatttgaatccgttgatttgaaaatgaaaactcgtggaattggaccaattggttttaaatggctaatggcaggt

SEQ ID NO: 66553 - DNA, 790 bp, Cucumis sativus
  Intron number 1 from transcript Cucsa.143700.1 (locus Cucs a.143700) derived from phytozome v7.0 (chr-ID scaffold0108 0; pos 27195 to 27984)
aatcaatctgcttggtattcacctaactttttcttccattgttgagaatagatggactattgatgtgtttttctttttatattgtaaagctattcttctttctttgtgtttcttcatctgggttcattttttatcatgttttttcccatttctttttgttcccctgtattttctttgtatttagcaacgtatcctcttctgctctctctgtagattcttactgcttctggggctgtttatgatctggggttgtttcttgtcttcaaattttagttttcactatgtgggtgtccgtttgattatgaaaacgtgttattctgatgttcccacacattttcttgatcatgtatgagttaccattagtatgcattctgctctttaccaaatgagtataatgtgatctagctttctctattaatgtcggtgagatcctctatatcttgaatgtgtcataccttttcaatttgatcaagatgataatgtttttgcatttggaatgaagttatatatagaaacttatggaaaaagggttaaataaatattaatctttcctcgatggaatgtaagaaacactttttaatctatctgctcacttctttattttgagacttggttttttgggttgaataatatatggggtgaggtatttgaacagttgatcttttggtcaagggtacatatattatgctagttgaacttggctttctttttaggcttcatcatatgcattgtaatcaatttgtttgatatgacagaaagaagttcggagttgatttttcttggattggat

SEQ ID NO: 66554 - DNA, 953 bp, Cucumis sativus
  Intron number 2 from transcript Cucsa.143700.1 (locus Cucs a.143700) derived from phytozome v7.0 (chr-ID scaffold0108 0; pos 28470 to 29422)
gtcaatctgtagattatcttctgattcaggttcatccattaactttgaacaatgtcatgtcattagtgtactgttgtattttctcctcactattgagaaatatcattgattcatcccaagcaagtttcacctaaatttttcactttattcatggtattgttctctaattacggggattcaactactgactcatgtacgtgctcataggcctgatttccatcacagaacagtggacggatataaaatgataactgaaaataaaaatttagtgaaccactaaaatcatcatttatacctaagttcctgagagaaatatatagactgaacactttatgggacaaaggaattaagtgaatttattgataacttcgatgcaaaaaagaactgagaaacgatcaaggttttatcaaaagattgtaaaagggatagtggaagatagctgtagataaattccagtgcttcaaatgggtgaaagaagctataattttattaaaaaggtgtcttagttgataattttatcatacattttttctccaacttgataacttcaagactatgggtaggatttggatataatgagattttgagccatataaggttaatgttgtttagtaattgtaatctggcaggatatgttttctttgaacagagctaaaacatgtccctagatatgaattttaacaagctaagtataaacagaactaagcttgcaacttttctatatttctatacttcaggataagcttataaacgcaggtaatccgtgcaagtgaacatatgtttcataaaaacaaattatgctgtcttcatactgatgttgaaataagcaagtcaaagttcaatggcaaagaatttgagaatagcttaggttcttggcccatgcacattttatgttgtatatattctaactatgacatgtttgtactgttagttatttggtgctccacggattt

SEQ ID NO: 66555 - DNA, 765 bp, Cucumis sativus
  Intron number 1 from transcript Cucsa.065630.6 (locus Cucs a.065630) derived from phytozome v7.0 (chr-ID scaffold0069 6; pos 313642 to 314406)
cagagcaatttgctgtgagctaccactagcttttggtaagatcaaaaagcctggcaaaaaaatttgttgagaatgcttggtttttatgcttattttcatatcttgaaatttcctgatttgtttgagtgaggaaaaattttcttttaatccccttttctgtgatgagtttgaatttaggatcatctgggttttgagttttctttttgtttctttttttctctgttcttgttttttttttttttgtttctcatatgatcgttagctgcagacacacgacaaccatatctgatctactgggtttcagtacaaaattttcatgatatgctttactgtttctcaaataaacaaaccaaaagtttggcccagggagagggagagagcgttgaagattatgccacttttacatattgccatgatttgttggggccaacagagcactgtgaaagaaagtaatgaagtgaagaaagtagagaaaagagattcgagtgaaagcattttcatataccttttcttttggtttacgtatatttttcttttctgaatatcttacgaaagtggctttggttggtagaagtgggggtggtttctcaggagtttctttgaagggagtgtttgttatttggttgtttcattttttctgttgattttgattaagctaccatctaaatttttgtattcagcttttcttttctatgtttgatttttaatgaaataattctctgaactgaagcagttcttgtgggtcagagagctttgaaggtgaac

SEQ ID NO: 66556 - DNA, 712 bp, Cucumis sativus
  Intron number 3 from transcript Cucsa.122980.1 (locus Cucs a.122980) derived from phytozome v7.0 (chr-ID scaffold0100 0; pos 268718 to 269429 reverse strand)
tgggagctctcaagaggtggggttcttgtccttaattgggtttttttccctctaattttgagtggtatatgaatctctctacctgttacttgatttggaatgtttcacaattttgattacttaaatgataggaagtgaaaggaaagaagaaaaaaaaggtttaaaataaagtatgtgaactaggcagtgttctaggacaaaacagaggtttacatatagaaaagttgatctcaaagtagataaaactaaaggaatattatagtgattcatatataactacaagtataataaatatcaattcagtaaatttctatagcattatttgtatttgtttgatgatccaagcgatacctttatgctctttctctaattcctttccagataagtccgcacaactttatatgctctttcaattgtctatgtcattttatttccatttgttgatacttttggtttcatttcgtatcttgtactttgagcaattgactcatttcactatttcaatgaaaaatcgtgttccatcgtgtaaaaacaaagttacacacaggctcaagaatatctgtctctgcctctttcttgtccatgtgatgctgaaaacgatggtgtcttggtaattagaagtggatgtgtagaaagagcaatttagataaatatgttgatactatgttcctggcgatcaaaatgtaatgactaatttgctttgtgcagatat

SEQ ID NO: 66557 - DNA, 597 bp, Cucumis sativus
  Intron number 2 from transcript Cucsa.134710.1 (locus Cucs a.134710) derived from phytozome v7.0 (chr-ID scaffold0104 3; pos 290917 to 291513)
ccgctggatcgtgtccgagaaggacgattatcaaggttcgttttcattttggtcttgtcaaatttaattgttcctttgtaatctttttgctaaatctcaatagtaatatcgaattgctgcttgctgaatgtgtacatggcctgatctgtgtgtcaatagagaatggaggagactgagtgatgtgtcagttattcaaattaccaaatggatattttgcaaatgcctttttattttgtttggtcttttcatttctatagatatatttctcttgtttgagtcattgttttttatcaatgaaatgatgagaagagaatgtcgattttggatttattaacgttcgatacaggtttttgtgtttgataattctatcttactgaacggttgtaactgtcgaggcatttacatgattgactttgtatgagatagttgggtggcagttgcatcgttagcgctatatttagctttaaatcaatattgatggtatggaactaggattagaagagattatataaatacgttgtcatgctcggtgggttggttagagagagttgcttaggttactcatttttctgttgtgttccataggtgtctggaagc

SEQ ID NO: 66558 - DNA, 542 bp, Cucumis sativus
  Intron number 1 from transcript Cucsa.095170.2 (locus Cucs a.095170) derived from phytozome v7.0 (chr-ID scaffold0091 9; pos 1110178 to 1110719 reverse strand)
ctttactttgtggtattgaactcattcattcgggtgtaagtatctgcgtttctgcttccagttcttttcctttcttatactttttcgctgtaattgatgaaggaagtgtataggttaaattatgtgtttagaaaatattttttgagcctttgattatgcgtatttttttgttgttgctaattttaagttcgtgttaaacttggttaatggaggaatttctttttaaggtaatttcattgattgaataaaaaatccaaggatatacaaaagggcccttcaagatctttctagtttataatgagaaaagagaaactatggctgaaaatagcagactctaaaaattccttagatgatttgcctttatcttggagcatttctttctaggttaacggatgattttttacataaaatccaaaatttagaagcatactagaaggtttctaaaaatgtgaatgacacagtacttaaatgtttgtacaccgttctggaacatttcagggacgaaacttagtaatttaacgtgatatatctattcaggtaac

SEQ ID NO: 66559 - DNA, 896 bp, Cucumis sativus
  Intron number 2 from transcript Cucsa.018370.1 (locus Cucs a.018370) derived from phytozome v7.0 (chr-ID scaffold0025 2; pos 785248 to 786143 reverse strand)
ctcttgccgattgctgcgataggtaacacccggcttgctaggatttagttcttggtaactctagttgcggtctctgttaattcacttagtgggtgagttatatgcttaatctgcatttggagctgtacatgaaatgaatttccgagatgatccgtcttttaatcgtataatttatgggcttgtcaaatatacgggtttggacacaggttgtttaccagatccttgactcggttctattggcattgtcactgtttcatggaacatacagccgagggggtatgaaatgatgagtactattatccaaattagaaacatggccaattttttgtgtaggaaaaatttaagcttcaggaaagcttatctagttattaaaccagttattcagtataccaatttatgttacaaggatatgtagtatgtcagtctattagcacttttgcatttactagaaggttttgatgtgtgaagtatttgaaaaagaagtccaaaattttatttggatcaccaggtgttggggcttgcatatttggacataattttaagttagaacttggaagaaagaagaagaacaattcttacaaaaggctttgattggattaaaacaggatctggtatgatgaagtttaagatggatcgatgatggctgtagttttcttatcactctgtgccatttggtgttgcttctgaattatttcatgacttctttgtttgcttagttctcttcatagaagggaaaaacaatgtttcagcactcctttctcccatcatttccctattttttcaataaatgtatcttgtcacttgaaatgaatagaacaaaattagctcatgatgcatttttttatattgaatttattacagaattgcaaaggctttaaatagttctagtgctagca

SEQ ID NO: 66560 - DNA, 543 bp, Cucumis sativus
  Intron number 2 from transcript Cucsa.135940.1 (locus Cucs a.135940) derived from phytozome v7.0 (chr-ID scaffold0104 4; pos 704809 to 705351 reverse strand)
gcagatcgacgttttttgatccttccgtcgcttttgtaagatactgaagttttcttttaaagtttttttttttttttttgttttttaaaggggttctccttttcgtgttagagaaattctagaatcgttgagattgtcaagtgtttttaacgaacaaggagatcattctaaactactttttagcgagagtgtataaagctcagtctgttttttctcattaaaattccaagttcaagactggtttttcgatcggcccagtcggggatatactctgtactagaaaattaagtgggacgagattaagtgaagaatctgattctattctctgaccaacagtttaaatgtattttcgtttgtttagatgatttaattttcaaagtcgtgttgcacagtggagaactacatgattttgatatccgaaataagcgtttagggatgttcccattactggaaagttcatgatttcaaagattgctaatttgctatcaattgtttgtgtaaatttattgtgggttctgtttacatgcagatcgggtcgcattt

SEQ ID NO: 66561 - DNA, 535 bp, Cucumis sativus
  Intron number 1 from transcript Cucsa.044180.1 (locus Cucs a.044180) derived from phytozome v7.0 (chr-ID scaffold0054 2; pos 658089 to 658623 reverse strand)
acccagcttgggatttcctctggtcaagtggtgagttgctctaatttgcattgttgatgtagtgattcagttgggtttcttctcattttgtttggtgtttttgattgtcatattctgattcaatatgtatgttggttgattgttgcagaatggattaatgttttttttcttttttttttgagtagatactgaatagagggtaggaattgaaatcaacattctcctggattttgtggccaaattcaaagattgttctatgctaatttttgggtttaaatagtggtggatgagcttgagctactgggaccatttaagatgttattagagcaggtgggcaatagatggtgttagatgatataatattaatttttttttacatatcagctttaagttttttttatcaataagttatgtgagaaatagtaattcagttttctttaatggtatgctctttgattctgttgtggctatgagatttcttgctggaaattgcaagtttgaacttgtgttgaacaggttgcaactctggctccta

SEQ ID NO: 66562 - DNA, 814 bp, Cucumis sativus
  Intron number 1 from transcript Cucsa.077060.1 (locus Cucs a.077060) derived from phytozome v7.0 (chr-ID scaffold0079 1; pos 162169 to 162982)
attgaacccagacatcgattgtcttcttcttttaagtgagtatctcttcacccttcttctgcttaacctgctttcatttttattttttatgtcaatcatcattcaatttgatttcgctcacatgtgtattgttttgactttgaacttcgatcttcatcttctacataagctccacttcctttagtgtttctcccttgcattttggtagctttccgtcaacgggtccctcaacagtgtcggcgaatgaaacttacagttcaagatttgcattgtaattgtggagattcgagtggttagaacttatggagtttgagttgtcatttagctaaacaaggaaattgaaatcgaagttttagcgtaatgttaaattgcgaactaaatttagaaggcaatttatatatatgtgaagttagggatctgacaagtgaagctttctattagctgggattgtttcttaataacgtttttccttaattagttttcagttttgttcttttcatggatttagctcttagctccctccctttctagctccatattaagcaacttagatgactaatcaataattaattttaagtgatctttcaatttctatacttacctataacctattgaaattgctatcctgaacaataagttcatctcttcttctgggaaacttcaactaattgtgaaactacttttaccataccttaactttacctatttctttgttcttttactatctgaatggatgtactgaaatttgctaacgttgtcttgaatgtctggtggagcagtgaagaaacaagtaagagaaggttccaaagaatta

SEQ ID NO: 66563 - DNA, 772 bp, Cucumis sativus
  Intron number 1 from transcript Cucsa.045070.1 (locus Cucs a.045070) derived from phytozome v7.0 (chr-ID scaffold0054 2; pos 1162358 to 1163129 reverse strand)
ggtaaatcaaaagacttttcattttcttgcgtgtttggatttaaacttattcgacccatatgagttgtttccggcgattggttttcctgtgtctgaattgggttttggctcttgattcttgaatgtggattagtactggaaattgtttgtttgagaatagttgaggaattgggttcaattttgaaatgcggttgatttgttttgtttttatttgattctgatagtggtttgaaattgcgtaataagttaaagagtgccagtgttagtcatctcctgttgctcattcggtgatgtggtatttgactatttggagctcatcaatttaatcttggtcactgtttcattaattacattagctcattaaaatatgtgtttctttaatcgatctactttagctatactttcctctcatttttgtttgttgggtgaagtgtaatttgaatacagtctctctaatggtctatagactcttaaatggattgatttaaaggattttttacaaaagcatttaacatctttctttcagttttctagtcaagttttgcagtattgatagaaatatcacaactccccctccccaagctctcaccccacatgataaatagatattagatgggtttcttcttaggttagaaaagcttgttatttctttcaagaacctactggttttgactgctgaatgatcttgctacaatcacaacaattttgagtttaaaggttactgaactaggtaaacaatttgattgcagggggctctctattccttgcactt

SEQ ID NO: 66564 - DNA, 364 bp, Cucumis sativus
  Intron number 1 from transcript Cucsa.034560.1 (locus Cucs a.034560) derived from phytozome v7.0 (chr-ID scaffold0044 4; pos 361163 to 361526 reverse strand)
tctcgtgttaagggtacgtaaaacttttgagtttggtagtaatttcaaattataaactaaataaaagttactactctcctactctctcaaattctcttttgtttcattttttgcttggctttttgattgttacttgtacttgtttttgtgcgtcataatccacatacaactccttgtagattgatgagtaagtgcatcttaagctgcaattatcccgatacaatctttccgttattacaaaagtagttgaattgcggacgagagctcttctttggaaaaagcgcgctccttaatttattgacacagtacaaatcatatagttcaaaatgacgatggcttggttttgcaggcgcgaagaaagtgg

SEQ ID NO: 66565 - DNA, 517 bp, Cucumis sativus
  Intron number 3 from transcript Cucsa.192590.1 (locus Cucs a.192590) derived from phytozome v7.0 (chr-ID scaffold0133 3; pos 482267 to 482783 reverse strand)
ggttagccttcaatttctacactatttaccacctaaaagtttaagctaaatgagtcgtgagaaatcttttgatttattttcaatactccaccttatgtgttagactcaaatattagcagatataaaatcaccttatgtgttagactcaaatattagtagatataaaatcaccatatgtgttagactcaaatattagtagatataaaatcaccttatgtgtagactcaaatattagcagatataaaatcactttatgtgttagactcaaatattagtatgtagaaaatatgatagaaatgacagtataaaagtctgaagtgagacctgaagtttagttaattctccatttttagaaaattctcaatctacacatctaatatcagaaagtcgaagggcatgttgtaaatatttcttctggccttaaaagtagaagttaaaaagaaaactgtctagattcttatgtttttgcttctttcccttaattgcttttcaatccatacgtagaccatataccaac

SEQ ID NO: 66566 - DNA, 1014 bp, Cucumis sativus
  Intron number 1 from transcript Cucsa.162150.1 (locus Cucs a.162150) derived from phytozome v7.0 (chr-ID scaffold0114 4; pos 1863257 to 1864270 reverse strand)
tttttttgccaccttttcctcttcaagaaatctaggtaagtggatctctctctatataggtatattttaagaaaaagaaagatataatagttgtttattataaatagaaaataaaagcaaaacacatatgagattatgttttccaataatctatttttttttatttgttaggagaaaattcaaagatttgtacttttttttttttttataaaaaaatgtgaatatcaatctcaacataactaattgtttaaagtacctatttatgaaataaggagggtttttatttttagatgattgataaggaggaaagtttaaaggtgaccaataaagttataggtcataataactaattaaatttataatctatatattaggaattatttcaattgctaataaacagcatgagattgttttccaagaatgggtacatggttaagattgttctaagaaaagcccacttcggttaaaaatcccaaaatggttattgccaataaaagcgcttccataacaaataaactcaaagatttacactttaaattccatcaattttcttcttcatcaatatcttccatcttcaatataatttgtatgttattcctatcttttctttttctttttttacattaaaaaaattacaatttatgcatccgaaattccacgtaaccaccgtcgatcgccggtcgaaaatactgacctgacgtgtcaattacttatgtggaatttaaaaggcatccacgtcggaccgacgggggccggcaaatcctcggtggcttctcacaattggatggatattcggtgaccgattatacggcattttcgtcaagaaagaatcgaaaagaaaaacggagcgtctagaaattgaaaattagtttttatcaaattttcacatataaaaagaatttgatttactactatattcgattttttttttctttttggaatgaagaaaaaaagaaagggttttgaatttgcattttgataattttaccacaggaattgaataattgaaacgac

SEQ ID NO: 66567 - DNA, 635 bp, Cucumis sativus
  Intron number 3 from transcript Cucsa.042300.1 (locus Cucs a.042300) derived from phytozome v7.0 (chr-ID scaffold0054 0; pos 751416 to 752050)
tggtaatagttcttttttgttgtaattcttcttattgttaatcattatgttgaactgaaaaagtgttgttaatgaaattttgtggaacaaaatcataacaattatgaaattcatagacaatattcaaatgagcaactaagtttttgtttttttgtttttccttttaagtaagttaaaagtacttgatactaataatatgttcatattttttatattatgttacaatggatatgtcaattcactttgaatctatgttcatagagaaatgtcaaccatggaaactataccttgcttatattgaggctgcaagatgctgattccttccccaaaattttaaaacatttgtaaatatttggacgttttaattttaaacggcctatttcttcttatgttaagtatagtttcatggcttgtaagcttgttattaatcaatcattttggtaaagcactaaactgagaattcttaaccaataattattaaattagaaacaagctcatataaaaaacatatagatatttagccgtaatgttccaacagtatagttagaaaaaagaaaaattattccaggtagaatatgactgtgagctccttccttgttcttgacatttatcggttggacaggtggttttttgcc

SEQ ID NO: 66568 - DNA, 999 bp, Cucumis sativus
  Intron number 3 from transcript Cucsa.162450.3 (locus Cucs a.162450) derived from phytozome v7.0 (chr-ID scaffold0114 4; pos 2077274 to 2078272)
gtggataaaatcaagcttcttttccatgtaaggattctagtttaaggcttcaatgagatatgaatcagatagagatattttatgaataattaagttggtcttcaagggaattcattccttctgaaattggtaccaagtagcctttgtttttctaattattctatctccacatatatcttttctttgggagttcgattcttcttcttctttaattacacttgtttgtttggaagattgggtgaccagcttgataaaaggaccagggagattagaaaaggctcaccaattggctaacaacaaaaagaaaaatttatgaaattcttttgagaggaaagagcaaatccaggcaactaatccattagatgagtgccattccacattttacagtttccttaaggatatttcattcaatcaatgaaatcgtttctaatccaaaagaagaaacattttacttattcattttcaaatctgccagtcccagcatagatggaactaacaaactgactgattagtttttttttttaatatgattatattgtaagttttctctttttaacacttgagcttatggacactactcattttatgcattctttgttcgacttttttctttccaaaaactattttttcaacttaccaaaatttggttaggatttacaaaatactttttggagtgaactaaaaatacaaaaaataaattagtaaatatgcttgactttacaaaaaaaaaaagagagagaggaagttataagtggggcttagcatttgaaagtcgatttctgcccacaattttagctgtggatctcgatgtaatatgctttagaattgatgcaaactaaagtaattagtgtattgaggctgcagttttagtggttccagaatttctttcaagtatttgattaaatatattaaaagaagctttagctaagaagttcttagagagaatggaattctttactttgtgatttaaacatggtgtgtaacagaaaagaaggcgtg

SEQ ID NO: 66569 - DNA, 1006 bp, Cucumis sativus
  Intron number 2 from transcript Cucsa.122940.1 (locus Cucs a.122940) derived from phytozome v7.0 (chr-ID scaffold0100 0; pos 254537 to 255542)
tgccgccgtggaaaagcatacctttttaataacgcgtgagttctctatcttttggtcgcaattgctgttggttgtttaatctttatggatttacaattcgtatttcctattattatgcactcaagtgtccacagattgaactaatttataaattattattaatgtcatagatcctcatgtatttaagtcacagttcgtgttgtctatccatccaaaaaagggtcatggttcgtgtaaactgtagatagccaaaacatattaagcattattaatttcccacttgagctagctaagaatggcagtcatatgttctgtgtaatacatgctattatcaattttggactctaactacttgttagaagtctattaagcatttttctttttgcataagtgtgaacaacaaatagaaaacacatctagttattgcttttagtcatttaaattccaaaagtttgaaataggttacaacatactttctcttgttgtttttccctgggtgggtggtcgtcctagtgacagtggcttcagatattttggaagaagttctctaaggtcttgggtccaagcctctgggtagaaagcttgataagggaaagttttaatatcttttggagccaacgtgtgaaaatttcatgtggagttgtagggcagggtaatatcacaaatatgataaactaaaaacaacaaatagaaaccaacccggctacctggcacataatatttgactgtttgagagaaataggggtagttaaccatgtggtccatgcagcctaggcaatccttcaactaacctcaatccaaaagtgttgagtcttttggaggctccaacttctctgtggtaggtgagacgaagagagagataagcatcttttctttcgtttgttatttacaaattatcgatgtttattgtttacacgttcttatcattacaaagcattctgattggaattatgctcacttctgtttttgagttcttcatataggataaacatttattttggagcat

SEQ ID NO: 66570 - DNA, 767 bp, Cucumis sativus
  Intron number 1 from transcript Cucsa.050960.1 (locus Cucs a.050960) derived from phytozome v7.0 (chr-ID scaffold0055 7; pos 153349 to 154115)
atatgtgagaatggaaagggaacgggagcgagcgagaatgcttaatccgtgttgtgaggggctccgttttagtaatctcatctactttttttataaaaaaaataaataaaacgacaaatttcgaaattattttccggtcatccagggagtccaaaataatttcgtactctcttccctccgctgcatcgcctacattcgtgttgtttattctcaatacgcggacctccagattccatccattccggcggaaaccacagcgtttcttcatcgccggaggcttcctcgtcacagcggtggcaagcgacgggaacttgggtttttgagtgccacaccaccgcgcgacgtctagaccacgcgggaatgggggtctcccggcggcttccctcgacggttttggactgtttgattaagtcaaggttgactttggatgagaacttcctctatgaacacctgttgaaattctttacaaggttctggtgaatctcgacctaaatggccgaagaatcaaaatgctttccgttccaatcaatacccattatttacttgatcttacccaacctcctaaatcaaagcaaaaactttgcttgtaaattctcatttgtaaccctcttgattacgaactacacgattagatatgaaagctgtctattctaaacttccccttcatccaaatttgagttttttcaaatcccattaccaccaaactccattcctccaccctcttacctctcttaacagtcttctcaattgtagccggacatcaaaac

SEQ ID NO: 66571 - DNA, 589 bp, Cucumis sativus
  Intron number 3 from transcript Cucsa.108140.1 (locus Cucs a.108140) derived from phytozome v7.0 (chr-ID scaffold0093 1; pos 352943 to 353531)
gtaccaagatcactctcttcctcaaggaggatcaggtaatggagtcttataatagtagttcattttgtattctcttcttaggattcgaaatggggagcatgaatttcgtaagtagaatagagaaagtgatgcgaaatgtgtttttttgttagtatgccttaaatataatatccggctctgaatgaccaaacacgtaacatcatgcacaatatttgatatagaccttataatcttactttatcggtgttttcaccctctagggtcattgttggtcggtgggaattggtttttgggataaaattgatggcaattgttggttttgttgaggcagtttaccgactgtctcacttttaaacccgctgatcgactttggtttagtcatttttggtcggtcagattggttttctagtgttttcttgcacagccatatactgcacacgtagttaacatgttgggttgatttctctgcggtttacttaacttttattacacttttgttttgagtttctgcataatgtagaatgcggcactaattgaatgcattaattattcagttggagtatctggaagagaggagaattaaggatct

SEQ ID NO: 66572 - DNA, 546 bp, Cucumis sativus
  Intron number 1 from transcript Cucsa.136740.1 (locus Cucs a.136740) derived from phytozome v7.0 (chr-ID scaffold0104 4; pos 1339331 to 1339876 reverse strand)
ataacacttcctcttcttcttcttcttcttcttgtgtagaaaattgtgttgttaatatgtcttatggtggattgagtttctctgctgagcagagttcttctgatgatatcacccaatatggatatttatgtgatttcacccattttccttatccatttaaagcttgaaactttgtgatctctctttctctctgcctctatcatcaaggtttcttcaaagatttttcttttctgtttatgtataatcaatcatctgtttattcccaactcaattcttatttttttcaagtatattactccactaatttgatacaactaactataatctttcttttgatcactactaaagaatcatcatggctttatggtgagaaacaagtagaaactgaatttgaggtttctttcattcccaactcaattttcgtatctttgtgttgatacactcgactaatcttatagaaaactcaggtacctataactatataattgatgaaactaagtttctgttttttcttacttttagagcatcttcaaggctttgtggtga

SEQ ID NO: 66573 - DNA, 496 bp, Cucumis sativus
  Intron number 2 from transcript Cucsa.131890.1 (locus Cucs a.131890) derived from phytozome v7.0 (chr-ID scaffold0103 7; pos 34060 to 34555 reverse strand)
aacccctgtgtgtgccctacttgtgagggaaacaggttatactttgaccccttttcatttccccggggctaaattaatggcatttgcattctttgtgatttactcattaggttctctgttcatgccaattcttatccagattctcatgtgtattatgaaaattatgctgaaccctaatgatatttgtgtgtgtttagtttgttgagaaaaagttaagaaggaataactcgtcttaagttgaatcaaaattttcgcttttaaaaagttgagattttaaagctctctctaatttgtcctgtattgaaattgactgataataaacacaaaagggtaattggtaaaatttttcctatttctgtgaaattttttggctgggctgatattcaattggtttacgttttctggtggtgatgtgttttctcactactgttgtttatttgctgcatcatttgatattgcagggtacaacgttgcctaaattgcctaggtaaaggat

SEQ ID NO: 66574 - DNA, 359 bp, Cucumis sativus
  Intron number 2 from transcript Cucsa.105940.1 (locus Cucs a.105940) derived from phytozome v7.0 (chr-ID scaffold0092 9; pos 379986 to 380344 reverse strand)
attgataggtgaagtttattttcgcatatcttcatttattctacacttgattgttgatattctgatatgccatttgtaactattgtcaaagtcgttttgcattttgactttattcgatagcttagtttatatgcttaagtgtagaaagctaagacgtatactacatgacggcatgctatattttaaaagtctaggaatgacacgacaaggaaacttttatcaaaagatctttttttaatgcattctgttaattggtttcttactgatttatgtagtaaatgagaaaatgaagggagattacatccatagttatcttttcgatttatatgctgctaacaaggaagttcctggtttaaggt

SEQ ID NO: 66575 - DNA, 756 bp, Cucumis sativus
  Intron number 1 from transcript Cucsa.147990.1 (locus Cucs a.147990) derived from phytozome v7.0 (chr-ID scaffold0110 7; pos 274411 to 275166 reverse strand)
ataacttcagtgttacgtgtaactaaaggcaagtgttagaggaatgactcataatcaaaggaagtaagtaatctctaataaaaagaattttagtatttagctaaattatacatatattaacttaggcattgaaatggggaagattattcaataccacatggtgaaagaatcttttgaaatttctattaaatataaaattggaagttaaaaatgtctatcttaagaaaaaattggaaactatgagtacacaaactatatgaacagtgtaatggaaacaccatgagtcatatccgatgctatctcaacattgacacgcactacaaagtgaagtagcaatctgatctctatgagtaaaaaaaactaaaaacaaataaacaaacagtatggtataacgtgatagtaaagtaaagtagagtccatccatccagatacagtggatgtatgataaaaaaaacaaaaacagtataaagttatgaatccaattccaaggaggaaatttgtcacttgcagtggtttttcaaaccccaaactctacccctccactctccacgtgtttctgaaaaacaaaacaaaaccagggggcgcgattttcccatctataataatctaatctattacagttctatatataatgagcaaatcccaattcattttcaagcatccaaaattcaaaaagacacaaatcaacacacacagataccaaaaaaatgagttgttgcagaaaaggttgggttgtagctgcaagtgttggagtgg

SEQ ID NO: 66576 - DNA, 588 bp, Cucumis sativus
  Intron number 1 from transcript Cucsa.106960.1 (locus Cucs a.106960) derived from phytozome v7.0 (chr-ID scaffold0093 0; pos 410752 to 411339)
aaccaaattatccaaccaactaaacagaaacaaaggtatatacttactttacttagcttcaattcaaactaattatttccccccttttcttgtttaatttcttggtattttttctaaaaaacgtttgattaattattaatttttactctgaatgaaaacttataaacataaatagtatatttattatattttggttagtattgatttttgtatgatttggttaaagtttgatgtaattaaatttaggcaaaccagtctccatcaatttgaacttttggatttagttacactttaatatggtaatttgagtatgaagttttatcaacataattataaaatttaactgtgtcatatagtatatgttcccaacttagagaacaaatgttggaatctcatctaacaaaatacgaagtaatcttctgtcatattatttcttctcaggaattaaatatgaaatttaggtcgatgaaattaaaagctatttaaattatatttaacccacaaactcaaatccgagattgattctttttttttatatattttgatatctcagcaagaaaagtagacaaaatagggtagtgaaagagg

SEQ ID NO: 66577 - DNA, 627 bp, Cucumis sativus
  Intron number 1 from transcript Cucsa.096310.1 (locus Cucs a.096310) derived from phytozome v7.0 (chr-ID scaffold0091 9; pos 1990911 to 1991537 reverse strand)
caattcaggtttgacctttttgaaccatcctttgtcttgctattttgtttgaatctatttttattttgaattaaacattagaactttctatattattttataacgttgagattagaagtatgtttatttacctcaaacagacccatcttaaaagagaagatgagaaagatgggtggggatctatcggtttaaatactatttttgtcaccataattctagttttggttcttttccgctcttgtactttaataaatttcattgtcgcaactatatataatcttttagcctaattcgttcaattttgtttattttattctttgatgtatttttgaaaaatgaacctccaaaggtagaatatgatgacttttttaaagtataaaattcaacccattaacattttcaaaataaattaaaactaaaaatacacaaaaagactaaagtagtatattttttttcaacttgaatatatcttaatgttattttttcaaatcttttattccataactgccatctataatctaaaatattgaaataagtttcatatcttgttgtttggttcattttaaatatttatttttctttctaattgtagggtgatccaatcgactgggtgagcacacatagata

SEQ ID NO: 66578 - DNA, 801 bp, Cucumis sativus
  Intron number 2 from transcript Cucsa.177670.1 (locus Cucs a.177670) derived from phytozome v7.0 (chr-ID scaffold0122 5; pos 1631849 to 1632649)
cgccgagttggattcggtcgcgttacctcaggaaggtgaggatgatcaaacgaatattgttgtttgttctttaagctgccatggcttctctttaaagcttacttctaaaaaaaatggttggcttcttgattgataggaaaggaatctgttgataactgccatgctagttttcattatatccttatcatataatttactgttgcttgctcatcacaaagcatctttgaagattgattttgaatgtgtcacacaacacatttgaactaaataatagaacatttttatgtttgtactttgtagaaaagaatgagactgtccacgttgccataatgcatagatgaatattgattgacaaagcttaaattgttctgttaaaatttatttgctctttttacgtgtgggctcagatgttaatttgattgacaaagcggacacgctaactattaatatagagtggaggagataacatgtaactactatactcgaaaactataaacttttaggttagtggtaattttatgatgaatatttgctagagcagttggttcattgatacgttgaactataaatgtaagcttgtctgttaagattcatacatatatggcctgtctattaaggttgaccaaacagctacgtattaccaactaaaaagtttttgtggctttttgctgtcgttctgttttttgacacattttttatgtcattccccacacaaaatgtttcggtttgtacctttacaataatgagtatgtgttgaattttgcagcttagaagagaaggggtgctcctgctgcgtggctt

SEQ ID NO: 66579 - DNA, 209 bp, Cucumis sativus
  Intron number 1 from transcript Cucsa.090310.1 (locus Cucs a.090310) derived from phytozome v7.0 (chr-ID scaffold0089 4; pos 1651399 to 1651607 reverse strand)
gctgttggagttctgtccctaaacttgcaggttattttcttcttcttttttcccatttccccctttctcttcttctctttcattttaatccctttcttctcagtttggtttgagaattatcaaacctttggatctcaaaagaaatttatttgtttttttttttgaattttatagggttgcaaaggtgtggaaaaagttgtagattaaga

SEQ ID NO: 66580 - DNA, 397 bp, Cucumis sativus
  Intron number 1 from transcript Cucsa.091540.2 (locus Cucs a.091540) derived from phytozome v7.0 (chr-ID scaffold0089 4; pos 2533400 to 2533796 reverse strand)
actttccaccttcaaatacaatataatctctaaaggccagttttcttcaccctttgtattattccctctcgattacttttaataccacgatatcactcttcgttcctcgtttcttatctcattctttcactcattactacttgtttttcatactctgataaacgctttgctttgattgtattttgcgtctctctctcacagtctatggataatttctttggatttttttatttttatttttatgtcttttttgagctgttgaagaatccgctttttgatagagatagctcgatttttttgattttttgtttttatggtgtttatgtttttgtggaagaattttttaagtcactgaaggttgttttgggatttcgcttttgcaggttttagacttcca

SEQ ID NO: 66581 - DNA, 700 bp, Cucumis sativus
  Intron number 2 from transcript Cucsa.011070.2 (locus Cucs a.011070) derived from phytozome v7.0 (chr-ID scaffold0015 4; pos 390465 to 391164)
acccaagtcctggatacaatattgaacaggtgtgttacaggaaaacgataatatagtttttttttaatccattattccttgcgtcgtgtgtcttttatttgtacttgatacgtgatatctaaagaaggaagaaggaaaggccaacttatttgtgtttgtgtgacaactgttacttgatctattcagatttatcttatctaacagagtttcaagtggtctgcagtaatcacttcattgtaggaggacgttgaacatatgaaaatcttcttttatcattgaagttgatgaatgtattgtacggttcattcattgaatctgcttttcgtttaacaattcgtttttctacactttctattgactattgtattaaagcatggtttcattggtttaaatatcacattgaaggaggccgatgtcttcacgtttccctgcttgttagttttatgtttcaaatggttccaaggttttcaacaatttgtatgatttgcatgcggtccttataagttgattgttgttctttacttatcatggtataatgattcaaaatgtgttttagcttgaaaccattttttttctctttcctcaatcccaacaaggttttgagctcaaataatgtgtaagaaaatgctttgtgtctcatacttttgattttttcttgtccacagcttgcaaagaaaggaaaactttttattgaacttcc

SEQ ID NO: 66582 - DNA, 670 bp, Cucumis sativus
  Intron number 2 from transcript Cucsa.058690.1 (locus Cucs a.058690) derived from phytozome v7.0 (chr-ID scaffold0061 4; pos 816517 to 817186 reverse strand)
ctcgttagttacaattcttacaaagattcaattttgtaattaaatgtacttcggggtaagtctaataaggttgctgatgctctcagtaaaaaaggtgtacttctcaccacccgttaatctcaaataactttctttgatcaccttcctacattgtaccatattggcactaatttaagaagtatttaggaaaattgctctaatcataaaccttgtaaagataaccacattgttaataattttctcttcaaaagtgatgttttgtgttcctcataaatctttaagagaggcaataattaaagaaacacactctagtggatttagccggatattttgaccgagacaaaattttgactgcattagctctaaatgcttttggccacaactcaataggggtgttactagcttcatcaaaatatgctctatttgccaaataactaaatgtaattctcaaaatacatgtttatacactcctttacctatttcttctactatttgggataatttatctatggattttgtgttaggattacctagaactcaaaggggtcattattctatttttatagtagtagattgctttagtaaaatgacccatttcatccattgtaaaaaaaacttctaatgctttgaatatagctaacttatttttttttagaaattgttagattac

SEQ ID NO: 66583 - DNA, 453 bp, Cucumis sativus
  Intron number 1 from transcript Cucsa.115680.1 (locus Cucs a.115680) derived from phytozome v7.0 (chr-ID scaffold0098 8; pos 261306 to 261758)
gagagcttgcaaggtttgctttgcttcaccttcagcttttgtttctcatgtgggttcttttttttttttttctgtggggggactgctgttttgtttaataaagttcttatgaagctttgaaatggagattcacagcttttgcttttacatgcatgagttgtgggtgccattagaagttcagggggatgattctttttctcgtttcccctgttctttttttgcacatgggtcatggtattaagttcagtttttttctttcgtaaatgtgtttgtttttctttgatctagagtgttacagtcccttttgaactcaagaggttttgatgtttcttgaatttaatgggaagcttgtgatttctttgatttgggtttcactctgtttttctcatgtatgcgttgttttgttcttcattttcagttttgcagctttgttataatcagctcagtggaagc

SEQ ID NO: 66584 - DNA, 1060 bp, Cucumis sativus
  Intron number 1 from transcript Cucsa.019300.1 (locus Cucs a.019300) derived from phytozome v7.0 (chr-ID scaffold0027 6; pos 115231 to 116290)
gaaaagagaagaaagaagtgaagagcacccataaggtatcgaaaggtgctgccaaggaggctatggtcgttagcacgacctctttgaagtttgtctccaaagaaaagaaatttgagaaatgccaagaaaaagacggaaaaaaacgtccgacgttgaaagaaagacaaaaaaaagtttatcattttccagactctaacttacctgatatgttggagcaactattggaaaaacaactcatgcaacttcctgaatgaaacgacccgcgaaaattggaaggataaaatatcccaattactgcaaatatcatcgggtcatcagccatccagtggataaatgttttgtgttgaaggagttgattatgaaattagctctaaacaaaaagattgaactagatctcgatgatgtggcacaaacaaatcatgtgtcacagtaacaattcatgtgggtggtcgattacctgccacaaggaatttaatccaatttgaatcttggagcctatctttatatatttttcaccggaggccttacaaaatgatgacctccaaactgttggccaaactgttggctccaaagaagaagaaaagcaggtagaggatgctgaatgagggatggacgctagtaacacgtcgaaagaagcgcaaacaaaattatgctaaaaaagaatctcgctcatatcgagagtatacaaaaaagtgtaagtctcagagaagaaaaacaagaaagaatgcgagaaagtttcaaccaatcactgaagaaagtgaggagcttcctcgaccacgacaaccaataactatgaataatttcttctctgaaaactttccaattgaaatagctttatgtcatgctgtcagtacgactgaggacgatgcttctccctcatatcatgtggaagcagcattaagtcagagaaattttcttcttttggcataaatgatattctatcacttccgagagaaataaaggacaccattatcgagatgtaaaaagatgatgacatctcaactatttctgcatcacaaacaaaggcgtgtgattcctattgtccgtcgataatatttag

SEQ ID NO: 66585 - DNA, 836 bp, Cucumis sativus
  Intron number 1 from transcript Cucsa.049910.1 (locus Cucs a.049910) derived from phytozome v7.0 (chr-ID scaffold0055 1; pos 67893 to 68728 reverse strand)
tctccaattgtccaggtaaattcacccaatcaaaattactgatcattttattttttttacatacatgttttagtccttcttcccattagagtattcatttttttgggcttagatttaatgttggcagtgtttgggttgtaacgagtaaagttgtttagttgtggttaatatgctatttctttaattgtgacgttgataatttatttaagtaaaacataggagtagagttaacatttgaatcgaatatgttttagagttcggcgtgattcttcagttaaaggttcggtcataacgaaatatgatgctttggtatgtagattgacagagacttgaaagataaaaaacaaaaattcttcctaaattcttagaaatttagaaaagttggaaaattatttgttccttatttgaaatttgtttttctttcttttagatgaagaattagaacttgagataactaagctaacctccgttagtctaacacctactactaagtgtgtggttcgatatccatttcaacttgaagttttttttttattacaaaaagcaaacaaaagaaaattagttcaattcgatttttaatcataacggtataaatattcaggttcactttccaaacccaaaattagattgaacttaattttctcatatttttaaattaaacagaacaccgtcactattaatattaaatttttagttcaattttgttaaggatttcgaactaaattattaaattaatacaaatcaaaatttgatagattcaatcatatttaaaatctatatcataacatatatttttaaatatttgtttgtttgtttttgatgcagctctattaaac

SEQ ID NO: 66586 - DNA, 639 bp, Cucumis sativus
  Intron number 1 from transcript Cucsa.165430.1 (locus Cucs a.165430) derived from phytozome v7.0 (chr-ID scaffold0115 3; pos 790691 to 791329)
ctcgtcattgctcctttcgccattatctttgagaggtcgtcttttcttattcattccttcgttctcttttgtttctattgtctagattacttattaaggacagatatttggattgactttcttgctaaaaaaagtgttttaaaaatattttgaaaaatcaatccaaacaaacattgaaagaattctgattaaccatacttactacatggcctaaaacgtctacatctccaatcagtatggtttagctttgaatttcatcagtgagaaggagagatgaagaactggagaaagaagaagaaaaagttcgaaaagagatgaagatgaattaaaagtagttttgaatttacttttttaatatatttagatgtgtggtgtaggttgagttttgctagtacgagactgcagtgatttatgtatcaaagtggaatatttgagtggttattaacaagtatccaattatcttaaccaaaccaatattttatgtattagctattattaataacttgttttttcgtttaatagtttcttatgtttgcttttaatggcaacaaaagtcaacaaacattgaataatctctctctctctacaaaaaggttgagtgtttttggtgtttttgcatgcaggaaggcaaggacaaag

SEQ ID NO: 66587 - DNA, 487 bp, Cucumis sativus
  Intron number 1 from transcript Cucsa.017540.1 (locus Cucs a.017540) derived from phytozome v7.0 (chr-ID scaffold0024 5; pos 316351 to 316837)
cttaaaattcgtgctgctgttctcagcccgtataggtatctgtttctctactgcttgctcttttatttttactctttatatctgaagcgtaagcttttgaacagagaatgaagtcaaagaagctatatggtttgaattagtaggtacttgtacgtggttttaatattgttacactgatagtacttcaggtaacaagtagctttatagctaatcacctgattctctgccacaggatgaagaagttgcaatatggtagatgttttcttccatgtgtatcggttaaccgtcactagacagagaccgcccactttagtttgattcactttatgatttgaattgtgcttttggtcctcaaggaatttttatattccaatttaatcttaagtgtaattttttttaactttcgtatttgttatttcattcctgttgtgactgattaactttgttttgcaatacctttcctcacaggcttctaattcttgttcgc

SEQ ID NO: 66588 - DNA, 538 bp, Cucumis sativus
  Intron number 1 from transcript Cucsa.109460.1 (locus Cucs a.109460) derived from phytozome v7.0 (chr-ID scaffold0093 4; pos 388729 to 389266)
acaactttacctaaatcctcctcctttgagtgaactccattttttttctttctaatttaacatccttttgcctaaaattagattaaacattatagaagtaatttgttttgatctcttttaattaaataaacattcagaacatgcgtcaacgttttgtttgggaaaagatgaattaggaaattgatttattttcttctttggttgttttggttttaattcttcacctccaataatgtgaagcaacaatttcattttgtttcagaattttctggatttgatttgcaagttttattctttgtcctctggcatctgtgtatggagagttataaatcttcatccacattaatttgagccaagaagtttttaaagtttattacaagtttaagatatttttacgaaattgaagtgtttgtgatttcaaagaaagagtattgaatgtttaatcattggatcatgtttcaaataatttatttccgtagtttttcggttttattgaatttcaggttctaccacacttccgtggaagttgggtgtgtgg

SEQ ID NO: 66589 - DNA, 698 bp, Cucumis sativus
  Intron number 1 from transcript Cucsa.155280.1 (locus Cucs a.155280) derived from phytozome v7.0 (chr-ID scaffold0113 6; pos 74224 to 74921 reverse strand)
tcataactggtacatatttcttcaatgactcttttacatttttctacatcttacttattacgctccattttttttcattttgaacatataacaacctaccaaaagcaaaaacttttaattactttcatacacatcctatcattactaccatgtatggaaaggtaataagaaaaacaaaacctcatagttgtgaataaaataagttttagaattgtcttttggtcatcatttgcgggtgttgggattattgtatgaaaaaggacaaagaataagttagatgaataattaaaatgtgtaaggctcgttggagatgtcgtcgtatatagactatgcagttattgtcttttgacgataatttcagtaagtgtacgtaagacttagttgttgcaagcttagacatcatttatctccattcatttttttcaaatacaaaaagaaattacacatagatcgttttctatatgtacaactcagccctgttacaccaaaagtatacacaaacacaccactttccatatgttattaacctcttttttctccaaacccaaacccaaacccaaacctcaatcaaattcagctttttccacgacaatgacattgataattatttttattgaaaaagtttataaccctaataacaatccttttttgtttaaatgacaggaaaaggagaatccttgacttgctctcccaccaac

SEQ ID NO: 66590 - DNA, 284 bp, Cucumis sativus
  Intron number 1 from transcript Cucsa.173550.1 (locus Cucs a.173550) derived from phytozome v7.0 (chr-ID scaffold0120 9; pos 228027 to 228310 reverse strand)
ccctctgtcgtctcactgtctccaagaacgacgtcgtaaggccctccttcatctctcttcttctcctttttttcttgttaaaacatgaccaatcatcttaaaaatttcaattatgccaaattatttaattgcagattattgtttatagatgtaactaatcaacggaagtctatgaatgtttattattaaccaaagagaagaaaaaaaaaaaactaaaatattttaggctaaataatttacgtttcacttttgattattgttgaaggtgtcggtactagcgccga

SEQ ID NO: 66591 - DNA, 713 bp, Cucumis sativus
  Intron number 1 from transcript Cucsa.101860.1 (locus Cucs a.101860) derived from phytozome v7.0 (chr-ID scaffold0092 7; pos 1021717 to 1022429)
tgcttattccacagctgttcagtttaacgatcctggtattccaaacccttctcttcttttctttcaattaacaaacttgtgaatcgaagatccgaacttttcaaaatctcaggctgctttctgttggtgatgatctgacaacagaaaatttgatgaagttgaaattgtgtgtttgaataatgtaatttagaaaacaaaagcttattggaggggttaaacaatgcagcagctacttttatactgtttaataaaagaatttatgaaatgtatttcgaactcaaaaacatcacatgtggattagtggatttttcctgttacatgtgcaaccgttttcacagtaagagactatgatccaactactcgctacagctttcaattagagtaagtatttaggcatcatgatacaatcatatcacaacttaacagaagtgtatcagaggagtatatacttttagacttctaccgtttatgttagtatatttatgataatactataattgttaaggcatttccaagacatgttccctgataccgctatataattacaatctatcttttatttaatggatacggagcaccaatgctttaggaatacgtatatttcaaacgtgtgtctgacccgttattctaaattactgaagaaatgtacatcttgtaaaagccattcaattacttttcctaattctgatattgacttgagcagattggtattt

SEQ ID NO: 66592 - DNA, 730 bp, Cucumis sativus
  Intron number 1 from transcript Cucsa.047280.1 (locus Cucs a.047280) derived from phytozome v7.0 (chr-ID scaffold0054 2; pos 2366041 to 2366770)
attaaggaagaaggaaaggtattttgattatataatgggactgttacatctttaaccttctcttttgtttcattacttggattactttactctaaacaaaaatgaaaaaaaaaagaataataaacaaaaatttacagctaatagaaaaaagttgcaagtagaatgatttggtaaataaacatctgtatagctgataaagggtcattttctttactttataaatacacacacttctttggctaccttacttccatttccctcttctcttcttctaatctttctgaatacaagctgtgtgtgtagagagatttcataaagacagcaaacatcccttctttttgttctgttttaaaagttcccttcttcaaccagctcttttcctcatcaggttagtgatcaaaatactacaaaaaataacttaatatatacttgaacaacatttcattattgtccccaaatctctctgtctcttaaaccaattgaaaaaagaacttagattcagcttctgattctctcctgctcattccactttgtaaatccataagaatgagactgaaagagcattgttttttaccccaaaaattgtatctcataacatgttttgtctcctttcttatgggatcaacaataatagtcagcaaaatggaaacaaaaatatttgaagatttgggttttgattgatgattgatctgtttggaatttgatttagggtaagttgcaaataaagggg

SEQ ID NO: 66593 - DNA, 742 bp, Cucumis sativus
  Intron number 1 from transcript Cucsa.091890.1 (locus Cucs a.091890) derived from phytozome v7.0 (chr-ID scaffold0089 4; pos 2771363 to 2772104)
gttttccgagcggtgactttctttggcgcttccaggtaatgccattttcaagtttttaagaatgagaatagatacatttaacttttatggtttcaagttgatcatttttaatctctcaactttgttagaagaataatataaccaaaaaatgaaaaatacatattacttcatacaccgaaaagaatctgagcttaaaaaattcacgttttctccttaaaacaattttactcactccagtgcctgaatttcgtgagcaaatttgtctcataataaaacaaattaactttctcatagaagtagcactccattcacaagatctaatgaactatactttgtgaaaataaaatcgaatttgaacaaatttgcaaaaaagaaagaaaaaagaataggagagaaaatgacggtgaaaaagttcttaaaaacaatttgaagaagaaacgtatacacattcaaatagttgcttctcctctttttaagatggttattttcgaaaatacattcgttcatcacaccatgctaactctacgtgaatggtcataaaccatttattacaacgcaattcagaagaaaaaaaaaaaggaatagtccgttacgcacgaaaaggaatatacagctcactttgatacttttaagttattacattacaattatttgttatatgaagttgaatggaaaaacaataattaattcaaatgatatgggtgcagattctcatagagaaaaaattcaaacaaagtatacc

SEQ ID NO: 66594 - DNA, 456 bp, Cucumis sativus
  Intron number 2 from transcript Cucsa.121900.1 (locus Cucs a.121900) derived from phytozome v7.0 (chr-ID scaffold0099 9; pos 296046 to 296501 reverse strand)
tccttgaaaggaaagattcaggtatcaaaacctccatactactacaaatctaataacgtttttaccttactaaaatcagtctagagtacttaaactttggaattaatttcttaataagttttgttgttaactttttattattactatcattaaataaacatagttggaccgacattaattctaaaaatttgtttttttcaaccatatgacactttacaaagttacatttacacaatttgacttaatacgatattcttcattaaatttgacaaaatcattatggtaacaaataacgaaattcatttctttaaccggttgtgctttttcgtatgacgataaggcttttttttttttttttttttggggtttgttctaaacattctatttgtttgttgagatgtaaagttgtattctttttgttttactttttgtcaacagggtcgggtaggacagtgt

SEQ ID NO: 66595 - DNA, 872 bp, Cucumis sativus
  Intron number 1 from transcript Cucsa.116760.1 (locus Cucs a.116760) derived from phytozome v7.0 (chr-ID scaffold0099 5; pos 602085 to 602956)
ccgtattataaagcaactgggttcgggtaaaatcaaactcttaacttgaatacgatggtttgtttactgtttaagctttctagttactagctagaacacaacaaaatggaacttaagaatatttcaatatattttgattggttaattttcaaaatattatttattatttaaaattttgtggtgagggaacaaatctctagaacgagatttgaggtttgagttttgttctttttggtaaattaatttgaaaaatatttagaaatatttgagtttgtatctatccttgtacggtctattcatttggagttgtgatgcgataaaggccagaaaaaaaaaagagtagaagatttatgattggaagtggacgtaagaggggcatttgtgacttttcatagacccgtccaataaatttgcaaagaaatgggtgtggtccatgttgatcatgattgaaaactcaaatgactcatttttatcaatttccctaaactcttcttatatgtatgtatatatcgacattcgtgctaagaaacgaagaatattgagttaattacctctaactattttaattttttttagaaaattattgaaaatagtttaaaatattattaagtataataaattttatttttaggagttttgctgtagagaatgaaagtagttttgacccaatagtttagttcaaattagaaaatacaattagatacttttgttatatatgcacttcaagacgtttatatctttagtaagctaccaatttaattaaatatttttctggtttggtgatgaagtacttaacctaatgttagagctttaaaattattatctgagatgatgacattggtatatctatatatatagaacggaaccataca

SEQ ID NO: 66596 - DNA, 680 bp, Cucumis sativus
  Intron number 1 from transcript Cucsa.162890.1 (locus Cucs a.162890) derived from phytozome v7.0 (chr-ID scaffold0114 4; pos 2403051 to 2403730 reverse strand)
tggataccatagacggccttattttgtttttgcaggtaaattcatctgccatgtcttgttgctaccctcgaatttctgtctggttcaatagaatgttaaatgtgaagctaagaacaaacaaaatgggatctgtcgtttgaaagggtgttttgaatttttgctgcttttggatcatgaaaatttcagtgtgaaaatattttcatgatactgtgcttagtttctaattattataggttcttcactattttataaattgtctcatatcaaatctatgagatcaattgccagcataaatggtctgcaaaggtttccatgctttgtcttagtattttttttgagtgctttgaataggctgcttgttctaacaaattttcagtattctattttggacctgttcatttggggaaaaaataattcttctgcaagaaatccttttgaaatgcccggtaactaagtcattagctatcccatgcctgcaagtgagctacatctgaagcttgcagatatgctgaacatcagtgaaacattttgtcctcatgttcataaaagtctgcttggttcccactttcttctacttaatttgtcttcttcacttgttatatagtttctaagtcgatcagatggtgaaatgtctgtaatttccaggttttcttggtgtgatctctttgctttcgttagcc

SEQ ID NO: 66597 - DNA, 574 bp, Cucumis sativus; identical to SEQ ID NO: 65259
  Intron number 1 from transcript Cucsa.148460.1 (locus Cucs a.148460) derived from phytozome v7.0 (chr-ID scaffold0110 7; pos 538933 to 539506 reverse strand)

SEQ ID NO: 66598 - DNA, 642 bp, Cucumis sativus
  Intron number 1 from transcript Cucsa.050170.1 (locus Cucs a.050170) derived from phytozome v7.0 (chr-ID scaffold0055 1; pos 255796 to 256437 reverse strand)
ttctcagattcaatattgttccgcagtgcttttgggtcagttcttgattcgttttgatccgttgaataatcttccttactctctcttgctctttttgtattctgtatttttttgtgttttcacttttgtttgttgattgttcttcggggctttttggttctggagctagggtttgttttcctcccttttatatggttctacttttattacgcggctgttttttcatgtacgtaatattttttttatatgggttttcgtgatttttaccttattaatcgtcgtctgcagttttgggtggtgttaattttatttaatattcgattacgacaatgacctatgcctaagcagatcgtgtttagagattttgtggatgattttaatattaattcgtccgtgttagcatcttgttcttatctttctaattaattggttctttcttgtgtttgtactttttttttctgtttaattagtgaaaaagtcgagggatgtttgaagggagaaggtttttgtcgatccttcgagatttccctatatatatgatttgaatgttctttttcaaggattgttgaactctttggttgattgcttttctaatgatgattcattctaagcagtctgagactgagtactcattgcctctcg

SEQ ID NO: 66599 - DNA, 440 bp, Cucumis sativus
  Intron number 1 from transcript Cucsa.140600.1 (locus Cucs a.140600) derived from phytozome v7.0 (chr-ID scaffold0107 1; pos 552119 to 552558 reverse strand)
tgttgcttatttgatctattcttctgttttgactggtcagtcttttcttctaattattattatttgtgaattttgaattttattgtgtttcttgatctttttcaactcaatgcattgctgcttcattttgatttccaaatctgagagaagaaaaagaaaatatttttcttttctttcttttttgtgtatgaaagtaaatttttaaagtgataaagttgtgttgagaatcttatattttattaatattttgaattaaccagcattatttatttattttttcaggaaatttaacttaatatttttgtgcattgagaattttagattttcttttcttttatttaacgagtttaatctaatgagaataaaatttatgattggaataattcttctaaatttgatttacaggtttggtatatccgattgtttctcattggttttgg

SEQ ID NO: 66600 - DNA, 960 bp, Cucumis sativus
  Intron number 2 from transcript Cucsa.096280.1 (locus Cucs a.096280) derived from phytozome v7.0 (chr-ID scaffold0091 9; pos 1969728 to 1970687)
ctcttggagggcttccttttctcacttggggagtaaacccagttattctagcactaattttgttattttttattttaagtcgagttgatccaaaaaaacatcattttcaaatgttaatttttaatatatacttctaggtcagaagatcacgtaagaattacaaatgtgtcaacttaattatataaatcaatctcctaaaataatttacttgtcatattttgttttagaaaaacaaaagtcaaatcaaacactcttaattagatctaaaaattttatacttgggtttgtcccggttacaatttaaaatcctattactattatcatgatcattagaagtaattttaaatatagtgaaatgaactaaaatatttacaaaatataataaaattttaactctattattgatagacagtcatatatttgtatctctcatcatcgatagaatatgaagatttagtatattttagaaatgttttctaatagttttatcatttacaatattatttaatgttattattactactactacatgttagcttaaaatctaacgtacacaagttgaaatatatgtgtcaacctagttaacgtgtgttctatatgtgtctaacttatttgacatatgctagtgtgtcgactaattgcacatacatccaaatgtttttagaaataaaaaacctaatatacaccgattattttgcaataaatccaagttttttaacctatatttcctaaaactaatcactgtcaactgacatataaaatatacgtcaggtacgtaattaaatatacatatatatatcttttatgcaagctttggaagtgaggttgaaaaacattatttatttgtaattttcagtacataaacatcatatatgttgatgttaacattacaaagaatgtttgaatggaagggttgaattgttgaataaatgcattgaaaatgcagggtgtaagaactgt

SEQ ID NO: 66601 - DNA, 627 bp, Cucumis sativus
  Intron number 1 from transcript Cucsa.105850.1 (locus Cucs a.105850) derived from phytozome v7.0 (chr-ID scaffold0092 9; pos 323596 to 324222 reverse strand)
gcttggcctcggcgttttccattccggtgttcaaggtcagtaatggtactaattgcttccgtttgatcttcgtttctgaaggcgtttcgtgagtttttctgtttttctcttggctgaagcactaatgcagctttttgcgttttttttttctttttgtgttcttgttaattcgttgatgcgatgcgatttgcgatgcgtgtatattttctttttacttgttttgatttgtgtttggaaatggagaaggtttcagtgagttaattttgtgtacgagatgcatggcctgtgagaaaaattgttcagatttagcagcctcttcatgaactatcactatcagctcgttttatggcctgtttttaactcgattgagcacattcttttctgttaattatactaccgattaagctatcgaacttcgagcatttttccggtttggtagatgagtaaattttccgacagctaaacacttatttctgatttcgcttctatttccagctcattttcttgatagtatgttgatttcgtagtcggtgccggcggagtttttatttcccagtttggcatatccttcatttgaatttgccgaacatgatttgacattttagctattgatttcgattgtagttc

SEQ ID NO: 66602 - DNA, 689 bp, Cucumis sativus
  Intron number 1 from transcript Cucsa.105250.1 (locus Cucs a.105250) derived from phytozome v7.0 (chr-ID scaffold0092 9; pos 24359 to 25047)
ccttacatttggttaggtttttcatatatataaggtaccagtttacattcaaattagttttttttatatattaatctatgtgtgcttctaactattcttgtcttagtacttttaatcaaacatatatttggttattaatttgttattgatttttttaaacaaaaattaatgacccaatattaacatttaagagtataaatttaaatatagttaattatataattgtatttttttaatactaataattactatttaataaattttagttttaaataattaagtttaatatctactaaaaatataaagggtaaaatgaaacaaattattcgaaattcaagaatggtgattattgtattaaaagttaccatttttaaaattaagcaatatttgaatgcatgcacatgtctttttctgaagtgtttaccatacagtcatgaaaagtttgttaaaatatacttttgaaaaaagaaagagaaaagaaaaatgagagtattccacttgatcactaagttaagttgcaataaacaaatgaatattttgtcaattcttttagtttttagaattatgcaaatgacaattacttttatcattctaaaagaaaccttcgtgcgttattcttttgtaattactcccccaaatataggacggtatgtggttaatgaaacttagttttgcaggtggtcggagga

SEQ ID NO: 66603 - DNA, 559 bp, Cucumis sativus
  Intron number 1 from transcript Cucsa.053610.1 (locus Cucs a.053610) derived from phytozome v7.0 (chr-ID scaffold0058 1; pos 678167 to 678725)
cttgcttacattgagcgaggtatcaaacttttaatagtattcaccttccaaacacattattttaagctttattttgattgaaatttgttaaaatgacttgaatctattatctcttgtcattcacgttggcaaaacatagaatctcttgctgcctcgttaattagtgagccaagaattcaaatttatattatttacattatttgtgattttggtactattggttcgaagaaatatgctacgtaaacttttagaacgtagttttataaaattcttctttcttctgtcatgaacgtagttaacaaactatgttaatgaactaggtatatctatctgttaatttttgtactcttttatatttgatgtgtttatttgattgtcgatttcttaacatattcactcaaaataaaaaacgtccccacatttgggaatataattgattatgtttgtgtatcattaactagcttaaagaattactcactttcttatcagcatattataaacaattgtttacaaatattgaacaggtgaaggtttcttgggcctgaacttcccagggtgt

SEQ ID NO: 66604 - DNA, 1038 bp, Cucumis sativus; identical to SEQ ID NO: 63446
  Intron number 1 from transcript Cucsa.107660.1 (locus Cucs a.107660) derived from phytozome v7.0 (chr-ID scaffold0093 1; pos 27679 to 28716 reverse strand)

SEQ ID NO: 66605 - DNA, 486 bp, Cucumis sativus
  Intron number 1 from transcript Cucsa.016440.1 (locus Cucs a.016440) derived from phytozome v7.0 (chr-ID scaffold0022 7; pos 135306 to 135791)
tttctgctggaaggtttactgttgaaactcttctcttgttttcatttgtgcatgctcttttgtaatgtgtattttccttatgttaatttactagtttgaattgaagtatgaggaatcttgttttacgtgaaaattgtgaatcaccctgaaagaagaccaaatttagaatatgtttatctagaagcattaaaatatcaagacttaagaagtgaatcattcccatttgatcaataacttagagtatgtggctgcatgtggtttggggatctttaagaatctataattagctttttgatataaagagattatagctgaaggatggagaagtgattttccgtacaagggcgctgtgtgttctacgtttactcttgttttttagtatgtaaaagaacaagagagggagagagatttaatggtagcactgatcttgttttatgatttctctgctcagtattgaatactggccagatccacagcgtggcatca

SEQ ID NO: 66606 - DNA, 900 bp, Cucumis sativus
  Intron number 1 from transcript Cucsa.042180.1 (locus Cucs a.042180) derived from phytozome v7.0 (chr-ID scaffold0054 0; pos 680639 to 681538)
atattagaacttccccacttccaatctttctcaaggtaaatctttcgtcaccattatcttaacgatcgagtgaataatgtcaccgttacgatattatatatgtagtcttcaagtgtttgtctttgtagaactgaggtttttcttgttcttgagttcaaatataacaatgacagaaatgaagaattttcaatctcaaaaaagggaaggttgttataattactattgaattaaacttactttgtcaatactaatagtctaaacagacaaaatctatgttaaatcaatttaggtaagaaaacaaattattgcaaaagtaactatgtagatcaattttttaaaaaataattgtagtctataaatgaaaatgggatggaacgaaacagatatgaaagttttaaattttttgtttttttcttttcattttagtgttggaatatcttgaatatgctatttgacgtttttagtaactaagtataggagtcttgttgtgatctaaattatttatggttttgactagaaggtttaaaaaatgcaatacataaaatctttaaccttagaaacgtctataatttataatatgaattattctctttaataataaacttctctccacctctactagtggacatagctaacacattgttggtgaatcatataaatctctacattcatccctattgttcaccttacaagaggtgatttcataacgctaaaattcattatctttttcattgaatatatgtatatcatgtcatctcattttagcaacatttcttaactcatttggttggtgggaatgaatctacaattccttaaaaggaacaatattccattcattgaaagaatcatccattttcacttgtagtttgaggatattgaatacaaagtgaggaataagca

SEQ ID NO: 66607 - DNA, 756 bp, Cucumis sativus
  Intron number 1 from transcript Cucsa.172140.1 (locus Cucs a.172140) derived from phytozome v7.0 (chr-ID scaffold0119 6; pos 57421 to 58176)
ttgtaacgagcggaaaagacaaatgtatgtatgcatgtagtaagaaccaagaacttactcccaccccaaacttctacgaaaagcatgttgtaataactttcttgaattattagatgaaaaaaacgacagcatttaaataattagaatgttatttgattatttcatgcatatatccttatcaattgagcttctgttaaggtcgtgctatgtgaaaattttcaatttgttttttcttattcaaaatcttcgcacaaacaaaagatggctaatcttgcttttcgttcttcgctctctagctttccttctctcaatcgctctcatttgtcttgtttctcatgctcttcgatgtccatcttctacaatgttgatgaattgctgaagaagaaaagaacagaaaaaaaaaaaaagaaattgagtgcttgtcggagtatgagaagaagaagaagagagatgagaagaaaaatggtggtggaggaagagaaaaataaaataaggtatgtgggaagtgtttgaacgttgaatttgaaaattttccaaatcttctccttctccaagtgaggccatcagaaggagaattcattctctaatttcactgttgcctgttggcatcaatgtcttttttcctttgcaaaactctaatttgcgttccacatctcctccaaatttcgcgcatatccaaacgtccgctgccttcaatttctccatttaacctattccacagccactgccgattcaaattcctttacagttacgtat

SEQ ID NO: 66608 - DNA, 770 bp, Cucumis sativus
  Intron number 1 from transcript Cucsa.142750.1 (locus Cucs a.142750) derived from phytozome v7.0 (chr-ID scaffold0107 9; pos 960985 to 961754 reverse strand)
agttggttttgtgaggtgggttttgtttgtagatctgaatttgtttcatttttgtattgaattttgattctggggttttttgaggatgatcgactgtgatggattctgatgttctgttttccttttttttggagaggatttcttcaggttggagatgagatctgattgttggttttgtgatagatttgtttggaagtgtttgatttagatgtgatgtttaatgctctgtttcgtttgtgttttgattctgaatttaattttattacttagtcttgttgttgaacttgatctgtgtaaaacagattaagaagtgtttgaagaaattgtcgttttcccctgtttgatctactttgtttgattgaacttttgcatgtaataagattattttagaaaggaagaggaattctcatggtgattggtgtgaagacatggtttggcttttgctttctgattagaaggaataaatctcttggtgttctttgttacatgtatcgatttgtggtttcggtagtgactcgatttgggatgaatcaaacatctcttttgtttttctagtaattgattctgagactgactgggtttttgctatgaaatttatgtttacaggtgaggaagtatagagaattttagtagcttccatatcatatctgataccaggtgaaggcagtagctgattaggatttgtttttggtgtaaatctggttgttggatctcacccgagtttcgtcatctgagtttagcaaatatctgctgattcatttttgggggaa

SEQ ID NO: 66609 - DNA, 995 bp, Cucumis sativus
  Intron number 2 from transcript Cucsa.124380.1 (locus Cucs a.124380) derived from phytozome v7.0 (chr-ID scaffold0100 1; pos 310205 to 311199)
ctagcaagccatgtaattacctttcaaactctcttacatacatccaattttaattcatttaaaatatttggttggtttctaggttttaagtcccctttttatatcattcttatcctaaaatatatattactcatttagtggttaagttgtaagttttaggttttgagtttgatttttatttagctatagaattttaaaatgttgtaatttttttttatattgaaatttgagttttgtttcaattttgtcactagattttaaggttctcacttttacttagctaataggcataaacacaatatgattatcaaggttaaaactgtaaatcttgaatagaaacaaaattgcaacattttatagactaaattgaaatcaaactcaaaacttaaaaaaaatgtgtaataatatttttggaatatgagatcaaatataaactatttccaaaaagttaaaatccaaaaagatttttttttcaattatagaaagataccattgaacttgtttttaaaactactttctagagtagaaaaacccttacttattagatcttagaacacaaagtcgatgaataagggtttacgtaagcagggttgggttgggccttggaagaaaattataaaccaatccaaaatattcaggttgactagaaatgaacactatctatttaagcaagtgtcaacggccaattcaatccggtctaaaaaatttgagtttggttggggttgtttttttttcacaaaattttatattgttttttaatatgggtaagcaaattttcattcaaaatgaggtttacttttacgttttaggttatatatattatacataattaggttgagtcgggtcaacccaaccctttacttactcgactatctaattcaaccttattttttatccaattttctaactcaactcaatccaaggtttatgtaagtttaattgatgtatatatgtttataggtattggggtcgtgctggtaccttctatccatagg

SEQ ID NO: 66610 - DNA, 374 bp, Cucumis sativus
  Intron number 1 from transcript Cucsa.139350.1 (locus Cucs a.139350) derived from phytozome v7.0 (chr-ID scaffold0106 6; pos 555406 to 555779 reverse strand)
tattgctcaggtgagtagatcatcatcattctttcttattttcttattttccttttttagtcccttaaaacttttctcaaattttatttcaagggaaagacttcaagtccttaagtcaagcttatttactatcgatgtccctcaactattatttaatttactaaatatttgatcccttagctacgcttcttatgcgactaccaatacatatagaattttccactctaccgcaatatttgaaatgtcctccattctaaactatctatatgtactcctgttcttacacttggtttatgttttaaactgtaacatcttcctaataatggtgttataatacactgcaggcaggattcagcttcacaaccacagcgtat

SEQ ID NO: 66611 - DNA, 646 bp, Cucumis sativus
  Intron number 1 from transcript Cucsa.193230.1 (locus Cucs a.193230) derived from phytozome v7.0 (chr-ID scaffold0133 5; pos 197927 to 198572 reverse strand)
ctagcccacggttcagatatcagaacccttttcaggtttctcactttcctccttttcttctagaataaactaatggtaaaggaaaaagggaacatcttgaaaaagaaaatggttgttttgtttcatccgggtcggttggatgttgttcttttgtttatatctaaccaatggattgttgtccaagtgatttgatggtttttctttttctttgtgaagtttgagggtggcgtaagtgtaggaggcttgattcttggtagtttgtcgtttcaactttcgggttgtattcgtggtttgaaaatataaagcgactgcttcttcttttcagtgggttttttagactatagattaatttacgtataattccactccacccaaattttcttgcttaattttgaaaaattcaccccccccccccccccaatagccagacatggaagaacccagaatcaagagtggccaaataacattggaactcaacaatccagaatcaagattggctaaaatgtggagatgaacatgataattaatatatatatatatatgatctagctttaagtttctaccatagattcaatgcttatttgttaataatcaatgcttgttgaatggtttttctaggagtttgtaaagaacaaaagttgaaaaa

SEQ ID NO: 66612 - DNA, 795 bp, Cucumis sativus
  Intron number 1 from transcript Cucsa.034710.1 (locus Cucs a.034710) derived from phytozome v7.0 (chr-ID scaffold0044 4; pos 596450 to 597244 reverse strand)
tggttcttgccacccaaaaacatcaccgccggcccatgccacggtggacctaagttagctaagcccgccctaaggttagttagttcttcactcatctgccatttttgtgtttttacgttaaaattttggttaaatggttaccttaaatttgattgaagtttcaaactttttagctttaaatacttccggttgatatattaattttggttagaatacgttactttattaatcgttttagtttatggtcttttaataggtcggaatttatgcccatttcttaggcgttttcttgagagaaaaaagaaattgagctcgctcttaaaatctaaaaattataaagcatgttttcaaaaacctattctttctttttatttttttttagtttttcagaactttttaaaatttttgcgaacattataggaagtagacaatatgtataaaaaaaaaattgagagagaagtaagagttttagaaatttaattttcaaataaaaaaaacaacaaacaaaatagttattataaatggggttatagaaaataagcttttggtttccataacaatattttgcaaaatttgtaaaataatttttgtacacaatttacaaattttggaggtttcagttttgttggtcaacagtttggtatgttaatttgtataaaagaaaaaaaaatagttagatattgaatacacataataggaataataattaaaataaaattagttacgttaaaatattgttgggttgttggattttgtgaaggaaaattttggattgggcgaaagggcgaaagggcg

SEQ ID NO: 66613 - DNA, 363 bp, Cucumis sativus
  Intron number 1 from transcript Cucsa.076430.1 (locus Cucs a.076430) derived from phytozome v7.0 (chr-ID scaffold0078 9; pos 791753 to 792115 reverse strand)
gtggaatatcagttgtgagtgctcttaatttgatgttttgttcataataaatctgtaaatgaaaatcgtatttgaattggtgatgtgagtaatattcatcggaagtgtcaattattgttttaatatttgatttgttattgctgatgctttctaaatgattggtagaatttaaataagttgaagaaattgccctcatgacgcttttgtaagtggtaagtgcatgaaaagtaataactatagcaaatgactagcatattaattttacagaacggaacggtttttttctcccattcctcctgatgaattgattgatggtttctatcttattgtcctctttttgtctgtatgcagctggagattgtc

SEQ ID NO: 66614 - DNA, 777 bp, Cucumis sativus
  Intron number 1 from transcript Cucsa.094500.1 (locus Cucs a.094500) derived from phytozome v7.0 (chr-ID scaffold0091 9; pos 710543 to 711319)
gcaattgctgtagcttcttcacttacctttggtaactgcgattattcgcctcttttttttatgttttctttgcatgtgagatcatcgattatgacgaattgggaatttgtgaaatacccatttcgttttccttgacgaattgattgttttttttaagggtgggtcatcgatcatcgacttttgagttgtttttgataacccagttatgaattgattttgtttgatgtgggtttttgtttgtttggatcgagaaagatgaacaactgatgaattcgtgctatgtgtttgtcagggaaatctggtttttcctctgagtttaggctttttgagctttagaggctcttgcttgtctacctagggatttccatttttgtcaaccatcacctcgtgtgaactattcattggggcattgcattttatcaaagaaaatataaattcatggaatgagaagaaattaatgtgaattggcatctctatttcatgacaatttattatagtttcaatttcaaggtctttgttgtacgaattttgtaaccacctttaggtgtttgagattttcccctgaattcatttatcaaagaaatcttttctttacaccaaaaaagaattgtcatctggaagtcgctttgttcttttgacattgcctcgtgattggggcattttgatcaaattcttcattttgtagcatttggtttgagttttgttcctcacttcctcttcccgcttttttaatgtcatacagaaggggctccttgctcgaaatcgtacgcattcaca

SEQ ID NO: 66615 - DNA, 851 bp, Cucumis sativus
  Intron number 1 from transcript Cucsa.072800.1 (locus Cucs a.072800) derived from phytozome v7.0 (chr-ID scaffold0076 5; pos 352658 to 353508)
attttcagcaacttcatcacggtattttcttctttcattagtgtgtttcctctaacctttagagattgaaatgagtggattttgaatctttgagcttcttgttccatgagagcttttgttgaatttgttgtctgcttttcggtttatgattttggttgtctaaactcatagtttatttggtagaatttcaacttttcagagaggattcccagcccacttcttcttttaacttgaaagatccaaatcattggttttaggctgctgccattgtggctgtaattgagcctggttcctgctctatttgagcttactgttgagtcttgagaaatgaattgggtgtttagaaaagaaagttcaaatatttagaaaattttacataaatttgcatggttgcatttcctttatttcgtaaaatttattggtttttatatttttattgtccttggcacttggcaagttccattctcatattttaggcaacactttcgttttcatcctcaatttataccatcacttaaattttaatcaaatggtttataggacaactcaaattaaacatagctaaaaccaaccatagcttaactcaacttatatttgagtgtactaataaccatgaacaccatagtttcaatcccccaacccagcatttttgtactaaaagaaaacatagctaagcacccattgccttccttaagtttgaatgttcaatccacatcttgttattagtgcttataaatttgtgttctatttctatgcagtagaatgtgcttgactattcagctaatcaaagatttttttttctgacatgttatgatcatgttctttgcctaaggaaccgttcatcgtccgtg

SEQ ID NO: 66616 - DNA, 529 bp, Cucumis sativus
  Intron number 2 from transcript Cucsa.062120.1 (locus Cucs a.062120) derived from phytozome v7.0 (chr-ID scaffold0065 3; pos 168868 to 169396 reverse strand)
gagatcttgttttacccaggcgcatcagttagtaccgaatctcttcttcttattactttcacaggcttttacagcaacaacatagagtgcccaaattcctcatgctagttgcattcttgtattaagtaatttatgattgaatttacatggagacttagaaactagtttaactttttaaatgcccaaactgaccaagaagctacacaatcacaattacttgctgtgttggtctgtttttgaatgcaaattttacatctacagtttcttatttgtgttgtcattctgagcacagcttagggaataaagaccattttaccaatccaaatttgattcttcaaccccatcacaccattgttgaacttaaaagaaaaagaaaaaggaattcttatgccatctctatgctaaatacctttcatctttcccgattaaaaatttttaaaatggaaatgtgggtgttaaaacacacaatatccataacttacgttatttaattggaagagatgttaagacatttctatatgaaaaacag

SEQ ID NO: 66617 - DNA, 652 bp, Cucumis sativus
  Intron number 2 from transcript Cucsa.021660.1 (locus Cucs a.021660) derived from phytozome v7.0 (chr-ID scaffold0030 9; pos 52457 to 53108)
gaaaacttgctactgatttcactggtaagtgcaaaaactttcttcttcgttgaaacttaaacacattggccttgcatgatgcttggataaacttcctgcatcatgaaagtcatctttttcttttagaccaagggcacagtttgttggtatcgtgccttcttccttctcatgtgtcttgtgagaaaataaatctatttgatatcttcttttttccttccgagttctgggaacatgagaaaaaagaaattaaagtttcattcataatttgttgaatctgccatttccggttcaagttctaaatggaatcaaatgataattatgttgcttctctctctatcctggttttcctacaaaactataaaaaaattataatgaaatgtgatttttaaaaacacaaaattatctgtttctaagatctaaacatgtttttaggaaattttccttaaaaactgaattggatgcataaaacaagtacaattctctggaaaccaatatatgcaaacaacattaaatgaagcctaaatatcaagttgttattgactgttatgtgtaccgtcttagaacaggtgttctacttaaggcctgtaattatcattaatgttttttattttctccagctcaaactttaggattcaagacctttccgttaccg

SEQ ID NO: 66618 - DNA, 725 bp, Cucumis sativus
  Intron number 1 from transcript Cucsa.151700.1 (locus Cucs a.151700) derived from phytozome v7.0 (chr-ID scaffold0111 9; pos 77248 to 77972)
gcgaaattgaaaaccgatctgcctatctctcggcggtatgtatttataattaacagatttttatggggtggtgacgttcaaaaactttaaaaataaaatttaaaatgttactaaattgaattttatattcgacagagttctaaaccttttaatttactctgttaatagaaatgaaattttataacctttccaggttgaactcaaatttaaatattttacaagtttacacttcaaatttaagagtttttcgatttttcttatagtatgtgtggatagaaaattaaattataatatccaaattgatattacataacatcgattgaactatgaaatttcttgtttatttgattatactacaaataattaaaaatttgttgaatatataaaattgagaggaaagctaattaaattaaattaaaaagttcgaaaatctctcttagtttgatggtactagatttaaaatcctcgaggcaaaaaagaaaaactatggttttactgacataaacttgaatctatgaaacttaggtagaagtcatacaaggtaatgaaagttagtctctttgattagttactcccaagttagtaactctaaaaaaaacctttgaattagaagactcagttgaaatattttcatttaaaattttaaaagataaaaaatcaaaggttggattgtctaaaaaactagagatggaacacatggcagataaaatccgaggtagaaacac

SEQ ID NO: 66619 - DNA, 909 bp, Cucumis sativus
  Intron number 1 from transcript Cucsa.112600.1 (locus Cucs a.112600) derived from phytozome v7.0 (chr-ID scaffold0095 3; pos 1110117 to 1111025)
attgccttcaactcaatctctctcgcattgaagaggtttctttcttttctttttttcaaataccctttttcaactttttgttgttggggaaatgtttgtattgtaatgtctgatatgggttttttctgtttgtgcatttgagtttctcttcggtcccctctttccttttggagaaagggaggttgtgttttctaatttctccatctttttctttgtgattattcattgttcatgatggcgaaatgttattatagacattgttttatagaaatgtttggaaaaaaggaattaatgtttgctcttaccttgaaacatttcctaagaatgttgtttagttgctttctttcaggttttggttgaggaaatagaggtttacaggcaatggcaaactatgccatatgatagtgatttggatttttcataatttttttgtgttaaatctcacattatccttttgcattctagtgattttggacccaattacttcttaagttgaggattgactagttccttgtcaatttgaagcatgtcattcgaaccatggaaggcaagcggtttttttctaatcttagtttacaaatcttaaaatctatagtaactagaagtagttacgggaattggattaagtaatagaaattaaagcaaacgaactgtttacgatatgctcatactgcgattatcgacatgagagattctttgaatagctttctcatattgttatgtccagctacatttgttcaacccataagcgttttttcagttatatggaagtcatttccctctatcctggttttcttcttgttctctttccaaccattataagttattatgcttatctcagtatgacggtatcccttttcccatgtttgttgttctgcctaggctgcttccggggctgtgcagtgtcag

SEQ ID NO: 66620 - DNA, 682 bp, Cucumis sativus
  Intron number 1 from transcript Cucsa.165000.1 (locus Cucs a.165000) derived from phytozome v7.0 (chr-ID scaffold0115 3; pos 395460 to 396141)
tttgctcgagcttgaagcacccattaagatttgcggttcgttttaatctccccctctttttgttttgttttttctttttctttttcttcttgttttcccatttaatgaaatttattcttggtttctagtcccaaatgtctcttaccccttttgtttttttcgggaaacttggtttaatttgttcgatttcttagttaatttgatgggtttgtggttttctgaaatttgagatatgtttgatgggttcttttttcttttaccccctttttgggttttcttttgttaatttgttctggatgacggtttaaagtttggttctttgactgcacaatgatggggtgtttggggatatgtatttgctttctctcctaatgtgtttagaatatcttatttcacgaatggaagagcattatgaaattttcaattggcttgcctccttgatgagcattgttgatattgagcctccgagaagaaacttgagaacccttttgaatattgctgaccttcacaatgttaacctgaaaaaattcctaaaggaatttggttccataaggaatggcatgaggattcatatcagtacttaaatttttttgttattgcataaaaaatggggtttttgttttgcaatggtctctctgattatatgctttccatttttcttttgcattttcaggtgacattc

SEQ ID NO: 66621 - DNA, 774 bp, Cucumis sativus
  Intron number 1 from transcript Cucsa.111900.1 (locus Cucs a.111900) derived from phytozome v7.0 (chr-ID scaffold0095 3; pos 582444 to 583217)
catcaagaatctcaacgagaaggtcaagaaagaaggtgattcactcttagcttttcacttaatcttactatattccttccgtaaatgtgttttcttctgttcgttaagtagaaaccttagtataatcgaagtgatcttcggcacattttatctttatcatttcgcctttggtttccccggcaagagaggggggttatttggcaaagttggatttgtttttatgacagcatttaatatttcttacgatgcctacagtaatgactcgagaagattaacgatttcagttgaaatttgagttttagggtgatagagctggtatcttgaaaggttagttagaacttgggattttgttttctattttggtttgtttagtgcccgtttgataaccatttggtttttgatttcttgtttttcaaaatgaagcttataaacacattggattttttattttattttttaatttgtaatctacaattcaccaatgtttagtttttaaaaattgtttttgtttttggaattggctaagaattcaactattgtgcatttgtatataagaaatatgtaaaccgatacgagaaattaagagaaaagatttttaattttcaaaaaccaaaagccaaaacagaatggtaaccaaactgaccttaatgctcagtttttgacaatattacatcacatgtggaggggttggtttgaacccaagtcctcatagtgttcagaatttgatggtatactaattttctcccccttggacagaattgaagagatccctgt

SEQ ID NO: 66622 - DNA, 584 bp, Cucumis sativus
  Intron number 1 from transcript Cucsa.136290.1 (locus Cucs a.136290) derived from phytozome v7.0 (chr-ID scaffold0104 4; pos 946119 to 946702 reverse strand)
atcgcgcgaccgctgcttgtttttcagatcccaaggttttattttctgtttttgttttgtttttctgggttatgttggtggtctattctctttcactcacggaaaataaaatcacgaacaattttttgttgttgttgttgatgatgatgatttcttttccaatagatgttctactaacctaaatgaaaatataatactaagaatgtatatcttacagattagagaaaaagataatgaataaaaatgaacaaaacatatcattcttatcaacaaaatagaaaattaatattaggttcgagtttgattgaactgtcgatgggtttgaaatatcatagggagacgattgcatatgaattggctggatataaataaaaaataaaacgcttatggggtagagctagaaacagattttgaccgattcaggggttccaaacagggggtacaacctcagaaatctattttaatgtagcagattctctttcttcttgcttttgggtcttcctttatcttctcaatctcttctgatttgggaaattacttttctgagaggtagggctaaggttcacattcaggaaagccaaaga

SEQ ID NO: 66623 - DNA, 741 bp, Cucumis sativus
  Intron number 1 from transcript Cucsa.087790.2 (locus Cucs a.087790) derived from phytozome v7.0 (chr-ID scaffold0088 8; pos 325782 to 326522 reverse strand)
tcactggtcgagctcccgttttgcctctctgggctgtaagttttttgctctttatcttttaatgctctctatttgagttttgatctttgtctttagatgtttctaataacatatccatattcaaatcttgattgaatggcttctgattaagatgttttgcttttgcgaactaatttcaaaagttgcatagtgattagcggtcaacgagttggaatctgttgttggcttcaaaagtgaatctggggatggggagatgattctttcgtggttagccttaatgaggatagttagattaaagatagtttgctacttgtcttagaattttctcagaatggttagtctaagttgtgttgtagcaaaatgcagcgggattcagattaactgtttgataatttgtttctacgactatagaagcatttttatggaatatttcatggatgcagaactgtttgttgtggatagtactttacaaacagatctgctgaatatatagtttggttgaggctattgaaaagtccttttggaagttccagaatcaatccttcccaacctgttcattaagattggtaaaatgcatcatcttctagcctttttactctatagtcaaaggaaatgaggggtgagatgcacgaatggctgtaaccaaaccactctaaccaattaaagtttgaagaacaaactgttgagctattttcttcttttaccatttttgtttagttaagtatggataccattttgcag

SEQ ID NO: 66624 - DNA, 675 bp, Cucumis sativus
  Intron number 1 from transcript Cucsa.021410.1 (locus Cucs a.021410) derived from phytozome v7.0 (chr-ID scaffold0030 7; pos 25285 to 25959)
gcctcctggtatacattgcttattccctctttaatctcatctcttttctggaaaacaaaattgcatttgtctaagtaaatatgttgtgcgctcctccaggcttttccatttttgatctaattcaaaatctctgccgacagaaaaaaagaagaaataaactaggagtggtataatatggttgcacttttctgggttttttctttggggaacaaattcaaactttctgcagaaaagaagaaaggaatggctataaaatgaatgaactatctgggtttctttttctggaacagattcaaactctctgcagattttctggggtctctctcattggcataaatcaaacactctgcacaagaaaatggaaggaatggttatatgatgcaaaacccaactgaagtattctcaactatgtagtggagatgatattttcaaatatgcagaacttaaaagctgtttatgcatcatattaattagaatagttatcagagcggctctacaatataaattgatatatgtaactatttgattggcatcacaccattgttaggtaattggtaagagaaatatttatatattcttttcataatggtaactcaaacattgtgcatgaatttttcctttttaatcatttgggtttcaggaactaaaggggttgcgttcccagcttcatcaagc

SEQ ID NO: 66625 - DNA, 918 bp, Cucumis sativus
  Intron number 1 from transcript Cucsa.167600.1 (locus Cucs a.167600) derived from phytozome v7.0 (chr-ID scaffold0115 4; pos 984121 to 985038 reverse strand)
aattacctcctcatttcgtcaggttcttcttcttcttcttcttctttttatttttcttgggttttctcttttgcagctttttaatttgcttttttttttttttctgttttagtcttgtttttattttttatgatgttgtgaacttgtgttttagctttattgtcatctgtaattcattttgcaaaagtcctgatgggttttatccatttcctctaagtttaaatctcaaatacttaacttgttgtactaaaagataatttatgcttgttttctcatgatttactcaccatgctttttacttctcttagactaacatttgaatttgaattattaggtaaaatctaaaaacaaaaataatttttttaattagttttcaaattttggtttggttttaaaaacagtggtggtaagtggcaacacacataacataaaaatgtagaggtttagaggtttaagttgagcttcatgagcttaattttcaaaaactaatttatttaggatttagaaaatcatggtgcgaagttgtaagaaaactaactcaattttcaaatgtttacactattagttttacaattcttcaaagtttcatcattgggtttgatagatactcgtccacatggttttaaatcgatgcatctattagacatgtagggagatcactacctttaatttgttatttactgtctgttccttctcacgattaattaatgaaacatttcagatttgtatctcaccatagatggagttattagatctggggcttggaaaaatgttgagaaattgttgagtactgaggcgaagatgattgtgttattttgtaggaatattgccattgattgaccccatggccaaccttgaaagtatcataattgaaaccaaacttaaaatagttgagtgtttaacatatcgtttgtcagg

SEQ ID NO: 66626 - DNA, 575 bp, Cucumis sativus
  Intron number 1 from transcript Cucsa.165580.1 (locus Cucs a.165580) derived from phytozome v7.0 (chr-ID scaffold0115 3; pos 902513 to 903087)
aaggtaacaatagatttttacttgattgagaaataagactataatcatttattttttataataatgtggtgcaaattaaattttttaagagtatttggtttgtacattcattagtttatcgtgtagttagtgttgattatggatttctatttcaccattgacgttgtttcaattttgtacttcactggtgcaatattgtaaattctgccgtggagccaatactttatatgtaatagggtttagggtttaacatgattacatgattagacggccgtaaattcatggttttataaaccctagtaaaagttttaaatacaaatcaagagtcgagctctgactcttcgatttattcacacacacgctcctgtctaatcagaaaattttctatgatgagtcaaaaacaatcagttgagggaggaggaccatgggaggaacctagtggaagaagagaggaaacaacaaatatgtctatccattcccaacccaaaattcaaaacaaatctcctcaaaccagctctgacactaataccccacaaaaaatcctaacccaaactgaggtaatcaatttaaagtta

SEQ ID NO: 66627 - DNA, 642 bp, Cucumis sativus
  Intron number 1 from transcript Cucsa.044810.1 (locus Cucs a.044810) derived from phytozome v7.0 (chr-ID scaffold0054 2; pos 984848 to 985489 reverse strand)
caccaacaaagaactcggcgtcatcagctaaaacggttcgtttttcatctttcatggaatttttagcctacaacgtttccttatcttctcggctattgattgattttgcgttttctttttcgctttccccctcgggattcaagtattcaagaccagcaagaactgggttggttgaatcgttgcgttttctttgattttgtatacaaacatatggcagtgtcatgtgggcgatcgttcacgaatggtattagatcttgttatttgcccgatttattgtattccaccgataaacatggctaaccccaattcatggaatggaatatgcattctgggatctgcttattgcgttctacattttgggttgtgatttgattaacctcttagatggattgtatggcattttgacacaggattaatgttaattagagcaatttataggatacaggacgaaaatgttttttggggtttgtatattttcaaatttatttgaatctgagagtgcctagcgtaatgagccaaaatattccaagtagcagaacatttagcttggaattgttcgagcacttagtttagaatttgatgattatataaaaaccttctacttcaggatcttttggtgaatattaacggaatctaaggcga

SEQ ID NO: 66628 - DNA, 451 bp, Cucumis sativus
  Intron number 3 from transcript Cucsa.141900.1 (locus Cucs a.141900) derived from phytozome v7.0 (chr-ID scaffold0107 9; pos 239443 to 239893 reverse strand)
tcccggcgattttggcttcgatccgcttggattgggtatgctactgtccctttttttgtttgattcaaatttacattttgaaaagtaattggtcgtgagaaaactaacttaacaacaaagaagatttgggctattactattactatttcttcttattttttctctttctgataaaagaaattaagaaaggtgtgttttacgattacaatactatttttggttttcacctcggaatagaaacgttctttttgagattattaggcaggaaatatggtagtaggagtgggaatgaaaagttaggagtttgttggagaattaaaaacaattattaccaaacacaattggaattagaattgtcaatcaaacacatttttgtagtgaatatgaaaatacagacatcaaagtgataatttgaaatgggcatgtcaggttcggatccagagacactaaa

SEQ ID NO: 66629 - DNA, 583 bp, Cucumis sativus
  Intron number 2 from transcript Cucsa.141900.1 (locus Cucs a.141900) derived from phytozome v7.0 (chr-ID scaffold0107 9; pos 239862 to 240444 reverse strand)
cccggcagcagcccgccggagtggctcgacggcaggttaattaatttatagcttatttcattcgtttttttttcttcttctttgattcgtagaattggagatttatagcttaaacagtgggttggcctctgaactttagcaacagcaacaatttagtacataaattaacacttttaaatttggtgttcaacaatttttttgtctttcatttttcaaacttgtaatgatttagttcgattgtggaaaagttctatcaaaatttattattcttctaagctcttcaactttcaattttgttgtattagattagtttacgaactttagtagatgtgcttttaattttattacaatttaatcttaaaactttgcattttacaaaactatagagtctccattatcgaaatattatacagtcaagtttagcaattaaattgttacaaaaatgaaagttcaaaaactaaatcattacaaaagtttggaaaaagtttataaacattcttctccacctactaaaagtgattatttaacgtttgtttgttccttcgtagccttcccggcgattttggcttcgatccgcttggat

SEQ ID NO: 66630 - DNA, 430 bp, Cucumis sativus
  Intron number 1 from transcript Cucsa.122660.1 (locus Cucs a.122660) derived from phytozome v7.0 (chr-ID scaffold0100 0; pos 11560 to 11989 reverse strand)
cgggctcatcagcgtttggcatctctgtttcgtaggtgggttgagttttgagattgaaacgaagataaactttttttcttattgatttattgacggggtttggaatgtacactgctgaggaaacggtgttgctagttcactaaacttatgctttaagtatctgtctgtgatctgcaatgagctagctttttgtttgattctttttgtaattgaaaatgaattcaggtgtaagcgattttgaaactggaatatgttgacataatcatgtagctttacagttggttgacttgtctgtgttgttttgatgttcttgtagctgacttgatggtttgttttctaagaattgtttatctagcgatagatcaatcgatgaacgcttggcttatttgttatatctcgatgtgattttgcaggttaggacaggtagaga

SEQ ID NO: 66631 - DNA, 545 bp, Cucumis sativus
  Intron number 1 from transcript Cucsa.051290.2 (locus Cucs a.051290) derived from phytozome v7.0 (chr-ID scaffold0055 7; pos 464521 to 465065)
tttcctggtgctttattcctcctctcaggtacccatctctctttctctctcatcttcggtttttttttcgattttctctctctaggtatgaattgaaatcttcccttttcgtttatgggtatgtgtaggatgtttgtgggtatcttaaatccttgaatttcgaatcaattttgctgtttttgttcgtttttatgataaaattttgtcaatgggatgagaccctttagttaattttttagaggaattgtgtgttgggtgttgattatagtttgaagtgggaatgaatttcttgttctgttttgttcaggaatgaagcagatcgagtatggggaatcgtttatagttaatggggttgtttaaatttccatatgcaaaattgggtgtttggccatttgatgtgggaatcatcgagggattgtcaatttaagtttctctgttcgatttgattaggtttaaatgatgaagggttggttttgttgaggaattttgattgttgtgattgtgttttcgtgtggactgaaatttgttttatgtgcgaggaacag

SEQ ID NO: 66632 - DNA, 482 bp, Cucumis sativus
  Intron number 1 from transcript Cucsa.193280.1 (locus Cucs a.193280) derived from phytozome v7.0 (chr-ID scaffold0133 5; pos 240516 to 240997)
caccaactttgagtacttgcctccgacctctgctggtaaggattaaactattgttatggaatgaatatataaaatgcaaaattatttattacatgggaatgttaaccaaaattttatataaatttttcaatataacaaaaatgagagattctaatcaaactatatatatatatatatatacactcatcccactcctatttttctcactttttgttcatctactttttaccaatactttcaagaaggaaaactaatgtttaaattctaaaaaaaattagtttttgaaaacttgtatttctttttaaaatttagcaacccttttacttgaaaaagatgagaattattgtaagaagataaaaaaaataaatccaaatagtgacaaaagggatttcaattatacaaactcagtcaactatttttttttctatcaattacttagtcgtttcatggttctggtttatggggttggtttaatttagtag

SEQ ID NO: 66633 - DNA, 712 bp, Cucumis sativus
  Intron number 1 from transcript Cucsa.143050.1 (locus Cucs a.143050) derived from phytozome v7.0 (chr-ID scaffold0107 9; pos 1338112 to 1338823)
ctggcgatccccgtactgatatcattccacgagaggtgctatttctttgttttgagctttggatttttgctaatgtgaacaattgtttggaaattggaacttggagtgggaatgttatttgtatttcctggaaatgtggacggtggagggaataatgtgtgtaatcaattgaaaggtttgagtaggagctctttcatatgctatagtttaatggttttaacttattgcgagttttaggtactgtgataagaaggattttgaatttgatgtaccctctttttggtgtataagagataaaaagaagatcaattcattgttgtattttcgtatttttattttcattcataagagaaagctctacattttacatggttttcaggactagtttgatcgtctttgggtcctttggagctgtaagcttatcactgtttgttgttttaacttatcatatcttgcatttttctcgtttgataatagaaattcttacatgtttttaggtctaattaattaattaatcatttggtggtaagttttaattaagattttattgtaagagtaggatccattcttatgtagttaattggttgcgtttaacttccatgctatttttcttaattttgaaaaaagggcttggatgagtggatttggtttaatgggttattctattactatgattaattagtgtatctaccttatgattgttaggtattac

SEQ ID NO: 66634 - DNA, 377 bp, Cucumis sativus
  Intron number 5 from transcript Cucsa.034380.1 (locus Cucs a.034380) derived from phytozome v7.0 (chr-ID scaffold0044 4; pos 91476 to 91852 reverse strand)
gaggttcgtatgctttctaatacaataggttaatctagaatgttttgttcacgtctttatgttttttgtattttcacacttccatgttattagggagcatttttcttccttctttatcttgttctgcttttaggtaattttcccatattatcactcaactttctcgagaaacattttcatttgcagttgttttgatctagtggattcaagatgttatctacaagactactatttttaagattatttattacaacttctgattacgagtcttcaattcatctttaagttttattattttatcatgtttataggatgctaattttgaatttggatgctaaataggctctcagccccactctgcacttctagagcacaga

SEQ ID NO: 66635 - DNA, 646 bp, Cucumis sativus
  Intron number 2 from transcript Cucsa.160150.1 (locus Cucs a.160150) derived from phytozome v7.0 (chr-ID scaffold0114 4; pos 425842 to 426487 reverse strand)
accagaaactgttagccttctaatccccctattcttcttcaatctgttgtttgcatcccgaatgtgctttctcttgttcatatctttaacttttttacataaatacattgtattggtggcgtgagagtgtcatgtatgctactaggatccgtgtattttttttttgtttttcccatgctcgtatctgtgatttcaatattatggctttctgaatctagggatttgaaaatgtgtagtaaatttacggtttaccttttgaatggtagagcagtgtcgaaatcgttagttcgatgtattttctgtgctaactgttgtgttaatttgtagcctttgtatggaagattttagataggcttttttgttgacatctctggaaatctagctgctgtgacgtctgttggttttcgttttttgattagtggtctgtttttctccttgttgtttttggcaaaacagtagtttttaagcgaaaatcttttgttaattttatttggtcggtcgggaagataggttttagttattcccttttttgtttgtacatttatttatcatcatgtttacttcagttttactttcgtaatggactgaaattatttctcgaatttgtatagccgtgctttctttgacaagaggatctcccaggaag

SEQ ID NO: 66636 - DNA, 301 bp, Cucumis sativus
  Intron number 1 from transcript Cucsa.107300.1 (locus Cucs a.107300) derived from phytozome v7.0 (chr-ID scaffold0093 0; pos 697602 to 697902)
gtaaattatttaaactttttcgatttataacctgaataaatatttggttgtttgttatagttaggagaattaatgtgcagagactaaaacataaatttattttataaatattttagttgattttgattgaagaatagagcaaagggattttaggatgtttgaaaattctccaaaagttttatggaaaagataatttttttttttgttgatttggatttattaaatatagtaaagtatgagacagatatattaaaaatatgtgtattttcgtaatttaaaataattttagtgaaaaagaaga

SEQ ID NO: 66637 - DNA, 838 bp, Cucumis sativus
  Intron number 1 from transcript Cucsa.142490.1 (locus Cucs a.142490) derived from phytozome v7.0 (chr-ID scaffold0107 9; pos 760486 to 761323)
ggaagttccgatccccgatcttgttcgctccccaggtcaatatttcgttcttttcccgctaatctttatctcttgtgaactgggtttgtgtcaatttatgttctttttgcttttcatgctgatgttttttggttgttcgtgggatttgattcattcaatgatacgtcgttttgttattgggttttattgtttggttgaggttgggtttcccggggaatttctttactaagatcgctgtattgcaatggttgtaaatggggaaagttccagccaagatccacttaattgactacttgaactaatattgacttccagcaattttaaataatgttaattgttaattattattatttatttttacttttgatcattttcttaatgctgtgctctttggatatgaatggctgaaatgtggagatgaatggctgaaatgtctgttgttggatttgacttctctgatcaactacagtttgtatatgaaaagctgggatttctctcttaatctcgatcccctttgaacttttgattaatctattagagttgtttggtttttagaatcaagtatgttgtggagctgagtgtttcttctttatcggttgaaggactgatggcgtactcatcgatgtaatgggtgatgagtaaaaacttgtagatccggatttgatcttacttagcaaatattttggctagattgtaaggtcgaatttgactttcttgctgtttgagatgaacccaatgtgaatttgtatgatgtttagccttggttatgccttttgaaatgatggtgggcatgtgttacaagacttgcagattccagtggctcccttgcaaggaggta

SEQ ID NO: 66638 - DNA, 219 bp, Cucumis sativus
  Intron number 3 from transcript Cucsa.117410.1 (locus Cucs a.117410) derived from phytozome v7.0 (chr-ID scaffold0099 5; pos 967483 to 967701)
tgtatcctttgaggcttttgccccctcaatgaaagttggtgcctcatcaatcaaattatttatgataagaaactgatattctattatagaaaaacatatacaaaaaggggctatttggacatggacattgattctctatcttgatcacatataattgcattgaagggtcatctatcttttgatatttagttttcttaacttcgatatgtagtcttgtta

SEQ ID NO: 66639 - DNA, 976 bp, Cucumis sativus
  Intron number 3 from transcript Cucsa.103820.1 (locus Cucs a.103820) derived from phytozome v7.0 (chr-ID scaffold0092 7; pos 2526587 to 2527562 reverse strand)
tgaaggtatagataatatttatcctccatgaaaggagttttttttaataaatttctcttgatctctttgtccaatatatatatgtgcatatagtttcatattgtttagttctacacattttgcttgtgacatttaatgatgtatttttttgggtggattttctagtagaaatacgtttgtaatgagatgactctttcatgatttctaaaaacttgtctttgggtctaatgtgatggatatacaccatatggggaaaatgtatggaagtatatgtaatgtatgaaacatggcataaaagtagtttcaaattaagatgaattctattcatttaaacactatagtctatatcagattttatatcagttttggaacataatatcgtaattttgtgagttatctctaaaaagttattcaatatgttattgatacataatgtatctatttttcatcatcgtgggatgtgaagttgaaaatttggatattttttatatttacaggacagtttaaaatacatttcacattttatcttaaacgtttatttgttacattattacagtaacctattcgaataatttttcttatctctataatttgtttggtggttgttttaataatgtaattaccatgtgttatgattaattgattaaattacaaagtttagacctctaagtttataagtagccaaaggatttttgaacttaagcatgtcttaaacgtatttgaatgttcttctatctaatatgactatataaactttaaatatggtatgtaatatttgatatattagatataaaatcgaattttatgtttaatcagaatatatgtccgtaaatttgaaagagaccttgactccaggacctactttgacacaaaaaattaagagtcagggatacaccaaaacatcttaaatttgtctaaaactttatttatcagtgtcaaagatgtgtgttgggttgttgtttttacattgatagtt

SEQ ID NO: 66640 - DNA, 280 bp, Cucumis sativus
  Intron number 2 from transcript Cucsa.103820.1 (locus Cucs a.103820) derived from phytozome v7.0 (chr-ID scaffold0092 7; pos 2527636 to 2527915 reverse strand)
agttctggcaaacactacgaatttgcaagctccaggtttgtgatttctctctctgagagctcatttttagatcagaaattgtgtttggcttcttagttagttgataatcttagttttgtttttggatttaggactgaaaaggggagcggttatatacgatcaaataaatttaaagctatttttattaggaagaaatttctagctatactatgaaattattttctttgatttttgtcggggtgagattttagagttatatgatttgtttttggtgatcagc

SEQ ID NO: 66641 - DNA, 798 bp, Cucumis sativus
  Intron number 1 from transcript Cucsa.066160.2 (locus Cucs a.066160) derived from phytozome v7.0 (chr-ID scaffold0069 6; pos 714810 to 715607)
tttctaagggtttagaaaaaccaaataaaaaaaaggtactgcaaaattttcatctctaatttcttccacgaatgctttgtttctctccattcttctcatcgtaatgtactgattttcattctcgaatttctttccaaacgatcggcgttcctggattgtttcgagttgaaacaatatattgcggtaactttttggatgttctaactctccatttgactgttttattgcttggatcttttttttccttcttattgagttatttctttgtttataatttgatttttttttttatgaatattgaaagattctttcgagtaatgcttcagttgcttaacgactggttccattgggcatattgttttcctggatgttcttaaatcagagtatgagttcttgaaaagattctgggtcactgatcggcccgtgatttgccttcctctggacgaatgttatcgattttacttgtgactaagttgttttctgaaatatcagaaagaatcatttgatttccttttgtaattgtaatagtgtacgcttcctccaaaatgctgctttcatatgttataggtcaaggatcttagctgcattgtagaattctggagaacaagattgatgaatttgaagactgattgtttttctcatatattagattcaggagcttagcatattattttcttcttcctagctctgaaagaaccgttccagatttccttgcatcttttcttcggatcgcttaatttatttttcttttatataagtttgatgcaatctaaaattctgttgcagacactataaaag

SEQ ID NO: 66642 - DNA, 500 bp, Cucumis sativus
  Intron number 1 from transcript Cucsa.034770.1 (locus Cucs a.034770) derived from phytozome v7.0 (chr-ID scaffold0044 4; pos 698896 to 699395)
acatcaggggtcgccgccaagttgttgggtaattcccccctcgccccccctcctctctctctctttctctttgttattatcaacaactttggattatcctttccttcaattttgcctcatcttgttgcttttttcttttttcttttttttttaaaaatatattgtttggattgttctctcaaacccctttttcaaatgaacaagaaagcctatgccattttttgttttttcaattttgatgaaataatcctgtcttttggataagacttgggatccattttcttattttgctatcggattggtttgtgttgtaccattaatcattttctgatgggtcccttcagaaattgatgggtcttaatctactacatgtggctaacaataatatcccattttttcctccatggaatggatatgcttttcttctctttttttttttttcctttttaaattagttaaacaaattttgattaaaatttgctattgggaattttttgcag

SEQ ID NO: 66643 - DNA, 502 bp, Cucumis sativus
  Intron number 3 from transcript Cucsa.034770.1 (locus Cucs a.034770) derived from phytozome v7.0 (chr-ID scaffold0044 4; pos 699666 to 700167)
cacttgaggaagctggcgttagaggaattgttcaggtttatctctctctccttttctagacatcatattatttgtctttttcttgtaaaaggtggtaaaggtttttgtggttttgagtagttttgggttactcttgtttggatgtggataaataatgttttaagattagaaaatggaagattagactgagtttacactaattgtggtaaagaacatggaccggaacccgattgtttggaacgttcgaggaaaaaatttgttctcgagtttgttttgttgactcttgaagatttctagatctagaagctgttctgttttttttctacacttaacaatttgttatgatgtgattgtgatccaatctgaaggagaaaaagtcaactagtgtttgtcttcctgccttcatcttggttgaaaattgcttctcgtttcggatgcgaattctcaactcgaaatctgatttgcagggtgaattggggagttggagtttcaagagcaaaac

SEQ ID NO: 66644 - DNA, 401 bp, Cucumis sativus
  Intron number 1 from transcript Cucsa.045240.2 (locus Cucs a.045240) derived from phytozome v7.0 (chr-ID scaffold0054 2; pos 1230276 to 1230676)
ccaattctggtaatttgatcactacctgaaaattttaataatttatgcgtagatttgggtgtttggaatttggacagtgcaactcgttaatgttcgacgtgagagaaatttttaattggactgttagtgattaatacgtgcttttcaattgattagaaataaatgggaaagaagaatcttaacagtggtttcatatatgtgttgaaagaaaagaagaggaatcttttgatctgactttatggacaaacaaattatccacttaaatgaaaagtagacaatgttctttagatatgtacatgctgcaattaaggtgtattgattctagttcaagtagtattaactgttactgatattttgtaattgcaggactcctttccttttaatctgaaagcaagtctgag

SEQ ID NO: 66645 - DNA, 363 bp, Cucumis sativus
  Intron number 1 from transcript Cucsa.083310.1 (locus Cucs a.083310) derived from phytozome v7.0 (chr-ID scaffold0085 8; pos 209970 to 210332)
tccattccgtttcctcaatcccctccgctcttcaggtataatttcttcccactctcttcttctctcttccatttttcaaattttgctgatttttttttattttgtttaattcattaagatttttttttcatttctagggtgtagagagatgaaatttctatggttttattgatgtctacttcttattgttatgctttggatgattctcagaatcttcatcatctcattcctttatctctctttgttttctgacgattctgtttatccgatcgttgtctccgttcctgcgagcgaatgtttgatttagattttcgattgttaattttagggttttagatctgtacaaacaacatcgccaaactg

SEQ ID NO: 66646 - DNA, 758 bp, Cucumis sativus
  Intron number 2 from transcript Cucsa.104760.1 (locus Cucs a.104760) derived from phytozome v7.0 (chr-ID scaffold0092 7; pos 3138343 to 3139100 reverse strand)
gaattgatcgttccagtgttaaagcaataatattggtaagaatttaaatcctttgatctctagttaaagacatttaattaaatgttttaatcatcaaactaggtcaaaaattgagttagttcttgtctgaagaattatttattttcgtgcataaaattacttctttttaaatgacttataaagtaatttcagatgagctcatagttttgtagatgaaaatctattattattattgtttaggtttgaatgcctcttcacgtcccgtattttttatttagtggtcatatttatttttatacttcaaattatgttagttcaattggtaatttaagaatatgggattatttggttcaaaatatttattttggtcattggaattattaataatgtccatttttgtcttatgttaattaaaatattgtatttaaatatttttaaattgatagacttttaccactatctattaatgtcgctaatagatgcatataaatgtttattaatgtctactattgataaaatctgaaaattttgctatacgttataaatattatgttaaatttgttattttttacaattttctttaatagaatttaaattttgttatatttttgtaaatattttggttcattttgttatatttaaaaatgtgatttgatcggtacctatatttgatatatctaaaatttcgttatattttgtagttttgtaattttttgtgttttaaaatacacttattacattccatatacatgaatagg

SEQ ID NO: 66647 - DNA, 932 bp, Cucumis sativus
  Intron number 1 from transcript Cucsa.102850.2 (locus Cucs a.102850) derived from phytozome v7.0 (chr-ID scaffold0092 7; pos 1796555 to 1797486)
tttcaggaacttagcaccactttgttttgatttgggtaattcttattcttctctaattttatctcctttattaatttttttttaaagttgttctctcttcgaagtactgtttccatatctcaaattcttctttgtgatgctgtaatcgagtcgtccaacgctttcttttttctggctaacttttgcaacgttagaaatttgttcaagaacttctgctactatcatctgtttcctctccagctcgaattaagaacaaaaatactgttacatgtgagcaaatgttctgtttatgggcttttcttagattctggtaatatgggttttggaatacttggtgtttaagtaagttggagttgtcaatagctgcacttattcgctagcacttctgatgatttccatgttattgtggataagtacttggtatcttttatgcttcatgtttttcctccatatgtgaattatatatgatattctggcttcaaagtgagaattttttggttatcctctctttctggtttaagtcttactattttaaaattatgagagattaagattgatttaagtctttaattttcagaacaaagcataataaaaatgctgaaatgatgacaaaagtgatcaaggaatggcttctaatattctcaactttatactttcttgaatggactatcgtttgatgatttatgggtacttttagaaaagaactcttctgaaacattattaaaagttgaagaacatgtacatatattttaagctcatacttgagaaagtttttaattgcagtatatggtctcctttcctgaaaaaattggcagcaacttcctatagtgaactgtagtttgtaagttatgagttcataatattttcttgaatggtttgttcgtgcaatcacttacttccatttccttgtggattcctcagacactgcttgg

SEQ ID NO: 66648 - DNA, 372 bp, Cucumis sativus
  Intron number 1 from transcript Cucsa.042450.3 (locus Cucs a.042450) derived from phytozome v7.0 (chr-ID scaffold0054 0; pos 845409 to 845780)
ccaccattttctttgcggattttggtctcctgttggtatgaaactctgggtttgctttgtttttgtgttttgtttctgggtttggattggtttatggtgtttgcagtggattgaagttggtgatgttacgaatgtgattgttttgagttgttgttggttgtggttgttctgtttttatgatctttcgtttgtgattcttcgaggaatttgttgagttttgagttttcgtaatgggtttggtttctttttgtgttattattattggtggattgttgattattgtcttctaacgttttcgtgtttgtttccgatttcaattcgatgttttcttttgtaggattgattgtctccacatttaagatctgtggagat

SEQ ID NO: 66649 - DNA, 924 bp, Cucumis sativus
  Intron number 1 from transcript Cucsa.102740.1 (locus Cucs a.102740) derived from phytozome v7.0 (chr-ID scaffold0092 7; pos 1716467 to 1717390 reverse strand)
cggtttttgaaaacagtaatgtgaaaagatttaaatctctaatattttagtccataatatatacatctttcaattatttgatataagctagagttgacacgtcttattagaaaacattgattaaaattttaatttcaggtcaaatttgttattcgttaaaaaaaaaaagaaagtaaaaacaagaaatttgaaactttgaaattatgtaccaataaaaaagcattgatgcactacaatatgtcatgattattatgtaaattctttaaatatttaaaaataatcacatttttagtagaatatatgtgagacatgatgagtctaattttcaaccacaaaagcaatcgtagtctcttttaagaataggaagaactagagagtattattaaaattgaaaatctcataactgttgatacatatggcaattgaaggatcattaaactctacacatgtcagtcatgcattttccttcgattatgatgattataatagataaaaggaaagaagagagagaagccaaaaaggggttgagtatcttcagcagatactttgtcaacgtggaaaaagattaatatatagttttgtctctactcaagatggatttacatgcatagaaattttggatttcaattgaaactcgtacataaaatggacttcataatgtatgttattacagcacactgccaaggtcattctggtggcttcaatctctataaatacctcacccctagtagccacctcttcatcttcactccccaactccaaatttaaatattacttttttcaacaaaaacgccatgcaaatttactctctcctttacctatttctctcccttatctctctcctcttcgctttcaacctccgcacccgccgtacaaacttaccccccagtcccccgtctctccctatcatcggccacctccatt

SEQ ID NO: 66650 - DNA, 742 bp, Cucumis sativus
  Intron number 1 from transcript Cucsa.141810.1 (locus Cucs a.141810) derived from phytozome v7.0 (chr-ID scaffold0107 9; pos 196124 to 196865 reverse strand)
ttcagacgcttgaaagggaaattggctttcttgaggtgagtttgaatttgaaaatgattgtctctgtctacatcatttcttctccctcttcgtatgtttcccctctttgaagttcaatggcatggtgtcgaaaagctattgtacaattgcaaagcacctcttttttgtttttagctttgttaattagacacaaaatttcgaagtcctacatgcagatctatttgtttgatttagggagctagttttccttacaaaacaggtttgataagcttagaacttccatttcgtgccatgaagcttctcctagaccttcatttaataaaagcaccgctgtggagtttatgacaagaaaaatctaagaaacactttggctcctaaatttcttgggattccttcccctgagcaaggggaacgagaaagaaattactaaatctttattcatattttctaaaatttgttgaatttgaatatttatggactccattcatgtcttctctttttaaatttacttatttctttagaactacgtgtaaattttccctcctgttatgggattttttggttagacaaatgccacatcttacatcaggaactgaaataaaatcatgttcacgcatgtcatgaggtacaattctctgtttcaaattaacatggctgcttttattattagttcaatgcgttaaacatttctagttttcttgaatcaggacgaactaaaatcccttcaaagtcttcaacctgt

SEQ ID NO: 66651 - DNA, 828 bp, Cucumis sativus
  Intron number 1 from transcript Cucsa.103750.1 (locus Cucs a.103750) derived from phytozome v7.0 (chr-ID scaffold0092 7; pos 2487782 to 2488609)
ccactccccatttttggaagaaggtttccaaattggtatttcctgctctcttgcttttgatatttgattagataactcgtaccgctgcttgcctcgtctttttcactgctatacatttagcactccattattgcttccgtgtgtcttgtaaatttctaatacgaacaacagttttctaagaaatagttgagaattttattaggcatcattgtctagagtttgatttaagtcagttgtttgtggtggcatcaggcatgtgcagttgttcttccaatttaattcacctattttccctccacttttactgtgctcgtagtctataagcgctattgggcacactagcacattttgttacattttcaggaatagtgaacaatggcttaaattttgtaaatctaggacatgaagtcaatgaaaattttatcatcaactcctctccttttatcttaaaattcagactgcaatggaacggacatgattttctgcaagctgaagtagtttttctacttaattagacgttctgttgggggcttatacgttttcaaattttaaaaaatgcaccaattcagttatagttatagttatagcccactagaatggtcttgtctgcattttatttatttaattgtcaagtttcttttctgtttcgcaatatattgaaagctcatcacgtactttgtattacagtaggtccataaagtctacttttttggctggcaatatcttcatcattccgttggaaaaggaaaacccaatctactttaacattgtgtttgtggatttcaattcacaggtgcctggaaagtctgcccaagattgctttgataa

SEQ ID NO: 66652 - DNA, 457 bp, Cucumis sativus
  Intron number 1 from transcript Cucsa.139110.1 (locus Cucs a.139110) derived from phytozome v7.0 (chr-ID scaffold0106 6; pos 324117 to 324573)
tgtgtctcttgcacgctctcaataacctatttcaggtatcttttcgtcctcaaccatttgactgtgaaagcttccgaactgttttcttgttgcttcatattgaaatatcgttgtatcttgaaattgattatttggtgtgtaattaagatgctgattaacggaattatactgtttctcatcattaagaaagaactatggcgcataggattccagaattagaagttacctctcactgcttcacgatttattgcattctttatgtattttgatgtcttcttatcattatatcttctatttgcaccataaatgtctttcataacagaaaaatatgcatttactcgagcgaacttatcctctcactgtttcacgatttattgccttctttgtgtattttaaaagtcttcttatcagtatatcttccatttccaccataaatgtctttaataacaggaaaagg

SEQ ID NO: 66653 - DNA, 663 bp, Cucumis sativus
  Intron number 1 from transcript Cucsa.131930.1 (locus Cucs a.131930) derived from phytozome v7.0 (chr-ID scaffold0103 7; pos 50824 to 51486 reverse strand)
gcaaagcgctgtgctaaaggtaaagcttttcgttttttttttcttcttttgctgggatttttttataaggggaaaaaagtaatgggtgtgtatggtttttacttgctttgctttgatgataccacaatgtgatgtatttgatgagttgggttgttgaaaatagtgactgattgatcataataatgaggttaagatttggttttcttgatgatgtcttttggctgtttgatgatatttcctaaagagggattttgttccttaagcttcaaggatggattgaaaataaaaggattgttctttttttaatatgattgaggggccgtttccaacttccctccaccagctcttcttttttagttaatgatttaagttaaaagccaaagagagggatgggatttgatccatgcgcatgttgattggacatatgctgtatttttttttttttactgatttgattgttttgatcgattgggtggtggaccatgatccactttcagattatgtgccatgaaaataagtgaattctgcgatggttgtgtttctaataatttctctttaagaatttagcttttatcatcagtattctgaagctaatgggtaaggattcttcttcttttctgatggacagagggtgtgatagcaggagcaaaagcagctgctatt

SEQ ID NO: 66654 - DNA, 828 bp, Cucumis sativus
  Intron number 2 from transcript Cucsa.129030.1 (locus Cucs a.129030) derived from phytozome v7.0 (chr-ID scaffold0102 8; pos 128053 to 128880 reverse strand)
tgttaacttcgctgcatttaccaactcttttacaggtactattttcgattttttttgtgtataagagtgaaatttagtatcagtttggcaatgttcttggttttaagaaatactttttaaagttattgaaagtggtattcggtaattatttcgttttttgtttctcgttatttagaaagaacctgaaaggatataaacaagaaataagaaacaaaaacatttagaaagaacctgaaaggatataaacaagaaataagaaacaaaaacattgagcatttagaaaagaaaaactatttttcttagtttcaagtttaacaaacatatatgctagtttgctaaaatgaacatagcttaaggatatataattgacaggtatgtactatatctgttttaagtttaagattttctacttgtagtatataccaaaaacacataaaaagattttctattattcatgtttgttacgaaaccctgttttttgtttttgaaaaactaattttctttttaataaaaaagtgtgtttagtaacagattttttttttttttttttctaaacaagaagttaacttgattttaaaacaaggaaggaaaattgaaaatgaaaaaaaaagaaaaaaaatttaaaagatacattttgttttgaaaacaccaaacaaaatccattatcaaacctatatggtttttgtttttaatgaacaaaaatttaaaaagtagaaaaaattgaaaggtttagcaatcggggtctcatttatttaattaatttatgtattcatggttggttcaaattttacaggtccgattcctagcttcaaaaattgctcagagttg

SEQ ID NO: 66655 - DNA, 984 bp, Cucumis sativus
  Intron number 2 from transcript Cucsa.137750.1 (locus Cucs a.137750) derived from phytozome v7.0 (chr-ID scaffold0105 3; pos 478208 to 479191 reverse strand)
tcggaagctgatttgcaagtggagcttgacagaaggtacttgctaggaacctcatgatctgacattttatctgtggctgcttgtgtaaataaaaggtcgaaatattggtagcgttcttggcatttctatggagctaatgttacttgttcattggttacatggagaatgatatttcttatcaatagaaattaaaataccgaatgatattcatgaaaaaccaattattggattcttttattaatctgttcagacatcatcatacaaaaatactatcatatataagatgagtatcttaatgtgttgaaatcttttgggataccagctagaagttggtgaagtgggttattatagcccactccatgtatagggcaccaacaacaatagtggtgttttactgtttataacttacaattgaggatagctatttcaaaattctctttgctgcattatttttatttactattttctacggtattcactatttttctctcatcctttattttcttctttactattttctactcaaacaaaaatagtttacactccaaatacaaatgtgatagcttagactaaaacaatctgcactccaaacatcaactatgatagcccattaattataataaccacatactataataactaactcaacgcccaaacaccttgtaaatgtattttcttgattctagttagactgatttttttccctacatttccacaaaaatcctacactcgagatatcttttgatattgacatttccatctttgttcgtcttttttttttgttgttgattatggctggtagaaaaggttcaattggtttatttgtccaaaaagttagaaagttaccatgtttctaagttttatttattttacaagtgataatttgatgcattccttagcaatgaattttctttcagcattaactgatagaatatatttaactatccaggagaccaggtcagagtagaattaccactccaagaa

SEQ ID NO: 66656 - DNA, 510 bp, Cucumis sativus
  Intron number 1 from transcript Cucsa.115540.1 (locus Cucs a.115540) derived from phytozome v7.0 (chr-ID scaffold0098 8; pos 168154 to 168663 reverse strand)
gtttggcagctcaaagcctaaaaagcaaagccgaagtatgttttcttttcaagaagatttttaaaaactataggtttatgatgattaaaacaacgtttcttaaacttcttcttttcatttttaactaaaaaaaaacaacttttttaccagaaggtttgaaagtctagcattaatttaatacaagagaacaaaaccatttattatgtccatgaggtaacaaataccaatatgatatatcttgttatcagttattttttgtttcctgacatttttcaagccttctgtttgatatatactttgagaccttgttttgttttagcctcaataaataaaattagtagttagtgttaatatatatgaaaacttttttctatcaaattcggtaaaagaataatagttttccccttcaagaaaaaataccatgtgtgatcaatgagtctgagttatttatatgatattaggctgaccatttgcattataatatatgtgtgtgtataaaaggttgtagca

SEQ ID NO: 66657 - DNA, 424 bp, Cucumis sativus
  Intron number 1 from transcript Cucsa.078040.1 (locus Cucs a.078040) derived from phytozome v7.0 (chr-ID scaffold0079 3; pos 240722 to 241145)
gtggcggatcggctgcgctcaaggttactccctccttctgggcttttatttcttgcttttttgattttatacaattttttggtacttgaattatgttaaatttgtgcctgctcatttaatccgtttcgatcttttttctggttgagttattatggatttccctctctatcttgcggaatctcaaatggagttttatttattttctattctattggtggacgaaacattccacgaacccatttcaatatttctctttgaacagtgtttgactagatcctaatacactccctcaaatacgacggattagaagtcatgagtttgtttctacccatttgaaaaaaaatatttatttatttatttagttaagaaaccaattgttccgtatactggatcgttacttgatctgtctttatcttcctgcagc

SEQ ID NO: 66658 - DNA, 378 bp, Cucumis sativus
  Intron number 2 from transcript Cucsa.090060.1 (locus Cucs a.090060) derived from phytozome v7.0 (chr-ID scaffold0089 4; pos 1470492 to 1470869)
agtcttgccttggcgataacccctacgttcgcgtacgcttgttcttggttcttctatattatttaatgttagtaccccttacgccatgagttactttgattttactcttgaattacgttcagaatttcacaattaatcacttgaatgtttgaataagtccttgaattgtacggtccttgctctgtgataatactatgaactagtgtaatgggtaaaaaacactaatctatattgtttttgtgtatgggggggggggatggatggcaatgaatgtatattggaattttgttttcttttgcaattaatgtcttattatttgattaaggcataacttttgattcattggatgtaatatttgactgcagacgaaagctgatt

SEQ ID NO: 66659 - DNA, 414 bp, Cucumis sativus
  Intron number 1 from transcript Cucsa.074770.1 (locus Cucs a.074770) derived from phytozome v7.0 (chr-ID scaffold0078 5; pos 647326 to 647739)
cgtgtaagtagtttttacctacaaatttatcagcaaatctaactaagagtttacttgtcacaagactgattctggtatggctaccaaagttgtcttaatattaatattgttcttggttgcgctttcgggttcaagctatatcaaacatggccatgaagatttgattaagagattagtgtttttttttagcaacgcttgtgttggctgaatgagatgtttctcttaataccatgaaagtatccattttgattgtgttgtggtgaagaagatcaatgtttttcctcaaaatcaaccaaaacctgtagaacgtactattggttttatgttttgtcaattgaaggaaaaatttgcatagttaaattcttataagaagtactgacatggtttataacgacaggaaacaagggagcagct

SEQ ID NO: 66660 - DNA, 709 bp, Cucumis sativus
  Intron number 1 from transcript Cucsa.001820.1 (locus Cucs a.001820) derived from phytozome v7.0 (chr-ID scaffold0002 3; pos 37997 to 38705)
cttcttcgatcactttcctttattattagaggcaggtgcaatactatgggggccatccccattcagattttgcaatagttggttgtagataaaagagtgcaacaaggttattgaggaagtcttgaaaatcgccctcccagacattgggtgggctggtttcattcttcatgacgtaaagtgaaatttgctgttaaaaattggcatgctactcatttgattgatacaaaagcagaaagaggaaaggcttttgagagagttagaaataattgatggatttgcagaaagtgttggtctgaatgaagtggaattggctcacaagtcagctatacaaacaaagttgctttgtatttacagaaccgaagaaataaattttatacagaaaaataaactaaattggcttgctataggagatgaaaatacgggcttttttcacagattccttaatgcaaaaaaaaggaaaaacctaatcacaaaattggtggatgagcaaggggtgataacgaagtcttttctcgacattgaaagggtgatattgtggttctatgaagacctgtataaaaaaattctaggagtcagatatcttccttttattgcagattggccttgtgtctctgtttctcaaaaattttcactaatcaacagtttctctgcggtggagattttcaaggcaattaaagcattaggaggcaatataaagcacccagaccgg

SEQ ID NO: 66661 - DNA, 753 bp, Cucumis sativus
  Intron number 1 from transcript Cucsa.101470.1 (locus Cucs a.101470) derived from phytozome v7.0 (chr-ID scaffold0092 7; pos 727997 to 728749)
tcctccctcgattaggttaccactttgacttccaggtttctcttccgtacacctttccttaatcctgattttgccggttattgtcttttttctgtaatcttgtattacaattgttatggccgtagttttaactcacataacatgttgtgtaatgatgccgtttggtagtacttggattagttgctgttatagtggtgattgctggcactttttttttttttttttttttcttctcttttggttttgtttttgttcttgctggcatgtcgttcttcaacttcgttatgctgaaatttgtgttaactctgttatggaaatcgattgttcccactgggagctgaaggattcaattatttggttttagctggactttctaagcgttgcttttgaatatcttgagatttaattttttgaaagtatcttgatatcatgatatcaattatttgtgatagtgaaatttcatgaaatggagttgttctaaaggtatagttgttcatgcaaaaatgtttggagattccactattgatgtgagtttgtgtggttgtctttaatagttagttagttgctgtttacccagcgtatagggagaggtttaatctcatctcacggtgttatcatcattctactgttactctcaccatcaccgtgctgtttctctctctctctctctcctctctttatctcatagtcagcatttggtttgttcactttctaacatttggctgtggccccttctctgcattgggaatcagg

SEQ ID NO: 66662 - DNA, 659 bp, Cucumis sativus
  Intron number 1 from transcript Cucsa.105760.1 (locus Cucs a.105760) derived from phytozome v7.0 (chr-ID scaffold0092 9; pos 272350 to 273008)
cctcctcatcctccacatcatcttctgctctccctgtgagctgcgcttctttgatcttcatttcttgcgtttcgttgcagaagaatttcaatttgtcagtcttcaaagtgatttctgttgtttgggataattactgtggcttattgttggtgttttctagggcagaatttagggtttccttggcaacaagttagcctagctttcaaattctacaatgctcttatgtcatttcattggtttgcattttcctttgagtgtgaaaattgaattattaataactaaattccaaaaacgaaaacaagatttctaatagcaacaaatttagaggtgggaggggtgtttacagggttaattttcaaaaactaaaaataaagaacaacatgtttatcaaatgggacctttgaaattgaattttcttttaatcgctttcctttatcgtgattggttcaaagggattgaatgaaatgaaatttaaacgaatcaaatttctgaagtattcaccatcattattggttgttgttttcttgctttcttttgattatcgattttataacacactcgataaacaataacgatcctacagattggattttttgttctgaacgaatagtttgtgttgcttaggttgagaggaagcctcttgtttgcgtacttggagt

SEQ ID NO: 66663 - DNA, 651 bp, Cucumis sativus
  Intron number 1 from transcript Cucsa.109650.1 (locus Cucs a.109650) derived from phytozome v7.0 (chr-ID scaffold0093 4; pos 569178 to 569828)
agagggagcttcttgttaaggtcaagcaaactcaggttggtgagaaatttctgttcttctcttcaagtaatgtaaagctgcagcattctttattcaaggggcaatttaattttcttctcaagttgcttcctaattactgttttgttcatgtaagattggctgtaggctgtgttttaataatcgggggattggtattgtcgatttagtggttagtgggactggcggtgagaatcttggatgattggttaggaaacgctactgacatgtgttgagaatggcttgtggacgggaatgtttttggtgtggtgaattagcaatattaggtatctaactgtcaacttatctgtaaaccttgcattctatttttaattttagctatctgaagttttgttggactattgttgtgtagttttctcttgctgccttatctgaaatttcattggtcttcatgaatgctatccctatttgttctagaaacaaaaaagagagagaaaagaaaggacggaacattcgaagaagttatatacctaaaacagtgccgagtaataactttcattagaagttttcaggtgaatattgttgctctgaagttaaattgtttgtttttttgtttcagaaacctgacttggcgggcttagctgaatttctgaa

SEQ ID NO: 66664 - DNA, 689 bp, Cucumis sativus
  Intron number 1 from transcript Cucsa.180700.1 (locus Cucs a.180700) derived from phytozome v7.0 (chr-ID scaffold0123 6; pos 250227 to 250915 reverse strand)
gtggtggaaactgttgaagtcaaggagatctagaagtaaatctattttcgctatgcagttcttctgattttaagttctaaaaccctttgttttgtggtttctctgtcttttactttttacataatggtaccaagatgaaatgaaaaatttaattgttatctttggtttttttcatttgactactaagcctaaactcaaagcatatgcatattatattgaataagctcatttatttcaaagtagagaataatgaatgatatgatgatcacaacctcagataattaataaataaggtagacttttttctatggaattttgattttggttttaatattgttatttccttcattttgggctcttctgaaaagtgttattcaatggaaatatgtcatataataaaggacatttaatttgtagcttagactagggcatttctctatacatcttctataagggggagttatctcatccttaccttgtttggtaatatcattttcatcctcttatttttggaaaaggaagcatatacggtggtattccaaaatccaaacttcatattgtttcaagtgtttggattaagtcccttttagatattcatgtatgtaatccaaatgtgtcacatccccaacatctttcatttgccaaataagtaattggagaactttaatttgtgcaggcactccatctcc

SEQ ID NO: 66665 - DNA, 264 bp, Cucumis sativus
  Intron number 1 from transcript Cucsa.105330.1 (locus Cucs a.105330) derived from phytozome v7.0 (chr-ID scaffold0092 9; pos 69454 to 69717)
cccactaccacaatcgcattattggggttttcagggtaatgatacgcttcttcttttgttcttattagtagtttttttgttctattactttgattcttcaaataataagtgggttttgtttgattctgttgccccttttgttatttcatcagtcttcgtgccctttttgtattcaatctcttgtttgatcattctgtttggttggcgtttgtgatttttggaagattaagaactgtgcttctgtttgtctgttgttctcagctg

SEQ ID NO: 66666 - DNA, 566 bp, Cucumis sativus
  Intron number 1 from transcript Cucsa.120370.1 (locus Cucs a.120370) derived from phytozome v7.0 (chr-ID scaffold0099 8; pos 2463639 to 2464204)
aagctttagcttccttgttatctgactcagatcgagtaagttttcttctagctcaattccttgatcttttgattcgagtgatgctttctctcgagcactattatgtgtatatttctcctatcattggcaaactatatcagctgggatccaatgattatcgctgaagttgcgtgccatagatgcaacatcgatgttcttttctttttttcccatttattttcaaatttggagttgggactatgtaaaacacctggggattgttgaattcgtagtttgaagcaggctgtttatgattatttgaatgaattcatcaaattaagtggggtagaaatcattgagaacacttctaagcgtcataaaatggggtcatatactaggaaacatcaagctttatgtgttatagaattgacaaatctatccatgtatgggttataatcatattaccagttccgtcttcataaatacataccatacgagtccttcacgtctatcccaagtcatgtaacgggagaatgataagaaaataactgcattgaaaggtttacattagattatgtttgttgcag

SEQ ID NO: 66667 - DNA, 343 bp, Cucumis sativus
  Intron number 2 from transcript Cucsa.185520.3 (locus Cucs a.185520) derived from phytozome v7.0 (chr-ID scaffold0127 4; pos 998559 to 998901)
tggaattgctactgcttgcaagaaaaatattgaaggtctctcaaacaactgttctattttgttcttaaacattataccactagtctataattaaattaatttaagtattgaaattgggttgttgacagattttctgattgagaaatgtggattcccaaaaacccaagctcccattcttcgaacagagctttttaaaacatacggcagtactctggctggtttgcgagtaattctcatcatcattgatcaaatttaaatcttcattaacgaaacaagcataactctaaattgtgtgctgattttctttatttgtgtgtttgatcctgtgtacaggcattgggat

SEQ ID NO: 66668 - DNA, 708 bp, Cucumis sativus
  Intron number 2 from transcript Cucsa.048900.1 (locus Cucs a.048900) derived from phytozome v7.0 (chr-ID scaffold0054 2; pos 3512431 to 3513138 reverse strand)
gcttctaccattatctcccctcaacaaaacctcaggtccactcatacctagtccataactcattatttcttaaccgctcttaacctacgttgtcgaactaacctattacacaaatctattcttattttttactcaagcggtatcatcatattcttccaactcactggattttctcaaattctaactaccctcagtcttcgaatttttgtcatctttttcgtcatacagatgcatgctcgtgaattctggatagtcgattcgtggatttacaattggaagcctaaatactgttcttggtgttcctaaaatatgaaatgatttctactcgttcttttgtgtactgtcaaagttatgcataccccattaagcaaaaattactctacattacttgtttaattaggatacaaatgcatgttaatacaaatttccgttcagtaaattttgcattcgcttatttttcctccatttttaagaaacgagttccataaacctccctaaacaataacgtttccataattgattttttatttcttacccctgacttcacaagcaaatgtttctatttgatagttaaaagacagattgaggtatcagaaacgccataagaccgaccctcaaatgactctgctttctctttacgggaatcaaagatacaactgtttgtactatttcctgacttgatgtcgtccgtgtaatttgtgtaacagg

SEQ ID NO: 66669 - DNA, 894 bp, Cucumis sativus
  Intron number 1 from transcript Cucsa.009140.1 (locus Cucs a.009140) derived from phytozome v7.0 (chr-ID scaffold0012 3; pos 75281 to 76174)
gcgatccctacgtcgtcatcacctccgctaaccaggttttgttcttccctttcccatctactccctatttctctatgtgttttatctgtgaaaaccattttcattccgatctttcctctgaattttattccaattgttttgtccaacttttaggattttcgattttgtgtttcaatttcttcttgaaactcgctgattcaagttcctctttccaaatatttgatttattttattgttcttacgtttcttccttttggattttggattcttttgagagattctttggaattgttagtctaatttgtctgtttttaggtttttctgtttggatttctgattcgagtttctctctactgcttcattataaatatttgttgaatttcccccctacctttttttttttggttctctattcggattgtccctcgagaaactttatgcaaacggctcaatttccaactgcgatatctcctagaacttcttgcaattattatttgattttcctgtttttaagtttctggatcttggattgttctcagagcttcattggaattattactctaatttctccatttttaagattttctgttcgtatttcacttctgatacaagtttctccacacaactcacaaatatttgttgatttttttcccttttttgtttctctattcggatttccccttcacaaacgggttgaatttcaaccgtcgtatcccttagaacttgcaaatattggtcaaactcttccgcttttaggtttttatgttcgaaaactgctcaaattctgattgcaatttctccattggatggtcttggaattgttgatctgactcttcttggatccgaaatttttgtgcagaaattcaaatcacgcgtggtgaaaaaaaattgcaa

SEQ ID NO: 66670 - DNA, 659 bp, Cucumis sativus
  Intron number 1 from transcript Cucsa.012500.1 (locus Cucs a.012500) derived from phytozome v7.0 (chr-ID scaffold0016 4; pos 62404 to 63062)
gcagcatcatccacctaaaatttaacgcaggtgaggatctgtatcaaaaccatcatttcaatttttttcgattttggttcagttatacttttaaatattctatattttaacatttcgacttttttcttctgaccaaaattacctttgagaaatcaatattatttatttattatttcaaaaagctatttaagaaacactactcttaccttctaaatctttttcttttattatctacttctctacccatgttttaaaaatcaagggagctagtttctagaaacaaaaataaaatgaattttaaaagtttgcttttgtttcacgaatttggttaataattcaaacttttttaataaaaagattatcaagcctaaaatccaaacgcaagaacaaaaggccaaataagtcttatcaaatcgagcctaaaaggttctgggtttgttacgcaacctccttaacatcatattcttcctcactttatatcaatacaattgatgcgtcaggttttatatgtcagttgtacatatacacctttattgtattttgcgagctcctgggatttacttagcaacaattcttactctctttttgtttttttttttccttgttttggatgaaattacttaggaaaaccagaagaggtgaaagagaggctagctatt

SEQ ID NO: 66671 - DNA, 801 bp, Cucumis sativus
  Intron number 1 from transcript Cucsa.106790.1 (locus Cucs a.106790) derived from phytozome v7.0 (chr-ID scaffold0093 0; pos 296183 to 296983)
tcgatcatcgtttccctcgggctactgccgtccaggtattattattgtattctattgttcggatcaattcaccttctattcaaatcattcatttggtatttttagaatttagtgttggttacttatggattgataatattgaccttgtttttggaaattactattccttcttaattccgttaggtattaggatgtactgtagttgtttttcgatggatgagatgatattatagcggaatggaatctgtgttgtttttgttttggattgtgaaattctatttaaggcttttaatttcccattttattgcctgttccttctgtttgtttgcttagaaactgtgaatcgtcacatggaaacatgaaaaaaaggggaatcacgagctgagttgggttctgcttttttctgctttttctgcttttggctttcttcttcccttatgattattagatttttaaggattgggaagtaccaagattagtgttattgggtttggatgactgtgtcaggaagcaatgtgctgctgtagccccaatgttatttgtctttttgtaataacactaggcactttttaaccagaaaaaagcatctctttctctccattctctttatcttttcaaaaaagagagagagagaggtgttgttttttaaatgcattctatatagaggaagagtattgctttttttataaagattccaacaaatgaggctctcatttgcccaagcacttccccactgttttgtactgatgtcattatcagtttcctctttttctctttgtttgattactagcagaaaagaag

SEQ ID NO: 66672 - DNA, 645 bp, Cucumis sativus
  Intron number 2 from transcript Cucsa.133160.1 (locus Cucs a.133160) derived from phytozome v7.0 (chr-ID scaffold0103 7; pos 931009 to 931653 reverse strand)
agattagaactgcaaaggtattgattgcatcccaggaattgggtatttcatgatttggtcttcgttttcttttttacttcaaaattttgacgcgtctgcttaatttctctgatggattttgagtatcaatgtgatattggattagagtttgtcttcgtgaatgcttgaaatgttgctaaagttctcattttggttgtttcttgataccattttctttttggatttaatttttctactttcagaggcaagtggatctaaacatgatagtatctttatccatataatttccccaaaatattgactaatttgatttaaattcctgttttgttcttcagcacaatgtatttactcttttgtggtgtttggaacttgggagactttagtcagtgaagcgattcatcaatattttctgtcttgtagaatgtgcctgcaaccaaatgtttattagagttagtgaatttgggatgacttttgagggtaacgcttttaagggaaatttctttctgcataatcatctcaaagtgccttccaaggggaactatcaaaatcacttttgaataccatggaaattggctaaacacacttctggttgttataatagtcgtatttaacttacctttgatggttactttttataggaaacaa

SEQ ID NO: 66673 - DNA, 870 bp, Cucumis sativus; identical to SEQ ID NO: 62434
  Intron number 1 from transcript Cucsa.078910.1 (locus Cucs a.078910) derived from phytozome v7.0 (chr-ID scaffold0079 3; pos 1403359 to 1404228 reverse strand)

SEQ ID NO: 66674 - DNA, 590 bp, Cucumis sativus
  Intron number 2 from transcript Cucsa.176060.1 (locus Cucs a.176060) derived from phytozome v7.0 (chr-ID scaffold0122 5; pos 446738 to 447327 reverse strand)
tttctctgggccaaatctgcttccattctcaataggtaactaatcggagattgcctcttgacttgcctgttataaactatctcttcaatttgaatatcaacgaagaacggtgaactgatatataggtttgagaatgcatgatctttaatagataagaggcatttccctattggatttgtcaatggtcttgaataatgattaggtcctggttcaaattctctaatttttcaactacttaatctcttaatttgtccttgctttcttttacatttgacgaacattttgggatttctacttccgtgagtttcattcacttagtaatactacgagatatgtaaatgcattcggtagttttcaagcattctaaaacttaccaatttaaaatatagtatttagtttttgatccactgctgtctcctgggttcagaagtgaaaattgttcttgaatttatatctttccaggcttccttagttgcatgctaatgaagtgtagcttaacttctaagtactttgattaagattacttctgactctgccacttttcttcctgaacagaccagcgccgcctcttcctgagttgtatctctcag

SEQ ID NO: 66675 - DNA, 827 bp, Cucumis sativus
  Intron number 1 from transcript Cucsa.090660.1 (locus Cucs a.090660) derived from phytozome v7.0 (chr-ID scaffold0089 4; pos 1858190 to 1859016 reverse strand)
ctcctccattgtcttggcgtctattcatcttaagggtaaccggtagttgtttgaattattagtttctaactatatatacttgtaggtgtgttgttttatggtgcatgcttatgggttggaattattggataaacataacgacgattcattttaaacttaattgataatgaaatgagtaattcctaaacattatgagtttggtttctccatttttttaatatgagatcgtcagtatgttctgaagatgttttttcagtttaccattattcttaggagtcaattttgtttttaaccaaatatttatttgaattttattgactcttttaccatgttagaaaagagaaatttccaactcaaacttaattgctaatagtggaataagtgacttgtgtatatcatgagatctcctcatcttttcaatgtaaggttctggatagacatgcaaagtttaggtttaatagtatattttatcacttgatttgtagatatttcgtttgtgatgacaatatagagatttcaaatatatacatgaaccttattttgttagtatttgaggtggaggagagttaacattttaactttacttcttgtttggttcaaaaagtttttaaatgactaactgtggcccatgacttattaacatcaattctatgactccttgttaacttgcatgataggtccctctaccaaacaatgtatcaaactaaacaactccggactaaacaatttcactctatgttcgattatcataaattgttttaattactttcatcttcacctctttatgaataggtactattttccacaactttgacattgatccaaca

SEQ ID NO: 66676 - DNA, 565 bp, Cucumis sativus
  Intron number 2 from transcript Cucsa.107140.1 (locus Cucs a.107140) derived from phytozome v7.0 (chr-ID scaffold0093 0; pos 601719 to 602283 reverse strand)
tggggttttcaccttccgttggggttgcaaggcaggtaatgctttgctttttcttttttaatattcttgaatatcccgagagaggaaaatgggaaattggattgatataaatgctggttttaaaatttgaagatttagaagattgctgaagctgtttgaatattgaaaagcacagatttgatggctatcttgtaaggttataaatctttaaaatatgtataaacttcacactctgtcagtgtcaactatttaaaaacataaatattgtacaaaaaaaaaaagccaccaaaacaataatattgacagaattgacactactttcattttttctcaatgaaacttgtttccataaaaaaaaaaaaacacaaatattttaccttttctttttagattgttgtatcctcaaacgttagaccttggaccacaaatctatttattaatttagttttttaaagcttttcttcatgttatggataattacatttaagagttttatgtgatagaaacgatatcaatcttctatcatgcagaggtaagggttctagagctcttttgaaaaggtaca

SEQ ID NO: 66677 - DNA, 940 bp, Cucumis sativus
  Intron number 1 from transcript Cucsa.107140.1 (locus Cucs a.107140) derived from phytozome v7.0 (chr-ID scaffold0093 0; pos 602863 to 603802 reverse strand)
tcgccagctggttgcgggtgtgtgttctaattaaagttttcggtattttttaaggtttctggatacccattgaagttttggcataattattggtttaccaatctactctgtatcgttcctattttatcgggtgtccccgaaggttgctcagcgggagtaaggttgtctcgagttgatttctaacccttcaatttttgttttctacttatattggtgttgatttggaagttttggagtggttatggttaaagccacaatttgggtgagttgtttggaagtaggtcctaaaaattgaacttaatttagctcatgctgtagagtttgattcgaagttttgttggtggttagttttggattatttactgaacttcaattcgagttagtgggtgttgtgatgactaccttatagccggttagatatgtatatctactatttgaaaagtatacatgatttttgtcatgcttaatgttgctgtctgttctatgatttttgcgctgctcatacatgcctcggtgttggaaatcttctatcctattttggtatgctggtcatgtacgtttgcttgtctgtctgatgtaaatgcacacgacacacgagttaaggggatatctatatgtgagttcttaaacgtgatactttttccataaagttcaatttaaagtcgaatttatatatgtgtgtgtgtgtgtgtgttagttcttaatatgggtttgtttctttctctccttgttattataatgctgatgatctaaaggaacgaacacccttttctcaaaaaaagaataagatatcgctttctaagtctgggaaccatgagaatttggttcattccaggctgaagagtattaaattttcatccatccttggattgaatttacttgtttttattgggatttatgattcgttttttatgttactctaggatattctaagggtttg

SEQ ID NO: 66678 - DNA, 987 bp, Cucumis sativus
  Intron number 1 from transcript Cucsa.019270.1 (locus Cucs a.019270) derived from phytozome v7.0 (chr-ID scaffold0027 6; pos 75443 to 76429)
atcaaagccttcgcttctgtaacatctctcacctttccttttttattcttttgctctttgttttgtgtaacccatttgccttatgcctctttattttgctcttctttgatgatttttttctgggtcgtccttattttatcctttttgtgctttctggtgctttaggactctggggctcttcttttgagatttggcttttaaatttcgaatttggaatttctgggttgcggttatttgtttggagacagagggaaattgactgttgtattgattttctgaatgcctttattgctgttttaatctttcaaatgggttgttgttggtttgatctcttggattttgatactcacttcattaagttttatgtgtcttccttttttcatattgctctgcttcttttggtaggcattagagagtagaggatcattttgggtagcaatagtgagttgaatttaatttttgaactgtatttttgagctctctcaactcaattctagttcatgggttgttgtaactccacttttcaacttagaagcttgtaatttctactgggcaagtatactattaccattattctttgtttttttttccttcctatacaaaaaggagaaaaaatcctaaaacacaagtacttaggaatttgagatttgaagaatttaattttgtcaaccttcttaatggggatgaataatttcagaattgcatatgacgttgttacttaattttgatttttggtggagaattggcaatcagaatctttggaagctatcaaaattgcagtttctccaatattgttgctgcaatattggtttgttatttttacaagttattgaaagcactttgcccctctccatggctctctaaatcaaatagataactcctatcattatttttttcatttttatttgcataatttgaatgtttctcgtttaactcattttccatatttcagaattccatactatcagacgcaaagaatagattgcg

SEQ ID NO: 66679 - DNA, 599 bp, Cucumis sativus
  Intron number 2 from transcript Cucsa.095470.1 (locus Cucs a.095470) derived from phytozome v7.0 (chr-ID scaffold0091 9; pos 1323374 to 1323972 reverse strand)
ccccctctggtcaaccgtcttggagctactacaaggtaaactcgtgcctcagttttattagtatagtcttattaaacttattaatagatgttgctgaaaatgagctggtggaagcataagttaaaaggataaaattctacctttaaggatgaagttgaaataaaatccaaattctgtggatgaaatcataacattttgaatttagaggagttttgaacggattattattgtttgaaatacagatccaaaatgtaactttctcccccaaaaaaatgttattttgtgtagttcatatgatttactaatttctctctttttaaccgatgaaaaaaagggttgaacaaaaaactgaattgaacatgagaatcatgcattaattatctgatagaattttttgtatttttggaaatattttagtaatctttatatgggtagtaagaagatgcacgaatatgcatgactctctccagaggtgacatattaaaggaacacaaaagctaacctcgacccagttttaggttacatcattggaaagaacacacaatttttttttaaaatttctatatgaatgaaaaatgatgtggggatttgggcaggta

SEQ ID NO: 66680 - DNA, 836 bp, Cucumis sativus
  Intron number 1 from transcript Cucsa.066530.1 (locus Cucs a.066530) derived from phytozome v7.0 (chr-ID scaffold0069 6; pos 986254 to 987089 reverse strand)
aagggaactctaggcggcttgatccagttacggaggtgagtttaattattctttttcttttttaaattgatatcttgatttttagaaaaggaggcttttaagaattcctcatagtatttcataatccaggagcttcttgtttgggctatcttggatttggagattgttgattgctttatttctgtcatcccagattgtccagcaggtgatagcataaatatgttgatgagatcctctttagagcatgttgagctgagcatgccaacggtctttgaagctgttgtagtagtcggactggattaggggagtttttgcaatgatcgatgctccaaatatgtctagctttgatgcaattgattaaggcatggtcagaagataatgtattaaccctaaaataatgtcatgaatagctctccaacaagaaaaaaaaaaaaaaagaattttccttgaaactatgaggttttagaaggatttccaggcttcctacctccattgtgtttgtggtagaaatacaatataatatcttttaaaactgtactaaagtacccaactgcgatattgttttttttcatcctcgtctttcataagaaacgaggaagcttccggttttatttttatataaattttatcatctactccttcgaagaggcaaaatgaaataaaaaatgtaatcaaagatgattaagactaaaatatttcaattagaagtttccaaccaatcgtttctttatatagtatattactgataactttttttaatccctttaaattgccatattgattttctcaactctacaaatcctaaaccaccaaaacattatcagagggttagagaa

SEQ ID NO: 66681 - DNA, 752 bp, Cucumis sativus
  Intron number 1 from transcript Cucsa.103700.1 (locus Cucs a.103700) derived from phytozome v7.0 (chr-ID scaffold0092 7; pos 2442751 to 2443502 reverse strand)
tctcaattgatattgaagggtgtgataaaaatggtaaagaatgtgaatatatggtatctgaaaattatatattctcgaaaggtgggtattctagaactgttaacgtggaatttgtactacgaatgtgcaaccatacgaaacacaggataagaagagaattaaacggtagaaaacgctcgcttcaatatttataaagatacaacaattacagatatcaaatataacccatcatacgatgactacctaccgattcaacagtcaattgaacacaagaactactaacttaagcagtagacgatatccaatgtaaaacgatcaaattcggggaaaagaagttgaaggaaaacggactaacttgcacaaccccaaaagttaggaacaaaaacaaaacacccaaagccagaaatcattaaaaaaaagaaaaaaagaactataattcgcactccaacagaagttcccaacataaatcttgataaatagaggttcttatgaatgaaaccgaaacaagtaaacaaaaaaaaaagaaactgaaagatagaaattgatggattggaagcaaggcaaggaaaagatgcgaatctgaataaaaaaatgagagcaaagcgattcagatacgaaaaataaatttaacccaacaagaagaagaaataggattcaacaaaaatgtagaaaatataaaaattagatctgaatatagtatgaagaaaatggagtgcatacatagatcagcaagaagaagaagagagaagaga

SEQ ID NO: 66682 - DNA, 694 bp, Cucumis sativus
  Intron number 1 from transcript Cucsa.133490.1 (locus Cucs a.133490) derived from phytozome v7.0 (chr-ID scaffold0103 7; pos 1175784 to 1176477 reverse strand)
gcataattcatccgtgctttcatcctgaaggcaaggtattcagttcttgttcttctttgcactgccttcagtttcgagattgtaatgggattggtttgcagggggaaatgaacggtatcgttaaatcatttggcccaattcgagtggcttgtgatgtttgtgtgtttggctgtgtatttgagtagagcaggattgacagaataacgtagagtttagtgggttttgcgaaatttgactgccaagaagagaattctctagcttaaattcgagcttgtggttactggcgtgggagcttgtataatgaggagactgggtcacttatatttgttgtttctggcgttggttatttcacaaaacgaagtaaatttgattttgaatgaaagtttaccagtgtagaccaaaatgtcgtttgaactataatatgatggtgtttgagacatgaaaacggtgggacatacgtttcttatcgaaatgaaattggaagcaaaatcacttctacttctgctttccgaatgcttaaatttataagacaacaagaagtgtgaatatgtggtttttatttgggctattaggaatgacgatgaacgaacctacagaattggccttcatattagatttatttctctaagaattgctgaaatttgttgctgttgatttgtgcttaatctgtctgtgcagcctccacctgctacgt

SEQ ID NO: 66683 - DNA, 625 bp, Cucumis sativus
  Intron number 2 from transcript Cucsa.060070.1 (locus Cucs a.060070) derived from phytozome v7.0 (chr-ID scaffold0062 1; pos 621449 to 622073)
tcgttagggcttgggtattcttcgtctccgatcaggtttgtgaatttccgtttcaattgaattgttatctatctctttcaatttactattttggaagagtggtttcaaatggttaatttaattgggatttttgatatcatattgaaagtatttgccgattgtacgattctcactgcaatttaatgaattttgtttcttttgtaaaagaaaaaattgggaaaaaggtagagactgatatggggtggcagtcgttcttatactctccaactttttattctaaaaattgaatactaaaatttttagaaatgttaaaattgaacctcaaagttgccaaaggtacgatagcatcagtaacttcattttcccttttagaaatgtgacaaaaagtcataatattaaccaaattcgttccctcaaattcataacttctgacgtaggataggatgcttattagctagccatttatagaatttgtttactatcgttatacattattaaattcaatttaaatttaagtctagttttagaaatgatacttgagtgcattctacacatctacgtctttgttatgaacttatgtttgaatttgattttgttggtaatgatttagattgtggcttatttg

SEQ ID NO: 66684 - DNA, 578 bp, Cucumis sativus
  Intron number 1 from transcript Cucsa.114950.1 (locus Cucs a.114950) derived from phytozome v7.0 (chr-ID scaffold0096 8; pos 276034 to 276611 reverse strand)
ccggcgatctcggcaaaaacctttcctttcataaggtttctttttcgcttcttattttcttaattttttcttcatctttactcatcaaacgtatcttccatcttcatcttctcgttactctttcgtgtttagtttcccttttggagcttctaattgattttggattctattctctggttttgaatttctgttttgctctcatcttcttgctacactgtttaattaaacaatatgattgtttcgcagacgttatctgttcatagttttttctttaaaacttcttttgaggatttctgattttatttcatctttgttgctttaactttttttccctcccagctatgaagtatttgtaatgtttgaagcgaattaatcatcttctctgttactgaaatgtttgtttgatcatttctgaattctatctaagtttgtttttttgtcatatttttggactgtatagtgctgtaaaacatttcataatgatgtacttgcatgtgtttctgaattggtttaataacaactgtaatttcctttttactatagctggacctcagggacaaacgggctttggagaaggt

SEQ ID NO: 66685 - DNA, 941 bp, Cucumis sativus
  Intron number 2 from transcript Cucsa.142910.2 (locus Cucs a.142910) derived from phytozome v7.0 (chr-ID scaffold0107 9; pos 1148314 to 1149254)
tctgtcaagctcttggtgcttttcttgacaaaaaggtagtttcctttttcttgagtcatcataattgtagtcttttttactgactatttcatttttggtttttgaaaatttaatgcttgccatttctcttgggatggtttttactattcttgaatttttttttggtattctcagtcaaattttagaaacaaaaaagtgtctttaaaaactactttgattttgcatctctgattgaaatgaaacattgtagtttttatttgcaacaaacgagatgaaaaagggacactttgaaagcaacagtgctttacgtgctttagagatttttttttccctttttctggataagaaacaatttcattgaaaagatatttccaattgaaacttcggaaaatttttggttcaaatcaaactcttgaagtcaagaagaatgcatgctttcaaattcaattcatctttgtatgtattttttatccataattcaacttgtgcctatttaaatatacgtaaaattttctgcgtgtgcaagtgacttacaaatatatttgtactctctattcccagctgaaatgcttaccttagtaattgaatgactcttttattgttagcctcaacccacttcaagaacaattcttgagtttttggaggatgagatgcattatttttgttcatttgaatccttttctatttccagttttgatgaggaaaaagggatcttatatcatgttttgttagaacctgtgaatctattctcattatattatggcttttaaaatcatggtttcctttcttttaactttttctaggttttattgatcagcaaattaaataagtgtgctagttgcgattaatcatgattatacttggatctatttttacagcatgatcacttgcctaggttgatttcaggtggtcacctgccttcgccagccatcacaaggacc

SEQ ID NO: 66686 - DNA, 684 bp, Cucumis sativus
  Intron number 1 from transcript Cucsa.196520.1 (locus Cucs a.196520) derived from phytozome v7.0 (chr-ID scaffold0135 7; pos 149630 to 150313 reverse strand)
tgtttttcctcctctcacctacatcccaacaccaggtacatcaagatttctgttttcccttttcttccatcaaaaaattcttccaagttgtttttctcgcataatctgcctgttaagaaatcaacgattagagataaacgtaagtaacagagaatcgataaatagatttacatgattcattaactgttgtagctatgtccaaggaatagagagaatttacatggtgcactcctttaaattctaaggccaaaatcataaataacataagtaggatgtttcaatactaccgataaaggatggttgatgcaaatgggccatagggtaatgtatatattttgttcctatttactcttttgatgatttgtgttccttctaaaaagtcaaactcaagaataatagattgtaaagataaattattctttatctgacagaagaaaactaaactagaaaatctgctgccagtggtgatcctctccccatgtgatggaacaaaagattaagtttgtgaaaggaaaattttcttcgaacacacaagaaaaatatatgatcaagagaatgttagcatattcattgggatgaaattcatctatgttcatgaactattgtaaaaattgcagcatttttacctgcaaattcattttgatttcagttggaagattagcaagaagccaattgagccaagaa

SEQ ID NO: 66687 - DNA, 645 bp, Cucumis sativus
  Intron number 1 from transcript Cucsa.007240.1 (locus Cucs a.007240) derived from phytozome v7.0 (chr-ID scaffold0008 9; pos 97535 to 98179 reverse strand)
tactccctcctttcatccgtctccctcgccttctggtaactctctctttctttcattacttgtttttacccttttcttttctgggttcttttcatgtccctccttctgcttaatccttcatacgcttttcttttataatcaaatctctgatatgatcttatgaatttaatggaaatctttgttttttgtttcttcttctctctctcttttcttttttcttttagatcttgtggtatttgttctgatcatttgctaattctggtgttggcttattcaatgaagagccgatgccgaattcggaaatcttttattcttcctttttaattgtgattatcattaattgtttgcttcttttggttacgaagatctgaatcccgtctgagttcggtaacgagttttaagtgttcgtgagaaaacaatcatgtatttagaagcacggaacattgaacattaaacattaaacattaaacaaacggatctaatatccaacaagggtctttgcttttgcttttaaattctagtatttctagtatcttaaggtctatggatagtgaagggtttaggtttccaacaataattattgttactatgctttcagattcccggttgttcgggttcgagtaagtttccattcaaacaaggttc

SEQ ID NO: 66688 - DNA, 461 bp, Cucumis sativus
  Intron number 1 from transcript Cucsa.103390.2 (locus Cucs a.103390) derived from phytozome v7.0 (chr-ID scaffold0092 7; pos 2184323 to 2184783 reverse strand)
tcaacagaaatcttcagtttactctagaaatacaggtaaatgatagctctgtttctttgactttcattcagttttctgttattttgttccacacgtcttgaggtctgcttgagtggattgccattgtcttttattgataaatttacatcatgagatgtggtgttcaatctgtgggaatggctgagttgcatctttgtgagaagtggtggggtttgtttatttagctttcttcccaacattcatttttgaagcgtgttgaggataactctagtttccatgattcgtttctgggatcggtttggttttggtgaaagtttccagttcctagattagaaacttaaaggaaaataatcgctttaaaactgttgaagaatctgaagagggtccacaatatttaccaaaccttgtttgtttttaatagaaacatcagcagtgagtcgagggttttgttggtgtgcagg

SEQ ID NO: 66689 - DNA, 747 bp, Cucumis sativus
  Intron number 1 from transcript Cucsa.072740.1 (locus Cucs a.072740) derived from phytozome v7.0 (chr-ID scaffold0076 5; pos 244348 to 245094)
gaaggtattgtcccaaacttagaagagaacattcaatatatatcatatatatatatatatatattcctctttactacattatttgggattgttaagtaaggtgcattgtctaatttccactttgattctctttctgtggctctggagttagcttcatttacttgcattgcgaagtatatctactattatgttttattatttcattgttctattaatctagatttttttggatgttgcgggagatttgtgcatgggttttggggcattgttggtttctttagtttttcttttgtattcattcattttgctccatgaaagtttagtctttcatttacaattataaaaaaaaggacgttaggaatgaagttaaaaagaagaggcttgtataatggagtacggtaaagtaaccatttttttttaaaaaaattaagcctataaatatatcttcaactaatgttttaagaaattaagtcaagtttcgaaaactaagaaaaatagtttttaataaagcttgtttttgttttctaaatttggttaagaattcagtttttttttacccaaagaaaaatgaaaatcattatcagaaatggagagaaattaataattaccgaatggtgtggcaagttttaggatattgatcaacaatcttacgcataggtgatgtttactctaccatcttctatattgattttttttcgtaaaagggtaacattcgattctatgagcatgtatctagccttgcagttg

SEQ ID NO: 66690 - DNA, 969 bp, Cucumis sativus
  Intron number 1 from transcript Cucsa.112620.1 (locus Cucs a.112620) derived from phytozome v7.0 (chr-ID scaffold0095 3; pos 1117709 to 1118677 reverse strand)
tcaactaagatcctcttcttattatcacccgggaggtaggctgaacacaccttttaaaatatctatatatcattcatttccataacacatcctttcaaatgttcattttaagaagtcctcttgggttttttttctctttctaaatctttcccattagagttaaatttaaattctttccaatattgagttgcaaggttaagatgttcttggtttgtagctaaaaaaaaaaaaaaaagtctctaagaaataaccatttgatttttaattagtttgttcttttttccagttttcaaatctttacttcaatatcgaaacatttgtgaagagtaggaatgaacaaatcttatacacttaatttcaaaaataaaactacagcataccaataccatttgattactagttagtttttgaaaactaagtctataaatatcattaagatctactatgtattttgttgtatctaaatttcaagagtgtttttgaaaatcaaaaccaatttttgtgaaaactaaaaaaataaagtaattttttgaaacttatttcttaaaattggctgaaaattttagctgtttatatattatataacaaaaatgaaagccatgagtaattaattgtggaagaaaacaatttctaaaatcaaaatggttatactaatttatcaaataggactagataaacaaaagggtatttttccttcctctctcactcaagaatcaagatccatgaaaaacaaaaatgggatctttatttcactaacaaataattagaaagaaaaattagggctaagaagatgaagtatataaaaagaatgatgtctcatgaccttccttcatttggcttactattatgtattattcccatgaaatgattgagctatatatatatattatataaacaaagtgtgtaaatgcataattgaaagggagaagttaattagggctaatggaatatgattaaagttgttcagtg

SEQ ID NO: 66691 - DNA, 662 bp, Cucumis sativus
  Intron number 1 from transcript Cucsa.158050.1 (locus Cucs a.158050) derived from phytozome v7.0 (chr-ID scaffold0114 2; pos 205474 to 206135)
ctcttcgagctgattccttcgagaagttggagaaggtacgaattatgacactcgtgatttcttcgtttgtcctgacgaaaaaaagaaatacaatcagagctttgattcaattaaagttcaatccgatctatcattaagatatatcattaatgaaccatctcattccttctagaataaatagaacattaccttaaaaaactacaaagaagggcctactcccaagagattgattctaataatctaacgcaggttcatatgaaaaacagagtgattaaccaaccacattgcgttaagagtctttctgtgcagttgttaaaatggtctttatgacattcatatatggctttgagttacaagaacttagaacaacacattcggtgaagacagcatttagcaaatgctatcttagatgaatatgttcaagttttctgccccaatatttgaattaatcgaaccccaaacatgtctcttggagcattagatcaagttctgttctttgtatgttctgaaggtctataaatcttgttattggcaatggcctgtgtaatgcatcatcctcttgaatgtttgatgtgcatctatgtacacattactcagaaagatcaaacaattttgtttttgaattagattggccaaggaacatacagcagtgtgtttcgtgc

SEQ ID NO: 66692 - DNA, 473 bp, Cucumis sativus
  Intron number 4 from transcript Cucsa.123340.1 (locus Cucs a.123340) derived from phytozome v7.0 (chr-ID scaffold0100 0; pos 595099 to 595571 reverse strand)
tcgattttccatttcttggacccgaattttgcccagtcagttcttctctctcttcacattttattaacaattctctccaacttttggaggaaaattcttagttttgttttaaaaatatttatgagtaatggtgaggatactttgatttttttttaaacttggaagaacatttattgtaattttttttaaaaaaaaacaatttacaaagctcatagactttttataattcagctttaaaattatttgataaattacggctgattaaaaatgtctatttagtttttaaatgtaagttttctaaactttttttatttaaggtaatattagtaaatagtaaagtgaataatactgttgtaaggtaaaggtctttattggaaaataaagaagaagaaaaaaggaatattaatgattgtattttgtaataatgaaatgatatagaaggaagatttggtaaagttaatagaagagggatc

SEQ ID NO: 66693 - DNA, 346 bp, Cucumis sativus
  Intron number 3 from transcript Cucsa.012920.1 (locus Cucs a.012920) derived from phytozome v7.0 (chr-ID scaffold0016 4; pos 703741 to 704086)
gacatttaagtcactttgaggtattaattcatgctgtctgttgtgattggaaattctctaggaactcaaatggcttatttgctgcttctgattcttctacatgattttattgagcaaaatgatgtaccgtgtctaggttttcactttgtaatttgtgtgtcacgtgatctttaataatatatcctgcatctttttcttttttcttttggtttcatataggaagatataaattgttcgtgtcaatgataaacctttgaactcttaaaggtcattggaccaattcagtcattgatgttttcttaatcttttagacgggctgatgaaattatcccaggtccttactgct

SEQ ID NO: 66694 - DNA, 829 bp, Cucumis sativus
  Intron number 1 from transcript Cucsa.059830.1 (locus Cucs a.059830) derived from phytozome v7.0 (chr-ID scaffold0062 1; pos 417167 to 417995 reverse strand)
atttccatttgtgcctcttccaaggctctctgcaggtcactcttcttttggttttttttttttcttaagtgggaggtttttgtgttatcattttgttgttattgggggcgtggagaatatttagtcttctgtatggggtattggctggatttttgttgtctgtcggtttttggggttgttcattccagacatttgttgaacggtttcatgtttcaaattgcgaagtgatttttcccctcatatgcgagatggagcttgtgatatgtggaagaatatgtttggtggtgtgatttctaagaattctttagttattatgatatggtttctgaaaatatgagctcgttgttaacatcctattctgttcatttgttgttattgttgatagaagtcactgtttgaatatggatttgaaactaaatgggattggttctgtagtacgggttttaaggtatttgaattcactcatgaagattatgggttgtctttctagctgtattttatctggaagaactttagctctttctcctataatgttatctagcccacaaaattatgtaattatttggtttcctctatgaggagattttctcttcaatatgagtgtgagtctgtgattgatgcttaggtaatagagctcacatttagcagaaatgacactggtaactttcttgggtcatccacgtccttgttttaattgtttctgcctgtcattgcacagaaaattgatcaattatagagagactatggttgtgaaaaactctgatcttaatgtttttgaatatatccttttgcaggacggaatttgcttccctgaagagtgtgggtggcg

SEQ ID NO: 66695 - DNA, 674 bp, Cucumis sativus
  Intron number 1 from transcript Cucsa.125550.1 (locus Cucs a.125550) derived from phytozome v7.0 (chr-ID scaffold0100 4; pos 291987 to 292660 reverse strand)
ggaagacgacgcctcaatcgcgaagctcaaagaaggtgaattggatttaattagataaattactactttaatttcataatacttgttaataggcctgggattagtccatttagactaaattacttgatgtttgtgctgggaactgggatactgttgcaattaggcactggaatacgatatatgatgtgccttctattattttttgttttctgggaaattcaaattagaatagttctgcacctcgacatcaaactataataatctctaaggtgacataattatgttctacattcaacaggcgaaggaaaagcgagcagtaaacttgacgccaaagaaaattttgaattttgaagagacaactccaacaattcccgacttgcgtctggaggccaaaatgaccagagaggtcagttacatagtttgttgttgaactctcacaatttctagttccgcctgtcaaccgtgaacttgtgttctaatagatgctattttgtgttctcacaacgtgttacccgtagagatctgagtttatatctcaattttggaatgcccacccgtaaattaggagtcattctacggaatgattattgcttatatatttgtttaatgtcgtgatattgaacaattaaatctccatccctaaactgtattcgtatcaccaggaaaattcacgg

SEQ ID NO: 66696 - DNA, 569 bp, Cucumis sativus
  Intron number 2 from transcript Cucsa.151250.1 (locus Cucs a.151250) derived from phytozome v7.0 (chr-ID scaffold0111 6; pos 114364 to 114932 reverse strand)
ttttcctccctgtgagtgaagttttgggagcactagtagatagacttcatcagaatgggctctaagaaggatttgttgttggtaaagaaaaaattcatgtttccattcatcagttcaaagatgacacacttttattttgtacgtatgacagccccatgctcacaaagttaaaggaagttgtagaatttaacgaatggtgctcaggtcagagaattttacaaatggtgtcagaaggttaattgggataaatcagtattatgtgacattaatttggaagatgtagttaccacggctgtaagcttgaaatgtaaggttgaacacctgccttttatttacttgggcttaccattgggaagttatccaaaaaaacttctttttggcaaccgtcgacaaggtccatgctaaacttgacaaatggaaaagattcaaacttttcagaggatgacaagccacattatgtaagtcagtattatacagtgttcctacttattttatatcatccttcttaatgcccaaaggagtcacatgaactagaaagaattctaagaattttttctgggaaggtcata

SEQ ID NO: 66697 - DNA, 1005 bp, Cucumis sativus
  Intron number 1 from transcript Cucsa.012580.1 (locus Cucs a.012580) derived from phytozome v7.0 (chr-ID scaffold0016 4; pos 192636 to 193640 reverse strand)
cattggcaataccaccttggtgagacacatattgctatttaatcttatctactattttgttttaggttaaatcttattttttctattttgaaatattactgtatagggttttgattgattgtttagagttctaaatgcatcaattttataactcaatcatatgcctaatgaacttatatttaagaactattatttattatttctttttagttcagaggtggagattcaaacctccaaatgtttattatgtgccttaaatcagttgagtaatgctttagttaatgtatttattttaatactaatatctctatttcttaaaaaatataaccgttttggtcttccctagctactattttacaactaaatattttctctttcaataatgttttcatctcacttgggtatgactttaatatatatgctcatatcattattaatagctttgtataaatcaaaataagaacaaggaccaaataacgtagttataattttgaagtttagtgacaaaataaattaactatcttttgataaaaacaacattgatcataaatagtatacaaagatattgatagaaggtaatcaaagattacaatcttttaagtctcctttggtaccaataatttagtttttaaaattaaaatttattttctctcaatttcttaccacaaattttcacctttcctaaacaacatagttgaaatcttaacaagttttcttagacaataagttttcaaaaaaaaaaaaataataaattcaattcgattttgtaaattaaagcatgagtaaaaatagatactaaataaaaaacttataactgaagttaaaaagagtgtttgtagagttaagtttaagaaattaattgatattgaatgatatcaaattttggttaagatcattgacatataaacatgttcgttgaatatttgtttcatgcattgatcaaagtaaagtgggttttgaattatgatcaaattaacaggaagcccagcagcagcaaagataaag

SEQ ID NO: 66698 - DNA, 653 bp, Cucumis sativus
  Intron number 2 from transcript Cucsa.129380.3 (locus Cucs a.129380) derived from phytozome v7.0 (chr-ID scaffold0102 8; pos 341563 to 342215 reverse strand)
cttcatcccaaggattactagtgtcccaactccaagtaagccatgtaattcttttttttttttgataaagatggaatgtgtttttggtattttaaattggatgtaaggttgctaagctgttgactagaaaaatactttgaaatgaatattgccttctctgcaacattcaagtgaaacattgattttattttctaacactaattagagagtgctgtactgtgtacaaagttgatgttttatcaaattttgatcattattgttcactttatgctagttcctactattgaaaattgaaaaagacagttctttgaccatcttgagattatccaaaaactttcttgcatttttatgttagtttaattatagcaggggaattctgtgtagcatccccaatatttctgcaaatctaccttcacaatgtaaccttgaacaaatttacattgtgttcatttttatatttttaaatttcttatgtaatttgtttttatgatggtgttgactaatacatgtaggatgcacatatgacacaaattctttattcttcatttaatgcaaaacggtcatcaaattttcctcatacattcttgtggctaacgctagactttgcctagattgcatattcaagctatataccaatgttgatgcagtgggaa

SEQ ID NO: 66699 - DNA, 515 bp, Cucumis sativus
  Intron number 1 from transcript Cucsa.089610.1 (locus Cucs a.089610) derived from phytozome v7.0 (chr-ID scaffold0089 4; pos 1023446 to 1023960)
ctttctctctcactcccaattaggactcaatcaaggtaaaaacccttttgtctttattgttttctttaatctctcggctagttcagcttgttcaaggtcttattttagtaaattaattcttattaattagttttatgaaagttaacttagttccatttttttctcaaaaataaaaaaggaaaaaatattcttacacgttgttaaaattagtttcaaattagttttactctctgtcttcttatacattgttacacaatttgttctattaaacaaacaggattgaaaagatatttttactttcaatttgaggtgatggtttaatccataaattttagtttctatccctttggttcttatgtttatattttatataacaataaacttctacgaaaaattcctctttctttcttattttaaaaaattaatccatagtcgttagtttattaacattgaagtatacccattttttattatgtatttatataaacatctaacctcaaatttgttttgtttag

SEQ ID NO: 66700 - DNA, 972 bp, Cucumis sativus
  Intron number 2 from transcript Cucsa.044990.2 (locus Cucs a.044990) derived from phytozome v7.0 (chr-ID scaffold0054 2; pos 1110224 to 1111195)
tcttttttggacggcaattggagaatagcatacaggtaacatgatgcgtgttctgatattaaacggtttttttttttttttttggttattgtttttccatagcatccgccatccgtttatgctttaccttcaaactggagaataatggatcattcgctccttacctgtttgtgtgtgtgtggagctccatgaaggacgaactcattgactaatatgatcttctatacaagtttagcctagctgggttgtgctttgaatgggcagcttataatttgctttatctatactctcctgggttgctgatgttatttcgatggatagattaacttggctgtctgcaaatatagcatattgttatttgagcgtctcaattgacaacagttctatgtaacttagcacatcaagaagttataagtctaacaagaaggtcctcatccctgaagagtaaataggatgagcgcactgggccttgaatgataggtgtgcatgcttggaaaatcataagaaacttaactccagaggcttgacagacatgaggtcatctcaaagtgtggtgttccctttgtattaaactgaagagcatataggcagtaggctattccctaatgagtggtagattcagtgatcaaacaattctaaccttaatcgaggtgagagaacctctgtaaattcctcacccttgctagtcaaaggatgacaatgtccctagggcactaggagttttgttctctataggtaggtaccaattaccatagttatgatgaaattatgatttactttctgtttttaagtagtaggaggaaatcacgttgaggcatgtgatcttttcctttattcaaattcaattcactacactggtgctcagttttttttcttcccttaacatttctaaaagtttttccaagttttgagttttggaaattgagtgcattaaagtgtgttatattgtaggtggcctggggaaagtcgagt

SEQ ID NO: 66701 - DNA, 488 bp, Cucumis sativus
  Intron number 1 from transcript Cucsa.192250.1 (locus Cucs a.192250) derived from phytozome v7.0 (chr-ID scaffold0133 3; pos 140507 to 140994)
agtcaattgggacgggcggttgatgtcaatgatccttgagaactttcttccaaaatgctaaataagtcagtctaaatggtttatgaattctttcatttgcacaaacactctactttccacttgaccttttaaattcgaaagtacaaagaaggggacttagctaaaatctcttttcttttgacgaatgatataatgaacaatcaaaagcttaaattgataaataatggtaaaatttgtatgtatatatatatatatatatttgtattcatcactaaactaaaaaacttaagttgactaattaagatggaatcatttcatttcttgtaattctttaaactaagacaaggaaacttttcttcatttcaaagttagagaagcaaaagactgaacatggactaaagttttgtttttctcctgcttaattactttatcaagaaatattacttgtaaagaccatgaagtaagatgctatcatttgctagatatct

SEQ ID NO: 66702 - DNA, 670 bp, Cucumis sativus
  Intron number 1 from transcript Cucsa.119030.2 (locus Cucs a.119030) derived from phytozome v7.0 (chr-ID scaffold0099 8; pos 929580 to 930249)
tcgttcacaacccacctcatctccgccgcccaccggtaagctttctttccccactttaattgctttcaatgttctgaaagctctttctgtcctttctctgcccatgtgaaatgtgatgtgtgaaaattctctacttctagtttagcaaaatttcccgagggaaaagctatatctatttagttctttctatgagattgtggaagaacaacaattttaatcttgttgcttaacttctaaaattcttttatttgctttcaaaataaaatcccttttatgtctaaaatacagaactccacaacgaactgatggaaccagacatacggttcggttcggttcggtttgaattatgataaaggatttactaattagagttgaagtacaaagaaaatcaacagcggtcgatgtgtttgctctcttctctttgactttcttggagtcgaagaacaatccatttccatgcctttgcctcctcaacaatcaacaatttattaatcactttcttctctcaccactcccacgttctatctacttccttatttccttcatcttcttcctcttctactctgctttcctttcaattgtttttattattgggtttttgttgctccagttttagggttttcaattccaatttctcactctacttgaactgaaacagagtcacaaagaa

SEQ ID NO: 66703 - DNA, 1010 bp, Cucumis sativus
  Intron number 1 from transcript Cucsa.153380.1 (locus Cucs a.153380) derived from phytozome v7.0 (chr-ID scaffold0112 4; pos 507202 to 508211 reverse strand)
gatcactctcgtacccttcaattttttccatctgggtatgttgatttctttgcttactgatgctttatgttactctactgttgattattcaattgggtgttcaaattttctcttggcttttgtttgatttcgtagttcttgtatattttctttctatacattgtttatcactgtgctgcattctggttatgtttatgcctgttcgatgattttgaaacgatggtgaatttgtctgttgtttttctttttgattcttaactgaagtggtttggatgagaaaaatgctggcttctagttttaaacagagatgatttaatactcgttctattaatagattataggttgttttcttttggttttcttgtattttacttttctgtttatagattcttatcgcagcacagatgccaaactcagtaaagaggaaaagagaaaggaaaaaaaattggtgcttctgttgggttttgttttcttgctgcttgtacttgtgccaattaatgatatagcttttattttctcactcttaaacgcactttttctgttgtgcaagcaaacaatgattccatccgattgtaactgtcatgtgttgttgtaaattttaatgcatacatgagttttcaatttaaagaacgttaaagattcttcctcgtagcttccgtttccaacaggttctgttctgtctatggtatgttattataaaagaaggatttaatgatccaaaacttaattgattttacttcttgcgcatgcaatgctttcaaattgcatcttgcttctcattgctcttgattactggatgtgaaattcattttggtatgtaataaatgcacacagttattgtccttgatttgtgatttaggagatccatgttttgaatgttttttctattattatcctatttgcattgtacatttgaaaataaatatcattgagtgtgatgtttaaatggaatccacatagctgaaatgatcatcctactaaattgattggtccagggaacaagtttcgag

SEQ ID NO: 66704 - DNA, 820 bp, Cucumis sativus
  Intron number 1 from transcript Cucsa.079390.1 (locus Cucs a.079390) derived from phytozome v7.0 (chr-ID scaffold0079 3; pos 2067958 to 2068777)
ttcttttcaaccattttttcttccaatttttccaggttctttgccccttttttcccttttcttgtaatttctttctttaaatcttgttagaaacttcaatcattttgcttcattgtgttagaagttttaaaaatcaaagacaaattctgatgggtagaaaaatttaaaccatttttcagtacttacaatagttaaatttttaactaattataattcttttaatttaattggccaccttattatttaaagttacaccaaggtttaaaatgcaaatcctaaaagttgttgactaaattgaaatgaaattgaaaatttaagaattaaatatgatgtgacattttctcaaattttaaaaactattttataacactttagttaagtaacttgaaaaaatatgctaaaaagttgataattatgaaatctttttagaattcaaatgagttatgtctttagttaaaaatttgaaatttgatggattaggtttaaatgagtttaactcaattattagtatgcattatacttgggaatcaaattttcaattattttcttcataaattgataaaaaataaaaataataaaaaggctagtcgaacaataagggtaacattcagttaaaagtcttgaatttcttcattttctcttggctgggtgtaaattctacaagatttataaaaaggagtttttgcattttgaaattttaatgttaaaagaaagtaatttatttgttaattgttatgattttccccctcaataatttataaaattcacattgaaaaagtatgcagttttgttacaggcagaagtgctctcagcattgatt

SEQ ID NO: 66705 - DNA, 774 bp, Cucumis sativus
  Intron number 1 from transcript Cucsa.185180.1 (locus Cucs a.185180) derived from phytozome v7.0 (chr-ID scaffold0127 4; pos 756129 to 756902 reverse strand)
ttgtatttatcactcacgcccaccttgatcacattgtaagtttccttagttgaactagttaaccttatcctgcttctattatctttgatgtaacttcactaaaggttttcttaagttactatctactatgcggtatgcactaatttctacccagttaagtatgtgctatttgtaatctcttacattaagcttagttgaaatctcttagactaatttcttaacttaatattcactatgggaactaagaatcagatttcttcaagaattatgaacttgttcttcatccaataaccaacactatctttacagatactttttcggtttggggtttaagcattatcagctaattttagtaacaattattgacagacctactaactaagaatcgataactaatataaaaactgaaaagggactggtgtagactgcagtgatttctggttaaagttattttcttcttcttcttcttcttctttttaaaatttatttattttttattttattattattattattattattatgaaaacgataaatttcattgagaaagaatgaaaggatacaagggcatacgcaaaaaaccagccccacaaaaccaacccattaaaagacagacctactaactaacattaaagttcttaacttcattagattactgaattagctcgtgaacccattttacagacaatttatgttaatgattgtgactaatcagctccaatttatgttagtgatggtgattttcaacttgttctggttcagggtgggctacca

SEQ ID NO: 66706 - DNA, 521 bp, Cucumis sativus
  Intron number 2 from transcript Cucsa.099350.1 (locus Cucs a.099350) derived from phytozome v7.0 (chr-ID scaffold0092 6; pos 170209 to 170729)
ggttgtggtgcttgctaccaggtaacatttcatacatatatatattgacatttgatctatcaatgcttttatagatgtgatatccaccattttcattatatatggtaaaatctatgaaatattactaatatgactataatatatgcaagtaataaatatatgttaacttgtttaaaagcgagcaaggtttatttgttagataatttttctaaaagatattcatctaattttaaaatgttattagtatatttagttttctttccaacgttataattctgtagttttatattatacattatttatagtaaaattttgtacttgtgtagatattctttcaaaaggtgtagcagaagaaatatatatgtgtatgttttaaaagaaaatgtgttttttattattgaaactaaaaaaaaaaaactttttttctatataatagacgttcgtgattctcttaataattttgttctattttagctttgcttctaactatgagcatatatttacttttctttgcagataag

SEQ ID NO: 66707 - DNA, 543 bp, Cucumis sativus
  Intron number 1 from transcript Cucsa.119730.1 (locus Cucs a.119730) derived from phytozome v7.0 (chr-ID scaffold0099 8; pos 1681306 to 1681848 reverse strand)
aacattgccatagcgcttggttagtacttcagggaacatagaaaccaaaacatagttttgttttttgtatttttgtttttatttcacattattcattttgtttttgttttttttttttgcgaagtcttctaggagaattttcttaaccattttgtttggtaacttttgttacatttcattggcatagcacctagttaaatactttgtacatctttcttaaactaactatcgttggttatattcttgataatataggttcccttgttattttattggctttattaatgtcttaattagatttctcagtatctcactgagaattttctatgatgcaattccaggtgccatatttattgtctctctggtcatcacatctaggtatgaatatcctttcgtttttggctgacatttaagtggaaccttatttatttcaaaaaaaaaaaacaaacaagcagaaccattttttgtagcgtgaaatgccgcttctttatttgatcatactttgatctattgattttgaaatgcagtttgtggagttcggga

SEQ ID NO: 66708 - DNA, 381 bp, Cucumis sativus
  Intron number 4 from transcript Cucsa.129240.2 (locus Cucs a.129240) derived from phytozome v7.0 (chr-ID scaffold0102 8; pos 264270 to 264650)
gatttgaagccctctgtgggttcatcagctctaaggtaccataacatatagtaccagagacttactcttctggggttttcaaaaagtttcttaaacttactttaaatatcttaatgattcttactctgttcttattacactaattggatttagagagatgaaagaagctcaaatcaagatgttaattccgctttttggttaatcgtgtatgtatttccagatggctgaaaattcagaaaaataaacaaagactattagtaactgataatgaatgaagtttctttatagattcgtttacattgcaaaacccatgtcatttgattttacttatttcattgtttttcaggagctcaaggcggtgcttagtagcgttcctgagat

SEQ ID NO: 66709 - DNA, 804 bp, Cucumis sativus
  Intron number 1 from transcript Cucsa.185290.2 (locus Cucs a.185290) derived from phytozome v7.0 (chr-ID scaffold0127 4; pos 838681 to 839484 reverse strand)
ttttccttgtggctggatcgagcatttcttttcaggtattcaactctttccatttccatttccatttcttttgttacttcgctttcatgtatgtttgattccctggaaaacgaatgaagttaagtttgttcttaatagccaatcaatatatattagttggcatggcatctgattaagaatcttggattcaatctttgtggtacaatacaatcaatagtctcatgttttgagtttattactggttgaatccaaagcgcttttctagtttgtggggttattcgcgattctcttacttacaccttttctgtttttagtttaatggggattctcttatcatggaaggttccttcgtgaggaatggattctttaccatgtcttggtttgccccacgagctagttttctaaatgtactaacagtgatgggattcttttcctttcttttacatgattgttggttggttgagcaattttgtttgacttaacatttcccgacattggttttcttgaaaaattaattatgtgatatcgttgctgataagtcttgaatttttatcagctttatctttttttgtcggttgtcagaagggtctgaacactctatatatcttgaatgccagactcactttttagttttacgtattcttggcttgctttagaatagataaaccaattattacttttgcttgtgttttctttttccatcccagagataactacattctgttgcctggtgccttttttttttttattaacaagcattttctaatttctttgaatttacgcttttagtgttttatggagcag

SEQ ID NO: 66710 - DNA, 923 bp, Cucumis sativus
  Intron number 1 from transcript Cucsa.063740.1 (locus Cucs a.063740) derived from phytozome v7.0 (chr-ID scaffold0067 4; pos 137813 to 138735 reverse strand)
accaaatcctggaaccttcgcctcgtttccaacaggtgctactcctccatttttcttctttttctcctcattgcccttcaattccttcaacttatcttttacctttccttttttgggcttttccccatatggctccttcttcaggactgttctttgtttttctttaccttttttgggcttttccccatcttggcctgcaccgttatactttttttgtgtcttctaagatcttcatgcttctctgtcactggagaaggagatccccctgaagaattggggataacttctagccaatgattcttgagcaaggatttgcttttgctatgcttagggatgtagaaagactcatttagatgagaatgtctttggtagattgtgttgaagtttagtcaatatgctaccattttttttttttttaaaagcgtatcttgtttgatttttttcttttctttttggctgttggtcttccagaatagagcggtttattcctatatttgaacgcagatacctaatatttgtaatgatcacgtgctctcttactgtaatctggagccaattactttggcctgttgtttgaaaagtatatataaatatacttagctaactggtgatgctgatcatgtactgatagattcaaacgaacattcattttgtgatttatctgctattaagaagaaatatgaaggaaaacatgcatttttcagttgttttattttctacctgcctacctggggttcagctttgtttactatacattggtttgaaggtccattcaacttgggaaatgaactaaaaccaatattttgtttgttaatgtctctctgttctagaactgccataaattgtggttggtctatagttgacatgataatagtttctctttctcagttctgagagctcagtttttgatcccttgggcatcc

SEQ ID NO: 66711 - DNA, 558 bp, Cucumis sativus
  Intron number 1 from transcript Cucsa.116170.2 (locus Cucs a.116170) derived from phytozome v7.0 (chr-ID scaffold0099 5; pos 95022 to 95579 reverse strand)
ctccttctcttgcatcacctcacttcatcttccaggtttctttctctttcaattcatgttttcctttgtttcattgctcaaactgaactgagctttgttttgaaattgtaattgtaggagcttgtttgttatttacttttttttttttttaatgaagatgatgatcggaggatgttacttgttttatgtgtttgtaatgtgctttcattttcttcttcactttctaattttgctatgtttggcagttttcttcctccagatctatggttcactttgctgttttgatttatgtttctggctttaaatctggatttcctgttgccatgtgcttgtacttgatgaaaataggggtttgttgttgttgttgtttttggaggttagggatggggtttcggggcaaatgcatctcgatcttaacttggaaaatgccttatgttgtctctggaagacttgtttgtttgggtttttgtgaattctaacagattttttttttgttaattcatgaatctgacctttcctgaagcttctgtgtacttattttgctttcggacctgcaca

SEQ ID NO: 66712 - DNA, 671 bp, Cucumis sativus
  Intron number 1 from transcript Cucsa.047460.2 (locus Cucs a.047460) derived from phytozome v7.0 (chr-ID scaffold0054 2; pos 2475631 to 2476301)
aagccgttaatcgtctcctcacacaaggtctctctctctctctctttattttttaaaaattcctctcgttggttctgttctttttttttttcttgcgtctgaaagtttaatcgtttttgtgttttaaccgctggggtttgcctgcaagaaccctgggtcttgaaatcaaagttcgtagttgattatttacgtgttttgtttaatgacgtgctagttgtctaactgttgtcatcgatccttgcggtgtttttgtttttgtttatgtgttaaagttgaaggttttatttccactgttatcttttgtgaaaccagaccagaaagaatacgtggtttgctaagtagttccgttgtagcacctagcagaagattcacctttttgtcctacgttatttggaaaaggaaaatttttcttttattcatcgtgtttgatgttccaagtttgaagtttctgataaattttgtcaacttccgttcgtacttctattacccatatgagtgatttatgccccatattaagttcttgcttttcgaatgaattaccttcctggacatttttagccttgcgttctattagtctcagtctgtgcgattctaaaggtttgaagattatattaattttattctatcgttgtgtagacccttttcacgaggtgaagagcaaacgagaaaag

SEQ ID NO: 66713 - DNA, 605 bp, Cucumis sativus
  Intron number 1 from transcript Cucsa.011010.1 (locus Cucs a.011010) derived from phytozome v7.0 (chr-ID scaffold0015 4; pos 352887 to 353491)
acatttctgttcaacccacctctacttttggtatgttttcgttctcttttttaaccttacaattgggtttttctttcttcaattttccaaatttggtgaagactttttattttccaaaaaacgtttgcacgatccttttaagaacgttattgaaaaagttaatcgtgtttaagataactttaaaagaaattgaataatttagaaacacacttctctaaagctaaaagtttaaatctttatacatcactttggttgtacatcaaatttcgtttattgtatacattctcaatgaatttgtaaattttttaacgatgtcattttatttattaaagaataacagtcgaaagcaattaagttgtatataatctcatacattattaattttattttagaaatagtaaaaaagacaaaaataaaaaataaaaaacaaatttcaacttttttatatatataaaatattattggagaagttgtaggaaaatatgtataattgcaaaccaaggcatattgggatttattttgttcatgtagggttcttaagggtttgattaaaaagtaatgaatttaatttggttatgtgtgtgttttttgtaggggaattgaag

SEQ ID NO: 66714 - DNA, 882 bp, Cucumis sativus; identical to SEQ ID NO: 63543
  Intron number 1 from transcript Cucsa.065610.3 (locus Cucs a.065610) derived from phytozome v7.0 (chr-ID scaffold0069 6; pos 303836 to 304717)

SEQ ID NO: 66715 - DNA, 352 bp, Cucumis sativus
  Intron number 1 from transcript Cucsa.192430.1 (locus Cucs a.192430) derived from phytozome v7.0 (chr-ID scaffold0133 3; pos 284871 to 285222)
tcttcatcaacctctgtattgagaaggtaatttcaatacttttctctctccaaaactctattttatgtataacattaatgaacgcaccttgaatctaactccaacaacatctaacgatggatttgatccatctccaatagaatcgaaagaatgaaacttgtttctttttctttttcattttttgtggaggagcctgctgaagaatccgtttctcagctccaagagaatagacatcgaacaatcactttttaagcaatttaaagaattcaaacagcacaaatgagagcaattctacacaaaatgctctattcggtaactatatcactaacagtttccctttgtttttaccagc

SEQ ID NO: 66716 - DNA, 828 bp, Cucumis sativus
  Intron number 1 from transcript Cucsa.025300.1 (locus Cucs a.025300) derived from phytozome v7.0 (chr-ID scaffold0034 5; pos 150716 to 151543)
cccataatccggtaattcagtttctattttcttctgtgtgtgtgtgtgtttttttacttgtttcttttcctgaattgatgtttgggtgtatttccattttctactgtcttagacactgaggtgttgttggattgaattgaatgtttgttgttttttaagcgttataaactggatgtgttgggaaaaagaaaaacctctcgttactaccgaagaaagtaataaaactaggaatacaagaaactaccgaagaaagcaataaaactagtaatacaagaattaatgtggaaaaactccaaaccagagaaagaaccctgggcatattatttacaatcacatagaataattctctttcccaatccaattacaagacaaagcttttgtgccataccactcacccctcttaactctaatctcaaattagagaatattagtagggaatttaactagatttagcacatttaaagtgtttttaacggggacgatttgaaactactctcccaacccaattaccagagctaccacctgaagcttttgtaccataccacccccacttttaactccacctcaaattagagatactagtagggaacttaactagagttagcacatctagtttaaagtgtatctaacagggaccttttgaaactaaagccgtaggccactttttaatgttgggatcccatcactcttaacttttttcatgcgagacaattgcacttctaatattttgtcaaaagctcaacatgatggattgttgagaaattttcatttggaggaatcttgacatatgatgggttttttgctttgttttaaggttaattggtatcc

SEQ ID NO: 66717 - DNA, 951 bp, Cucumis sativus
  Intron number 1 from transcript Cucsa.004230.1 (locus Cucs a.004230) derived from phytozome v7.0 (chr-ID scaffold0004 8; pos 132687 to 133637)
cactcttttttccaactccctctctcacacctctggtaaatttttcttctctaattctgttgaatttcgtctcttcttttccgttttccgtttccatctcgagaataccggaggaataggatgacggtgttcatgaatttcaaaccaaattttcgaattagatctgtgcgtttggtgttgctttagatgcggagactatggcggtgatgtttgtgattgtgaatctgtcgggtttttttttttttttttaattggatcgggttgtggtttcctttcatttcttgatctgcgatctgtgtggttttcattcgttcaacaatgtttaaatctacttgttcttccttgttttctttgcgatctgatttctggagccgggtttggaaatctttgcggacaggggaatttctttctttttttttttcgtatgtttgaaattttgattcgatttatctagattggagtttcaattacgccttctcttttgttcatcgggatttctgatctgtcagatccgaaatattgttattgtttcgtttctatactagggtttcatcatgtaaatttcggtgacttccatatggttgaatcctagtttggatcagaagaagaatgcacttaggttttgatttgattgatctgtatgactggaatcggatttgttcttaaatacttattcgtttagtttttgttttaagcttacaaacacaaagttttgaaaactaaaataatttattctttagaatctcgtaaatccaatcttttatgcatgattttgagaaccaaatgattatcaaactgggtttaagcaagttttatgaacagaatgaaatagattgccctacttttctcatttgttgaagtttgtcctccatgttctatattttgttgatggttgattttgtttgttgttctaaaggtccgtagatcagttgtataactacattccaaaac

SEQ ID NO: 66718 - DNA, 815 bp, Cucumis sativus
  Intron number 1 from transcript Cucsa.180480.1 (locus Cucs a.180480) derived from phytozome v7.0 (chr-ID scaffold0123 6; pos 74423 to 75237 reverse strand)
gaagaactgtaagtcttgtgtattctactttattttcattggtttttccacctgtattagaagctttagatgtctttcaaagaatgttccagtgtgtcttcagattcaattttgtggattaaatatactcgtggagggatcaaggttttcctgatatcttttggtgttcctcatgatccaaacttattagaattcttcagcatttatatgctaaatctcttttatctcgataattcatagttttccttcacagcatgaaggggaagattcggctattcacattttaattgggcaatttctgtttcatgtgaaatgatgaccatgtttttgtggaagtatgatgccaatgtatgtacttgggttgccttcatatgtcctgggtatatgtacaaacatttatatatcaaatcaatactgtgagagggctttggtccttcgataaatttgcaaatttttgtgtagaaagaagtctatcttaattttccttagtagtcctcaatgtaaaatgaccttacttgaacaggatttgttctataggttgtacatctatatccttgagttcttaagtagtcctcaatgtgaaacaatgagttgtgtatattaggaggctcgttatcttgttgagtttgtcatggacattaggctttatgtgtgatggcttccacgtgtgttaaaaagatacgttttgttgcttccagacctttatgtgtattggtaaagaaagtaaattctatcatttccatgttttgatgttagttttttttgtcttcttttttcttttgttcaggttgaagcaaagaaggcggttcctcgag

SEQ ID NO: 66719 - DNA, 934 bp, Cucumis sativus
  Intron number 1 from transcript Cucsa.133070.1 (locus Cucs a.133070) derived from phytozome v7.0 (chr-ID scaffold0103 7; pos 874887 to 875820 reverse strand)
ccattatcattcgaaccctcaaacgtaagtttcttgatacaatcatatatatatatatatatatatatatatattagtattagcatgttatctaagtccatcataagtaacataaattcgaatacggatacaaattaggctcttctagcgagactcctctacaatacttgattgttctgagttcacataattattttttacccgttttggattattgttgatagggtatacacagaatctgattgagactccacttagagtgtatctggctcttccagtgttatatgtcaaccatttccttccacaagtgctgggtttgccttattgggaaaggaaaatcacttgtaaacttaggccctctcaaaaaggtacaaaataactctattattcctttctgcacttattgttgatcttttaaatttctaaatgtttctgctttctttttctttttataatcagtttaggtattttaaaagttgatatcatgtagaattgcatggaaaagaataattagagtgaaagttttgattggaaggaccaaaggctagcaatggttaattataataattattttaggttaaattaaaaaaatatatattttaaaactttattctttgtttacaaaaatcacttcctatcaattttggatactcaatgttaaatatccatcaatctaaagaaatatttgtcaaaattaacaaattacttgaaaaatactgttttttctaaatggaaaaaaaccactttttaccctttccaaaatcatcacaaaagactctgtgttctttttttctccaatgcaaaagtatctcttgcactatcattaatttttccttttgaaaaacaagtcaaatatagcttttatctgattcaaggagccctttaatcaaactttacagatattattcagaaggtgttggacaagttcccaaac

SEQ ID NO: 66720 - DNA, 641 bp, Cucumis sativus
  Intron number 1 from transcript Cucsa.149560.1 (locus Cucs a.149560) derived from phytozome v7.0 (chr-ID scaffold0111 0; pos 411771 to 412411)
aattgaaaataaaattcagattgttcgaaacttttgtgagtctcttactctcattataagaacgtgagctgaaattctataatcataggatataaatctaaggtagttgccacacagtttttttattcaatgagagtttttttttttcttttgatagaaacaactgcttttgttgaggaaaaaaatgaaagaatacaagggcatacaaaaaaactaagtccacaaaagaactcactaaagaaagagttcccaactaagtaagtggtttgcagagaataattttgataaaaaaaattattaaaaaaaattgaaactaaagcctaaaaaaaacatggaacctcaccagggatcaaacttcacctaagatcactatcctcacctctaaatactttactgctcttctcctcctaaagatctcacaacaaagcgcacactccaccaaaccacaagaaacaacttttttcttcgaaaggaggatgaaagaggaactcccagatcattgcaattcgcacaaacattcttgacaactaacacaaaatcaaactcttgaaaaaagcagttcgacacaagactagcaaactgacactcctggtgacggtgatccaggttttcttccagcttccaacaaaggatactcataa

SEQ ID NO: 66721 - DNA, 972 bp, Cucumis sativus
  Intron number 1 from transcript Cucsa.093890.1 (locus Cucs a.093890) derived from phytozome v7.0 (chr-ID scaffold0091 9; pos 149560 to 150531 reverse strand)
ggaagtctgaaagagaaagctcactccgccgcgttgtaagttttcaccacccctcgagtcttccggtttctaatcgatttgcgctcttctcttgattgaatgctgtgataccaatggcttctcatcattgcaatttgtttacaatttgcaatctgaaaagttttgatctatattcggttgtctgtttatcgaaatcttcaatgcaagcggctggtttttgtattgttctttcttagcagtttcgctgcggtagttgaatccatcatgcttttgttttttgttttcaaactttttctggagtttctgtttgagttttagaaatactgctgtctcttgatctgttttatctctgattggttgtagtagataaagcggatggttctgatagcactacgtttggtgtaattgtgattcatttgtcctctcttcataacgagcaaatgggtgattgcttgttttttttttccagcagtgtgattatgaatctttggttgttgtgggctaatgattttgatttctagaaaatgcatttataatgagttttatacttgatctggatgtttattcctaactcccagcctccaattgttcttttttagctgttgagcttctttgtagtgatggatatgtttactctaaacattaggcagttcaaggaaaactcatgtttaagttacttgcaatattggtgatttaggacgttgtgtatggttaatccaattaagttgagtttttggtaattattggtagaaattcaatgtgactcgttctttgtttttttaaattgtttattaatggattgggttttgtcactactacttctaaaacatgttcttatgttgtagtactcttttcttcccagtttattgagtcaaaatgtatttggttggatggaatcacttgtgtttcttgttcttctctttgttttccttcaattgaatctgtttacttctggcttgttagaggtaaaaa

SEQ ID NO: 66722 - DNA, 590 bp, Cucumis sativus
  Intron number 1 from transcript Cucsa.126830.3 (locus Cucs a.126830) derived from phytozome v7.0 (chr-ID scaffold0101 7; pos 663953 to 664542 reverse strand)
ctgtcattatcggccacccttttgacaccgttaaggtaagctgcatcctctgcttgaactgcagttccttcgaccttccttctgcttattcctgtggactgaaatgaaaattgtctttttgtatttgggattttttaaagtttcgtgaaaatgaaatagattgcaatggtaatagagtttacatttcgggctttgacctggatgctgtgtttcattcacctgtggagttttgagtgatgtgaggctgagatttatctgatatgtaaagtagacatagttgaatgattcttcttgtttaccacttaaattaagttgttgcggagtaatactaaacattttgattgtttgtgttttaaaatgccttttccattactgttttcttttatagagcaactattacctttttatcatgctgccttgtctgtactaagcacattcagactatccaaatgacttccatttgaacttaactgcaggttaagctagttctgcttgtgaatagttagtggctggtagaatgatttctcatattgtctgtttacttaccaggtaaagcttcaaaaacataataccgagtcacggggtattac

SEQ ID NO: 66723 - DNA, 413 bp, Cucumis sativus
  Intron number 1 from transcript Cucsa.039100.1 (locus Cucs a.039100) derived from phytozome v7.0 (chr-ID scaffold0051 1; pos 12941 to 13353 reverse strand)
gcagtttctgtcaccattctccttttgattttcttctctcaatgatttgttgtaattattattattatctttttcatttacttatgaacaggatttctaatcttgggataaaaagaaaaaaaggttttctttttagttttataaacatgaataatattcataaactaaaatttaaaaagagacttggttactgtctttgttttttcttctttcattttactatcctatcttaggttgtatctgttttaataagagctacatttttaatcaaatcttaaatatatttcagatgatggtggtgctcaatcttaatccattctcacattatacacagattaattacatttattttttctaatttagttgtccatatctctatgctagtttacaagagaccgttctgtgaggacttt

SEQ ID NO: 66724 - DNA, 542 bp, Cucumis sativus
  Intron number 1 from transcript Cucsa.051040.1 (locus Cucs a.051040) derived from phytozome v7.0 (chr-ID scaffold0055 7; pos 232148 to 232689)
caaaacaagcaggtactttctttttttttcttgctaattcaactcttcttctcctcacattttacttttcttcttacccatcttagattcgttgatgggaaattgaaaagggggagttattgctctcttcttcttgtcttcccgaacaactatttctggatactggattcctttgtcaagatttatttgatattcattcattacttgcattgcactttaccttcttcctttttctctatctactctctctctcttttttttattcctctgtaaagtgttttttttcatattcggtctcatcaaatttttttccccaaaatttgataactgctcaccggcggatgatgtttaggcttccttgcttgtagatgagcactgatttttctaaaaaatctatttacaatgttcatagaccgatatggatagtgctaagtagcttcactttttctttttttttttctctttttgtttgaattgtttacatcacataattcatgtgtgcgtatttttatttctttctttatcctctgcagtctgtttgg

SEQ ID NO: 66725 - DNA, 1045 bp, Cucumis sativus
  Intron number 4 from transcript Cucsa.174680.1 (locus Cucs a.174680) derived from phytozome v7.0 (chr-ID scaffold0122 1; pos 354793 to 355837)
tttctggctacctacaaaggacaaagataccacatgtaggagtgtcgtggagttggaaatgcaccaacaatagtgaaagagttctttaacatgaagcattcttccgcacataatgttattcaaagagcttttggtctattaaagggtcgatcgacatcctccacagaaagtcctactacctcgttcaagtcaaacgtcgcacgattctggcgtgttgtcagcataatctcataaacagagagatgacgaacgatgatattttagaggacattgatgaaggggacttgatctacggagttagtagaggaatgacttagccaaagagatattcagtgaatgagagttgcgtaatcattagtacccattgtgttacagcagtatcatgttattttaatttttttaatattgaaactcttgttgtatgtgtttatgaacgaaattaatgaaacactaacccatgacacgatacgaagattttattttttcccatgtgtgtaattattctctaataattgacttacaatttctttttcttccaattctttgtcagtatgactagtacgtcaagggccccgaaacatctgtagaataaggaggtcttggtgaacgtgggaggctggaggtcagacaatggaacgttcaaacccatacctagcacaattggttagaatgatggtggacaagatgccatgatgcattgtcaaaacaaccacttgttacagaaagtcggataaagtctttgaagagaacaatctaggaaattgcttaaatacaaggcttagcatgtaatgggtttgaatggaatgacgatgctatgtgtataattgctaagaaggacgagtttgacagttgggtcaaggtagggaaataagtatacgtgaaccactattcgcttctaatggtattgaaagctgacaattattttttattccattcacaaacccatcttgcaacgaagggctcctaaacaagcatttccccaattacaacgaattatcgtatatgttcaggaaagattgtgtaacgagggcacgtgtagagacat

SEQ ID NO: 66726 - DNA, 545 bp, Cucumis sativus
  Intron number 3 from transcript Cucsa.085750.1 (locus Cucs a.085750) derived from phytozome v7.0 (chr-ID scaffold0087 0; pos 162284 to 162828 reverse strand)
gagaaatttggtgacgatattgcgattgctttcaggtgtgtttttatcccgttatttgattaaattgtctttaggtttaattttcaaatattacgtctcaaatgtctgaaactttaaattgtaatgctgttgaatctgtgatctgtaacatgtatcttagtcacatatattatacatagttattgttcaatgattagaatagacctttttcaagcattttctttagagattcgtgttactggatttatttattgttcacctaattcgcctatcttaaatatgaccaaagactatccaaaacaaatgtgtggcaactcatattgcacctctcactctgttagtttattaattgtttcattttcaataagcttttggctaccatcagctgtagatggtagagcctaatgcaactaatgattatagattcaagggtattagtaattttcacccttcagaagaatttagcagtaaagcatttaaggtttaaagaatttccttgtgtttctcttaccaacaaaacatctaacactgcagtggtgcggaag

SEQ ID NO: 66727 - DNA, 588 bp, Cucumis sativus
  Intron number 1 from transcript Cucsa.137710.1 (locus Cucs a.137710) derived from phytozome v7.0 (chr-ID scaffold0105 3; pos 454133 to 454720)
cttcgttcttgtttactgtactgctggaatttcaggttgttgttcttcttcctctcttccttcgtcttcaagttaaagaaaatttaaaattttctctcattttcttagcttccaaacaaaccaaattccatttcgcgcttttttattattattattatttacttatttattaaaaataatacttacgtgttctttcttgaaaaatgaatgaaaagaaagctaagatagtaaactaattctcagtcgcaacggcttattaattattctaaagtaaactaaattgttactatttttatcgaggtttatttgacaaagtattttcgtagacatttatttgaaacattctgaaatgtagtataataaatcaaaacatttataaaatataataaagtttaaattttatttacggtagatatcaatataacttctattatttgtgtttataaaaattaattaatagaacctaaaattttaataatattttggtgaatacgtgcatgaattttattatcaacaatagttttagaaacggttaaccgcggagattgtgcagggggccacataaacccagcagtgacatttgggctt

SEQ ID NO: 66728 - DNA, 271 bp, Cucumis sativus
  Intron number 1 from transcript Cucsa.133450.2 (locus Cucs a.133450) derived from phytozome v7.0 (chr-ID scaffold0103 7; pos 1151569 to 1151839)
gcagagtaatttgccttctctcttgttttcattttctgagcttgtctcttcttttgtttccctttttctgatgttgggttttgttgttttttgcagtacaatgaaattttgggaaaaggggcttcaaaaacagtgtagggatttgattctttttgcatcttatggacttcccattttgccattttgcttgaaatttgcatctctttctgaagcattttaatgggttttttttgtttgtttgttttgggttgttgtagttacagagcatttg

SEQ ID NO: 66729 - DNA, 432 bp, Cucumis sativus
  Intron number 1 from transcript Cucsa.197490.3 (locus Cucs a.197490) derived from phytozome v7.0 (chr-ID scaffold0135 7; pos 877134 to 877565 reverse strand)
ccttttgtcataggtaatgtttcatttctgttctgtttcatgtatttttgttgttgttgttgttgttgtttatgctgttttttcattcaggtaatgagacttttgagaagttgggagctattggaacattagcaaatctcttgatttatctgacttcagttttcaatatgaagagtataacagcagcgactatacttaatatcttcaatggcagcactaatttagtcactttagttggagcttttctttgtgatacttattttggtcgctataaaaccttgggatttgctatcatagcctctttcttggtagttgttctcacttatattgtttaaaaatttgaacttttctcatttcccatcatttgaatgattaatgtttgttttttccattcaaggggttgcttgtaattcatctcacagcagcagtcaa

SEQ ID NO: 66730 - DNA, 795 bp, Cucumis sativus
  Intron number 1 from transcript Cucsa.185290.3 (locus Cucs a.185290) derived from phytozome v7.0 (chr-ID scaffold0127 4; pos 838690 to 839484 reverse strand)
ttttccttgtggctggatcgagcatttcttttcaggtattcaactctttccatttccatttccatttcttttgttacttcgctttcatgtatgtttgattccctggaaaacgaatgaagttaagtttgttcttaatagccaatcaatatatattagttggcatggcatctgattaagaatcttggattcaatctttgtggtacaatacaatcaatagtctcatgttttgagtttattactggttgaatccaaagcgcttttctagtttgtggggttattcgcgattctcttacttacaccttttctgtttttagtttaatggggattctcttatcatggaaggttccttcgtgaggaatggattctttaccatgtcttggtttgccccacgagctagttttctaaatgtactaacagtgatgggattcttttcctttcttttacatgattgttggttggttgagcaattttgtttgacttaacatttcccgacattggttttcttgaaaaattaattatgtgatatcgttgctgataagtcttgaatttttatcagctttatctttttttgtcggttgtcagaagggtctgaacactctatatatcttgaatgccagactcactttttagttttacgtattcttggcttgctttagaatagataaaccaattattacttttgcttgtgttttctttttccatcccagagataactacattctgttgcctggtgccttttttttttttattaacaagcattttctaatttctttgaatttacgcttttagtgtttt

SEQ ID NO: 66731 - DNA, 980 bp, Cucumis sativus
  Intron number 1 from transcript Cucsa.124430.1 (locus Cucs a.124430) derived from phytozome v7.0 (chr-ID scaffold0100 1; pos 371408 to 372387)
atttcctacgaattaagccagtacggaaaacccaggtgaatatcaaaagaagtagaacagcaatgaaatcaacaaacaattttacaaccctatctccttttttttcttttcttttttgttcagcttcatgtgggtttcttttgtttatccataacctctcttaaaatctgtgtttttgaagcttgggttttaattccttttcttttcttcacctttagcttgcatcggatccgtggttttttattctgatcttcatttctcgtggccaatttcttttgggagagtaggttttgggttctgggttctgggttgggctttattttaggtgtatgtcccaattttgagatacccttttgtgttcgatgaaagtccccggtattttttttattttttatttttttttttataattttgagctgtttttctggattttgactgtctagggtttgaattgtaatggggctctattaattttgaactataggtatgcatttaggttgttgactttctataaggagaaataaaaaataggcggtaaggtaaggccgaaccaggattatttattattagaattactcatggtagttaacatgtagaattcttgtacctccctaaatcgagttttcttaattgctaaactgatttcgtggggaattagctgctttttcagtttgtttagtcaacatctgattttgattcctaaaaaatttatcctatgcatgatttcacaattttgttgtctttatagtaaagttttgattctggactttcggtttctactttattattgtaattttgagatcctatcatcacctattgtttctcatagatttcttttaccaaaaatctattatttctttgaatgtattgcataaacaactattttgttctgcattaccgttgtctccttctctgatgctaatggatatgctttcattgatttaggcgaggggtggcacagaatattcttttcggagcag

SEQ ID NO: 66732 - DNA, 612 bp, Cucumis sativus
  Intron number 2 from transcript Cucsa.124430.1 (locus Cucs a.124430) derived from phytozome v7.0 (chr-ID scaffold0100 1; pos 373038 to 373649)
gcattggtgtggtcactggaagaggtcttgcccaggtaatttatttgttttcaaggctttcgcatttttacttatgttgtgtctatcaagcagcttttatctgaaaatcagtcaattgaccgatgttgatttttccctttattagttttgaattttttttttatgggagaatttcatgtgttggttgtatcttgtattctcctatgtggttcgtttgcatctttctcattagtcttcaatttcgaggacttttttgtaattatcttttagacacgaatctctatggttgaattcccttcttgtagaaggggtcccctgtttttttgttggctttgtttttttatgcccgtttattctttcatttattctcaatgaaagttgttcttataaataaataaatgtgtgtggacgtgtctctgtttccagtttgggttgatgtttgatatgttagcttgtaaccttcactttcactttatgcctcttccattttggtttgttccatgggtataggttgatttttgttattttttaaattacttgactgctagttgttaaatgttactggaggttgacatatttaccctattttgttttgttgattataccaaagat

SEQ ID NO: 66733 - DNA, 773 bp, Cucumis sativus
  Intron number 2 from transcript Cucsa.132080.1 (locus Cucs a.132080) derived from phytozome v7.0 (chr-ID scaffold0103 7; pos 152308 to 153080)
caaactccattaggcttttgtcttttgaagtcaaggtatggtttctttgggcatttctttcctattttacttcttttaagtgaaatgaacttgtttggttatggttgttttgtggataagttgttgggatttttagtggattgtggaactggaaattatggaatagtctttcgttctctactgcttgtctttagctaaaggttttgttaagaaatcaacaaacaaagatgaatgaaaaaaaaggtaaagcaatggagaatcaactcacaagtttacatggttcactaatagtttggtagctatgttgggtagaggaagagaacaatattattagaaaaaacagttcattaacttatgagtggaattgttcgtttgaataaccattaactaggttggtgaatattaactgagttgaaatacatggctgtaagatgaaactgaacaaatcaagttggttttgttggtttgaaatttgatgtatgatggttggttggtttgatttcttaagaaattggttttaatattggttttggctcaaaacgaatccaattcaacctaattacgccgtttttttaataacaaaccaagctttcatcgaacaaaatgaaagaatacacaaagtcatacaaaaacaaacaagcccataagaataggagacacaagaataggacctcgtaagctgttcactattgaactacatgaagaagaacacagtttactattctttttcagtttctcagagcgtgatttattcttggtttggcaggcttcag

SEQ ID NO: 66734 - DNA, 633 bp, Cucumis sativus
  Intron number 2 from transcript Cucsa.031960.1 (locus Cucs a.031960) derived from phytozome v7.0 (chr-ID scaffold0042 9; pos 1233623 to 1234255)
atttcctttccgtcattgccttccaaacctctgcagtgagttctctcttcttaagagtttgtttatgtttgagcattggtttcttaacattatttcagcgagaagttaaaatgtgcatgaggaggaactaatcttcataatgatgcatcagacattaatgtgttgataatgttcaatcaaatatgtaatgcttctaacaatctacattaagtcgtgggatgcaacaaaagtgtactatgatcatatgagttatgaacatgtataaataaacatccatagtgtacaattaaagtagctatatggtcattaagttttgaaggctacgaagtttaattcttgctttaatttgattatcataaaaagggtactgtatttagatttctaaaagcttatatagccatagaatgtatacaacttccttttgtttctcctccaagcttcttcaagacgtactatggtctcttgttcatatcttaaaactcctgaaattaggcagcctatccaagaaaacatcatgtgggagttatattgaagtaaatattcatactacactactgtttgttcgtgtgtcttaccttcatccattgaatccttgaaggtgggaagcagtggaggatacaagaaagggattgt

SEQ ID NO: 66735 - DNA, 488 bp, Cucumis sativus
  Intron number 2 from transcript Cucsa.106400.1 (locus Cucs a.106400) derived from phytozome v7.0 (chr-ID scaffold0093 0; pos 19288 to 19775 reverse strand)
atcattgcaagtactttatctatcaggtatagattctttgtattatgttttctggtttctcctttgatttggtttttgttcatctctctgaggtttctcttgaaaaagtaatatgggtttataagatggtttttgttttgtgtgtttcaaaggtagaaaaagacttttatatgatagatatggagtgtgtatacttttataggcaaagataataaagggagtactttcattgttaaaatggtaaatcttttgtttgatcttaatttaaatggcttgatgttgctgcatttttgtttcttataagctattgttgttgcaaccattttgcttccatatatgactgataaaggggagtcttaagagagttgcaacggaaactttgtataaatatcaaatttgatgcctaactaaactccaaggtttgattatgacatttcttcttatgtattacagttgctttgcgggttgcagcatcttcattcagctaa

SEQ ID NO: 66736 - DNA, 402 bp, Cucumis sativus
  Intron number 1 from transcript Cucsa.130720.2 (locus Cucs a.130720) derived from phytozome v7.0 (chr-ID scaffold0102 9; pos 775150 to 775551)
aaattgcatcgtggattgaattggctatattttcggtgaatctatctcgtctttgtttagttctggaaattatctcatatctttctatggttcttttaattgctcttctttctttatcttcgttttctcaaaacaactggatctgctaatatgtacatcttatgatttagaaacatgattgtatttcatggtgtgcctatgttttgatttatgtactcaagttacatctcggttgttatgctgtgaaagtttaaagcataaaatcatggttccatggtaggagaagttttgcatttcttttttctcatttttggtagataatgttgtaacagatttctgattcttatgatcattccttgattcgcagcatagctgcaaaggcgcctccctggtgttagtcta

SEQ ID NO: 66737 - DNA, 693 bp, Cucumis sativus
  Intron number 1 from transcript Cucsa.192460.2 (locus Cucs a.192460) derived from phytozome v7.0 (chr-ID scaffold0133 3; pos 305745 to 306437 reverse strand)
ctcttcaaagtttgtcggattgctctgtttttctggtatagatggatctctttactgatatcaagcttttgctggtgttgattactgtttttgtactcttggtgaatggctaggttttggaaaattaaagacgatgatgttgattttaatgaattcaactttatactgacttgttgtttcttggcgttcttttttaaacaattaatttgttggtttactggttgctaattgtttgatctggaaattagacggtataactggaagagttgatgcgttgcggctgtagtgtctgcttcgattctttgagtttgaagcgatgagatgatttttttttttggttggcgttgatattaaagtgggttggtagatccaaagtatgcctttgatgcattataagattttgatgaaggagattgtttttcttagtgtgtgttagagtttttgaaaactggtgttgagacttttggtgtgtttttgggcatttgatttaatttgtacttcttctaagaagttcttgaatttggttttaactagctagttccatggcgatgcatgttgtattggttggccagccttacaagtagttacccttctctttgttgtgtaattttgtttgcttgaaagagaattattctccagtgagataattgaatgctcactttggtcagttaggggatcaattagcgggaaaag

SEQ ID NO: 66738 - DNA, 1037 bp, Cucumis sativus
  Intron number 2 from transcript Cucsa.181870.1 (locus Cucs a.181870) derived from phytozome v7.0 (chr-ID scaffold0125 1; pos 94927 to 95963)
aagaccagtgtgaagatcatccacgctaggtgagtttctaattttatgtgtttgattgttgatgttgatgttcttctttaattctggatttgagattctgctattgctgattatttatggagttttttttgtttattattattattctggaatgaattgatgttgaattaaccttttcggatgaaagtttttgaaaacctaccctcttttggggatcttgtcgcggtgtgaaaacttgaggaaattctgaagcttttgggtccttggctttgtttgaatggatgttttggatggcttgagaaaggttaaattttgataattgagttaatgattttgtaaggagaaaaattgcggtttctccctaacaaacaacaacttgattttgtgtttgttctagaattctggaaactgtaatcggaaacagcttccaggaaaaccttgaacctttttccccaaaacactcttagcttttgccttctgtgcttttgtgcgttcatcactttttggtgtcttcatggattagagctttggctttttctttataaaaaaaaaaacgattcaaggacaaatttaaacaatttttttacaatctttaactatatgatcagaagtaattgcatgtattgaaccaatcttctttcattcattaaaattttaaaatacattgtctaattattggaaatgcgagacacgccttcaatgtagctcttcgcattatttcattttcttggtaggactattacatttgagatttcaaacacagactaccaatagaaggtcgataaaattttgtaaatgatgtattggggatctaaactgaaaaacttgacagaagtttgagtgcaaaagtccacagttttttgtttcgtttcagttcagatgtaaagaatagaagtttttcattacagaacattttaaatggtttatttttgcattattttccacgtttctctgaatgagtttcaatcctgatgtgttatggttcttcaaatttactgtcaggttgcacgcacaggctttgaccttagctgctcttg

SEQ ID NO: 66739 - DNA, 748 bp, Cucumis sativus
  Intron number 1 from transcript Cucsa.135680.1 (locus Cucs a.135680) derived from phytozome v7.0 (chr-ID scaffold0104 4; pos 498581 to 499328)
cttcatttgctaacagggtgttctttgtttgagggcttttcttattagaatactcatttgttcttgttaaatatcttgatcttgcttggccaaggaaatgcatattggtttattttagtttcactatattaaatttcagcattactcaaatttctcaccaaccatacagggagttcaccttttctccgtattcttgtgtatgatcccaaacattaacgttacttttattcattctgttttgcagattgttgcttttctgtattctggtaaggtgtttgttctctgatgagttctctgtcgtaatttcaatttcagtgattgaaaagctttgttaagtttatggctgtgtgtgttcttaattctatagtgcaatgaaatatttctgttacttacacgtgataaacaaaactgagggactgtctaattggttgttacttctaacattcatgacagtaaagttgtaaagttgtgtttggtttaacttttcaaatgtttaattttgatagaaaaaattgtagtgtttccactcaatctaatttttgaaacactctagaagtttattttaaatcatttctatcaaaaagtttaaataaaagagagttctttataaaacgttttttttttctttaatcaaatccaaagggcccaagtatgtgttacctttatgtatagtgtttaaaatggctttggtttctactttgatatggtttttcttctaactatttttttattttgtgaaaagttcccc

SEQ ID NO: 66740 - DNA, 616 bp, Cucumis sativus
  Intron number 3 from transcript Cucsa.097200.1 (locus Cucs a.097200) derived from phytozome v7.0 (chr-ID scaffold0091 9; pos 2539605 to 2540220)
agtcttcttgctgcgggttgtaaatctcaggtgggtttaatttggtagacacgttaatttcgatttttcttcaatttcaaataacatttcaagtttgtcagattgctgggaatcctttatcagttcatttaagggtcagttataaaatcggtgtttgaactttcagggttgtgcttagcctctaaactttgaaaaatggctaataggtccacaaactttttgttgttgtatttaataagtttctaaactttacaaagtgttttgtagtaaatcaaacattcaatgtgccttataagtcttaatcaattagacaaattttgaagtctagggatctatcagattcaaaattagaaatgcaaagacatactagacacattttaaaattcataaacctattcgatataaaattgaagatttactatctgaccaacaaccattcaagttcaaggaccaaatttataatttaaccattaatttatagaggaatttaaaagtatgagatatttcaattgatgaatttagagtcattagggaagacaattcttgtgatataattgtacttatacgaaaatgctactcagattctcttctgggattggaggaacagaaagcaagt

SEQ ID NO: 66741 - DNA, 947 bp, Cucumis sativus
  Intron number 1 from transcript Cucsa.162830.1 (locus Cucs a.162830) derived from phytozome v7.0 (chr-ID scaffold0114 4; pos 2352506 to 2353452)
gctacattgtcatcaagggccgtccctgcaaggttaaaacccattactaatcttctctctttttataattgatctcctctgtttttttccctcctttctctgaacccttaattgcttaactttttagattaaacggtggctttgatcgttgttgggttgttataggttcaaatcagaatttaaccactgttgcttgtttgtttttttttttcattacttttctgtattatttaggaatttaaagatgttttcattactattttgttgggttttgtcttacatcacgttgttcaacgcattattatttatttatttgtttgtttgttttgaaactacacattattactttgttgcattctgactaatactgactccaaatttgtaagctatgctgatttggttttaaatagcaaacataaattgattcttaatctctagcaacaggattactttttgtcaattttttttgttattattgtcatcgttagaaatacttgaatgcactatatatgaacactctaatcttgagatgtttttgtaatatgatatctgattttttttttttttttctaatcaacaaggttaacatactactagtaacctgttgattctttatcgttttctgtttatctttggttgtagattgcttaaaagtcgttgttatgttattttttacagttgagtcactattgtttatcatggatcattgctgaattaaaggggttgctttccatgtatgattagatcagtaaaaaagaaagtcaggctctaattgtactggtttgttcattcaagaggcagtgtttgagaagtctcttcatgtgccatcaaagcaaaatggtcaactggcataattgtgtaggagctttgatctttacagtatttatttttaatgatattatgttaatgtaggtagttgaggtttcaacatccaagactggaaagca

SEQ ID NO: 66742 - DNA, 837 bp, Cucumis sativus
  Intron number 1 from transcript Cucsa.173670.1 (locus Cucs a.173670) derived from phytozome v7.0 (chr-ID scaffold0120 9; pos 377458 to 378294 reverse strand)
ggatttaccaggtattatttgttttaacttttactcgttctatgctacttcatctcctttctttatcgtcgtcctatgttttacatggaggacatgagacaaaatctctatctggtataagtaatacttttgaaataaaatccatatgtgcttggtttcaaattggatagtaaaattaaacctcttatatattgacctgaaaaatacaatttattatattgttctttgagtcttcaggtgggttcactttttttcccatttaaactatttgaaaataagaagagattagatagaggagtggcaagtaaaagaagaaagctttccctatcttcaaattaagtactccattaaagattatatcttttttttttcttctcttcttctccttttatggttaaaattagttaaaagaatatatatatatgtgtgtgtatatatatttatatatacatatatataaatagaaagtgaaaaatgaagggttcaataagaatggtgttgctttattattgatcaattttgtttgtggtgggggcttagctttattaaagaaaagtgttctctctctctatctctattggcctttatttatgaagcttcttatttgagacaaatatttcctcaaacattcaagtcaaaaagaaagctataggttacagaaaagaatcaaaatgcaattcaattatttttcaaaatttaaatttattattgctttaaaattttcatacatatactaaaattcaattatttttcaagaaaaaaacacgtaaattgaattagctggggttttgttttttcaattacaggaaagtcattgcttcctagcaaggatcttga

SEQ ID NO: 66743 - DNA, 543 bp, Cucumis sativus
  Intron number 1 from transcript Cucsa.011990.1 (locus Cucs a.011990) derived from phytozome v7.0 (chr-ID scaffold0015 4; pos 1410484 to 1411026)
cctacgattctcccaattccaaccttgttttcaatgtaaggattcactcgtttctttcgtcatttcactttacttgtggctttgatgttattggtgtttgatctaggaatatcaacttgaatttattttcgacggaaagaactaaaattaggttttaataccactttggcctctatccattcgaaataaaaataaagggaccaaaatgattcttataaatgaactaaattaaaaaatgcaaggtatttacacttatattatacttatatttctcttaactctatcttgtttcaataatttcttagttttatcttctaccaacttccatatattatcaagtttttgaaataatgttcaatagaagagaaaaaaaaatgatattgagttactaattcctcctaatgaatttcatagttcaattagattgttatcactaagggtcaatttggctaatatgaccaaaacatagaagtgttaccatgaacagaagagaaactaacatcacagatttttttttttttttgacagtgtcacccattcttc

SEQ ID NO: 66744 - DNA, 529 bp, Cucumis sativus
  Intron number 2 from transcript Cucsa.160890.1 (locus Cucs a.160890) derived from phytozome v7.0 (chr-ID scaffold0114 4; pos 971180 to 971708 reverse strand)
tccaaggtttgattgatattaagattcataatctttgaaaactaccttttttccatgttagattatacctatatggttttgttttcccttctatctgattttgtactttccaagcatctccaggtcttagcttttatattttcagatgtattttccaaatgctattgaatgtcacaacctgccccagggtagcctgaacctaggatgagatgtgatgacaatagactccgagtgtgcaacggaatttactgtaaaaaattattatctttaaaccttactttgaatatccagacgagcttcctttatgtcgaaatctcaaggctagattagataggatttttgtatgagattacctaacaaccacaactattgaaagattagagaaggactgtatcctctgattcagaccaccaccattgaagaatatgttttcaactttgatgtcatgtgaaaaatggaaattcatatgaatagtggtttgttgttgttttcagacaagtggaatcccggtttcggagatttgccagca

SEQ ID NO: 66745 - DNA, 919 bp, Cucumis sativus
  Intron number 2 from transcript Cucsa.075980.1 (locus Cucs a.075980) derived from phytozome v7.0 (chr-ID scaffold0078 9; pos 492682 to 493600 reverse strand)
agcagaaactgagaaggcgtattagtatatacaaggtgagttgtttcttttctccttgaatgttgtttagagaccttagttgtacttaatgaatctgaaagttcatgtacctgaaaagtgagttcatatcggaaatccaaacctccagcctcaaggtacattgtgtttgttgagctaacgtttctgttaaaaaggaattttgattttaggtatctagaggaagtgtatgcttaaaggctgacattttcatggtttgaaattactcggtggttttctatagtggtgtacttgttgatttctttttttcctcaaatcacttaggtctcatttgacatccgtttcttttttgctggttgaaaattaagcttatttcccctcatttttactacggtagttgaattattggctaaattccaaaaatgaaaacaaggttttgaaagctagactttgtttggcaagctattttctcccgttttttagaatgatttgcatttttcttaaatataatgattgaattcttggccaaattccaataacagaaataagtttttagctacttttttagttttcatgttttggcttggttttttagaccattggtttagataatagaggaagatgtgagggtagaagtagcgcatttggacttaatttaaggaaaaaaagtggttaccaaatggggtcttagttaattatggatgccaaagaattttggctaatgatatatgaatatgtaggacaggatttaaatgcatagaatgaagctttgtgcattgtacttccttcgattgattattactcatacaatgatttatttttgagttgttatcatctgaaaatttttgttgtagtcatcttgacccattgactcaaatgtttctctggtttttgttggaacgtagatagaacttcgcaatcc

SEQ ID NO: 66746 - DNA, 510 bp, Cucumis sativus
  Intron number 1 from transcript Cucsa.175360.1 (locus Cucs a.175360) derived from phytozome v7.0 (chr-ID scaffold0122 5; pos 77047 to 77556 reverse strand)
cctatcccaaaaggtatgtatatctctttggattcctttttctttttcgatatctgggttttctttagattttcatgattgttgcttattttctgtttgtgggttaatcgtagatttctttgatgggtttgatttgggggatttttgggatctgatatcggtgtttacgagtgatttgagagtgatttggggactttttttaaagtatgggttcgattcgattcagtgtattggagattggacgttgattctcttttcatttgggatgttattgctttgtttatctgttgtgtttgtgagtaatttgtgctctgtttggttaatctagggttttgatggagggaagatacactggagattgacatcatcggagtgtttttcagggttactttcttcagttggtgttgttttttcctttttctttttctttgtttctttgtgttttcccttcagcaatggcaatattcaacttctcagaaacaattaggattccataagagatgagttgaa

SEQ ID NO: 66747 - DNA, 964 bp, Cucumis sativus
  Intron number 1 from transcript Cucsa.148770.1 (locus Cucs a.148770) derived from phytozome v7.0 (chr-ID scaffold0110 7; pos 775494 to 776457)
ctctcccttccccaggttacattcggccccaaaaggtttgtttcattacataattccttctatttctccaattgatatgttttggttgttcatgaaaatgcagaatttcgaaatgaaatccctatgtgtaattgggtttaatttcgattatctggattttgatagaccatccttattagacgacagacgtggtttgattttcttgttttttgttcgtttctgtggtgcatagtttgtacttgaagttggttattctgatatatatgtacaccaaattagctttgtgctgtacaatggaaattgggaattcattttatttctgggcaacagtataggcatgtgcctttacctgaagaaacagtaatcggtgtagatttttgaggtggtgattgttgaagcaagatgtcaatcctataatgattccgatgcacttgggaaagtaaatagtatccattaagttgaagttttttatttgctgctaaaaaagttgattgcacaagtaacagtttgtatcacttgatattgggaaatgttgtgttccatccttcttttatggacgattgaggaaggcttctttgaggctggtgactttttgtggttcgagagaattgagaaataggagaacttttagagtagagatgtttgggggtggtggaatacaactaagtacaacacacctctgtctctttgtctaaacagctttaaactgtcttttgaagtttcccatcaaaataactacatttttctcttatcttcgacgggttgagccatactttgtgattcttcttttgtttttgtctgttctttggttttgtattgttttattggtttgaactttttctgtttgtcctttttgttgtcttaccatttgtactctttcatttctctagaaagttctgtttctcatgaaaaagttttagttgatgcaggtgggaattgcctcaatctgagaactcaatattgg

SEQ ID NO: 66748 - DNA, 122 bp, Cucumis sativus
  Intron number 1 from transcript Cucsa.170640.1 (locus Cucs a.170640) derived from phytozome v7.0 (chr-ID scaffold0117 9; pos 8088 to 8209)
ttgcaccgtacgtttctgattcttttctccttttgtttgaatttttcctcttttcttttttttatcaattcgaatgtaattctgatttatgattgcttgtggttgcaggttgagttttgtat

SEQ ID NO: 66749 - DNA, 928 bp, Cucumis sativus
  Intron number 1 from transcript Cucsa.126270.1 (locus Cucs a.126270) derived from phytozome v7.0 (chr-ID scaffold0101 7; pos 213454 to 214381 reverse strand)
tctatttccaggctcctcgttcttgtctccgttaggtatcttcttcttcccaattgtggtttgatttttgtttgtatagtttaaatgtaaggtcagattatttattatggtcctgtgttctggttcactgttgttttgtggaattacttttatttgttaattgttgtatggaatatgttctgttgtaaatattatgttgaccgaccataccctgtttcatcatttgtttggactgggactgcttctttttttttcctgttaatccgaagttgggatttctgcggtataaatataattggtgtcagaattaatttggattatgcaccattgatttacttccaagatatgagttaaaaacaggggtagatagaaaactgcaaaatcttaagttcttgtatctattttttaaaaaaaattaataaactaagggggacaccaacttttttgctccgtgtctgcaaatcaaacatatcattgctattaaaaattaaacatttcattctgatgtatggatccctcactcgataattacatcttttaagtctataggatacactattaactttctctgctgattctttccccgataataattttcacaactaagggtagacgaatcaattctttaaaaagctgcatccattaaagcagagttggttctaatctctaacatcatctcattaagagcattgcttaaagatttgaatcaaaagagctcaactatactctgtacatcacttaggacttcaaacagagcgtgggagctatcttttatgttcaattgggctcacccattagggagaggaaaaattcacgttatgcctactgcgtgtttaacaaatgaccatattagatattattcattttacgtatttaatcagattttgatgcactcttttctcctgcagtggggggagccttgtagcat

SEQ ID NO: 66750 - DNA, 480 bp, Cucumis sativus
  Intron number 1 from transcript Cucsa.002240.1 (locus Cucs a.002240) derived from phytozome v7.0 (chr-ID scaffold0003 2; pos 1682 to 2161 reverse strand)
gaggggaattcaacttcttctcgatcgaagttctggtaaaatggttttgttcatatttcgaattttggcacttgctttacatttctatgtttttcttttcttttttcttttttcttcaaattttgaatccaataaattttgttaattctcttataatttattttggaaaatctcatgtcaacaattacttccttccttccttccccatgtttctatttttatttttcacatatgtctaacttataaaaatgttttcaaaatcaaattaaagcttcctggtcggaaacttactcttctgttttcaaatttttctaatgacataaatgtttcctaaatcaatcttatcaaagggaacctttgaaagttctcaaataactttcctaatgtagattaaccaaaaagaaactatattatattaaaaagaaaaattgttaattacgtgactttgagcgtaattgttcgtggattttactgtttagg

SEQ ID NO: 66751 - DNA, 911 bp, Cucumis sativus
  Intron number 2 from transcript Cucsa.058870.1 (locus Cucs a.058870) derived from phytozome v7.0 (chr-ID scaffold0061 4; pos 985850 to 986760)
tgaaatattacttttacattcatactattctacaggcaagttcatctaatcttttctagcaatatcataatagaatgaaaaactgagccggccgaacaaaactaatcgaactgaggagaggagaggttagtgtcagtttaaacaattttaaaaaatattcaaagacttaaatcaaccgatcttttttgtactcgttcattacaggaatcggtttgaacatttaactaagtcgatcacagtcgattcagtgtcggtttagtcggaaaaccaaacccaacaaaccgatactcacccctaaacaatacactcaaatactaaaatgaacgttcttttttgtttttgttattgtttacataaagaagaatcctttataactaaacaaacaataaatgtagaagcatcattaaggcaattaactttaactttttattaaacaagcaaacaatccactttttcttgctctactttatgaaattaattatagttaaagagaaactataagggtcctgattctgaatatcttatacatgaatatacttgtgaagaaagaaaagacaggcatcatcacatcataactaattagaaactcatagccaaatatctgtaatgttgaaaatctagcaggtgtatggattataatattagagttaggtgagatttagctctggaaagtcaaaatgatacaaaatttgtatgacagttgaaggattttgattatacttcaaccacaaagatggggtccaatttgatgaatctcacttcaagatcaaacagtcgtggttcaagtgattataatgctagtatttttcattctcacaatgagttgttaaatcagccattaatatcatattatcttgatttgattatgttgaacagatagtgtctgtattactagtcacagcaggagcagt

SEQ ID NO: 66752 - DNA, 411 bp, Cucumis sativus
  Intron number 2 from transcript Cucsa.076090.2 (locus Cucs a.076090) derived from phytozome v7.0 (chr-ID scaffold0078 9; pos 553543 to 553953 reverse strand)
tcatttcatctctctgttgctcaatcctttcttgggttccttttaatcaaattaacgtgtttatttcttgtaggtctcgagattttttgttcttcgtcatgtttcaccttggcggaaatcgtgtcgttcccttcgaattcgattgccgtctagctcacgcacgcgatgtaggattccttttatgtcttctattgaagtgatttagactgcatcaagttctggttgttgattctgtttgatgatttctttttattatcttacgcttaagtaagtgcgtctaattagaatgaagaggatgaacaaacccactcccccatccttttttcttttgagattaccaatctttgttttttattcgaaactttctgtttttcagttataagagctgttgcaactcctaattcggcgttg

SEQ ID NO: 66753 - DNA, 403 bp, Cucumis sativus
  Intron number 3 from transcript Cucsa.003430.1 (locus Cucs a.003430) derived from phytozome v7.0 (chr-ID scaffold0004 1; pos 3405 to 3807)
caggtccaggttagtagagtttctacattttggttttagaatgttcttgagaaacatagacagtagatttttctcttcctcttatgtttttgctcgttttggtactaagaagacgatttggttggccactgttcgtgcttccttttgtagcttgtggggcgaaaggaacaaacgtctctttaatgattatttttcctcttttactcgtttaaacgaagcattcttccactcattttagtttatcctttctagtcagtaattgactttccctcctgtaacaccttgtaatgtgtggatctgattctttatcaatggattgtttcttctactaaaaaaaattgtgacattgtagcagtggtttgtttcaggggttgctgaagtttccatttcggataggctggta

SEQ ID NO: 66754 - DNA, 570 bp, Cucumis sativus
  Intron number 1 from transcript Cucsa.165490.1 (locus Cucs a.165490) derived from phytozome v7.0 (chr-ID scaffold0115 3; pos 864264 to 864833 reverse strand)
gggcaggttgaagaaactcattataatataggcaggtagttcatttaagctattgcctcagctgttatatatctcagtagcttcacatttccttttgaactcttagattgaatgacattgatgagttatgattaattgcttatgaaaatttctctgagggactatgcttctgattgttttagtctgctagtgttagacattgatctggaaatgatttgcctttgatgatttactgtcaatgctcgaggagggagaaattgcatttcgaatatgaattgctgctttcttaggggaatggcttgagtttgattaagcgttaaaactctttctcgtgttagttcccttgtagatattgtatgcacaatagtgtctatggatctgatactctaatagtgtttattatattgatctgaggaatttttaatggtattgccctagtccaagctgtgtcatctagattggtagatgctttagcgctgcccttctccttttgattgattagaatgtgaaagtggacttttctttttgctgatatttattagtgctcttcaatattctacagtgaatttg

SEQ ID NO: 66755 - DNA, 879 bp, Cucumis sativus
  Intron number 4 from transcript Cucsa.083220.1 (locus Cucs a.083220) derived from phytozome v7.0 (chr-ID scaffold0085 8; pos 161390 to 162268)
ccggtcagccttttttctattggtgagaaacatttgttagctccacatacttcatattaaaacatctctcattttcttttttgctttttctaatccttcttcttcctaatctctggatgatggatttgagttaatatgtgatctaatgttatttactcctcaattaatattgatgatttccctctaatcagttttctaaaattttaaacccaagtatttaaagtgttgatatagtattaaatagaaaataccaagtactcctatagatcgaggagtgtttgataagaaaccaccccaaggcaaattttgtatttttcaagataataattaaaaaatttccatgtcgctatggtaatgagaaccgttagattaagtgcaataatttattcctgaacttgaacttaaacttaaacttggtatcattagactatgatacaattgcggccatgaatttctagtgtaatttgtttttctaaaagaataatacacgattaagctcatgacataatttacataataatatttaacactccactttggcatggacatgaagatttgtagaaaaccttgaaaatcaatattaatagaaaagaaacttgaggacataaaaatttgtagaaagacccaagtggaaatcaaaatgaatagaaaaggaaaaaagattattgaaatttaaataattttttcttttttttacgataataaagttgatgggtcaatgtaaatttaattacatcaaacacttttaatgataatatttgcttagtttgatcgtgagcaaaaaagttcaatggtaaaaatgttttaacagttttttagcaagaatgtttgctaatcaatgactcattatgttaatattaatttcactctacaggttgg

SEQ ID NO: 66756 - DNA, 893 bp, Cucumis sativus
  Intron number 2 from transcript Cucsa.078410.1 (locus Cucs a.078410) derived from phytozome v7.0 (chr-ID scaffold0079 3; pos 759534 to 760426 reverse strand)
aggctctacaagggttgcacctttgtgatcaagaggtttgcattttgtataactgatcaattctccttttgctgcttagtagtactattaaatattaaatttctacttgatgagcaataacactaaatagagaatgattatccattgttgatattattatgatgctttatgatgatcttgcttgctatgaactatactttagttttttcataaattcctccattttgattgatcagagcgaaaactgtatttcaaaaaagttgcttttatttaatcttcttcgataaaaatgttttaaataaatctttgaaagtgtttgtgaaacgattttgagtgattgctgtcaaacccttcaattttctttgaaatggctcatttttcaaatttgtactcttaatctttgaatttcttttactttttcttgtttagactgtctcaagatattatcttgttagagttggtcagaggagacactaaggacaaaggtttttctaatgctgaagtcctcccaaattgcccttgtagaatatagcaccgtaacatgaaaagtaggttcctacaaaggaaagaagctaagtttaggggttttatttgtgtatttcttgataacgttttcacaattgaaaaataggtaacatggttgagcagagatgtagatgtcaaaccatttttctgcatcgattcgatgttcaaaaacctttgattgagcttttatttttacttttagggcttttgtgtttgaaatcttttctggaactaagaccaatgcacaattgcatttgttatttgagttggcatagcactgatgtcttaattttgattagctcaaccttgcactgcagcaaatatggtgtgttttccttttccattaactaaactcttacatttacagt

SEQ ID NO: 66757 - DNA, 629 bp, Cucumis sativus
  Intron number 1 from transcript Cucsa.157870.2 (locus Cucs a.157870) derived from phytozome v7.0 (chr-ID scaffold0114 2; pos 97231 to 97859)
agctcgtcactgtacttcttacctcgccttgccttgtgggtttttgttttttttaacgaatcttgcttactgggtggctaacaattaggctaattgtgaagaatatgtggttcctctttgaaattagcgaatgaataattctatgttgttggtggtgtttgattttgttgacttatttgggggtttgtgatgttcgtcagtaaagctacgcagcaattttagggttctgagttaaatttttgggtgttgggtttgaagcaattgggatttgtttgtttaatttatagtccacgggaattcttttcaattcatgatttgttttcgtgctcttcatgttaacttagttatttttggttgtacttgtgaagtttcgttaatcatgtggtttttgtatgtaattgtcactctatggttgtttgccctttattatttaggattttctgtgactttaaagcattgagcttttgtaattttaagttctctttcactcaagcctcaaatgggttcagggcgctgctcaaatggaaatgaactttctgtcctttccgggttgagtttcttgcttgtgtgttcatttgattataaccttataatgattttccctctactttctgggtattagggctgca

SEQ ID NO: 66758 - DNA, 653 bp, Cucumis sativus
  Intron number 1 from transcript Cucsa.032410.1 (locus Cucs a.032410) derived from phytozome v7.0 (chr-ID scaffold0042 9; pos 1715565 to 1716217)
gaacgataatctctcccaactctatcaccgatcaggttcctcttctttcttctcttttctttttagccttcctagttctaccctttttattaagcttttcactggaatattgttatgcctttttcgttacggcccctaacctagggttctacttgttttttgtatcttgtggcgtgcttccgtttgaaccttctttacgtttttcgttgcgattgttatttttttcatcttcctgtttctttccttgcgattgctggaaattcatatctagtttttttctgaataactttaagttatgttatccgtagcggcagctgaaatttccggaagttttggttattatttgttttttattcttttcatggtcgatggatgtctatgattttgtagggaagtgatccttgcacctctagtactgttttacctaagtgcggtgtttcatgaattgggtatgaacgttttgggatgatgtgtacggattatggatatgagttttactttgtgagatttcgtagcttatcgattgtgctttttatatgctagaaagatctattatttatatccttttaagtttgattacggctctcattttgaagacttattgatattgttattgttattggatgcgaacagccagccttacgacacaggat

SEQ ID NO: 66759 - DNA, 793 bp, Cucumis sativus
  Intron number 1 from transcript Cucsa.083640.1 (locus Cucs a.083640) derived from phytozome v7.0 (chr-ID scaffold0085 8; pos 405443 to 406235 reverse strand)
cccttcctcttcaggtactaatatctctctctttatatatacatatctctctctctctcttcttcttcttcttcttcttccatcatgcatgatgttgacaaaagtcacatgggtggagattatgggttatgcttttccaacgtgaagcatcataaacacaaaacatatctattgtctgttcaattccaacaatgcagtctagtacatttgtattcctctcttgcaaaatcaccttaatactcaagagtacaagatgtttataccatataacatttcgaagccttaactaaatttcaaaacttttaattgtatttataatttgagtggctgtcgtcgaaaatggataaaaattagtatatagaagatggaacggtaaaattttaggacaaagatgaaaccggaaaatggcatgtcgatcaaacacaataaaatgaaaagaagtaattttcaaaaagcatcttcgaaaatataaagcaaacaaaagaaactggatcccaaaatatttataatttaatcaattaattctctaaactaaaactgagatgatttcgtacaattccataccagaatagcatatcaagaaacagtttgatctaaacctatagctttcctatctcatcataacaaaaagttcatttacttgaaaaattgaaattcaaccaataccaattgttttcaataaagatgatcatgccaggtaatacgaaacctgagtacaattgatgagaagtttcagattctccaagcttaacataaagtttattctcctcataattttgaaggaactggtaga

SEQ ID NO: 66760 - DNA, 943 bp, Cucumis sativus
  Intron number 2 from transcript Cucsa.012840.2 (locus Cucs a.012840) derived from phytozome v7.0 (chr-ID scaffold0016 4; pos 597730 to 598672)
tagcgctggtataaaattatttttctttttctttttctgccttgctgtgggattttcccccttttttacttgatttagattgttttgattgcctttaatttcattgatattatgatattcattgctttattttgttgcttgccttcatctgatcttctcttgtgtctgggatttctctcttttttttttttttctacttgttgattgttgaccgtttttctacttggtgatttaggcagttagttttttttttttggtctgaaaattttaggggttcctttaccaactgctagaagaatgatcgttagatcatggttttcgaaatggaaattcagtcaacgaatcccgtatttaaaatatatcagaatttggttctattctggggctgaatatcttagttgtccaaattcttaaatcatttcctctgaaagttacccttcgacccttcgaccttatatgttttggtgttattattatgcatggtgagaagatgtgatgttttcgttgcgttgtgaacgttattgaagaaagtctgtgcgctttagcttgggatgctcacatctgtagcagaagtttagacatttaagtttgtactgtgctcatttttcctttacgttaaattgctaattatgaagaacttctaactcctggtaaccttgattacttcttgcttctaaaagcaaagttagcttgacgttgattgattggacatgactatccaggtgttgaccataatgattcgtttaacccttgttgatgaatttatggtacatgcttttgcatgagaaagaatactgggtttgaggggctactcttctttttcctaagatttatttgtacctcttgctcttagtacatcctaagtagttttagtatttataacagtagttttctgttgatgccctgactcttaagtatttcctcaggtccagttgccgaagac

SEQ ID NO: 66761 - DNA, 576 bp, Cucumis sativus
  Intron number 2 from transcript Cucsa.086030.1 (locus Cucs a.086030) derived from phytozome v7.0 (chr-ID scaffold0087 0; pos 343888 to 344463 reverse strand)
gaagcgtaagcatattcttctttctctctctttattaattaactaaggctggttaaaaactagtttaaaatcattttgttttatttaattttcaccttgatggacctagtttggatcttaattttgaatttcacaaaataatagtgcgatttattgagtctagttaggctagacaaaaaaactgatgcaaacctgattataccaagttgatgactatcattaacaaaaggtacatgtgtttaagaagagaacactatgtaataattttgttcaacttttagtttttgttaatcacttttccaactttcaattaaaaatatgagattttcacctaccataaaagtaatatgtaaaaaaggaatactgtcaactttttaatgcatattcaaaccacaacataaaaattgttttgtttgaagccaaatgtgcataagacaactgattattacatatatatcatggattaaattagatgttctctatttttttatatagcaaatgtgtgtggaagtatatgtatgatattagttgaagaagaaatataggggtggaaattggtttcaggttttttaagga

SEQ ID NO: 66762 - DNA, 585 bp, Cucumis sativus
  Intron number 2 from transcript Cucsa.095540.1 (locus Cucs a.095540) derived from phytozome v7.0 (chr-ID scaffold0091 9; pos 1408439 to 1409023)
gtggatataacatcaccaacaaacactactggagtgtaagttttcttttttcttcatttccagttttttattacgtttatgagtagagttggattaagttacgaaactctatttgtttgcaatgcaagcatgctgagggtgccctttgcaccagtctgaagaaaaagaactacaaaagttagaagtgataaagaaaattaaattttggttaacatggaaaatattgaaactatttacaaaataaagaaaaatttataaatagttttagttatacggtggaagcaactatatgacaagaaagttattatttgttttttaatttaaacttttttctttctgggtataaaaaagaagtataattctgaatttctaatggataaattaagttactaagtctagctttaatgtatatatatctatttgaaagtttaggagtattaatacatctaggagggtttctgtaaatatataaattttgtatcaaattaagaaggaacttttacgtactgtactaaaaaaacttttcacctaactagcagtttcttgtttgtttatagtcaacagttttcacaggagctgtagggt

SEQ ID NO: 66763 - DNA, 366 bp, Cucumis sativus
  Intron number 1 from transcript Cucsa.066050.2 (locus Cucs a.066050) derived from phytozome v7.0 (chr-ID scaffold0069 6; pos 614128 to 614493 reverse strand)
ttccctggagttggtgcagaggttcgttgattggatcattagtttttctttttgtcttatggattctgtttttagtttattttgggttttgattggaagtttctatagatatatttgtttgtgttaaggaatcattcatgaacaatgcttctagatgtaatctgaaaggaattgcattaagatagtttgatttcgagatatccataggaattatagttaaaccatgttattcatttaaagctcttggaagatctggttatcctttgtatgtatgtttagcgggtcgaaatcgaaactattattaggaatcataacatgaagattaaactaaagatgcaagtgatgttctataggtgccttcctttg

SEQ ID NO: 66764 - DNA, 798 bp, Cucumis sativus
  Intron number 2 from transcript Cucsa.119170.1 (locus Cucs a.119170) derived from phytozome v7.0 (chr-ID scaffold0099 8; pos 1070389 to 1071186)
cagaggtatgtatattcaacaacaattttaatactattaacactatgctctataatacctacattttctttcaaatactttacacctccactttatattattataacccaaattaaggattagttttgattgactccaccaaaaaaaatgttcttaccagaaactcacttttacttaaattttgttggtgaaagttatttaaaagacacttcaataaaaagtattttgaatggcaaacattctaatttttttcaaaaatgatttatttttaaaacaacctttacaaattaattttctaaaaaccaaatggatatccaaataggccttattcttctttagtaatgattttggcttgagcttcctacttttaaacttatgtttatcttctaccagaattaatttaacacagtaatggaattctaataacaaaatgtagttattcaaaaactaccttcttttttagtttttaaaatattggctttgttttaaataaaatattagtgaaaaagtaaataataaaacaaataaatttttaattggacttgtttcatcgttttaatcttcaaaaactaaaaccctaaaaagtaaatagttttcgaattgtattttaatttttgttatgttttctatttacgaaaattgtggttttccaccataatttgttactatatatatatatatataatattgattatgttcccaaaacatttgaattatcaatcaaattaagaaacaaatttaactaaaatgttacttttttttttttttgggttatgtaattaatggagtagattgaag

SEQ ID NO: 66765 - DNA, 953 bp, Cucumis sativus
  Intron number 2 from transcript Cucsa.098570.1 (locus Cucs a.098570) derived from phytozome v7.0 (chr-ID scaffold0092 3; pos 528057 to 529009)
ggaaattgaaggtttttgaaggacaagagtagacgataaggaagccacaaaaacgaaaagcagagggtaaggtagcgttaatggctattccaaaatggtaaattagcgacccggttatgacattgggttgaccgaactgagtccaaactccgaactaagattattccacctgcacccattgtgggctaatcaatgaatttgggctttagcttttattcaattacaaaaatgtcccaaattcaccctagcaaaaaataattgtattaagtgataaattaaatattccatcttccgcacaacaatatttttatagttataaatataataaaatttatgaaaaattttaaaaataacaaattttacaaatctattgtaaattctgaagaatttgttgttttcaattaaatactatacgatctagaatacttttaccaaaattatatatgaagaagagatcggctacgtgggatgttcgtcccgccgatgaacaaagccgctctctctgtgatcactcgatttggcgcgagagaggaagagacgcagtggcggactagaagattgatgagatttcaaaattctgtaagttctatctctctaaagtttgttcccaaatcgatcgatttcttaagaagtgtgaggttttctctaaatttagtgactccctattaagtaattggatgaagaagtatgtgcaattgccgtggtttgctttgatctcattaggaactgtagatcttagcaagcttacatcttgatgtttaaccatggatctcaagtcgccttcgaaacttaagttgtcaccaccgagattttctaagcataaatggatattaaacttaataattatcgttgtaacatttgtgatttcaattggtgcaattttggcatataaatctcgagtttctaatgcaccaaaagagctctattatactgtggttgtggactgtggaagc

SEQ ID NO: 66766 - DNA, 944 bp, Cucumis sativus
  Intron number 1 from transcript Cucsa.077180.1 (locus Cucs a.077180) derived from phytozome v7.0 (chr-ID scaffold0079 1; pos 321545 to 322488)
gattctaacgtcctcttcagtggtggcggtatcaggtctttgaatcttactttttctccctcttcgccacacctcttcatatttttgcataaattcaatgctgttttctcctaattttgaccttttctctcctccccctctttattcacttacttttcattaaagtgttttttgtggggttctacctttggattggtctttttaagcttcttacaggttgtactcttgatccttgtggcattccatatctggacggagacatctagttacagattttttcattttcatttttttttttataataattttgtcttgcttttcgaggaagttgtatttttaggaaaattcttccagtgggttctctaattaatagaatgtacaatgaaacttaaggatcttttgtttggccatttctttgtatagtctactttgatgttaattgtggtccagattacctgcccatcgcatgaatggcggtggacctgagtttttggtttccctacctgcttttggaataagattcctttctacactttttttttaagaacttgaagcaatcaatgtgcaatagctcagttcttaaaggtggccatagggcccattatcttctggggtgtgatttgagttgccctcatggatggatttttcagtcatgaatcatttaattctttacgaacacaatcatccttagttttatgcttttgatggattttttgtgaagcaatacttggtgcatgatatcgtattcagtaattgtatttttcatgcagagttgaaatctagcagccatgatgcatattaagtcattaaaagcataacgagggacataatgatatttgttaaaataacttcttattttggtggtcttattacaatgtgaagttcgggaagcagtgaaacttgcacatctaatatttttctcttctgtccttttagttttctga

SEQ ID NO: 66767 - DNA, 586 bp, Cucumis sativus
  Intron number 2 from transcript Cucsa.050060.1 (locus Cucs a.050060) derived from phytozome v7.0 (chr-ID scaffold0055 1; pos 192460 to 193045)
ataccagtttcaggtatttagccaactgatcataattatatgattaattatcatattctttctactttctaatatgaatgggataaatgtgtaaaggctttgatgggatattatttgtagaattccgtgctttctatctttggtaacttgacttgaatgcttaattgtcatcaatctgtttcttggtttgcaattggtcatagatgtgaaagttgttacctacatgtatcactgtgtatggcctaccatgaactttaatgattttcttaattctgtttttttttaccatttctggtgttgttttaagaatatcaaatttggataatttgattgagaagtaaaaatagagatgtaattatggttttttttccttccgtgatctaaagatcacaatgctaatcagctcttgaatgctataccactaaaacaagcatgaatttgtaactcctctaaagaagaatgactgtctaaacttgattttcttaaatctttcatgttctctctctctcttttctccatgtacaattccttcacttgcattgtgcttataacttgtggattaattttctctatcatgacttagaat

SEQ ID NO: 66768 - DNA, 948 bp, Cucumis sativus
  Intron number 2 from transcript Cucsa.116930.1 (locus Cucs a.116930) derived from phytozome v7.0 (chr-ID scaffold0099 5; pos 716799 to 717746 reverse strand)
ctttcaaagcaattgctttatactcggcttgctaggttattaccttcatactcttattatctttgcattattataatatggttctggaagaatttctactgatattattttcatgtcacaattcatcatgcttttaggacttttcctattagattagtttgagtatcttacaattacaactaacttctgtgattgtgtggttcgtgttttcttttgtttctagtttctttcaagactgttcctggttttttctaatcaagccactttttcaatatcactcatgagaatccaagttcattcatttattttgattcatggaatatgcttacatgatcggtgtggaaatgagtcaaaatattaactgtagcaccatctttattatggtagcacctctcttttttttttgaaaagggaagcatagatgtttctattatccccatgaaatttgatatcatactctgtctgaataagtcttatcttatcacaatctctctaatcttttgagctttgtatcataatgtcttcgatatatagtcctctcccctgtgttaggttacataatccctttccttctagccctttaatacaaacaaatataatccctctctttatcttaagctagttaaatttcagtggtatttaccactatctgcccttctttatcagaccaatcatccaacctaaaattctaaacatatcatgggttgttttagtggtgaatgagtgctaggttgtcctgtgagaattttctgaggtgcatgtgagatggaccggacactcaaaattagatccgaagcacagtgcttacttggactcgagtgtgctgatgtacttctttgtatacggtgcattgcatatgacaaacaatacttgtcctcaggatgggattcatttctttattttctgacatttggttattacattgattatgcagcatcccaggtcgtt

SEQ ID NO: 66769 - DNA, 606 bp, Cucumis sativus
  Intron number 1 from transcript Cucsa.116930.1 (locus Cucs a.116930) derived from phytozome v7.0 (chr-ID scaffold0099 5; pos 717894 to 718499 reverse strand)
tactgtgtgttgttctctggtttattggtaatctatttatctactctctgagattggtttttttcctatttgtataagactggaattctcgtttcttgttgatgtttggattgtagttgcgggtatgatactggaaattgactagggttttagtctttaattagacggaaattgtttgtgatttggggagctatttgaagcctgaaggccgaatggtttctccggatcttccttaccgacagtgtgtgtatcggtagcgaaattctaattccctgatttagctgctctcaccacctagatgttaatttgtgttcgatgaagaaaattatgttcacacgcagtagtgggttttccagatctctcattacctctgatttttttttactgagaaaccatttcagaaactttaagaaaatcgaagtgttagtgaagaaggggagtttattaggctttccttagtctcgattttccttggatgttttgtagaggctgattaataagttcttgttttctgcattgagggagaattgtttttttttttcctttaatttttgaatttttctttatgtcttgggtgcagtttttctttagctttgtgttgaattg

SEQ ID NO: 66770 - DNA, 785 bp, Cucumis sativus
  Intron number 1 from transcript Cucsa.063190.2 (locus Cucs a.063190) derived from phytozome v7.0 (chr-ID scaffold0066 7; pos 51755 to 52539 reverse strand)
gtttggttttgggattttccattcgggtattgaaggtgattaccatatccgtttctgcccttcccctttattatatctctctgattttggttggcatttttatgcaccctttatgtttgttaaaatgtctctgaggaaagattactgaaaatgttcgctttcgtttggattttttaaaattagatttgtttaggatgcaaagtaatcgaaactttaggatgggaacaaagaagattgaatttaggcaccttcttttgattattttcttggatccaaattaactcagaagatcttccatagactggatcggttagaagctggttgtggatatttggaatattcgtatgaagatagcttgatttgtgatcaatgaggtgtaccaaaatcctttttgtagttgtcattgcatatttgaatcttcagggttggcaaataattcacaatgtaggctattttcaggctgatcgcaaccttttgtttgatcttttggctgttttagatcttgttcttcttctgtggttggccattgaatatctgagtgacaatgcttttgtggagacaaacaaaatcgcttggatttctttttgtgtgtgtgtgtatgattttgagattagagagatcttttggtataatcttgatatgttgttaagttgttgcattggtataagattgaagctgaaactggacaggcaactatttgtatagaaaattctagattatgagcttggaagttatcttgatattatgtgaattcattcaaatgtctttcatgttgcacacagtcc

SEQ ID NO: 66771 - DNA, 810 bp, Cucumis sativus
  Intron number 1 from transcript Cucsa.114290.1 (locus Cucs a.114290) derived from phytozome v7.0 (chr-ID scaffold0096 2; pos 121803 to 122612)
gaggactcctcagattctgcgacttcaagtaagttctattccacttgaaaaaaatatgcccattccttgttttgttttgttcatgccagatttttcttatgaaaagtgattctgtcagcaaaaagaatgatgatgttgctgatgcttatagaggaagttcatgcatggaaaactgggtcatcaccgaaagaacgaagtggaaaaagaaaataaactaaatataatctgctggtctgtttgtttgttaaaattgggttcttagcagtttagtttatgtttcattgaagcatgagtagttttttgcgtccacattgtgatcttcagcgaaagtttctcctgaaattatattgggaaagtacactgagaaacttttattgagtatgatggtcatggttaattatttagtgtccgatagttaaatcaagttcggctgtcctaatcaccgctctacgtctggagatgttctaacctttctttcaccctttcaagttttctccataaaaagaaaaatccaggttttgtcggtttatgatgttcatgagtgaagatgtatggatgtgaacgcattttttaattaccatgtttgatagaattgtgtgtgcatgttctgtatatgtttactgggaaactgttgttaaaagctaaaattactttaagaacgttctattctgtctagaatgtttgaagatgtgataagtagattttcttctttagttttttttttctttatacaattagaaggaatttggacatcttatttaatcgcttacataatgatttcagaggttgccttaaagcgtatcaccctga

SEQ ID NO: 66772 - DNA, 513 bp, Cucumis sativus
  Intron number 1 from transcript Cucsa.049900.1 (locus Cucs a.049900) derived from phytozome v7.0 (chr-ID scaffold0055 1; pos 65233 to 65745 reverse strand)
cgtttggtgggaacggggtggaaactactatagtaaagttttggtataggcttattttgattgggtttcgctctctttttctgctcgttcaattcacgaaattgattggtattggtattgtaaatactgaaattgtttgtttaaatgtcacttgattgctagtaatttaaatatgacttcgtttgctggttccgtcgttaatttaggaactctcctttatttcttcggtctgtctttccctttcggatcgatgggatcgggtttgatttttaggagctaagattgctgtattgtttaatggttatatttgtgggacagcagaaaaatgatcttctgggttatcgtaaggaaattcgttttgtcgtaaataaatcacagttgatcttcccccctttttttggtgtttaatcgaaactcttgttgtgattacattctgtttattatttcaaggtgtaatttgtgactgtttatttcttttgtatcaggtgtcgtaggctgaaggaagggggacat

SEQ ID NO: 66773 - DNA, 862 bp, Cucumis sativus
  Intron number 1 from transcript Cucsa.095490.1 (locus Cucs a.095490) derived from phytozome v7.0 (chr-ID scaffold0091 9; pos 1334419 to 1335280)
ggttctacttcttcaggtgtgtttcttttgaaatgggtattttttgttttttgtttttgtttttttgtttggttgagagaaatatggggatggggttctctttttctttttagtggaagctggattttggtgctgtgtggtggttaagctgctctttttgttttctgggattgttttgggtgttttaagtcctgtttgttatggattagccattttaagatgctttggatgtggatttgtgagagttttaaaaaggtggtttatgtattaggatttgggagagagattcatgtgtgagttcaggttgcttagggtttcttaattatgatttttctgcactaagttgctgtgtgtttatgttgatcggctattgtggctagtcctgacatattgaagaacggtaatatttagttgatactgcatggtgcgtgtattttggttttttgctgcagtctgtacttgacctgtagtatgtgaatattaacttattaagcttaatgtttcttttatgataataatgttttgagcttcactttgaccttttcaaactaagttttgtaatttcattaagaaagtaatcccttttgtctgatgtgatgtttcgtagggcatcttcaatattttggtacttgtgtttgactccaaaagttctggaaatatgtaaataaaattgcatatgtggttgctattcgtgatcatcttgctgaacgtggcatagattaatttacagtggctgttattcgttttgaagcatgctaaaatgaagtgattctttttccttttagttatgttgcttttatcttgtgtggtacattgtttaaattagaaccttgtggttgtaggtggaattagcatatttaat

SEQ ID NO: 66774 - DNA, 1053 bp, Cucumis sativus
  Intron number 1 from transcript Cucsa.143860.1 (locus Cucs a.143860) derived from phytozome v7.0 (chr-ID scaffold0108 0; pos 231270 to 232322 reverse strand)
aggccaagactgacgttcttgagcgcacgaacaaggtgggtttaaatttgtttcttttatttttctccctacttttttattttatggcttgctgaaattgtgggtttacattattgtggcttggttttgtgtgatttgataccgtgcctcgaccctgtttgatgaaataccgcagagaagttcgttgtagtatatattttgattttttgcatttttgaatttttgttcgatttttttagagaattatgggatgatttagttgtatttcacctttattgtaattgtgaatgaggacccttttatgatattattttgccaagtctacagatttccttccagttttgggatggagagttatgtccatttttaggttgggagttgatatccacatgaatacgagtcaacaccatagcgcttgacttccaacttttgcgagcaacacacaatatttaatttactcttattatttagttaatactttatagctccttctgtaagttatttttctatactttgctaatatttgttattcctgtgcctggtgtctggggctggggggtaatttaaggtgtgttagaaaacgacttttggcctagagactacacgatttgaccgtttaaatctcgttcttttctctaacgttaatggtgtatttgattatcttgattatgacgtaatctaatgctcaagtattaactaatccactcatgtttgaatttataaaatggtatgaagtagtctatatgattttaatatcactttattggtaaatgtggctgtttcaccttgcttatagacaagctttcagattagtatattagtcaatttgtcttgaatccaattaatcatcagaaaaacatgaacattgaacacttcattcgtcatgaataccaattttgagagataaaggtcaaacttattagcattagaaagtagacagattcttctttgaaactttgtttaaactgtaatctacttccaaaatttatttttccgttcattctctaaattttactaggtggctgtgcttggaggtggatcttttggcacagc

SEQ ID NO: 66775 - DNA, 664 bp, Cucumis sativus
  Intron number 1 from transcript Cucsa.156270.1 (locus Cucs a.156270) derived from phytozome v7.0 (chr-ID scaffold0113 9; pos 601665 to 602328 reverse strand)
tcttcatcaacactttcgactctttagaaccacaggtatacactcattttcaatcaaaagtactttgatgtatcgtcccaaacgataccatcttcatcaatgactgccagatgtgaatatgtgataatttttttttcttaaataaaataaaagaatataagcttgaattctaaatgggagagatcccaacaaactaaaaacactttttaaaaattattttctttttgttggaaacatcaataactacctaaaacttatggaactttgcttatttcgttttttaaggattgactaatcaaatgatatttttgttccaatttttgccgtcaatgagttatatgacaaaatttatattatatatcaacatttcaacctttcctcgaaggaagttgaaaatctttcttataaaacccgataagtgaaattcaatattaaaatgtggatgaaatgacttagctttagttgaatttgaactaacctctcttactttgatatcaactcaaaagtagataacaaaacaaaataatcaataacccaaaataaaaacatattctaaaacttatttcaatgataatccaataaagtctaattattatttgaacaacactagttttttttttttgttaatgatttttttttttttttgccctatgtaggaatctgt

SEQ ID NO: 66776 - DNA, 866 bp, Cucumis sativus
  Intron number 1 from transcript Cucsa.106790.2 (locus Cucs a.106790) derived from phytozome v7.0 (chr-ID scaffold0093 0; pos 296183 to 297048)
tcgatcatcgtttccctcgggctactgccgtccaggtattattattgtattctattgttcggatcaattcaccttctattcaaatcattcatttggtatttttagaatttagtgttggttacttatggattgataatattgaccttgtttttggaaattactattccttcttaattccgttaggtattaggatgtactgtagttgtttttcgatggatgagatgatattatagcggaatggaatctgtgttgtttttgttttggattgtgaaattctatttaaggcttttaatttcccattttattgcctgttccttctgtttgtttgcttagaaactgtgaatcgtcacatggaaacatgaaaaaaaggggaatcacgagctgagttgggttctgcttttttctgctttttctgcttttggctttcttcttcccttatgattattagatttttaaggattgggaagtaccaagattagtgttattgggtttggatgactgtgtcaggaagcaatgtgctgctgtagccccaatgttatttgtctttttgtaataacactaggcactttttaaccagaaaaaagcatctctttctctccattctctttatcttttcaaaaaagagagagagagaggtgttgttttttaaatgcattctatatagaggaagagtattgctttttttataaagattccaacaaatgaggctctcatttgcccaagcacttccccactgttttgtactgatgtcattatcagtttcctctttttctctttgtttgattactagcagaaaagaagatggggcagttgtttgagtatttattggtgctttggatctatcaaacagaggaaaagaatcgggc

SEQ ID NO: 66777 - DNA, 715 bp, Cucumis sativus
  Intron number 1 from transcript Cucsa.163170.1 (locus Cucs a.163170) derived from phytozome v7.0 (chr-ID scaffold0114 4; pos 2597071 to 2597785 reverse strand)
ctgggtttttttaaaaggaatctctccttctccaggtaagtcgcctccttttctctcaattttgttgatatcttctgctttcaaattctagatgagttgcgagttttttttcgaaataggcgattcatgtgtgaatttttcaatgtagtttaagattattggttagaccctgatttcaattataggctttaaaccattatggagagataaatggtagcaaagttttacgccccccaaaacttagaagtcgttttggcttgaacaataagtgagtgggattcagacttttgacctgttcgtaccttagctgtgttcacgttggtaaaacttggatgttctttgagaacagtttccaaataacaaggccttaatcttccgttagacaattttgtgcatccactaagatgtcatgaatgttagacttggcctaaggcttacctttatgctcaaatttctcatggtttgccctccaattcaatttttgttgagttatttgccaattttggattgctttgtgttgaatcaaatgaattttttgggtgtttagaccatctgagatctgagaggtatagtttagttaaatgatgggaagacgtttctggtttatctcatgcaggtaggggcgacgctcatcaaacaaccctccaaatttccacgcctccattgaactcacgtatgatttacatacacatataatttgttcttgatcaagccg

SEQ ID NO: 66778 - DNA, 739 bp, Cucumis sativus; identical to SEQ ID NO: 63890
  Intron number 1 from transcript Cucsa.176860.1 (locus Cucs a.176860) derived from phytozome v7.0 (chr-ID scaffold0122 5; pos 921918 to 922656)

SEQ ID NO: 66779 - DNA, 432 bp, Cucumis sativus
  Intron number 1 from transcript Cucsa.045240.1 (locus Cucs a.045240) derived from phytozome v7.0 (chr-ID scaffold0054 2; pos 1230276 to 1230707)
ccaattctggtaatttgatcactacctgaaaattttaataatttatgcgtagatttgggtgtttggaatttggacagtgcaactcgttaatgttcgacgtgagagaaatttttaattggactgttagtgattaatacgtgcttttcaattgattagaaataaatgggaaagaagaatcttaacagtggtttcatatatgtgttgaaagaaaagaagaggaatcttttgatctgactttatggacaaacaaattatccacttaaatgaaaagtagacaatgttctttagatatgtacatgctgcaattaaggtgtattgattctagttcaagtagtattaactgttactgatattttgtaattgcaggactcctttccttttaatctgaaagcaagtctgagtctttgaatcattggcaggatcatcagaagc

SEQ ID NO: 66780 - DNA, 683 bp, Cucumis sativus
  Intron number 1 from transcript Cucsa.066090.1 (locus Cucs a.066090) derived from phytozome v7.0 (chr-ID scaffold0069 6; pos 651717 to 652399 reverse strand)
tttataccaaaaggtactctcattgaagatccaattccattttgttcttcctgggtcaatggaaatctagaaattactttgttcaattagcttagtagtttgtttccttatttcttgtgcatatgggtgggtttgttttgatttgaaagagaaaaagaaacaagtgtagtttctggagatcttgttggaattttggaaagtagaatgaatttgatgggtctgattcagtgttttcctcctacgtctggaggctatcaagagattttagggttagggttggatattgtgtttctatagcgtctgtgaaatctgttcttagataaggatttgtgttctactctattcccctttttttttttttttgtatatgatttcacctccttgttgactctattctgttctttgtccttcttttggaattctttttctatatggttttttgtttgtgttgtgttaaatttcttgtgagtttgtgaggtttgtgctattttcatttgataaatctagggttttgatggagggaagatattgtggggattgatatatataagccacagctgtttataagggtttcttctttcttgaattgtgtttttggaatggctatatttgatataacccatcagcttcaaaacttactaccaccgaggagatgatgacggtgttgatgatgatgagttgaa

SEQ ID NO: 66781 - DNA, 716 bp, Cucumis sativus
  Intron number 1 from transcript Cucsa.100870.1 (locus Cucs a.100870) derived from phytozome v7.0 (chr-ID scaffold0092 7; pos 163048 to 163763)
ctctgtaaggactcataaaagatgaattgctgtggtcttttctctgtttttcttctttacccaaaatgacccacggttttgtttaccatatagctcatgtttgtgcattattagatatgggataatgaaacttgattagtcgttaaatatttatgtgattaattgcttttcttgtaatctgtaaaaacattttaggaaaaggtcttacccatgtggaaataatggtttgtttcttctatgaggaatggggttaaatttcatataaataatacaggacgcctttggtagaatatatgaatggaaaatgagaatatgtttatgtgggaagaagtaaccttactccattagttcttaagtcatatcttaattggactgacagcccaaagccatgtaagtaagttaagagtatatgttatatgaaactgagatagacaagaactcaaaaatgatatcaaaataatgccagatgcggatgcctctggatgttttcaacatatatgatttgaggctggaaattgctaatactaattagggttgtcatgttcaaggtgagggtgggctggtatggaagttccctcgtggttcctgggaatgggacactaaacgcctgtagcctctctctccctctcctatgattatatgattgtggaatctcattcttccatgcactgagttttgcagatttctaggaattggagtttgaagctacatttcga

SEQ ID NO: 66782 - DNA, 419 bp, Cucumis sativus
  Intron number 2 from transcript Cucsa.100870.1 (locus Cucs a.100870) derived from phytozome v7.0 (chr-ID scaffold0092 7; pos 164010 to 164428)
acgaatatttggaatatcgacagtaagtttcatagcagttcttacggttcttatttttttccactctttgttgctcactaaaaaaataattttaaaaaaccaaaaaaagatgagtttctttttctcagcaaaatacatcacaaagtatttcttgcatcatttgattgtgagcagtgcatgaagctgggtatagttgaagaaaagttcagcaaattaagattttaaattttcatatagaaaattttagcttgagtttttttctattaaaaaaaaagaagcaatgttcctacaaagtaacccttaaacaaaataggtttccctcattgtagctttctataaactctttaatttctttcaatgacactctgtcccttttatgcatgtgtgaagatattggtgttcatttggtcctgaaaatt

SEQ ID NO: 66783 - DNA, 776 bp, Cucumis sativus
  Intron number 1 from transcript Cucsa.075300.3 (locus Cucs a.075300) derived from phytozome v7.0 (chr-ID scaffold0078 9; pos 47002 to 47777 reverse strand)
aattctcgttttcatgtaatttcctttctcaataattactaatcgatctgtgatgatgatcatcttgtacaagctggtttcttttttcttttctttttttttttggaatttgaaggaaaataattttgattctgtaaattgtgtgatctgggtctgaagagttgtttttgtgattgatcattggtggtgatgttattattgtaaaccctgttctgggtcattaaggatgatgagagtttgattttcaagtaattgttattggtttttgttagtgtctctgactttttgctccttatattgagtttgcgtgaacagatgtttttcctctcttatggtaattccttcctttttgggttctttttggggttggaatatccattcatagacgattggtattcttcttaacaatgctttgccttctgctctgactcatttttcaccatcatcttccttattttgttttccatttccttaacttgttttgtttcggagtttcttgctgctcttttacttggctttgttttttcttttcttaagctcaaatggtagtgatcgagtgccttatttgggttgtttttggttaactgatctaatctttgatcgtggtttggaataacttatttgggttaaaaactaagttcttaaaaaactataagcttgaaacgtcaaagcatccgtaaatccattattggactctttttttttttttttttgccttttcatttgtttttctcctttgtcttacgagtaatttatacaggtgtggtttgtttctt

SEQ ID NO: 66784 - DNA, 1049 bp, Cucumis sativus
  Intron number 1 from transcript Cucsa.004590.3 (locus Cucs a.004590) derived from phytozome v7.0 (chr-ID scaffold0005 3; pos 141681 to 142729 reverse strand)
tggccgccggagggaaatcaccattttaggtcattttctcttcttcttttacatctttctttctttcaatttttcgtttttcagatagttagcaaattttacataagatgttcaaataatctacgtctcatgctcgttatgctaaaaaaaagtttacggataaatcttatgctttttatacgatttgatgaacttattagtaatcttattgtcaattggtatatgaactaatgttatttaatataagatattttaaaaatgataaaatattaaaactaattacaaaatataacaaaattcatcaaactcttaaatacattttgtaactaattttagtattttgctatggagaacaatttttcttaatatatgaaccctaaacccttaatattttgaggatgtgaattggatcacgtatcatctgatatgtaaatatttgttttagcaagatataacaaaatttcacatacctcaaatagaaatatgaaattttgttgtactgtttttttttataattttttttaacactattacaacagaatgttattatatatattttttctgtgggtgctgacttttataaatgagttgggattattggatgtttactttgtgggtttttgagtactgatcttgggagctagctgctttattattagtgggttggtctcaataaagaattcttagcttcttggagaatgttgttcaaatggatccaaacaagagacaagactaggtagcctagctagttcaataataatgaaagataaatgaaagaattggacaaagataaagcttcttatttggaggggtttggatacataattgttttggttgaagagagaagtgataataatgttcttaatttttggtttgttttttcagtgcaactttgcattcatttgcaaagatagcagaagaattggacaaaatggtgaccaaaatgatatttgaaagctatggtgtggaaaagtattacaattctcatgctgattccattacttatcttcttagagttttaaaaagcaaagctcctcaatctccagacc

SEQ ID NO: 66785 - DNA, 794 bp, Cucumis sativus
  Intron number 1 from transcript Cucsa.119110.1 (locus Cucs a.119110) derived from phytozome v7.0 (chr-ID scaffold0099 8; pos 1012728 to 1013521 reverse strand)
tttctcccggaaggtttaacgagcgagtctttaaggtattgattgagctgcattttctgagatttctgctgtttctgtgattggattcttcatttatttgattctactcttaatgctttggttttgtgttcgtaatttgtttctttttctgaaattttatggcaatgtctgttttagagagagatgagtgattctgcagggtttgaaaggttccattggccaaagaatgcaaagcttggatgcttccaccgacagaaaaactgtgtcggtagtcataaaacaatatggaattattttgtgaatcgcatgattttcttggaaaagaaacggtagttcttgccattatggttaagatgaatgaattagactgaagacaataaattatctgtcagttccttttggcatttaaaggtggattaattgagtatgatttaaattctcatgttctgtaaccccaataagaagcattataacttgtatttctgtggaagatcaatctggttttgtttgttatcttgtcaatatagtttcaagttcaaaaaatgaagactggaattcatggaagaaccagaaaactttctatttccatctatctcgctttctctttttgagaaatataaggataaatgacacattatccaaaaaatacacaagaaagcatatgtttgtatatattttttccatagcaattgtttagtttgatggcgttttttatttgcgcaaatgcatatgtgaagttgtgctgttatcagcttacgtttcaattggtccttcctggtggcaggctttggatc

SEQ ID NO: 66786 - DNA, 433 bp, Cucumis sativus
  Intron number 3 from transcript Cucsa.103110.1 (locus Cucs a.103110) derived from phytozome v7.0 (chr-ID scaffold0092 7; pos 1998179 to 1998611 reverse strand)
gttaaagtattcattagatatctgtactcttgcaggtaaatgtttctcttcttctgttttgtgatttgatcattgatttcagtcttcaaagcctcttaatcagactactagaaataaaattttgaattgcatcgattttgcaaataatttcctaccagggtttctatttagatctaacgatttaataaacatgttagaagctactgtaggaagaaaatatgagtttgccggtttattttcatttagtgaaattgttagtttccatcaattaacttgtcgatcttcgttccttagtttgtgttttttctcgccactggaagttggatgtcatgtactataatcctctgcgtcatatgttaggactaggacatatgaacgtggttgcgttttctgatctataactatgtgtaatttcagatacgagaaagaagaa

SEQ ID NO: 66787 - DNA, 669 bp, Cucumis sativus
  Intron number 1 from transcript Cucsa.103110.1 (locus Cucs a.103110) derived from phytozome v7.0 (chr-ID scaffold0092 7; pos 1999210 to 1999878 reverse strand)
ccattttcttttctttacccacgctatttcggaaggtcagcaatatctttgcgttatctcttttttttttcttcatgttttcaagttaattttgtacaatatatgaatctgtcttacgttttggttttcaattctcattttgggaatgttaattttttggagttattatgtaattttttattttgtattttaatgccagatgagaatttattggattgtcttaacaagagacagatagagatagccttgttctttttttccgtgtatagatagcttgatttctcaatcgtcctgaatttgaatattgtacactttcagcttcttttattcgatattgtttgtcatttccaggtgtgtgtagatcgagaatattcttttcaattgttttgagctaccatcaatttttactaaaatatgtataagattgaaagaaccttatcttgtcgaaagtgtgattgcttgtttctttgttagagatcgaggtattcgagggtgttatttcagtctaaattcttgcttagcgggttggggttttaatttgattggcatcatcatgatcactgcaaaatttcaatgataatacccatttacctacagttcaatatgtattgattgttctatttaaatttgcaaactcacaggttttctagagtttttggaagtaagtac

SEQ ID NO: 66788 - DNA, 925 bp, Cucumis sativus
  Intron number 1 from transcript Cucsa.082250.1 (locus Cucs a.082250) derived from phytozome v7.0 (chr-ID scaffold0084 3; pos 150347 to 151271)
cagcttttaactagtaattaccttaattaattaattgatcttttttttcttcttgatttctatcaatttttgtttaatttctcttagtgttttagattctttctaattttttttatggtggtaattaagtagttatgagattcgtattaatccattatgagatataattttatttgatgttttcatctatatatctttttaatttattagttaaccttagttaaagaatatatatcaggaatagaaaaaagtaatacgaatcttatctattcaactatgtgtttgaatagcttctagcaagtattttgctttcgtttcttgaaaaacaaaatttataaatacaaaatacgcctgtaacaaagggtgacataaacataacaatattactattaattacctcatgaatttaggtaaaggttttctatctttgaatttgaagaaagctacaaaatttgaagcagcatagttaggcaacacaattataattaggagcgattgaaacccccaaaaaaattatccccagttaagtgacatcgtagtgttgaattctttataatccaattattacgctaacattctatacgtttttaattaccattatgtttttttttcttgcaattaaatttataaacattacttccatccaaaataaacctaatttaatttaatttaattaagatgtgaaatatcaaaatgatcaaattgtcgagtatcacacataatatatatacaatgaaaatcagaataaaattatggaaggaaataaatattaataaaatataaaattgttgtcagacaatagttttattcttgatattataatataaaaagttacattttctttaaatttgttagtcaatggatgatttaacgtgtttgtgttttgatgttcagccgtagagacatcgaggcgacagttacaagc

SEQ ID NO: 66789 - DNA, 525 bp, Cucumis sativus
  Intron number 1 from transcript Cucsa.005460.1 (locus Cucs a.005460) derived from phytozome v7.0 (chr-ID scaffold0005 5; pos 548006 to 548530)
ttttgacggtacgcatcccttgctagatccgaatctccctccatttctctttctctttctctttctccggtaactttagttatttcactcatctatttctctattgattggccttttctggtgctgtaacagtgatggttcttttttttcctggttcgtgttattactgcactgtgaacatgatgggagaaattattgtttatgtaactacgagagtctccaaagtgtgtattgcagtgtcgtgtttagagaagaaaagggattttgtttctattttcttgaactgtatctttcttcaaatgtctgtccgataatctgttataggatcggcgcagcctcagaatgttacttactgtttgaatttcttgaattgtatctttcttcaaatggtttgattttttttccccctttacttttgaaggtctcctgttaacagtgaaattctcgttttactattagtgttagactttgtttctcatttgtgttatgttaactaatttttgggagcttgattgtagagaagaa

SEQ ID NO: 66790 - DNA, 483 bp, Cucumis sativus
  Intron number 4 from transcript Cucsa.146830.2 (locus Cucs a.146830) derived from phytozome v7.0 (chr-ID scaffold0110 0; pos 171764 to 172246 reverse strand)
ctgtacttgaaggtcgtataattactgtggaaaaggtaaaaagtgaactaattatctcttcatagacttgggatgtttcctattgttactgttgtcttgttctttaatctgaaatggtgtacctggatgatttgatgttagagatttgagttttttttgccaagtgtttttttggcagcaggttagctgtgtgtagcagctcttcatcaaactcaaactacaactaaacaatcaaaacaaacacatgaagcctcagaacattggggttgtatgccctgcatttctctctatttctgccaattgcatatgtgttgagttattaaagtgttttagcttcttttttcttttgtgaatctcgacactgtgactttgcatccgtgctatggtatttttcttggatggaagcttgagtagctggtctcactgtttatctttaattgtttgacaggctcggagacggagaggcagaactccaacacctgg

SEQ ID NO: 66791 - DNA, 832 bp, Cucumis sativus
  Intron number 1 from transcript Cucsa.146830.2 (locus Cucs a.146830) derived from phytozome v7.0 (chr-ID scaffold0110 0; pos 172821 to 173652 reverse strand)
ctttgatttgggttttgccttcgctgatctgtacggtaagttccctttctgtgtttcgttttattttcgtttgagatgaaatgtttgatctggatatgcatttgattctgctttcgaacaggcagaattaggttggggttattgttttattgttttttctgtgatgagcatgtgcatccctttttgttgtttgagatgatatgttcggggttctgatcgacatgcgcgtttgattccgctctctgtaatgtttatggaaagaattatattctggttattgagcgggttttgtttactctatgattcgctagttatgggatgcaaatggagtagtttctgtaatttacttgaaaatttgattgttaaattagaaccacttcggagatgttgaagtcaaccatatttctttttattggagtcatggatcttaaattgctaatttggtatcatttggagatcgtccgagtttaatcaatttggtttataattctaatttagatcgatagaagtatagaacactcgtaaatattccttgcagtatgaattatctatgaaatttttattaacgcataaggactattttttgaggttttattaaatcaaacttaattcgaatttttttttaaaaccataggactaaactagctttccccaaaccataggaacttaacttgcaagttaatcttttctttacttacgacagctccttgcgctgttctgttcaagacgatattcatacttaatagtactcttaacattatggtcttcatcgacgcttgtgcttctcgttttaaatctctgttgaattaagtgatttcttgtttggttccag

SEQ ID NO: 66792 - DNA, 783 bp, Cucumis sativus
  Intron number 1 from transcript Cucsa.043170.1 (locus Cucs a.043170) derived from phytozome v7.0 (chr-ID scaffold0054 2; pos 81425 to 82207)
atctcactaatcaggtaattttaacttgtgcagcgttagaacacaaatggtcatgtgatgaagttacttttttaaaaagaaaaaaaaattaaacaggtgccgtggtagctcgattccttagattttcttttaattatgtaagaaaatacgtatagagaaaagatagatgaatggagatcgaaatatattttttcttattttaaaatttagagacggtataaacaggattgccatactatatggctactgagcattcataggtagaagcttttccattttgtgtatttttggtgatttggtttactatatccaccaaaagaaaattaccccaataagatatactcccaatacaaaattaactgcacttaattccatagatatgcgagacatgtatcgttaaaaaagatattgtctacaactatacaaatcattttttaaatagagtaaaaaactaaggagaaaatgaatagataatgtttgaatacaattattaaataattgttagatatgaagtgagtaaaaaggtagcggtacctgacaaataaataattggccacgtatgaggtcattccatacgtgagatcttcaaaggaatactaatttgtatttgttttgatgtttttttcaaacaaaaattataacaataataataatagtagattctataataacaatttaatgagttgcataaacataactgtatgtttggatgttttataaatgttgtaaaagtatttgattgaactcttgcaggtgagtcgactcagaaaccacaacaacgag

SEQ ID NO: 66793 - DNA, 536 bp, Cucumis sativus
  Intron number 1 from transcript Cucsa.156230.1 (locus Cucs a.156230) derived from phytozome v7.0 (chr-ID scaffold0113 9; pos 525466 to 526001)
gcatttctatattagaaacagcatttgcttgtatcgaccatgcattttcgcattctatcaatccaattatggatataaatctataatatggcttagctatgatgtttcgtatcattttctggtagaaaatggaatttgtgaatttgttgcctatataacattcaaaatcggaaagaatctggcatatatttggaagctattgttttgtttttcctccgttgtgggaatggtgatcaatgtatgatcaatgggttagcttccattaacttctctccctgacatacctgccttgtttgatacccacatcagaagaatctatttcattgctttcatagaaatggatggccaaaagcaaacacaagataggaagagatctacacattaacatggaacattctatgcaagagaaaaagcaatggacgaacggactaatatgggaattcacaagtataattatgaatgaaaaatatctgacttcttgtacttttctaatgtctatagcaggataaaggtcgccccttgccgaagtttggcga

SEQ ID NO: 66794 - DNA, 386 bp, Cucumis sativus
  Intron number 1 from transcript Cucsa.143260.2 (locus Cucs a.143260) derived from phytozome v7.0 (chr-ID scaffold0107 9; pos 1582027 to 1582412 reverse strand)
agattttggtatgttctgtttgtttttgtttttctttctgaattatgatttgcttttttgttccttgttgatttgatttgatgttatctttttctgattcttgttggaccgtgggaacaatttggtggtggtgttgatttgatagttggtgttttgtttaccgttgacgaatggagtgagtctgagtgagttttttcttggttagagtttgagatgatttgcacgtgaatcactctccgaattttctgctgtattctgtttcttcttcttcttcttttgttttttttcttcattggatttgagtttaatctaggtctgtttgttttattgtttttgaatctcgtggtgcagttgaagttgtgattctgtacgcgttattgctgagg

SEQ ID NO: 66795 - DNA, 949 bp, Cucumis sativus
  Intron number 2 from transcript Cucsa.013030.1 (locus Cucs a.013030) derived from phytozome v7.0 (chr-ID scaffold0016 4; pos 836905 to 837853 reverse strand)
tgcaaactggagaggaggttgctgtcaagctagtatgttcttcaatggaagcatattcgtgtttgtttgtttaaataattttgatttcaaccaactgtttacttttcattatcagtagttttgcttttaatttatgtttactcgtatcaagatagattcaaatgcttttttcttgttgttaaggtcctttgatcatccatctttatttttcctagtctacttcaatcaatttttagtatgctacagaatactggacttgtgatagaaacttagatgatcttctcttctaaaaaaaaaagaatttttttaaaaggaagaacaagaagagatcattactcttgcaccaatttggagaagaaagcttgcatcaagtgctattgatctgatatcaaagatattttaaagctgaataagacgtttttctgataaagtgtatgggtcatttagatgagaggacctgaacaggacggagctgggaagctggtggtaaacaatattccatttaccttgatatgagagcaaagaatgcggtcttagtgtttcttggtattttctctcctgcttaaggcagcagtaaattttagttaataggtcaaaacattacttttacttaatttattccctttacctattgtttctttccctcttaattccattgattttagggactggttttttatgttttctatcttgtttctgattgtatgattattgaatgaataaatactggtccctggatgtgacatttaattcgtttgttgtccataacttatgcttttaagcaaaaaatttctttttttgctgaagcttttaggtcctggtttgatcatgtataaattttgaggaacaaatacgatcaaataaagaaatcagttcttttgtgaattgttttgagtctagttgttatttttcaggaacctgtgaaaaccaagcatcctcagcttcatta

SEQ ID NO: 66796 - DNA, 672 bp, Cucumis sativus
  Intron number 2 from transcript Cucsa.046730.1 (locus Cucs a.046730) derived from phytozome v7.0 (chr-ID scaffold0054 2; pos 2077377 to 2078048)
cattgatttcttctcctgccttttccttttctctggtatgtctattcttcaccctccattttttcccttttaatatcacttacatttctatgttgacatttgagatatgggattttgtatttggtaacaaatggtagatctggaagtcttagaagcttactgatgggggattttataagttctagtgcttgttgtggtaaatattgactatgttttgtgattctttttcggatttcccatatcttctgtggtgatgactgtgatagtagaacttataatatggttttcgctgttctttggagactcggaggaacagaatatctgtgttgcttgttaatgaatctcgtgatcttgagcgactggttgaaaaactagttgcattgatctgagattgatggttttgaaatgcgtggtatgtttggtaggcaaatgttcaattggtaacatcttatctttgtttctttcgtgattggtttgtttcaagctcaattctgcgtttactgtgggatctgcacttataatttgaagttcttaaggggagacttaataatggaatattgttgaagcagacaaggcttagtcaacgcttgcttactgatgatattagtgaccatttgattaacgtagaactctttctagcttgtttaggatacaagcacttcgtttgcaaag

SEQ ID NO: 66797 - DNA, 454 bp, Cucumis sativus
  Intron number 1 from transcript Cucsa.124760.1 (locus Cucs a.124760) derived from phytozome v7.0 (chr-ID scaffold0100 1; pos 583145 to 583598 reverse strand)
cattcattcatcttcaatctcagctcaagaagttggtaagctgttcaccgctacccctatatctgtctacattgctggattttgtaattgctgactctgtccatttcttaatcgatgagggcggttgtcttctgaatcttttggtgtatgtatttcatttaactgtgtaagaatcggcgttaggttttttgagatggaagatgtagtttgtttggattgattatttacaccgtttcagtcaactcttcacggcagcaacattgttttgatttctgttcttgtgtttagatcgtatgtttaggtttctatttaatcgacgtattgttttcatctgaattgttaagatttgtaaaattagttgtaaaatcttgagatggaagctagagttgggcttaaatgttgacatctgtatttcataatcgttgggttgcagaggacgagagagaatttgatt

SEQ ID NO: 66798 - DNA, 618 bp, Cucumis sativus
  Intron number 1 from transcript Cucsa.120220.1 (locus Cucs a.120220) derived from phytozome v7.0 (chr-ID scaffold0099 8; pos 2216825 to 2217442 reverse strand)
agaggtcgttgttcgaaccttggagattttcatttctgttgttgtcgttaacccatttgatttgatttttggacactcccacctggtttcagtaacttggacgctgagaattcagaataacagggacacccagttaacgtttttatcacttatttcttattttcttcgtcttgcgattgtgagaaacgtcccaattcagatttcccaacttcgttactactttttcccatttttttggaccacccccaattccagttgagatactttgctgttctaaactgagtcatcaactgaaattcgtggtatattcatgcaaattcgatttgggttctctttattttctctgaaaattgcagtgcctgatgtgttcagttgattgaagcattgaaattattcaaagattgaattgcaaatgaatctgttcgaagcttccttgacttttttttaccttttttttcattgcttcatgtagaacaaaagtagtaaacaagtattcttattctgttgttctgttcgtttctcacgtgttttattcttgtttctggattttcaatatgggaagtgatcatttttatcttctgttttctgctatcagccatagattttcgcgttgtttga

SEQ ID NO: 66799 - DNA, 177 bp, Cucumis sativus
  Intron number 1 from transcript Cucsa.139220.1 (locus Cucs a.139220) derived from phytozome v7.0 (chr-ID scaffold0106 6; pos 401251 to 401427)
cacccattactctcagccttaagaaagtgtgcaaagtaagttttcgattcgagggttttcttcgtttttgttaatgactggttaaggttttggtaattcttgttattggcggttctttttatttgattattgttcaattttatggttgatttttttaggtttgtaaaaggactggtc

SEQ ID NO: 66800 - DNA, 757 bp, Cucumis sativus
  Intron number 2 from transcript Cucsa.139220.1 (locus Cucs a.139220) derived from phytozome v7.0 (chr-ID scaffold0106 6; pos 401496 to 402252)
cctggtgagtgctaaactttctgatttttttgtttgtttgtttagtttcttatattactctgcctccttggattggtagttctgagatgattttggagcaagcaatgttttagtagactggatttgtcaatgatacatttgaagtgaactaccagtacttcttttgatttctccaagtcgtttcgtttcaacatcaagtttgttttagctgccaaaattgtgaggggcaaggtcgggattagaattgtttttgaggagcaaaattttacattcaaactctgtgtatggaaaatcgagagtgaaaagttaggaacaacactgagtccctgaaaaatgtgcttgttttctatcatttcttgctcacgttcttatgttttctaaatatactaatgaattttttgccaaatattaaaaccaaaacaagactttaagcactattttaaaaataatgataaaaagaaatttggcttaaatttaaaaacaatactcaaaagtagaaaagaaaacaaaagtatcaattcgagcaagtaaattttatgagttgattttttaagaaccataataagaaacgaaatggttatcaaatgggaactattactcactccttccttctttgctctgcatctgttgtgcatttaacatgaagttgtacggtcatttacattttctcatgcttttatgtcttctttatttaaatatgctgacttggggtcttccgttacccatggtttatcaaccaattgaaggacatacaaca

SEQ ID NO: 66801 - DNA, 616 bp, Cucumis sativus
  Intron number 2 from transcript Cucsa.048650.1 (locus Cucs a.048650) derived from phytozome v7.0 (chr-ID scaffold0054 2; pos 3325164 to 3325779 reverse strand)
actaaaggaaatacccaaattgtatgtatcatatttttatttatctgtaactattcaattacaagtggtgttgctactctttacctagtgcttctagttggagttgtttctcagtttttcgtagtcatcctagttttttcacattaattcattggagaagttgttaatcttccgttgtttttgggatggagcataaaagctgaagtgtgtctccttttcaaatagaatgcatttgcctgtatgaacatgatttggtacataaaagctatagctgtgtcgtctatcagagatttagggcagtgatattactgtgagaagaattcaagtaattttagtaggattgaatgtttgttggagatttattggtttgaccataggaatgttgaaggtgttcgtttaatttaatttgatttagttttccatataatggctcctttagaaactaaatattattgtgaaagagagaacgatatgtaaaatctcatattatgcatcttgaagagattcgtcactgtgttctttctttttgttattgctacagactacagaggtagttaatttgggctttttctgatttattatgccaattcagtgtttcttcgatacaccagggcta

SEQ ID NO: 66802 - DNA, 469 bp, Cucumis sativus
  Intron number 1 from transcript Cucsa.048650.1 (locus Cucs a.048650) derived from phytozome v7.0 (chr-ID scaffold0054 2; pos 3325814 to 3326282 reverse strand)
caaacgcgggcaagtccgcactgactaattatgtttgttctttaagctttcaagcctcttgactgcacaacttagctaattttcgtgtgattttttaaacttacggttgcttagagcatggaaggtgttttcttttacatgcttagctttccttttataacaaattctagtttgatatgacttcctttgttgcaaattcgtcggatttgtggagaatttttgggttgttattcgtcctttcttgcttcgaattgttgttcgtttccttaaaatgcagaattgcctccttcgcctcttttagtcataagttcttcatttatttagttttaacgtttcttattatgaagggggttatgtggaagcaatcagcttttattgattatgacatgagagattgtaaatagtaattttgttatgtttttttttttgtttaggtgggaactaaagttgcggcagtttcacggaaaat

SEQ ID NO: 66803 - DNA, 787 bp, Cucumis sativus
  Intron number 1 from transcript Cucsa.150250.1 (locus Cucs a.150250) derived from phytozome v7.0 (chr-ID scaffold0111 0; pos 1189863 to 1190649 reverse strand)
ctcgccaagtctgtgcgccaccgctgcaacgagtttgtttgtttgtttttttgtttgttatctttgatcatctttttggctagctcttgagtgcatcttagtttagcttttgtgcatttgtgtgtacttgctaactttggttgttggttatatcttaatacatagttgtaatgctgccattttgtactctctgccgttctagcccttctgggtctctgaaattttgttattgggggtgcttattatttggtctagattgctttttgttctgattatcccttgaattttgagcttggtgtagttcttttggattggagtccttatctgaagttttttttatggccttgtatattctctcacttctctcaatgaaagcatggtttcatatcaaaataaattgaacgttctgattagtcaacatgtgctgatcttcgcttaagttggagctttttcttggaagcaagttctgtccggtttaggatttgtttacggttcatcaattgatgcctcatctggctctggcttctgagtgtttcgagatgatctatacgcagctttgattgactgtcatctcaagccttaatttattggttaaatgtttactttattgaaattattgattattttaaccacaaaatgttctgtaccttttgttttctgtgctgtatgctaaatattagtggaatctgtacaggtgcaatttgatgatgagtatcaattctctcagcaaatgtaagcatttcttctttttaataattgactattggtttgtgtaggatttttcgtg

SEQ ID NO: 66804 - DNA, 1041 bp, Cucumis sativus
  Intron number 1 from transcript Cucsa.096180.1 (locus Cucs a.096180) derived from phytozome v7.0 (chr-ID scaffold0091 9; pos 1905310 to 1906350)
cttgcttccacattcttcaagccattgtaagattaatgtcttgttttacttgtaatatatggttttttttttttttgagataattatgattatatactgggaaagattttatttgtccttaaaagtgtgaagtctatcatttttacccttaaaagtgcaagtttaccattttcccccataaaccttcaatttctatttcatcatataggacactagactttgataaatgttgtaatttttaacatctattcatttttagctaattcaattactaattacaacataatgacgatgcaaaaatctccctttaccaccaagtccagtaatattaaaatttgattttagtttagttgtgtgcaaactagccattgcataacattatcaaaactttaaaattttaacagaaaatattgctctcatgtatgctttttataaaatcctattatagatgatatatgagttttgtaattcatggtacttatgtatatgagttttgtaattcatggtacttatgtatatgaggatgcttttattgttattattattactactactattattatttaattattttttgaacctttggtaaggagtgcataccaatattcctgagctatgctcactttggcttattagaatatttcttttaatgatatttggaatgtaaacgtatcatagaggaaaagttataagccttttttaagtttaaggttaagatgacaacattcaactaagtttgaggtgcaatttgatggtttagagtaaaaattaatacaatatgacaagtgtgctggtaaacatagaattttttttccctatatatctgtttttgggggctatgatgtgttggtgagaaatacatttgaatcttttcttgaaggtatctttttctaataaaaatctaatgtgcataaaatagtttctgctttaatcatgaatatttccaaatttcttttgaaaattattgataaagaagacctctttaatgtttgtttttcctatttaggaattttggagtagcaacaactagaatatcctcga

SEQ ID NO: 66805 - DNA, 681 bp, Cucumis sativus
  Intron number 1 from transcript Cucsa.059840.1 (locus Cucs a.059840) derived from phytozome v7.0 (chr-ID scaffold0062 1; pos 426892 to 427572 reverse strand)
tttaacctcatttgccaacatttcctttaaatctggtaggttctgtccctttgctccctcatattttgatctcctgcattggttgcatatgacttgtttgggtgcaatgatccatgtaggttttcagtggttgattggaattcaaaacacgtttttgggtttgaatcttccttacacaaatgtggtatttgagcattgagttctgatatggtttgaggcattttgtgggttctttcttagaatgaagttattttacttttaaccaataatacgctccaagaattccccttgtagtttttaatggttcgttggatctcagaatgtgtttccaggcttgagtctgatatgtgattgtcgaatcattgttttgcaatagtttgttggaattcacgaagtgtttccgggattgtatcttccttaattgagtatggtatttgagctacaaatcttttaatggtagaggcatttgggtagtttctttttccgaatgagtttatatttcttaatcactcatgcacctagaatactttcaacatctcttttcattgtttcaaacaatacatgcgtagattctataagatccttgtttaaaactttaattgcttttattcttcaaggagtagaggattaaaatcactgatcaatacgattgattcaataaacttgactgtgaacttgcag

SEQ ID NO: 66806 - DNA, 418 bp, Cucumis sativus
  Intron number 1 from transcript Cucsa.138690.1 (locus Cucs a.138690) derived from phytozome v7.0 (chr-ID scaffold0106 6; pos 13375 to 13792)
tgtatgctttccgttttctataatctcgccgatctcaatttgtttgtctataatctttcaactattggtcgttcgtttcattttttccatcaaaacaatcatcagaaaaccaaatctactgcatatattgatcttcccatttgttggattccatttattctcttgggtgggagcgagagatttttattgacgaaacccagatttctcgcttgctctttcagtgtatatcccccgacttccccgatccgagtgtgttgccgttgatttttattttcttgtcagttgaattgttattggagtatagatttggaaatggaggttagggttagtagtttgtgtttagatgaatgtatattgttgttgattgaataataattttacagaacggaacaaccgaggaggtgaagaaaatcatcgc

SEQ ID NO: 66807 - DNA, 410 bp, Cucumis sativus
  Intron number 2 from transcript Cucsa.060540.1 (locus Cucs a.060540) derived from phytozome v7.0 (chr-ID scaffold0063 5; pos 17729 to 18138)
tctcgtctcattagcgtaccttgatcccggcaaccgtaagttcattggtctttttataaagaaattcaacaataatatacttaaatccatttcgagtaaaataaactataaataaataaatgtccaaatcgtaaatattttttaaaaaagaatttgacttctgagcatttaaagagaattagacaataaagtatacatgcataactaactagtggggaagcaaagttttgtttttatagatatgtatacatatttaatttgagttgtttgaaatattttattgcaattgttttaatttaaaatagttttagaacaaagttgtaacctgacagactctatcgtgtctttttcttttcttttcctattaatttgcagtggaaacggacttgcaggccggagctaatcacggg

SEQ ID NO: 66808 - DNA, 504 bp, Cucumis sativus
  Intron number 1 from transcript Cucsa.089290.1 (locus Cucs a.089290) derived from phytozome v7.0 (chr-ID scaffold0089 4; pos 646181 to 646684 reverse strand)
atttgcttgggtaataatctcttctatagatttttttttcttgtagtcgcagaatcagtagttgatttactcttatattttcgtatttctagttttcagacaaatatgaaaggagcttttttgggttccacagatccttcaactgtgagaccttataatataactaactcgttatattcatgttatcagacccaatccaattcttctaaaatattatcaattttcctcttcttgatgaattaatgtagttgtatattcttgttgataaatgggacttcacttcataaataagtggcggtttctacattcttctttctcttgatgagtacggctgtcttgtaagccttctgttcctgttgttcagcatcttcttgaattgcaattttgttattgaatgatgaaaaaccaaagttaattggctaggattgtcttctgttcacagaaagaagcaaggggatttgatttgttttcctttcttcaggtgctgtagaaaacaacttattc

SEQ ID NO: 66809 - DNA, 906 bp, Cucumis sativus
  Intron number 1 from transcript Cucsa.047430.1 (locus Cucs a.047430) derived from phytozome v7.0 (chr-ID scaffold0054 2; pos 2452549 to 2453454)
ttgatcgtcctcgttttgaagggctactactgggagtgagtttttttaagacttttcttttctgggtgtttgagtttcgttgctttgagcttgattttgaggagtttgtgtttgtttgtttttttttttttggtgtttgtcttcatcttgcttgtttcttatctatcactctctctgttttcagttggaacctatcttgaatttcctaatttgtttgattacatgcaaatttgagtgatttggttctcaaagtttcgatttttgtttttgttttcatctggggtttgatttttctgaaacgtaatataatgtctggggaggatcgtttgacttcgcttgttcaatcctgtttttcattttccccattgtggagtggttttcaccctctttttttaggggctgatcggacatgttataagtcaacttcgttttgttttggtcgtatgagttacgcctccacaaaagtagaaagaagagcaatattttatgttttgtaacatgcttttgtctttttatatttcgtctcatgtctccccttgcggtttgaacctgagttacattgtatagtgcttttaaaatccaggttacatttccttttagttgatgacgctttgatctagccacgattggtctcgcatgtctgaaaatctgtgtattgagaatatactaaattactaaatatactctacttttaagtttagcaatgagtttttgatgccaagtattgtgtttgaatctttgctacggcattttttctgttgttgatgttaatagttcacctgttgagttttcgtgaatcaaattagtaattaagcctacatgtgacgatttggtcttgctgttatttaacattcttgtactaaaatcctaagtgtatgtgcaccaggaagtctagtatacttctca

SEQ ID NO: 66810 - DNA, 767 bp, Cucumis sativus
  Intron number 1 from transcript Cucsa.071070.1 (locus Cucs a.071070) derived from phytozome v7.0 (chr-ID scaffold0073 7; pos 51919 to 52685 reverse strand)
cgccggtgccgccgccgcgcctaattctaacgaaggtacgcttttctcttttttctttatctatctctttctctaagagatgaaaatcacagaacagtgagattcgtatatcctaatgttcttcctcggtttcatctcgagcttaatctcatcgagctcagagagattgggaacagccccccaactattcgagaatttctcaaattttcatcacgagcttcaattcaaattggagcgattaggaagtttttcctagaacattcaagaacttactcctgcaaattcgatctcgagcttaccttcatttaatcgagttctcgtgaatcaatttctctacaatccgttaaactagagagattaggaattttcttaatagcttaaagaatttctgtgaattcaatagcttgaagaacttcatttctatcgaactctcagaaattcatttggaattgtttcgtgaattccatctcaagcttaatttcaatcgaactatcataaaattcactccctacagtatcttcaatctctcttcaaattccatcacatctttagccctaaaaatccaataaaccagcaatttcatcggaaaaaaagaagaagaaaaaactcatgaaaagcctcgagaatttcatcattttccatagaaacaaacagaaaaagaaagaaaccaaaacaatcgattctgtacctgacataccgtgaatgagcgactgacagatggtgaaattgcaggtggattggagaagaagatcataaatccggagtta

SEQ ID NO: 66811 - DNA, 758 bp, Cucumis sativus
  Intron number 3 from transcript Cucsa.132950.1 (locus Cucs a.132950) derived from phytozome v7.0 (chr-ID scaffold0103 7; pos 773121 to 773878)
ggcatgtgtaaagctcatggatgattagaacacaaaacttaactgaggtaagttatacaattctttagatcatctatacttttccaaattggtccaattttaaatttccttttctatctgtaccaatataattctcatctagaacctcaatatattaagttaaagaaggtgcatggatatatttccagaacttaaatcatgcaataaatatttaaaataaaaatatagtactaaaaggtaaggaatatacattatgttttttgtttccgagtttatagataataggtcaattttgtaacacaatcaaagtttaagaaatagtgatgcatgtctcatataagtactttgatgtaatcaaattgcagggtaatcgaaccacaagtattagtggagaagatgagaagagactcacatttttttttttagatatatgatcgagaatcagttttgttgattagttactctatatcgagatatatataggatcaattttgatttatttttgaatctttttatatattgatccatttctgtttggttatggataaacatggtttcgataatttgacaaaaaaagtttatgataaaacctttgtatttatggacatttttatcatacaaaaaattctaaatacttaaccacctcccaaatataatgttaaaatgaaaatctagaaagccatatttcttttttttttttttgtttgaacaataaataagaagtgtggaagcaggatactatttccaagaaaatataa

SEQ ID NO: 66812 - DNA, 871 bp, Cucumis sativus
  Intron number 1 from transcript Cucsa.161490.1 (locus Cucs a.161490) derived from phytozome v7.0 (chr-ID scaffold0114 4; pos 1403519 to 1404389 reverse strand)
tcttcggccgcctcctagttccgatcaacctactggtagctcctcctatttccttcttgctttctggacttctgtgaaaatgctgttccgttgcctttctttttctgtgttatctgagtggaggcgatgtgatgagaagctaattacgagcttggttattaggaatttgatataaacaattcgtttcttctcctttttttcgttttttctttttcttagcgagtctcatgtgaaagaacagataattgcttcacctgggtaggtaatgatttgtatttactcgaaaattatgcttatcatccatgaaaaggtacaccgttttagtttttttttttttttccttaaattgacaataattacagtgaattgcagagagtctacttggatcttcgaagttcctggttcttaattgtcgccttttctagcaaaatgtagcttaatattttgctaaggaattgttgctgagcatgttcattgaatttgaatatcaattaaacttgtgcagttatatggcatagattatatttaaacaatgtagccttggaattgaaatagcatagattgctatttggcgtctgttagttttaaaaggttgcatgaaaattgaatgctttgattctttcacattgggtgatgttttgtactagagaaatcttcacgatcattctagagttttactctgccctttttttgccttctcgcaatatttttttgcaatatcacccgtttagcacgaggatttacagctttgaccatggttctcctgctcttaacgatatattattatgcacttccttttgttttgtgttattgaactgcatattagaattgtgatttttctcatatttcgttctgtcttgtgcagtttctc

SEQ ID NO: 66813 - DNA, 700 bp, Cucumis sativus
  Intron number 2 from transcript Cucsa.067120.1 (locus Cucs a.067120) derived from phytozome v7.0 (chr-ID scaffold0069 6; pos 1527377 to 1528076)
caaaagtataaggaaggaaaatacatccttgaaatgtgaggccactatcctttgttttttcttttattacattgattgcgttcttgatgtctctccactataaagtttgatcgtaagctggatataaacataagaaagaaattatcttggacaaatatcaatttttagtaccgttaagaaatcaatgattaaagatatagaaaatctaaacaatagagaattaacaaagactaatatggtttactaactgtgtgttaactacgtcttcgaatgtggagagaacacgttagtgttttgtcttcgaatgtggagagaacacgttagtgttttgtcttcgaatgtggagagaacacgttagtgttttgtcttcgaatgtggagagaacacgatagtgttttgtcttcgaatgggagagaacatgttagtgttttagagaaaagatcagattacatagcctagagtgccctctagctagagagtttatatagctcactctaaaccacagggacaaaaatcggaaaaaatagaaatatgatgaatatggatacaaattcaaggcattacaacaagtgcacattatgatccatcaatatttctgtaaactatttgaagatttcacaactatatcaacccaaaaacggttcttgatttcttgttggtgtttggaaaaatctttacaggttcaaggtgttggctcctg

SEQ ID NO: 66814 - DNA, 568 bp, Cucumis sativus
  Intron number 1 from transcript Cucsa.160960.2 (locus Cucs a.160960) derived from phytozome v7.0 (chr-ID scaffold0114 4; pos 1038707 to 1039274)
aagcctaagcttgaaggattagctaggtataattataccaaactcctccctcccttctttccttccttccttttttttttttttggttttttatcctttattatttattctccgttttatgttatatgattgtttgagtttcaatgtagatgggcttctgatttctctggtgcccttgtttccttttcctttttcttctggttattgtttcgtagaggaatattccagagccgcttacgtcgttttcttttgcctaggggaagaaggggggagagggtgggggggaaatatcagaatgttccaaaaatctcgtagtcggaaatgggttgattaatcaacttgtatttcttttgttttcttttgattctgaggccgtaattaagattggatcctgcaaaataaaattctgggattttttttttttaataaatgggtttgatcaatttcgctatcttcgtcttagactctcacatcatgaagattattaaatgattgttattaaatttacttatattctgttctgggaaatgcaggaataagggtatattgtttgttgcaattgatcaaa

SEQ ID NO: 66815 - DNA, 939 bp, Cucumis sativus
  Intron number 1 from transcript Cucsa.101800.1 (locus Cucs a.101800) derived from phytozome v7.0 (chr-ID scaffold0092 7; pos 981950 to 982888)
agagaagggagaaagagagagtgaaagaaacgaaggtaaaccaaagtaagagagtcgagagtgacaacacacgtcatgtgggctacatttagataattatatatacacacatatatccttaaaagaaaaatctatttcccctctgtccaataaaaaaaaacaaaattcattataaatatttttgtcaaattttctataaaaatttaagatttacagaaaaactaataagtaatcatgaagatactagaataaggtcaacaataaattattgatggtaagtaatgaacaaatttgatcttcattcaatttatatcgatctcaacatcgttgttcacagtagaaactaaatcatttgttagtgtagagaaaaaagacttgtattctttgctctagtgtgaaaaaatgaaaaaacaattgtagttgcttcataatgaaaattggggcaattgggagccgccaatgaagagttattccattactcaaacttgaaaacttctcatttgtacaatctctacatctttggtttgattacctcatcaacatcatcaccaatttgttctaaacaataccatattaaaacaaagattgtcccttttggactactttcttcccactcttctctatattaaatttcgaaatgtcatcttttccttcttccaagtcaaccgaagaaacaatgacagcactgccacatcccgcgttgcttcgtcttcccagcgcaagttcaagatccaatacacacttcttctccttcctccatccaattttgaccttttccaatatataagcactgttttttaacaaaccccatctgaaaatttcccccaatttcatcatggattccttccaattccatttcttcaccgcttctctgttttgcttcttctctttcattgtttctcagcaaccctacgccggatccaccaccgctgactgtgc

SEQ ID NO: 66816 - DNA, 561 bp, Cucumis sativus
  Intron number 1 from transcript Cucsa.090220.1 (locus Cucs a.090220) derived from phytozome v7.0 (chr-ID scaffold0089 4; pos 1580118 to 1580678)
gtcctggactctccggaaatctcgtcgactctgaggtgattacaacaccttcttttccctccatttccatgatcgaacgaaatttcttgtgctggaggtgattgggctttgtattcgaacccccaagtgaaaattttcgattttggtagttttgtcatgcttgattacaactcttttcctttgagattttgtggggtaccctatagctaataagcacaattgcttttttttttattattattattcttttagtttctgtgctatgctgtatgaagacttatacatgctcaattgaaaattgattggattttgatgttggaaaagtttggtatattgaccatgaacgaagttggaatttgtttggattgcaaaaatatgaacaatgcttgattttctgtggtgtggatgataggtttttggtaagtctgagtccaggagaagtttgattgattgtgttgtagtgccttgtttagatttagtttgtttgaaacttactttgtactctaatttttaatatcttttgcaggggtttcctcgttcggatatagatattccagttat

SEQ ID NO: 66817 - DNA, 639 bp, Cucumis sativus
  Intron number 1 from transcript Cucsa.106720.2 (locus Cucs a.106720) derived from phytozome v7.0 (chr-ID scaffold0093 0; pos 229170 to 229808)
cttcttccaacccctccattcctctttctttcaaggtaatcacaaatcactatgcattcattgctttactctaatgtcccttctctgcttttttaatggggtttctcatggttagtgatcttaactctcccactaattgtgattttgttactttcttttcttgggttttatcttttatcattgtttgttctaagtgtacccaatttggatgtggtttttctttttcaaatgggtatttcttctttaccttatttgatccaattgcaatattgggttttctttttgtgtttcataagagattttttctgctgtagagttcgtctttagattactttcttgacttattgttttaggaagatgttgagaaaatgcgggtgggagtgtaagtaatggtttttgagcttttattgtttaattttggaattggggattggagactttattcgaatttgtgccgaggttgttgaatgattttctttttcttttacgtttttaggtaatgaattgaactctgggttctgttttctctcctctaagtttaggaattcataatctaatcgaccttctaaccctttccattcttagctttttctttttgagatattttattaattctcttttatttcattcgtgaaggga

SEQ ID NO: 66818 - DNA, 708 bp, Cucumis sativus
  Intron number 1 from transcript Cucsa.193990.1 (locus Cucs a.193990) derived from phytozome v7.0 (chr-ID scaffold0133 7; pos 122243 to 122950 reverse strand)
cttctttcttttgatttctctgcaaattcttgtgggtaagctttcgattcttaatcctcttccttgttttgttttttatttcatgtttctcttttgatgattcatttctttgcaacttttatgcaattataaggcataagcatgtcatatttcttccttgatttgttttgtatgcctgttttaatgttttaagtcagatctagaattattacgttgtaaattgatgaccctttacggatcttggttaaactttgagttaatgtatggttttttttcataaacttatagcatcttaggtgttcggcaatagatggcatgccttgtctttttttttcttttctgatttacatctttctatggatgttcaataatattgtgaaatctgacgttacgtatatgttgtttcatagctgagatttagcttctattttttcttttgaaattggtttttctagatttgttgattaggttgtttctggtgtgtttatgttgttgtaaacccttcgacatgtactgttatgcgtaactttagggttattagatcttctattgtcatgttactttttaggatgttgtttatatcgattatgcgtaaaatatcagttgatttgttttctgtctaattctttgctgttatgttaacgatttcgtacgtagggagttcttatcctttctttgtttctttgtttgcagttcgattaataccaa

SEQ ID NO: 66819 - DNA, 583 bp, Cucumis sativus
  Intron number 1 from transcript Cucsa.132470.1 (locus Cucs a.132470) derived from phytozome v7.0 (chr-ID scaffold0103 7; pos 416752 to 417334 reverse strand)
aatatcaggtgatttcaacgattttcctcttctgggttttgacttttttctcttatgggttttgagttttttcttatttacacctgattcatgttcgtgtcttctttcggatttttctcttctgggttttgagttttgtcagacttacattttccttcatgctcgtttgttatcttctgctttgttgattatttggtgaaaatgtttctgaacatgacagttttggcttgtaatttacctctctgttttttgttggcctatgttttacgtggaagttttgcaaacgtgctatttatgtttgtgcttaatagatcttacaatttactctatctggatttttggttactctgttttagccaagttttgcttatacggctggtgttgatcaacaaaaaagatacgcgtcttctgtttttctctttggagttttcttctatctgccaaattttgttgtgtgaatctcattgtacgagaattattgcttttcgttttgtacaaaaaatctatgtgaggatatgaatattttggaggagatgactattttggctcattcttcttctttttcttcagatttttgtgaagg

SEQ ID NO: 66820 - DNA, 607 bp, Cucumis sativus
  Intron number 2 from transcript Cucsa.149130.4 (locus Cucs a.149130) derived from phytozome v7.0 (chr-ID scaffold0111 0; pos 2471 to 3077)
agattctttaagaacggtgttttttttagagtaagcaaaatgactacttgccatgccacaacttgcagcttatagaaatgtgatagtacttggtgacgccttagttggattttgattagaaaactatctcaataaaccttgttattgcagaaaaacaatgaatattgagcaagaacaccaccttaagtaatcgtatatgtactttatcctgctctggagctgcagaaacttttgctaaaatatatggatgaataaacctgtaccatctaccctctctttctgagaagactgaccttgtatctatttcttggctgtaaggctgtaacctgaacaatgttacttttctattcgatgttaaagagatcattttgcattgttgcttcaaagggatattttgacacatatatatgttagcaagtgcgttcaacctaaagcggggaatgtaagatttcatagcatcttaaattattgtatgaactcaattgcaacttatcctataatcacgggagatataccatttggaaagttattattattttgacgcacttagttactaatacacatggatatcttactacttatattatttatgcagtatcggctctaa

SEQ ID NO: 66821 - DNA, 575 bp, Cucumis sativus
  Intron number 1 from transcript Cucsa.173600.1 (locus Cucs a.173600) derived from phytozome v7.0 (chr-ID scaffold0120 9; pos 300382 to 300956 reverse strand)
tttgactcaacctctaacaccgaaggacaagtgttggagggaggcagtcatttatgttcataattagattcaatctaaacctttgaatgacatgaccaaagaaattgacggagctaaagaaatgaatgaaaacaatttttatttaagctaattagttgttactttgatctaaacttcacaaacatagaaaagaagatgtaatttgcatttgaaatctaaatcatgtaatctgcatttgaaatctaaatcatgactatgatctaaacctatgctctcaaatctttatttacagtttttttaaatggttaacaactgaatcttgaattttttagaatcctcaagcactgatgaaagtactttgggttgtaaagagttgaagaacagcagtttggcgaatggctggaaagtattgatgttaatctcctttctgttttcggttctttttggttattcacttacagccaaagagatcaaagacctttgggcctcattgtaatcctggttgctacaggtctaattttcccctaatccaactccatttagttgttttctgaaatgcaagcaatctgctcaac

SEQ ID NO: 66822 - DNA, 663 bp, Cucumis sativus
  Intron number 2 from transcript Cucsa.165170.2 (locus Cucs a.165170) derived from phytozome v7.0 (chr-ID scaffold0115 3; pos 509869 to 510531 reverse strand)
ggagtaggaagaaaagcattgctgagatccttcaggtgatgatgcttttgattgtaatatttatatgggtcttgttttctttagattctattgttttgcttcatatatattttttggaagaatcattttccctttaaatcgttgtgaactcgataaagttatcatttttttgcctacagctcttatgatcctaacattcccaattgtagattgttttttgacggaattacaatcttatatttactgttcttatcgtgtatattgcagtgatgccttataaaatgatctatgttgtggtcagcatttaaaaaatgccagcttagatgtgccagtttctcaacttgtaaggaagaaacacatgaatattctgaaaagatgttcatttttcccttacaatctcaaataaaacctatatttttgtaaattttttcttattattcctcatactataagtaggcaatctatttacattttttctattgtgtgcattataaaaagagagccatgcttaaccttgtaagcttattgtgcattgggtgtatttcgagctttaacaaacactaactatagcaagtgagattggttgtgtttcattttttcttctggtagaaaatttctgcagttaagttacagttacttagtttggttttatttgatgacagg

SEQ ID NO: 66823 - DNA, 717 bp, Cucumis sativus
  Intron number 1 from transcript Cucsa.108240.3 (locus Cucs a.108240) derived from phytozome v7.0 (chr-ID scaffold0093 1; pos 428046 to 428762 reverse strand)
ttagcagatcgccgactcgatttccccttgttcaggtcgctctctctttttaacgtttcaatttcttcctttgatcagacattttatgtatttatccaccacctattctcaattttcgtatactttcatgcgtttgattgaattaatttaattaattttgggttttgacgcagctgtttctgtactgatttcaatgagattgatgtagattcgtatggatcgaaattatgtttttctttgagtatcgattggtgtagcttcaatcgtttatacttaattttcaatgggttccgtgccctatttctccctctctatcaattattggggttgaaggatgttgggtttataggcggaattgaacagtttgggtgggagttagttgctttgttaatggcttgttgctcaactttttcgacaattatgaagatgttattgatctatgtttcttattcaacgctgtagtttcccaaaatcgcatgcaattatcaaacaattcatggtcaaccacgttattctttgtaacttgaagattccttcttttctctgtttctgaaattcatttaggtttcaaagtgaatggataagctcctttatgatatgctgtattattttcatttctataaaaaaaaaagaaaagaaatgctatattattctcattgttatgatgttattacaaagctagtttttcagacagtagaaagttgacggaaggcactg

SEQ ID NO: 66824 - DNA, 994 bp, Cucumis sativus
  Intron number 4 from transcript Cucsa.164340.1 (locus Cucs a.164340) derived from phytozome v7.0 (chr-ID scaffold0114 8; pos 205347 to 206340 reverse strand)
tccatctctcttggtttatttcatattctgtgcaggtaatgacatcatgtgttatttgctttactcatgtgtaagccataatattgtaatgacacaatgtgttactggtctcaactaaagtagatggggaaccgttgatcttaatcgaactatgagacatccagtggatgtaaaaaaggagaaccaatgcccaacaggactgtatgcttcaaaagatgctttaatggttcaaatgaatagctttcaatgacaaaataatagcaaagatgataggcctcgcctcaattttacttgccaatggtcggggaaggatttgagagcttcccattctctccacagttctctatagagagtctattacaagcaaaatggccaaaagatggctctctgatcacccccaaaaaatatataaagcaagtaaaataacaaactaattggcccttatctaacaatattccttataggcccacaacacatactattcacccctaaattaacctttcgtattttgacgggaatacatcttcagtatggggggtctatcattacccgccccccaaagagttaccttgtcatcgaggtgaaattcaagaaattgagcttgcatcagatcaacttgctcctagattgcatcttctggaaagctattgtcccctcttctggcaagtttttggctctatcccaaatttgctgattagatttggacgttttcttcgcaaactcattttgtttgttgttctaccaccttgagtttgagggagtgtgttaaaggaaattagggtttactggatttattcctatttcatatttttcctttattagtattttggtctctatctattcaccaatgtaataggttattaagtactttgatttattcagtatattatataaagttatcaattctatctttctttttcggtggttttgatttttgcttggtctgatgtcttttacagttttcaatatctgctggaattatcaccctctgcac

SEQ ID NO: 66825 - DNA, 991 bp, Cucumis sativus
  Intron number 1 from transcript Cucsa.152910.1 (locus Cucs a.152910) derived from phytozome v7.0 (chr-ID scaffold0112 4; pos 198109 to 199099)
tagctgctcttcagtctccttcttcaggagctcaggttaacttccccccctattacactcacacacccacaagccgaaattgtggttttagcatataacgtaccagaaaatagcataagtttattattctgggatgcaactgttattggtatcatacttgcaaacttaaagagtctcattgttttagtttggtagagcaactttggatgtttcttatagaagtttgattttagcttcattcgacggttttgttttttaccctcatttagtggtcatgagatgagtttgtttttttagacactggcctgatgctgttcaactagtgtgctcaatttcagctgcgacatgccattgaatggtggattgggttttcgcatgttttcctcctttttctctctccccttccacccgcttttggggggtctctgaatttggataaatgtaatgctgcatgatggccaatcatttttccggtgaataatgctatctatgaagatgtctgagcgagtatcagggatccttccagcctatttttggaaatatcttttacctcagtttcttcttccctttctccagctgattccctcaattccttgtattctgttaatgttctttattgcttataatgttttcttgacctgtaagcgacataaaatctctgtgtatgtcaacacaaatgagtagtgtaatgtttaagaaactaagatttgctatgtaactcttggtgcaattttgaaacgattccagtatgtttcacagtgaagaaaactagttattaatagttcaatattcctgtaaatgtcatgtatatgcttggcataaaattcaattagtgaatatcctggcaaagtccatcacctatagctatgaaatcttgttaacgacccttgtacattcctgctagttattaatttctcttatccaatttattttattttttctcttgagtataattaaagtgagagatatgacactttcaattagggaggat

SEQ ID NO: 66826 - DNA, 476 bp, Cucumis sativus
  Intron number 1 from transcript Cucsa.153010.1 (locus Cucs a.153010) derived from phytozome v7.0 (chr-ID scaffold0112 4; pos 270496 to 270971)
gccaagtgagaatcaaactgaaaccttataaaccttaatctgcttgaaaatgaagagggatatgggcagataagttgatgatatcatttgttttcccatttaggttgtctccattttgttttactatctatgtttgtctctctcgtttccattattatttgtggtactgtcttttcagtatcctgtttctttgctgcaacgatatctgtagtctggcatggctgttcgtgtcggtagtctctctaatttttcatatttctttctacctgtgatgctatgaactcagaaaccatttgttgatcgaatcagaggattttgcttgtgggaagttttttttcttttttttttttataacatcttctaccttgtccaaagttttttcaaaagtaaaggaaaggaagaagaaataatttgtgtttgaaaattgaagggctttgtgggtaatttatgtttatatttgtgatatggatagacgg

SEQ ID NO: 66827 - DNA, 745 bp, Cucumis sativus
  Intron number 1 from transcript Cucsa.095680.1 (locus Cucs a.095680) derived from phytozome v7.0 (chr-ID scaffold0091 9; pos 1555217 to 1555961 reverse strand)
gcctatacctcacctgagtgcttgcaggactgcaggttagaattctattcctaactaacacgttcatttgatactcgtttcattttgattcatgtttgttcttgtgttttgaaacttcgatgttgaaaatgttaaactactggtaaaacttgtgatgaatgatgatgttatagaattgtgatcattggacagtctgttttcatactacagccaagtactattgaatccaaaaggctaaaaagttgagatttttgttctcttattagtacgaaaatgatttagtggttgggatatcttttggtgcttatgctaaagcttaagataggagtttgaaccaaagtccttttattcttggtatcaaattaaactactattagaagatgagttaacctatcccggggaatggcgacttgtgaattaatatcctcaagttttcttgacaaatgaaattaaaccacttctaaattcaaaagcttatctggtatttaatttttaatgcatcttctttggaaggaaaaaggtttaggccaggatatcttgttaaatgggtagcatatagtacaagaaaattaatgccgaaactagagcaaactaatatcactttgataaagatacataagtaaggatattcagagttactctctgtttagaatcttgattgatgagcacttgtttcgaaaagtagttgattcgacttttgctgtttcaagtttaaacaggtatagcgataagagcgacatcttca

SEQ ID NO: 66828 - DNA, 520 bp, Cucumis sativus
  Intron number 1 from transcript Cucsa.016450.1 (locus Cucs a.016450) derived from phytozome v7.0 (chr-ID scaffold0022 7; pos 146212 to 146731)
ctggtgcgttcatgtttctcttcccttttcgttcttgcccatcaagtgtttgatatttttcctgaatgaaacatcaggctcaggtttatagtttgttcatgcttttttgttagtgggtattgagatttgaacctcgaggcgagggaagatgtgtggatgctaataatttgtgttgggttatactcgctttgttataatttatagtttgttcatgttcatgttcaagttcacctgaatattatcaaactgaacagaatctggaaattcagagattactaatagattatatgaagaagaataattgtgtctcttcattggtgagaaacttgagcatggatgttctgtttttagtcattaagttgttctttctcttagttatgataaccttaacttttataattcaaaattggtttaagccatgggttttttatttctttgtgagaaatgttttcttttgagtttatggtttaaggatgactgctaagtgaaacttgtgggaatatttgtaggattcatcact

SEQ ID NO: 66829 - DNA, 315 bp, Cucumis sativus
  Intron number 3 from transcript Cucsa.016450.1 (locus Cucs a.016450) derived from phytozome v7.0 (chr-ID scaffold0022 7; pos 147023 to 147337)
gttatatctcagcttttgaggtaaaatttcaatctctctctttaatttctctctgatttgagtatcatcacataaatcttcttttgcaaatctctctgtctagttatgattgttgtattttgcttgccccttgaactcatttgaaggccattgccattggtcaatgaaaaccaaaaggcaggctactttaaaacatgaaagtcaacaaacaatccacaaaacctacagtatattattgttgaattagcttaattgataagccaaatgtcttaccgacaaagttatctttccaccatttgaatctgcagttgagaa

SEQ ID NO: 66830 - DNA, 292 bp, Cucumis sativus
  Intron number 1 from transcript Cucsa.097340.1 (locus Cucs a.097340) derived from phytozome v7.0 (chr-ID scaffold0091 9; pos 2620582 to 2620873 reverse strand)
aatatcttgtggcctcaaggaaacccaacctttaggtttgaatatgttctacaaataatgctatcttattaattatttccctcttctccttctcatttttatatcatactttgaatctatattatacgttattacttgtttattttttcttacctttatcgatcgaaaatatgtcttaactagttgtgatcttaattttgatgactaattaatgataagagtctctgtcttgaaccttctaattagggttttttttccttttcttacaaatcttgttgagtacagcaaagtg

SEQ ID NO: 66831 - DNA, 470 bp, Cucumis sativus
  Intron number 1 from transcript Cucsa.143720.3 (locus Cucs a.143720) derived from phytozome v7.0 (chr-ID scaffold0108 0; pos 48364 to 48833 reverse strand)
tgctccttcatcactgctctcattgcataacccaggtaccattcttcttttttcatcaatgtacttccataattccccacttcactcagctttgtgccagtaaaatgcatctcaagaaactgcgatttcgcttttgctttcttttcgtgggttttgcgattctggtgaatttatgggttttttcttttactcatttcccagatctgggtcgagtggcttttgtttatgaatctacaatttgctacttcgtcttctgggttatgggtgttttttttgggttttatgagttggattttattccttttttagtttaatgattgtctgcttgtgggtttctttttttccttctaatggtaattttgatgaaatgttcttcaaatttgtgttctctgtcctattgaacttaccagcattgtgtttgtttctactgtttttagttcaggatctacttctctgcttagctgattgcc

SEQ ID NO: 66832 - DNA, 256 bp, Cucumis sativus
  Intron number 1 from transcript Cucsa.010800.2 (locus Cucs a.010800) derived from phytozome v7.0 (chr-ID scaffold0015 4; pos 190001 to 190256)
aggttgttaaagggggtattcaactgagcgactctgtaagtgttttggattttgattgaattactgtttttgtttacttctcttcttgattcttggaaagaggaaagaattagaagattactacttgttgttggtgcctgtgttctgtttttagacctattaattttccttcttacagatgagttgaaggtgggactttgacttttatggaaattgttgttttgttttttgtaggcttcggtggcagatctgcagg

SEQ ID NO: 66833 - DNA, 740 bp, Cucumis sativus
  Intron number 1 from transcript Cucsa.102350.1 (locus Cucs a.102350) derived from phytozome v7.0 (chr-ID scaffold0092 7; pos 1398762 to 1399501 reverse strand)
gcggaaaatatctgtttcttcaacaaggtactcttttttctctctatttttcttctttttctgtaacttcaccttgcaatatcgactttcttttgggttctagcagtgttgctggtttcacttcatgcagattctgggtttcaaaagattttcctttataggtctcttgttctttgaatgtttggttattttgaggttgagaagttccctttcttcgtttttggaacaatttgccttaaatgccatctgttttggtctctaattcatgcaacttcctttgttcttcaagggtatttgacaaactacaatgtattttttttagtgtgatggctaagtctttttccatgtttctgtgtaagattcagcttctgggttttggtgtttttcttttggggtgggggttgcgtttgctttactttttatttgaacccagttgctattatcattcaattagttgtcttttcgtttttggtttattttttcaaaattattgctttagcaattattttcacatggaaatgtttccaaccaaactgtggtatgggttattcaatattcatcacttcatatcttaatgttcctggcttcctgcattttttcttcaattccttcaatatttttgtgaaaatctcatcaattggatatactagagtaattatattgagataataacccatattcctttccattttcatggttcctcaggatacgttgattctaaaacctccaaagaaatctcc

SEQ ID NO: 66834 - DNA, 292 bp, Cucumis sativus
  Intron number 1 from transcript Cucsa.100260.1 (locus Cucs a.100260) derived from phytozome v7.0 (chr-ID scaffold0092 6; pos 809073 to 809364)
ctcttcgtcgtcttcccttttcagcttcagaacaggtaggggtttttttatttgtttttctgcgttttttttttttttctgtttaagttgattctatgtcggttctcttcatattttagtgggttcttccttgatttctgtacccaagttcatagctaggattgggattttaagacctggatttgattgagtttaaattattgcataatcatgtggatttggacttattttgtgctcctttttgtggggggtttcttgtttttcattcttgtagttgcggctactgcttcat

SEQ ID NO: 66835 - DNA, 843 bp, Cucumis sativus
  Intron number 1 from transcript Cucsa.196340.1 (locus Cucs a.196340) derived from phytozome v7.0 (chr-ID scaffold0135 7; pos 63561 to 64403)
gaggtatcctctccttctctctttatcttcccctaattcccaccgattctcttcttcttcttctttccaagattttcgttatttgaatttggaagatactcggatttctgaaaatggataaattgcccccccgttcatttacgacgctgaaggtattttgtgcttgtttgtatttgtatgttcatcgacaatccagctttggatatttttgtatacggttttagatttagttaatattaactgctccattcagattgtgaaataaaaaaacttcatcgtgttcgcagttcgttttttttttttagtttttctggattttggataattttttcaatctgatttatatgctgcgaagttgtgctgtagagaagcattttcttggaactgctggataaattcttgaatgttcttaatttattcaatacatgtagtttcagaggggtttatctcgagtggtatggttagtttattctattgtggtgtgtttgccttgggatatgcaatcttttgattatgatattcgatggcatatatgtccgagtgaattggacggacggggacaggtttcgtccctaaacggccctgcttctgaggctgtgaagcttcataaggtacttcttgcgttattgagaacgaactacggattgattcggagatgaatagactttcaactccatgataagagttggtgaatagctttaggaacttgtgaattttgttccattggtgtgtagtattgtttatttacatgttttttaagggggaagttgaatgtttgatcgtagcatgccatttaatcacattgcagaggttttggagtggaagtggaattggtacgaacaa

SEQ ID NO: 66836 - DNA, 715 bp, Cucumis sativus
  Intron number 1 from transcript Cucsa.150220.1 (locus Cucs a.150220) derived from phytozome v7.0 (chr-ID scaffold0111 0; pos 1162116 to 1162830)
ccgccaaaaacaagtaaaatcaatcatctccctcttcttctatctccctctttctttgattcctctggtttctggatgcttgttctacgatttcttgtaatgggtctttcctcgaagatctatttctccttgttcatttcttgttttgtgggcagtttctttgagggtttgtttttagatggctgtggtgttagaggggagagtttcgggagctttgtgctgggattgagttgtttttttcatcgacactgattttcgtcctctttgacttgttatttgaggttgttatggggaccaggatgaggcttatggatctaattgaagcaatgggtcattgcattactgttttcttttgggcttttttcgtttctgtttgactacttcaggtgtcaccaatgtactatatcattgagagctaattacttgctatattgtttgtactgttcttacagtcctgtcctctttcggatcccaattgtttaatcggttctttttgagataaatggttgtcattttgctgagaaaatcctcacccatggtttaattttatccttctcgatgttagactttcttttagtttgatttgcttagttaagattgcactgattattttccatttctattatgttattaagtgctgcatttgaataattgtgcattttgttaattgcttttatatgcaattttattagtgatacttggaattgggaaggtg

SEQ ID NO: 66837 - DNA, 561 bp, Cucumis sativus
  Intron number 1 from transcript Cucsa.128250.3 (locus Cucs a.128250) derived from phytozome v7.0 (chr-ID scaffold0102 4; pos 302245 to 302805 reverse strand)
atttctctctgcttagtagaggtaggagaacacaggtagtactttgaattcttaaatttcgtagatttgggtttgtttttcttctgatggggtttgttttagatgtgattagttgttgattattctgtaaaattagatgtagtttcattcagaagcttctggggttgccgatttttggccgacactgtaaggagtttaatccttaacacgaatttctgagaagcttttggtttttttatctctattttggttgcccatgttattcctgtgatcgagcttgtgggattctatttctgccttaggttttttataatttttcgtgctgttcaaactagttttgttttcatttttttcacaaaatagttatgacgaatcatgattcagtggttcatgattttcaaaggaagaagaagcttaaacaacagttacccaattggaaaaaaaaactctcaaacaaccgctttttgtaactgaagtgattacttcatttaacaatatgttggttaaatttgttgcttaatcagttgtcttttctttggattgcagaactgtctcctaggc

SEQ ID NO: 66838 - DNA, 389 bp, Cucumis sativus
  Intron number 2 from transcript Cucsa.055940.1 (locus Cucs a.055940) derived from phytozome v7.0 (chr-ID scaffold0060 2; pos 120754 to 121142)
tggactcgtaatttgtgtcactggtttatccaaaggttggttatatggcataaatcttttcttcagaacttttactctttgtgatcgctattggttttgtgtcttttgagtttctttgtgaattagactggatcttctgtcagtaagatgaaaattctaatggctttttttgggttgcttaatcaattagtccagtcgtggtggcagtttcttaatagagaagcattgttgaggtgtctgttcgtgttctctatgatgatgatgatttgaaaaattgttgaattggggcttatatgtttttctttatataatttttgcttcaattattgatactttgcatcatgtttttggcagaagcaaggaaacaagttaaggaagctactgagaga

SEQ ID NO: 66839 - DNA, 949 bp, Cucumis sativus
  Intron number 2 from transcript Cucsa.041700.1 (locus Cucs a.041700) derived from phytozome v7.0 (chr-ID scaffold0054 0; pos 272863 to 273811 reverse strand)
tgctagattctccagtttttctttcaaattcactggtgagttaaatcttcaatctatatgagagtttatatcttatctagagaagcatacaatcattatggttatttgtttgctagttgattaaattataaatttagttcctaaactctgattattgtgtgtatttaatccttataattattatttgacaactatttgatttttggtttttagtttttgaaaattaagcttataaacattttttttttttgctttgttatctactttctacccattaatattttcaaaccaaagttcgaaaactaaaaaagaaaaaacaaattttcaagaactcttttctaaaatttttgaaatttggttaagacttagaacagtatagaaaattataaaagaattggaggaaatagatgaatttttaaaaacaaaaaacagtaaccaaataattaccatttaaaaagaaaaatgaaatggttacgaaacaatgcttaaatttttattttttctaatttaatatgttatatacttaattttttttaatatctatagttatggggtgaaattctcaacttttcttagttttctttaattaaaatagttataaaaaaattaattttgtttcaaagttttatttaccgaggaaaaatgaattttgaggatgatcagaagagatgtaatgaaaaacattctttactaatgttggttagttcttctaaacaaaaaacattctttagtttcactaaacaaccaaagggaggataatactaattcttaaattctattcttaatttgtaaatagactcgaagaacattcataatcttgttgacctctttatcaattactttgttccttcattcagtttgtttttgtttcttctgtcactttgacatgttttccttcatctgtcttgatgcaggctcaacaatctcccacaactgggaagtttccatt

SEQ ID NO: 66840 - DNA, 905 bp, Cucumis sativus
  Intron number 1 from transcript Cucsa.041700.1 (locus Cucs a.041700) derived from phytozome v7.0 (chr-ID scaffold0054 0; pos 274240 to 275144 reverse strand)
tttgatttctttttccaccttccaaatccactcaggtaatcccttctcggcaatctgctgtttctctcaattttctctgacgatttttgttctgcttttgaatttttttgtttttttaagcttcattgttaaaatgcttagatctttactggatctttggatccaacaccattttgaaggtttcagtgattttgaaatggttaatatcattctttctatatgctttttaatttattcaaaattgtacttgaaagcctaaattgattttgaaggacgaagggtatgtggaggagtgttttttaacatcacaaaagtgattttaactctttttctttgaaaaatcactagttgataattatcatgttattgttggtttctgggggtttgattctttttttcaggatggaaaaaagttaaacaatctaaaaccatttatttacataaagacaatatgaaataggaagaacaagaatggaaagacatgttgatgttttgtttagccttttttttagcctttttcggctgagttttcttttttttgctttgtgttgtttgagagctaggattggatcatgcatgttcattctatttccatctttcaaataaaaatgtgaatgctaattttgtcgctaaaaagatttagattactggctgaagttcaaaattattacatgatttgttttaaatgttgaacttagattttgttgcaatgtaaatacttttgagtcttgaactcaaggacacacttgtactgcctttagaataaatcctgttcgagtgaggttgttgcaatgtaaatactagttttgttggattacttgctgaagtacaaatagttacgtgatttgttttacattcctttccctttagaattcgtacgtttgggctcaggatcgagtagtaat

SEQ ID NO: 66841 - DNA, 617 bp, Cucumis sativus
  Intron number 4 from transcript Cucsa.074210.1 (locus Cucs a.074210) derived from phytozome v7.0 (chr-ID scaffold0078 5; pos 63955 to 64571)
tggagattctttgttttctttaacgagcaccacaagtatgctttctatatatgctttctatttacactttcgttattgctgcctttcagagtcatctctaaataatattgtactatttaataaacaacaggataaattcacacttggcttggagattcaaaatctttcatcttttattgtatttctgaactacatgaaaatttgggatattgctattttcttctaactcatttgctaataccaacttctagttagaaattgtgccaatcaagagttgattggagtacctttggttttacttctacgtacatcaagctagtgtgtggttttatgcatcttaagtaaaaactgaaagaaaaaactaactatgacttataggagctttactagggcttaactagttattgtaattgctgaatgaagtatgatgcctaagtttttcatagtaaatgaacctacaactctaatgtggtgtgtttccctataaatctttttataacctcccatgggataaactatcaaaatatgtacggaaaaacttgaactttcatggtggctagaattttgagtttcctttaatgatattattttttggcagggatacatatattaaggac

SEQ ID NO: 66842 - DNA, 944 bp, Cucumis sativus
  Intron number 2 from transcript Cucsa.017300.1 (locus Cucs a.017300) derived from phytozome v7.0 (chr-ID scaffold0024 5; pos 14307 to 15250)
ttcttgtttcttcttgcacgtatgatattttcttctatttgctctttttgctgaaatttaatgacattgttcaaggttttcctattttgatttctttaattgctgttcatattgcatcctggcaaagtagtgtgttttgatctagccatcaaggttatgaatagtgtgaagacctttaagtttagagatgaattctgaggtttgaatatctttttggaaattactttctgcatcaagattgcaattatgtagttgagtttgcataatatataaattgcatcctctgtactggcaaagtagtgagtttttctctagtgggtatggaaatatactacctcttgtgcttagagaggaacactgaggtttgaatgtatttttggagtcactgctgcaaggttgcaataataaaatcataggattacattcgctgcttaagttgttgattaatgtttcttatgtgtgtatgctttccgaccataaaactgtttggtttaacttggctgctttttgttggactattttaattcaatagatctatctctcttttaatctcttccggcttcttgttaagagtgtaagatgtatgatcaaatgttgtaaatgtatgatccaatgtcgtcaatgtcatagatttctcaattttactaggaaggaatccccttgagcaccccaaaaattattgcatgcttgtatgcatgactgtggacacatttcagatttacattttacatgttgatgtgtacacttttcatgtatttcaaggagaggacacccttttttacattccacaaaaaaaaattcatgcttgttcacattcatgttttgcaagttcattctcaacttcaaccgttcttcatttctagtgataagaaattcatatttggagtacttacatatttgaatttgtcatgcagtggctggtgtatattttgctgaaataatca

SEQ ID NO: 66843 - DNA, 458 bp, Cucumis sativus
  Intron number 2 from transcript Cucsa.114250.1 (locus Cucs a.114250) derived from phytozome v7.0 (chr-ID scaffold0096 2; pos 97606 to 98063 reverse strand)
gctctggtgagcatctctcattacttctgctgtcgctgttgatctttgatgcttgtttttttttttaagttgcgaaatgatttcagaactagtggatttgttttcgtctggctgttccagatcttacggcttaacatctcgtttgatgaagaaaatgaatttatgatttgatctctatggggaggttttagttcgtttctaaatgcattttgagtatttgttttggagcatgctaatttaacaatcaatctctcatagataggtgggaagtgtttttattattagtatttttgagttgtatcgaacttagttatccatcccattcatcgcttcttgcatgccacaggcatttaatgtctaattattcgttggttaagttgtttttgaaagtagatattggatccgatgtatttgtgttttgatttttcaggttctgcattcttggactcctagcaaaa

SEQ ID NO: 66844 - DNA, 715 bp, Cucumis sativus
  Intron number 2 from transcript Cucsa.072870.1 (locus Cucs a.072870) derived from phytozome v7.0 (chr-ID scaffold0076 5; pos 416673 to 417387 reverse strand)
gagcttttggaaagggtacgttttttattgcctctgctcttctgaagttgaattgggaattttgaaattcggcgtggagaatacgactttttgttcttcattactttaatacactactagtgatgaatagtagctgagtttttagtgttttttttttataatgtagattttttaagattgtgaggtatagtagtatttgaatgtgtgatagtaatttaacttttagttggaagtttgcatcatgtatgcgtgatgaaattaaaagctggcaatcgaagtactcttttctgttgctcttaactgtgctttgtgaatgtttggcatgttgaaacaatttcttggaggaaacgtcactttatgataagacagacttttatcagaaaagttgcctttaaaaattactaagatttatccaacattacttcttctgatagtcaagaagtagtgatgtctatgcaaccatcaaaagatttggcagctctgttgcaaaaaactctgttttattgtttattgtaaaagttaccactgtttctcttgaaatacattgggaagatcataaagtaattatattagcttatcaaattttcttcccgaatacccctggccaagaatccaattgctgtttccgattgtgatttatggtcagtgttggtttaatttaacccctaacagagttttcatcacttttgatgtttatctgcaggtgtctttgctg

SEQ ID NO: 66845 - DNA, 809 bp, Cucumis sativus
  Intron number 1 from transcript Cucsa.026870.2 (locus Cucs a.026870) derived from phytozome v7.0 (chr-ID scaffold0037 0; pos 23159 to 23967)
gacatttcttcagtactcccacttccacaggtgaggtcagtttcttaggacttgacagtacgtctactttactgttaatttgttagcagcctttgttaagggatcattcattcatgtacctgtttgattcaatcttctccccctctctttcttcaaatgggttcaactaattgttagttcctagctttcccatgccaatttcaataattcaacatcaattgattactacttctctcgaaatttccaccttagctactgggagaaaattattggttatttccttgttatatgtgcatggcagtcagtaatatgtattctcttacgcttaatcttgccatgaacaaatttttttcagtaggaattaaaatgtgatggctagcctaaaactaatttctcgggtaattgaatttgagaactgcatagaaattcaattttcttttatatttagttctgtggttctacttttttcaaggtttccagtgaaatgatgtgctccttatgcatgcaaaatccccattttctgctagcttactctggaaatatttctatggtattcgtcttcagatttatacattacaataataacacaaaccatatttgtaattactgtgggatgatctcaacttgagtgaagcatacatttatagtgctggaatgtgagcttgataccatcaactgtatgaaggattgatttaactcttgttgaggttgaaaaatatgtcaatcaacatttatttctcaaattcatttgattttgatgcgtgaactgtcctgcttttctataatttgcccaggtggtgattctgata

SEQ ID NO: 66846 - DNA, 938 bp, Cucumis sativus
  Intron number 2 from transcript Cucsa.129190.1 (locus Cucs a.129190) derived from phytozome v7.0 (chr-ID scaffold0102 8; pos 235325 to 236262 reverse strand)
ccctacacgtctatatcccaggtatgtgaatccatgtagtagttcttctaatttgattcttaaatttacttttcctatttccattttgatccacccaatggggatttttttttgttttcttatatatttggaaatgcttgttactttttatcggcgtattgttagttggaacagctacgattctatatctagggagctcttctttggctgatcgctgattcattattaacgagtagttgttagagtctagattggaatcagtatcaatgtctaacaattagtcataaacctcggttttttggcaactctgacaacgttgtcttcttgaaatatatgttgatttcatgttggtttatgcctctcaaacctttaggttgcctcttaaacattgattagcaatacttatcacttgcatccatttcagttcatatgtggactatatttttgcctttatttgtaccttatggaattctagattatcgtgatggaaccagcgaagaaaatcaataatatgtaagataatgttttcattaatacctacaagtgtcggatgatgggtgattttatactgctgggcgtttgactctagaattaaaacttcctgcaagcttcttttgtcaattgaagcactttcacaaaatgctgtgatcaatgcttctaagtgttcgtaatcgatgaggaaaagttaaagtatatggtttatttaaaagtagtatgcactatgcatccctttttggtataattttgtagatttctgttaagtttattgatttacaatctaaacatttaaagagattctgaacatcgacaagttaaacattcacaattacatgaatctaaataattgttgtgattttcatttgttctatgcaatacgacttttcacatagatgcccatgcccaactaaaaatatatgatttttcatgttccacagtgt

SEQ ID NO: 66847 - DNA, 812 bp, Cucumis sativus
  Intron number 1 from transcript Cucsa.140340.8 (locus Cucs a.140340) derived from phytozome v7.0 (chr-ID scaffold0107 1; pos 163652 to 164463)
caccctcgttaagccggccgtcgccagcagcagaggtaatatatatatctctttcttttggatttctctctctctttctcactctcacccctgctccaccgcggtccatcgctcgacctctatcgttctagacaacttcacccaccaccggatctgtgacgacgacacatgattagacagcgaacgccttcctcttcatcgcttttaacggcgcttgcgaaccaaaatccttacaaatagtttcaaattagatggtctcacccgttagggtttaacacaatatatgtggagggtccttgttgcttactgactgccttagcaaccaaacgtaggagagtcagttgtctggtgagaatagcaagatgcccaaacatttatagatatgagaatatgggattctgtggtgatttgtgtttttgtttttgggtattgtagatttgtggctgaattaaggggtgggagatgtcgttcgatctgctcctgaagcaatcgtgcagtggatgtggatccacgacggagttgtatgggagcaattgcaagcatatgacattgtgtttgacttgtggaaaaactatggcggagaacaagggcaaatgttatgattgtggggctactgtaactcgcttaataagagttcgtactttacctcgttgttcttaaggagcgtcatgatttgaatgttttaaatttgtactcatgtgattaggcgttcttatttatgacagatttaagaattttcataatagcgtggattgagtactgtctgccttctctttctgagagtgcatgatgaactatattttaggaataca

SEQ ID NO: 66848 - DNA, 655 bp, Cucumis sativus
  Intron number 3 from transcript Cucsa.185470.1 (locus Cucs a.185470) derived from phytozome v7.0 (chr-ID scaffold0127 4; pos 955739 to 956393)
atcatcttttcatctctctttgcaaggtaatttcattataatttcttcttaatttttatttcggttattacatgaatattattgttgagggacacgtacatatatacagttaattaaattgattggaatatatataatatgtgtgaatatctatcagtttggctccactatttaattctgctacctaagcttgaaagtctatccagtgtattaataatactacaaaatacaccctttttttttattagtctgtcagaccaagttcttgaattcatgtcagagtgttttctgttgtccgatttttcactaaatcgatgagagaatttgcccaaaaaaaaaagagatcttacctgccttctgataatacattcaatatagttttaaattcaaaatacaagttttatggaaaatccgtacacgaagatgtagtagatggagtcatgaagaaaaatcagccaacccattaattttcatttctttagattcacattcattcacagtgttttcttttcttcttgatggagtatgcactaaaaaacaaaaattaaacaaaaaaagtgggccagagaaggcagctgctattatataatgacatgaacaaccaccatcacgtactgtatgtctaatatctgtaatatattttgacaggaaggat

SEQ ID NO: 66849 - DNA, 1009 bp, Cucumis sativus
  Intron number 2 from transcript Cucsa.065850.1 (locus Cucs a.065850) derived from phytozome v7.0 (chr-ID scaffold0069 6; pos 488939 to 489947)
aggacgactccaataaatctccaccttccaatcaggttactacttttcatccaattattcataacaacaacaaaaattcaattctgtcctcagtaattattataaatgaaaaagtacagaatttcaaaatctatttttttttcatgttttataaatattttggtatgggtctacccaaaagaaaatttggatagttatatcaaatttgctatttttataattctctttgatatatatatatatattaataaattattcatatactggtatctttctttaaattcatgtaatagtagaatataaaatgtaattataatatatcaattattagttatacaatatattatagatttattaaataaaaaagaagaaatttgtccaaaaaaaattaaaaaattgacaaaatatttataatgggtaataaattatgtcttttgcaattaaaaaaataggacttaaggatgcaaactctaaatatttattaaaaactttcaaagttagttttttaaaaaaataataaaaaaatataagctatttacacacaaaaaaaactatttatactatatgacaaaaaattcattaaacaacaaaaactcactgtatttggtgaaattagtttgtccattttgcaattttttataatttttctttaaaattttagatattaaattgtatataaaattttatttttacgttttgtatttttttcgaggagaaattgtaaaaagttaatttacatagaaaaaaaatgtaaaattttgtttgtaaataatttatcaaaattttatatttttgaaaaatgtatagaaaaaacaacttttgcattgtaagataattatagtagaatgatttgggaatattattgtgaaaaagaaaaaaggtaatatttgtgtatgtgtaaaataatcggatgaaattcaataataataataaataaataaaaataatgaattaataagaaatattattgtcaggttgttgttttgagggtatcattgcattgcagagg

SEQ ID NO: 66850 - DNA, 951 bp, Cucumis sativus
  Intron number 1 from transcript Cucsa.066930.1 (locus Cucs a.066930) derived from phytozome v7.0 (chr-ID scaffold0069 6; pos 1322522 to 1323472)
tgggaagataaggtaatgggattttggttggttggggatgaagaaaaaaggtatatcagttgtattctattcttgtaaagcttacttcaatgctgaataaaaaaattgaggttttgtgtagtttatatttgcttccgtatcaactattgcctatttcatattttgtaaagtttttgtgtttgagaatagaaggggattaaatcattgtttcttcgataaaacagcaaattaaagaaaaacaaattaagttcatgaaaatacagtcattatcaattgtatacgacggttgtggaaattattataatattaccaatcaaaagaggaacatgctttttaatataactaatttcaatatcttacttttacgataaagtatggtactcactagcaaaatcctaatttttttttttatattaatgccatatgtaggaagtatagaagtgatcatgaaataagaatattgttcattgtcttgccatgctcggatgctactagcaaattatgttatactaacgctaacgatgaaacatcttgaatctataatatggttatagtcatgaacataatcaaaacaaaatctgtttttatgttttctatttatatttaatggtcagtttcacaacaactaaacttaacaattacaaaattgaaaccaacatgataatcattcaattgacataatatttgtattataatcttaaaagattcgccttttccaaatgtaaaccttaaacccaaactttaattatataacaattaatcactttttaaaatttaatgacaaaaaaaacataattaaattggttagaaaaaattgtaagagtttctttaaaacataattctttaaaaaaaattagtttgaaagataaaaatacacaagtacttcatctagggtgcatcttacaatcgtgagaattgagaacccatctatatttcgtacgtactgcagcc

SEQ ID NO: 66851 - DNA, 681 bp, Cucumis sativus
  Intron number 1 from transcript Cucsa.046690.1 (locus Cucs a.046690) derived from phytozome v7.0 (chr-ID scaffold0054 2; pos 2060275 to 2060955)
atgtaacatttcttctttttcttttgtaattgtttaattttagcgccaatattcgtttctgtttataaaattctaaaatactttaaagttgaactgtgtagtctttaggatcggctaatttgttagaagagattaatgtgcgagaatagataggtttcatgaatgtgggtactccggagcaatgtttgaatttaaaatcggcggaacctttgcagtttgtagtcacgagtcaatgttttcaatttaaacttttagtcacttgctgttcattttgcgatgaaataaatttttatactccacattttcaaagtctttgcaaaatttccaaaatttaggaccgagagactagtaaatgtagctttgagagcccagaagcagaagtgtgcctcatattcactttggatggataatccatttatcaagacaaggacaatggcttcgaaaagtcttcttcaatgtttttttttaatttaaaagttctttaagagaggatttatttagctcagttcggcgtatttcccaactcacaccttggttaaatgttatcaatattggtaacttgagaaaccgtggatgatttgttgctgtccttttcatcaatatgtgcagtgattctcacattatttttcggcttctgttctaccagtatcatttgggaagaggccatattgggatatcgat

SEQ ID NO: 66852 - DNA, 559 bp, Cucumis sativus
  Intron number 3 from transcript Cucsa.136560.1 (locus Cucs a.136560) derived from phytozome v7.0 (chr-ID scaffold0104 4; pos 1169252 to 1169810)
atattgtagaaaataaggaccaaggtgacatccaggtatgtatttctagctgcttgcaaaccttatacataaagaaactagcttgaaaatcagtttgtcgttagaaagtgctcttgagtcttgagtagctacagccgactgaaatagacgttcatgcttttacctggtgatgagttctaaatgatgtttgtgtaaagaaagtcaaaatttggctttttccaacagaagccagcaaagctattccatggtgcacctgagtgtatacggagtcctacatacagtagaattaccaacactggaagtgcatataattcacttgtcgtaattaatataacatagaaggttttatcctggtctctctatcagaagccggcatatgaacacttcattttgaagaccaaatcttcttttgggtgccatttttgctccaacattcttcatttctcatttgattttttcttttaaaaagtcagccctgtagagaaggggtggttacaaaattagtttgtgacctcagtgtatttgaagtgtttttaaactttgaaacaggatattgata

SEQ ID NO: 66853 - DNA, 598 bp, Cucumis sativus
  Intron number 3 from transcript Cucsa.112260.1 (locus Cucs a.112260) derived from phytozome v7.0 (chr-ID scaffold0095 3; pos 910637 to 911234 reverse strand)
tctcaggtatatttcctttctttcttttttttttggaaagggaaatttgattttgattgaattaatgaaatgggacaaagtctcaaactacataaagataatacaaaaagtaatctattctatgaatcaagaaatacttggtcaggatatgtttaatcttttatacatattattaccaattgtagtagatgcgagggaaggtaatgaaaaactgatttgcaattgtaacacccgatttttacaaccttactcgaacaggatctgttccataggttgtacatctgtgtccttgagttttaaggagtttgaaggagacaagaacctaagtctggtggatgaaccactaaaaaacactagtgcttttttatttttaaatgaaacaaaattttcactgatataataaaaagagctcaatgctcaaacttttcagtgtaacgctagaactcaataatttacttcaatctctcaattggtttcttacaagtttcacgtgttcagatgaattttggtttttagaaaaaagtactatgaaaaatccaactcttagcctcgttgatttaccttaagctcattgctctgttacatcttaggtgtccat

SEQ ID NO: 66854 - DNA, 857 bp, Cucumis sativus
  Intron number 1 from transcript Cucsa.130250.1 (locus Cucs a.130250) derived from phytozome v7.0 (chr-ID scaffold0102 9; pos 181611 to 182467 reverse strand)
ccgccgtctcctccattattggcaaacccgaaaatgtataaacctttgcttcttaaaatacatacttcttttcattctttctcttgtcctctcatcctaatgcatcctacagtccacttatcttcttctacactatttagttggttaattaaagctacataaatcattgtctttttagacaattttttatagacgagaagaaaaactatttataagatatagcacaaaaaaaacttatttttttataaaaatattccattttttaaaaatatatttttcctattgttggatttgtgcttcggagccaaacgcctaattatggacaatgcaaaagtttaatttaatggaaacattcctaaccatttctttttttgatagaacgaagtgaaatttcacttttattaactctatatctttatttatgtaatccattaatttcaagttttgtaccttctgtaaaatcattttccctcctgtttatattttagcgtacgtattcgaattttagtttggttgagaatgatataatatcaaattaactcttatgtttgagttcaaattttttgattaattaataattcgagattttggtatagagcaagtggtcaaagtcctgcagttttattttcctttcaattaaaattgattcacttatttggttttgttcatgtttccaatacataagttggagttcaagtggtgatttaagagtttttttaaaaaatctcaatttactgtgatccatcgttttgagtttgattagtgatttagtgctcttttcattacttatgcctgtaattacctttctcctttctttcttcgaccgtcaagttgacagttttttttttgccaacagt

SEQ ID NO: 66855 - DNA, 696 bp, Cucumis sativus
  Intron number 1 from transcript Cucsa.180070.1 (locus Cucs a.180070) derived from phytozome v7.0 (chr-ID scaffold0123 3; pos 420210 to 420905 reverse strand)
gcaactgcctgctcatacttttcaggtactcttcttctatgcgatcctcttcactttctttcttcctgctcttctgggtttttgcttttacagttttagggttttgttctaccaatgtgtgctctctctctcgggaaatgtctgaattgggatgggttgtttctttgaaatttggttttcttatggcgtttgctttttgctgatgtatggggctttattctcagtctcttccgagtgacgatgtccagattattatttttttcccactgtcgcgttcagtagttaagactgggatttggtctgataggctacacgtagaagcgagagtaatgttgttgtgatactgtagcttttaagctcattaagtctaaactagtcaattatcgtcactgtgtccttgagttggtggcaagggataggggtatttgataactggtagcaagttttcttgggcaaatctatgtgggatcatttatacaaagttggagaacgattggttttctggcagggaaatatgaggggttttgtgtcatttattttacgtatatcgagttattgtcatttgtttgtttcataaaaaaaataaaaattgtcacttcgttctcggtagttttttgcctggtttgagtttgtttctaacagttttttgcttaaaatataggttgttgcaatcacagtgttttgcttactagtggt

SEQ ID NO: 66856 - DNA, 1008 bp, Cucumis sativus
  Intron number 1 from transcript Cucsa.184680.1 (locus Cucs a.184680) derived from phytozome v7.0 (chr-ID scaffold0127 4; pos 328318 to 329325 reverse strand)
gccatctcagtaagaacctctattagattaaaccattgcaatcagatatcacattcaatcataatagcatgtcttattgtcaatgactttagggatatgccaattgcttgataaatgtgtgtctatgtatccgaccttttatcaactgccaaacagtatttgactttatgattcacctttattactcccttcttttcccctcaaattgaaaaatatgtttattcttttggttgatttgtaagcacggtattgcctttattaaacttgcatctgaataatggtttatgaagagaacgacgaaacacgttagtttgaataagtaattgtttgtgtttaatatgcgtcagatacaatacacacaaatcaaaactttgaacaaattgaatacaagtccgacagttggtggccatgtgtcaagcacatgttaagcatattaaactagtgttcgacttgtctcatgaacatttgcccttgttggatacacaactagaatcttcaattttttttttaatagggaaaaaagcatacatatctgatagagtttttcaccttaagctttatcgttgtttttgggtcattactgaaagccctttcctctgtgtcgaaactatatttaaccttttggattttttaatatacgtttttaatacacaactatagtcttcagatatgtatgctttttctcctaggtacaaaccttttattttctggtttttattttttgatggcataagatttttttgtcatgatcttacccgactactggtaatagtctgctttacctttttctttctagatttacttttttgacttttcacgaggttttatcacgttttcaaatttatcaaccaaaagtgctgaaataataaaggagaatcatcagatatcttcttcctcaggatattacactgtgacatcaacctttagttgttttccttataattttatttcttcttgatgccccttctgattgaacaaatattgcagaggtgttgcaggaacttcttg

SEQ ID NO: 66857 - DNA, 766 bp, Cucumis sativus
  Intron number 1 from transcript Cucsa.091800.1 (locus Cucs a.091800) derived from phytozome v7.0 (chr-ID scaffold0089 4; pos 2701032 to 2701797)
gccgactcatccttgatttcctctgtaattttctccaatttcttgtttgatatgaactgtcatccaatgatttatttagtttttttatctaataattttcacatatatatatttctttcaattctatagatatcttaattcttaagtgggtttatcttttgttatttttaattgggaagctattataggcagagattgaaatgaattaggatacataattagtgaatatccaaccatgaaagattataaataatctattctttttaaaacactcaaaaccaattattcagataaagtagtgtttaaattttaaacttattttgaaagaaagtttttgaaaaaatatatattcttgaatagatattcgaaatacactctaaatagctttaaatagattgaaagaatgatatatatattcaattttgtaacattaaaatttgtggtgatttaattcatattgtcaaatttttaataagatttcttgtctaaacaaatcaataaattatttagactcaacaattttataaattacaaagtctacgtcataaaataattaaaattaatatcaaatattgatgattttttaccttggacactaaattgcattttaagaacattcaaatgattttttatgttcgaatcttgagcttttgatctttaacgcaatttgtgtctttgaaatgattaagggatttcagtgattaagattcctgatttatttttggtggacatatagtgactgtgaactcatgattttctgcagtgg

SEQ ID NO: 66858 - DNA, 905 bp, Cucumis sativus
  Intron number 2 from transcript Cucsa.172150.12 (locus Cuc sa.172150) derived from phytozome v7.0 (chr-ID scaffold011 96; pos 67947 to 68851 reverse strand)
ggaagaagtgtgtttcttagcggttctttcaccaggtgatgttcgggagttcatagtcttttgtacttcgattctttcctgcatgttctatggttgtgggacgtatcaaccgagtttggattttctggtttaacatgcgtatgtgtgttatgttgtaaacgatttttgtaaattataattgtattttgatgaaggtggtcggagcttgttcctatgacgcctatggagggttgtcccactgtttttcaggctatttacagcttaacccctggatatcaccaggtcagattgtggtggttgaataggaccttttaaattgttcatgctatttttcacgggcaccacagatatgtgatgaaactatggtgctctttagctgtatgcagcataattttgctataatcttagatgttagtttagcaagcattgaatagtagttgtgctgcttgggtgaagctgatgtttgtcaaggaaaacatgggtttctggaagaattatattaaacagaatcacaactatattggattctccgacaattttatgttaatgatgaccttgggtcaaggttagaatgtgtaggaatggcttttcaaaaaattagtttttccggttattgcttgcgcgatcatagaatttttgctatactaagtaatattgtcaatcgttttatctttattcaaatcatctgtgcagttattatgagtagcaatgacatttttcttgttatttccaactgacttcactatgttcttcaatattgagcaattgtcatgcttagctattaaattagaattatacaactaaattttattgaagatacttaaattggttgattttcatttgtttttgaaatttactaatgtgcgcacaaaggttgtcttgtatgcagtataaattttttgttg

SEQ ID NO: 66859 - DNA, 707 bp, Cucumis sativus
  Intron number 2 from transcript Cucsa.058840.1 (locus Cucs a.058840) derived from phytozome v7.0 (chr-ID scaffold0061 4; pos 961319 to 962025)
gctaccaacgaagtccgtgccaaatctaagttctggtgtgttgttatcctttccgtcgatgtttctttatctttttgattggttacttgttagaaaatgaaggcgaataagggtgttttatcctactccgtttcgaaatgaactctatgttgctttcatgatcctggttcatgtagttagaagatttatgagtggattgacattttcaacgtgattctttctaaaaattcgggagggattaaagaaatttttacagcagttttaatttttatgaatggcttgatccagcagttttaatttttacagcagcacaatgaggttttattcatgggtttagttctattgatataatttggttttgtattaattatgattattttgattctatagtcttagttcaatagtttaagatttatccattgtcccttttgccttcatagaatgtttgactcaacagatggaaactgttttttattgtttttgtttctttttttaatatgataacaataaatgtgtcaggaacatgcttctatatttgaaaaactgtaaaaattagttttcaaattctaaaatttaaattttggtgagaattcaaatgtggaaagtacattaaagaaattgtgtgaagctagcttagtttgtattctgatttcttgatacttgcgtggataggtactttttgaggaagttgaagaaagttaagaaaa

SEQ ID NO: 66860 - DNA, 963 bp, Cucumis sativus
  Intron number 1 from transcript Cucsa.109750.1 (locus Cucs a.109750) derived from phytozome v7.0 (chr-ID scaffold0093 4; pos 665656 to 666618)
atactctaagaagtgttgcagaaagggctgcccatgttgttggatgaaggccggagtcctttggtgcttcatgtttcttttatcattattttagtttgaggttttgagcttttattattgttgtttttatggaatgaatctctatttcatttatcatttagcaaaggtacaagcctaaatatattaaataaggaatacacttaagaaaagaatcggcagaataatatcataataatatctcctaaaaatactctaaatactccgacaattatatctttaacatagttctgttctgctgtttatttatttgcctttgagggaattctttgttactatgcttgtaacttaatggcgtaaaagaatattttggtattcatattttagttgcttcttttgttcttttccccccttttgtttgtcttattgatgaatgtctcaacagggaatttatatataaatcttgttgggtttttatttaaactcataaattttggttaatatgtattgagaaattttattgtttggtataaccaataacttaaggaaaaaactaaaaatcagcaaacaaaacagaagtattcattaattaaaggactaatattttgttttcattaaagtattttaaaagcagaaatgtgaagcaagtgttttagttgagaatgattctcattgtttttcaagagtctctcccaaaaagtgattcttccttggaacgttttttctttttcctcataaaactgatattgctgcttctgtgaaaatatgagccagtgcgataactatgtagaggagatgacactgtaaaatatcaagaatgtattttttccactattatcatatgctttataatggtttgaaggtttaacattctttccctttctgtgccatattgttttgttgcttctaaccatctgcttgactttctaatctggactcaggaacaaaggatctctgaaattggta

SEQ ID NO: 66861 - DNA, 883 bp, Cucumis sativus
  Intron number 2 from transcript Cucsa.122120.1 (locus Cucs a.122120) derived from phytozome v7.0 (chr-ID scaffold0099 9; pos 432542 to 433424)
tccctattcgtgtaagaatgttgttctctttattatacctacttcgcaatttactttttcctattttgaggtcgattgatttgtagatttttaatttgatgttcaatttagctaccaggggttgggttcggtagtggtcgacaagggttgtgacaaattgagaatagtctagggaacacggggtgactcgaacgctagtggatgtaaaacgagggaaaatgcaattgatgtttagtttttgaaacggcttgttcttggtactttgtttttgctatgctcgcaatttgtcttttgggcttgtttatttggggtcttaatgacaacctgtttgttcttttaaaagaagtcttgattgatgatttgtagtgtaagtgaatcagtgatgggatgggatcctgcgccaaattttcactctataacctgcaaagttcagtttctctgttataaacatctaaacttaaatttgtttcatttatgaacttgtatggctattttcatgcccaagtaattttaattatattttattaggcctagttttttaataatatgtggggaaggggatttttaacctttgagctcagttaatggccagttcatatatgatgtatttataccataaatttagcaatcgtatgatactgacgaggtataatcattcatgggttaaattctgatttttttttttaatgaaatttacaaggtagtataaatttggtttgtatcctacttttttatttgatggtgttgcatattcattttaatttgagtttaattttggattatggtatgtttgtaaacttctgagctttctactgtttcttcaaatgcatattttcttcatgtgacttatgtttattggtattttctttcggttgtggcagct

SEQ ID NO: 66862 - DNA, 230 bp, Cucumis sativus
  Intron number 1 from transcript Cucsa.127490.1 (locus Cucs a.127490) derived from phytozome v7.0 (chr-ID scaffold0101 9; pos 106017 to 106246 reverse strand)
ctaaacaggtgttgtttcgtttttgttgttttatagtttgtttcattttctggttgctttttgggagagtaattgaagaacggaatggacatttgaggtgctgagattaatatatgatggttgttttgttgttctgaacgggggtgttgaatgtaattttgttttctgctattgaattattcaagttcattgcctttaactgtgttctttctgggtaggtttttgagctg

SEQ ID NO: 66863 - DNA, 687 bp, Cucumis sativus
  Intron number 2 from transcript Cucsa.178280.1 (locus Cucs a.178280) derived from phytozome v7.0 (chr-ID scaffold0122 7; pos 391419 to 392105 reverse strand)
gagtctgaagattcaaatgtatattaagtaactttaatttccctatttataatttttttaatattgtttttcttttagatatatggaaatccttgctgtttggtatgtaagaaagcgaagaaattctttttggcccagtagttgtgagatttttaaataaacgttggtttttactttctctgttgtatttgtatatttaggtcacatttcaaccgtgttccaataaaattttgaaaacttgtcttgatttgtaatctttcttatatttagaagcgtaaagcaaaagagggatttgctgattcaattaagagcccgaatactgaggggttgtaatcttattttgtcatgtttctacaataaatatccagctcctttcgtttagtgcattaaaagattggaggaaatcattttctaaattacttgttcggttcatatttcaacttccttgttcaatcaccaggaagaaattatttcttatgtttcttatttgggcattaatcacttagttatgagattttagtaaagcgtgggttttactttctctgtgtgtgtttatgtattttgattaaatttgatctgccttggtcaataaattgctaagaatttaagagatgggcttgatttgtagtctttttggtattttgatattaaggataagggtaaagcaaaagaggagcttgctgattc

SEQ ID NO: 66864 - DNA, 378 bp, Cucumis sativus
  Intron number 1 from transcript Cucsa.178280.1 (locus Cucs a.178280) derived from phytozome v7.0 (chr-ID scaffold0122 7; pos 392166 to 392543 reverse strand)
catctgctcgtgcggctgtaaacttcctcctagtggtttgcactgattttctactctcttattgttgctgatattattcatatctccattacgtcttttctctcgctggaaaactctaattaatacttgtctgatgaaagaaagtatgagtctgtttttttgtttgtaatagtaacgaaaaagaatgcggtaaactttgacttccgaactgccatgttctaccttctgccttttgctttcttctacgtgtttgtcaattatgttagggttccaggggctgttttctctcagacaccaggtgggagaaaaggagattaagtacaagtcttagctttattttactgatttatcaacttgtgtctgttttttcagccaata

SEQ ID NO: 66865 - DNA, 534 bp, Cucumis sativus
  Intron number 2 from transcript Cucsa.139770.1 (locus Cucs a.139770) derived from phytozome v7.0 (chr-ID scaffold0106 6; pos 1061000 to 1061533 reverse strand)
ggagttattttctcatctaaagagtattagagtgagtaattcaaagcataatgactggtgttttactgtttctctctctctttttttccccttattttttatacaggagaagaaaagaattttctgcatagtcatacggtacaactagacaagaaacaaacttgccatcgaagaatgaagaacacaaaagtaaaattgggaagcaagttaaaagattttttttttttgaaaaaactacttcaattcatgtccaaaaagtaatgccatcttgaaagagcttcgagatagcacttagtagatccaaggaatttgatgagattccatatattcattatagtttgatgagatgtcacactgagcatatccaactatctgttcatgttagtaataatagtgactactttttaatttgtaagattggttttatatgcatgtcatttcctctatgtcatgagatttgtggattggccgacttatgtggagactttggcaatgccaggaaaagctcaagaggaccgttgaggctgctattgt

SEQ ID NO: 66866 - DNA, 976 bp, Cucumis sativus
  Intron number 2 from transcript Cucsa.176390.1 (locus Cucs a.176390) derived from phytozome v7.0 (chr-ID scaffold0122 5; pos 659483 to 660458)
ccatcgataatactgggttagtcactgcaagacttttttcagctctcatttatttgtagtgtaattaaacccagttccccagttttagatgaagattgactttttattctgatgctatttttgttttcttgtgattgggatggtttatactctatacccttgtcaatggtctcaaagttctgaatggagaagagggtgctcaatcaattatttgaaaactttgcatggataaccttctactttctttcgataaaattaaacttacttgcctaaaatgaaaatgaaagtcacttttaatgctttccttttccttgcttcttaaaattttgtcccagcttgtgcgaatgggttaggaaattttttccaagaaagttcaacgttttcatgtggaagcgtctgatgggagtaaaaacaactctactatccaaaagagaattccaacgtatactagttaactaagttgtctgcctaatactttatcatttgtaacttgtaaggccgaagtaaagacttaagactgtcttccttttcactagaagttggccccttagttttgggacataattttcatggaatttggctaagcgcagactatatcctttactttcaccttggaggccatttgttcagaaagcaagctaaattcatctcttcaatttaaacttggcttctctttgaaatcgacatggcctattggcttaaggccccccctgctctttggactttttgaaaatgggaaaaactaaaggacctttgggattaggccaagtcctaaagttcttgtgggatcatatttcttgtcttatgagttatgacctatgtgtgtgaagttggtaacctctctctgtatcaattaggcaggagctttcagtgttcataattagacactgtaataacttaattttgtttttgctataattgtaagatgctattatgtacaggagacctactacggtggataaaatcataacagtga

SEQ ID NO: 66867 - DNA, 699 bp, Cucumis sativus
  Intron number 1 from transcript Cucsa.059900.1 (locus Cucs a.059900) derived from phytozome v7.0 (chr-ID scaffold0062 1; pos 481132 to 481830 reverse strand)
tctgaaggtaaaaagagagacgttcccaagtcatgtctaatgtctttttcatttggtcaaatcaaactgatgattcctagtaaataatttgagtttaacagaatggggtttcgaaactgatctcttggtcaaggatataacgccttaaccagttgagatatgttgttgtaggtgactccaagtatatattttattcatttaattttcgccactgctaaaaatataggctttcctttctctctcttcccctagctctttctttctttttgatgttatcttgtttattttgtggttttctgttgattaaccatgtcatcggaagttttaggattcttggattggatagtttcatattttgtttttattcttttttgaagacagtatggttttatattgttgatttctgtgaaggttgggtagcgcttctgttttgcttagtggaatagaacactcaaagatagtttggagaaatttctccctttgcctaataatttcatgatgaataattcaaacatgttcttttttcaaaatcaatatagggttttgaagagcgacagtaatttttgggctttttacaactttactgacattggagctgttttagggtttttttctaatatttttttaactatcttttgactttcttttccatttggacttgtgttttaggttgacgatagcttgtgacctgtggtttct

SEQ ID NO: 66868 - DNA, 827 bp, Cucumis sativus
  Intron number 3 from transcript Cucsa.027610.1 (locus Cucs a.027610) derived from phytozome v7.0 (chr-ID scaffold0037 8; pos 348133 to 348959)
gacccgttgttgacgaggtattttctctgttctgctagcttgtttagggctgtttacatccattttagttttcattatcttattagaaattgtgcttattggtgatttctttaccttatatttgtaattacttttgtaggtttaatagtgctgattttcaaaagttattccaaaatactattcggagctggtttcaagaactgaaaggcctgtgtatatttcggttaagacttcaaaagtatttctaaacagtagcaaatgtaactaagtaattgtgaatttaagcatagctcgattgttaaaggcaaagataccgtgttactcatttagcgttgaagccagatgtttgaaatctcatataagtaaaggcaaagatatggtattactcatttagcatagaagccgtatgacatgaccttgataaagggctaagaggtcatagattcattctattgtgactacctacttacaatttaatatcctgcgacgttcttcggtacccaaatgttgtaaggttagatgggttgtcttgtgagattaatgaagtagaaatgtaaccaaagagaaaaaaacatgtaacaaaagtattaccaagaagtaacaagttagaaacaattattaggggaaggttggcacaataagttggcacccactctgctgcgcatgctttcttttttatttttgattctcaagctttttgtattgtcgaactttcataataagatgaacttttttattaattctccagtcaaagtaaatgtgaattatctgatataagcttgtgatgtactgtgaatgttgaatttctgcttcagtgtggtcaagag

SEQ ID NO: 66869 - DNA, 766 bp, Cucumis sativus
  Intron number 1 from transcript Cucsa.144120.1 (locus Cucs a.144120) derived from phytozome v7.0 (chr-ID scaffold0108 0; pos 552446 to 553211)
ttcttttaagcctcgaattcattgttctcttggaggtattcttctttttctgatttgggttttgtttaatttcccaatttgaggttgttttggaatcattggatttgaaagaaaccgaggtttgactcctgtttgttgattatttctctactgggttgtggaattgaatcttcaatttggattgtttcagtcggtgttagggttttgatttgtgaagtggaaatattaagagctttgatgatggagctgactttcttttcatgatgtgttaaagacgttttgggtttttctatcttgttacgtctttgcttagttcatttttccaatgaaattagtgcagaattgaagtcaatcgtcttacacatgtggaaattctgcatttgcgtttgtgagccctgccattgaactcaaaagaattaggtggataagtcataactcataagttattgtttttttatacattcttaacacttgataagtataggatatgctaaattgtaaaagtttaagtggagcgtttatggtatagttatcatcattgttattctgtatatgttattaccaacggtgtattacagcatataccatcaaccaagaagtccgaggcttgaatctaccagtgaaaaaaaaaatgctactaatgtcatgtgaagcttttctggttgtgagaaagtaagataatttcaacattcataagaataaaaattctgatgcaagataatcacattcaggaactgtagcagaaccgaaacctaccacttctgca

SEQ ID NO: 66870 - DNA, 715 bp, Cucumis sativus
  Intron number 1 from transcript Cucsa.139740.1 (locus Cucs a.139740) derived from phytozome v7.0 (chr-ID scaffold0106 6; pos 1022611 to 1023325)
gacaactttggtaattttgtctctcttctatgctgtgattcgatttaatccttttgattgtaacacttcgtgtagtaggcctcttatgttggcctgatatcacgatatgggttatcccataactgataaacatgcagaagaagtatttttttggggtttgaactatttttaagttttgtacatctgtgaattatgggctagcatacgtggattcaactcagctaatcatatgagactattgttcgactctataacattacattaagttagacataactgttgaacaagagaaggtgatttaagctagttgaaagcacttataaaacttttcctggtctaaagttgtataatccatgctttaaaggatgtttagagaaaattttttgtcagtgtttcctttagaagtccttgagtgctccacctgaaaacactactctccaaagtcatcaaactcacccaaactaaaccatgcaatttaggattccaaggtttccccccatctgtggtgtcaatgtaatgagttgtgactaaccaagatcatcttggtgggattactttctatagtattttcttattgtttctatgatgcgggatgcatggggatttttaatatgcttgctcgatatctattatctattttaaccttctttaataaactataataaagttctggaatgcagtcggaatttgtcaaatcaaaacgtccctctttact

SEQ ID NO: 66871 - DNA, 610 bp, Cucumis sativus
  Intron number 2 from transcript Cucsa.007150.1 (locus Cucs a.007150) derived from phytozome v7.0 (chr-ID scaffold0008 9; pos 12273 to 12882 reverse strand)
ggcaacgagtcttttcaaggtatgtattctgtttcaaaatttgaacacaaactaatttaaaattaatttaaaccatacttcttgtagagaacttggttgtttaaaatagtgcacaaaagataagaggtaggcaatatggatgattaactttatctttaaagataagggaattgactttatcattaaagatgacgagggaccaccaaattagtatagtgcaattgcaaatagttgtgaagttctcatgaaattaatacttttctcttaaaatgaagtcttccttgctcggatgtgagggaagatatccttttagggaactccatagacttatcatcctttcacagatagaatttgcaattatagcgtaacttcaaagatttctcccgtcaaccatgtcacgaggcagatataattttttgaacccttgtgattgtatttttggtgaatactcaccaatataacaaaaggagatttttcctttacaaattattatacgtcatccaatcatcataaatgtagtttttagattttcagtttgaagtttgttggatgactgttctcaagttaagattgaatacaggtaaatcgtaaatcacattgaatgcaggag

SEQ ID NO: 66872 - DNA, 986 bp, Cucumis sativus
  Intron number 2 from transcript Cucsa.109860.1 (locus Cucs a.109860) derived from phytozome v7.0 (chr-ID scaffold0093 4; pos 782847 to 783832)
agattattcataacccaactgttaataaggttcttgaatggcttaacttttcttgcctttactgtttcatcggttagatcatgaccacaaaagttcaatcacatgtctaagtgttcttaaaagggtagttaagttaggaattatgtgttcgtacagttgtgaaaatggagttctttgaaaaatatgctcgcaacataaagagaaagtttctcgattaacgtgcaaactctagtgaaagtggagttgagttatttaactccgacttgggaagttggtaggccaaacactcccctaagtacttcaaaattcatttcaaataggatttgattctttagttatcactattgagtttcccctgagtttcacaaatgttgagttgttgttacactattctatttagtgacacatgtgacttcaaaagctactgacataattataaaaagatagatccatgctatagtagaatagttctagaaacatttctgtggttaagaacttcttccaagtcccaagtttagatgatccttattctttacacgcttttttcttttcatgttgttctcgtctgttttgcttttatggtagttgttgttggaatgtcttaaatctgttatctgacacttcaaacaattaagtgtggacggtggagggagtgcctcaaatacctaagttgtattcttatttgttatgtgtaagtaatttacaattttcacatttgggtttagagaaatgctcaaatcatagaggtgtctctctcctctgttatctgaattattctttctaataataaaccgttctccatgtgtccatggatgtaactaacacactattaatgaaacatgtaaatttgtgtgtcaattctcttttgctttatgtttagtgctcatatgtgattgtcgcttcttaactagctaacaaacatgatgtaagaaatatcattttgtaactccttgaaaattcttgtgtgtttgcagcgattggaggag

SEQ ID NO: 66873 - DNA, 500 bp, Cucumis sativus
  Intron number 1 from transcript Cucsa.005570.1 (locus Cucs a.005570) derived from phytozome v7.0 (chr-ID scaffold0005 5; pos 629201 to 629700)
ttttaattacttgagctatcttattaagtcgccttgtgaatattgttaaaaaaagcatttctcaatcttatgttttgtgtacttttttttcctattaatggacagtgattgaaggagaatttttattttttttcttcatctttttgcattttctatgttaaagttttccgttttttacgggcttctatttactgtagtgttaacttaattcattagatttgttttttttcaaaaaaattaataatattactgttacagctaaccctaatttcaaaggctgctggaaaaagggaagaagaaaaacccaaacttcaaacagttcatctccatttctcaatatattttacaatgtatttcactcaagaggtacctttttattttttattattatttactgctattttcttcttcttcttcctcctcaagaaatttagggtttttttcttttcttttctttttttgcagaaagaatatcacagactcacagacaatagtacgcc

SEQ ID NO: 66874 - DNA, 749 bp, Cucumis sativus
  Intron number 1 from transcript Cucsa.109560.1 (locus Cucs a.109560) derived from phytozome v7.0 (chr-ID scaffold0093 4; pos 474637 to 475385 reverse strand)
ctcgttttcatttgggttaagcctggaacttacaggtaattattaattgttccttcattttcttattttcattttggtcactcttcttcttcttcttcttcttcttttctctcaatttctttgatcgggtgcttgtaacacgattatatgatttgaactctttaagattagatcgaaggagagaattagttgaaataaagcatagttcaaccggcatatttaaacttgttatatgagtttaaggttaagaaaattgagtttttagttttcaaacttgtggttgttttaacttttgaagttttgaatttgttaacattcttcgttctttatgttttagggttcatttttttattatggtcaacttttttgttatatttattgttgtgttgcggttgtgtcatgttcgcatggcctctttctgttcatttctttaagtttatatatacatgaaaaaaaaaaaagcagagagaaggagaagataacaaaagaaaagaaatagatgcgaggatgaagaaggatcatagaattttaaatagttctatattagaaaaatattgtgattgaatagggtttgatagattctaaaatttggttaaattttatatcgttagaaagaattttatttttaaaaattatatggataattttaattaaaaacaatgacaacatatatacttttgtttatgtggtgtgttgataacaaatattgagtagagagaaaatagtggtacctgaggacaagccctaca

SEQ ID NO: 66875 - DNA, 1006 bp, Cucumis sativus
  Intron number 1 from transcript Cucsa.107800.1 (locus Cucs a.107800) derived from phytozome v7.0 (chr-ID scaffold0093 1; pos 77941 to 78946)
gcgtcttcctctccacgcgcctccttcattcctctgtaagtctctgtttttcttctttttttttcctattgttactaaataaatcattttattaattttttaaaaaatatttatcctaaaagtaaagaaaccgacatgtcgtcttgtggtgccgtgacatttggattggccgaactgtcggctctatatttttccttggaacaataaggctctctatttttcggacgcttgttcctcctttatttttacgtttttgccacgcgtcttctctacaccaatttataatttgagttcataaataattgcttccatttaaattatgataatatatttggaaattttattttcaatcaattaaatttataacgttttcattaattatgattaccttttttttgaaattattcatggatcggttctcaaatttgtatagattttttcaaacgtggattttacaaaaggatccaataaaatgggtgaaagattggaatagaaaactttaataaataatctggatttattcactacgaaagtttaagaattttatttatataactattaagtgtgtgttcttctaaacgaaatataagatatagtgtatgaggtaaaagtaaccataattttttattaaaaaaaaaaacatctatgtattatgatttaagacatcacctttatatatataaaataatatagaaagaacaaaaaaaagttaacactatatttgaaaagtaggtatgtttttttgtaggtttcatattctgggtcttccacaaacacttaaaattgaaagctacttttgtggagtataaattggtttaagtttttgttgcataaacagaatggatgatttcgaagtcaaattaaaaatagtatgaaacatatagttaaaattttcccagagatgagggataccgttaaatttgtcggcagagagatttattgaaagttcgttggatctgattttatttcagacgacagcgtacaatttaaccataaaagggagcgg

SEQ ID NO: 66876 - DNA, 305 bp, Cucumis sativus
  Intron number 1 from transcript Cucsa.102990.1 (locus Cucs a.102990) derived from phytozome v7.0 (chr-ID scaffold0092 7; pos 1888196 to 1888500)
gagaagctgaaagctgcttctaagggcgagtttttctctctctctctaattcttcgcttttatttagcgactaattttttttgttggagtatttttgttagatttctcggcggatatctaccaaccaacgtgaagactatgtgaggatgaaattattttgattgtttagttctgttttgggatccgtgggggttggggtaggttagctgctgagttgattgtttgagtgagttttttcggttcatattttgagggttttgtttcttttgttatcaggaagtcagcttgaagcaaacaagaaagca

SEQ ID NO: 66877 - DNA, 798 bp, Cucumis sativus
  Intron number 1 from transcript Cucsa.181750.1 (locus Cucs a.181750) derived from phytozome v7.0 (chr-ID scaffold0125 1; pos 33284 to 34081)
attactacatctgcagattccaggttgggttctttgtttttttttttcttttttctttttttgaatgttgaaatgaaaatcttaggcttcgagagtgcttttcccatggtaataattagtttttgagtttttttcctagttgtcaaatagttgaatggtgaaaataaattaaaacagatgaacagtgagttgaataacgtaattgaattgattctcgggtgagagttacaagatctcataccttgaaattcatggctatgttaccgaactaattagcatggaatattttctcttgaccatcttaatctatgtttgaaactgatgttggcatgagtttgggatgactcttggaaacaggatcaaatggtttcaaccagtacaaatttgcttttccaaccttttcatactgtttggttgaagaacggaaagtggtttcgaaatgtgtacgaattacttggaacctaactttttgaagtaattatagttgaagtatttaattagctactctgaaaagtcaacagaacaccacaccaaagtgcatttatgagaaagcacttatagcccaagtacgaggctaaaagcacttctttattgtaactataaacttgaaatcttgaatacaaggtccttaagaaatattgaacagtgatttatgtactggttttctgggattaaaatagcctctacttaggagattgtttccctttttgtgcttttttctttgaaagagagtaatcaaacataagatttgtttttcttttttctcccttttagaatccaggagagattgaagaagag

SEQ ID NO: 66878 - DNA, 365 bp, Cucumis sativus
  Intron number 1 from transcript Cucsa.042070.1 (locus Cucs a.042070) derived from phytozome v7.0 (chr-ID scaffold0054 0; pos 554733 to 555097 reverse strand)
tgaccacaagaatcactccagcttctccattcaaggtcaactctaattaaactttccataactcatcaacctcttcagacgtacctaactgatttataacaatgtatgattttgtgtcatcaacatacggtctcttgtttttcatcgattttactaaatctagactcatcagcttgagacgtatgtatttgatttacatcgatgtatgatgactgactttgtgtcatttataaactaccgttataccctatgatgacactcgtcttcatacatatacaatgtgaaattgttgtagtgatcatctcatgttcttttggtatttacattgattgttggatatatgtttgtaggagaagtggaagaaa

SEQ ID NO: 66879 - DNA, 987 bp, Cucumis sativus
  Intron number 1 from transcript Cucsa.126650.1 (locus Cucs a.126650) derived from phytozome v7.0 (chr-ID scaffold0101 7; pos 530039 to 531025 reverse strand)
ctcgctgcctctaccaccgccaccgcaactttcttgtgagtgcttcccaggtttatttcagattttgtgttttcgaatcttcgtcttggttttgagattcgatgcatttaatttctttctcatcgctgtctctttatacatttgattgaacttctgctgcttgactttaaaaacttaagctgacatttttcttttgtaaatttttggacaatattttcttgtgttcgtgtttgtgagcgaattgattgggtggtttcttcccactgcttgtaactcccgaatatgttaacctaacttagtaggaaaactctttttgaaatttgtccaattcgaatctatgcactgtgcgttattaatctgcttaaacacaattatagttcagacatagtttcagttcagggagtcgatgctcatccaaccaaaagtgcagagaagttaagaggattgttgttgagttttttgtatgattgacccaaatttagatcggctaatgtcaaatgatccagattctgaaaaacaatgaaaattaacattttgcagacacagtactctacttaacctctccttactgcccattttctgttgcgggtttgcaactttgcaaattgatgagaccttgaacacgattccaatacacatcccaattttttcataacaattcaaacttttgcctattgtttaaattttgtgatcctatgagttttctaaaacctgaaatcttgttcggggtctcatccattcgcgatagatgaaaacctgcgatcgtgaatggacaacaatttaactttggttagtgattttgttgcgacttaagcaaaatgttagttttcattgtttatagaatacatatcatttgatattagtgcaaccaaatttcagtcaaaacctcattcctgttagcatgttatattgcaagtcccaaatattgtcattatatgtactttacttaaaatatctcatttgaaaacgttttgatcagcagctgac

SEQ ID NO: 66880 - DNA, 701 bp, Cucumis sativus
  Intron number 1 from transcript Cucsa.142590.2 (locus Cucs a.142590) derived from phytozome v7.0 (chr-ID scaffold0107 9; pos 831771 to 832471)
attttgatttcttcacagagtattttcagtcgtatgtaagtctaaacttcaaccttttctttttgtctttagtttttagtctttttttttttttatgggttttcttctttttgttttgggttattgtttttgcgaattgggttttgggttttgttgcttatgtgcttgttggttgagactttttgtgttttgggtttgattttgatcttcaattctaatggtaaattactgcattgtttgcacctcatcgtgttttttattggtcaattttggctgccaattgggtatttgtattcgtgttctttggaatggctgctttctgtgatgggtgcttggtgcttattaaaatttatgaaaatagagaacaacattagacaattattaatcaatgaattttgttgttttctagctagagatttttttttaaaaaaaagtatgagattcattagacgtctctgaaagaatgatcgatcctacaaagttaagctagatagtccttactgagctcgatattttatcagctagttttctttacctcttttatggcatatctttaggaaaattgtttttgaacattgccctagaaataattttattgtttaagggagtttctttttttttttttttgtttcatttggttatttgtttgctctggtgccgtaacagaccaatctgttggtttacagagcaactcggctaaa

SEQ ID NO: 66881 - DNA, 522 bp, Cucumis sativus
  Intron number 1 from transcript Cucsa.119850.1 (locus Cucs a.119850) derived from phytozome v7.0 (chr-ID scaffold0099 8; pos 1783724 to 1784245)
ccggacgtggaacttcagagggcagagaagcagtggtagtttgtgagcacaaaccaagggcacattctggattattggacttgaatttgcctcctccaatggaggagattgaacaggaatcttcatctccctattcatcagggattgttttggatctcagattggggcttaattaattcaaccatttttacatttcttttcttcttatttcctccaaatagggaaaaacaagagtttgtggtaagtattacactaattaattaactaggaaggacaaacgtgtgaagtcaattcagcaatctataactcaaacaattattatacattctgattcttttcaataaattttatgtatactaatatcatttccattccttatataactggggttggacactaacatatataatataacataaagtgtatagattttctgtggtttatgttttcagttttgtttttgtttgtggatttcataacaacgtaacctccttttgcctactatttagaaactgtacgacc

SEQ ID NO: 66882 - DNA, 911 bp, Cucumis sativus; identical to SEQ ID NO: 63886
  Intron number 2 from transcript Cucsa.180680.2 (locus Cucs a.180680) derived from phytozome v7.0 (chr-ID scaffold0123 6; pos 226034 to 226944 reverse strand)

SEQ ID NO: 66883 - DNA, 754 bp, Cucumis sativus
  Intron number 1 from transcript Cucsa.157380.1 (locus Cucs a.157380) derived from phytozome v7.0 (chr-ID scaffold0114 1; pos 332183 to 332936)
gcttcttctcttccaccgttccctcctcaaatccggtaatgtttcttctactcttctttgaaatattgctattttctatgattttgtgtattttctcacatttgtatacatttactttagtaaaattccatttagtgatcaattatgtacagtttaatcaatcactttgatccgaagacatgggaattttacgtctttgtgttttgtaacacaatgcatttgagtctcagcatttaagacttaagaggggttgaatctctcttcgttttagaattattcaaaagaatgctttaagggattctgctgcgttcctccctactgtcattttttaggcttaaataatattagcaatcaaagaccaaccagttgtttacaggtataaaagcttggtaatttgagttttcctatggctaggttttgtgataatgcatttgggtggtctgagtgtttgagttattgagttcgttatcactctagtttgaagtataagaacttggtaattcgagttttcatatggctaggttttgcaatgatgcatttgggtgatccgagtgtttgagctgttgagttcgttatcactttagtctgaatcattgaacttatcatctttgctgagaaatcaatgaagtttctttctttttctagttctttttctttggcattctagtcatttgtgtgtatttatcgagattattatctatattgaaacaatatgtttttcaatatgttcttcaatatgaacatgcagggaagt

SEQ ID NO: 66884 - DNA, 648 bp, Cucumis sativus
  Intron number 1 from transcript Cucsa.057990.4 (locus Cucs a.057990) derived from phytozome v7.0 (chr-ID scaffold0061 4; pos 305988 to 306635)
atccattttccctcggatttctcctcccccgaaaggttagtttttggatttcgatccatttcgttgtttcatcgttcatcgtattcgtgtagaatgagtcccgttcgtgtcaaacaatgattcttcagtttcctattcgtatttgacatggctgagctgatcgataatgcttaacttatcgaattctacgtaggtgttttgacattccgattgcttcggatggagtggctttcctggccgtagatagaaagctgccttcttgatgtttatgttagtcagtcctactatagaaatgtaacttgtttttgggttttgggatatttcgattcgatctttaaggggtttgttattgattcgatataattgggggattgggtttgattcatagtatttcatactggcggttgtttttctgctggcatgaaaattcttgggtttccttgggcgtaaatgggtttttagattctttaaatcgttggatggctagttgttttttcttgggatgttagaagtgaatactttgtctgcttgttttttcttttcagaagcaggattacatgtagtctatgaatatttctttcaaaaattagttttattaatttgttgatatttcattaagtctttcttttgggttttctataatagatt

SEQ ID NO: 66885 - DNA, 889 bp, Cucumis sativus
  Intron number 1 from transcript Cucsa.120220.2 (locus Cucs a.120220) derived from phytozome v7.0 (chr-ID scaffold0099 8; pos 2216554 to 2217442 reverse strand)
agaggtcgttgttcgaaccttggagattttcatttctgttgttgtcgttaacccatttgatttgatttttggacactcccacctggtttcagtaacttggacgctgagaattcagaataacagggacacccagttaacgtttttatcacttatttcttattttcttcgtcttgcgattgtgagaaacgtcccaattcagatttcccaacttcgttactactttttcccatttttttggaccacccccaattccagttgagatactttgctgttctaaactgagtcatcaactgaaattcgtggtatattcatgcaaattcgatttgggttctctttattttctctgaaaattgcagtgcctgatgtgttcagttgattgaagcattgaaattattcaaagattgaattgcaaatgaatctgttcgaagcttccttgacttttttttaccttttttttcattgcttcatgtagaacaaaagtagtaaacaagtattcttattctgttgttctgttcgtttctcacgtgttttattcttgtttctggattttcaatatgggaagtgatcatttttatcttctgttttctgctatcagccatagattttcgcgttgtttgaatgatatttaaacgtccagttcggtaatggaataagggattggtgattagtcagctgacgttagatggagtttcagtttctttgattccgaccattatttggctccaatgctttgagtatcacagactctgtaatctcaaagagcagatttcctagttcttgtgttttctattcgcttttatatttgtgctccaatttaacccatttgacaagctagagatggttagttaccactgtctttgctttttttgttttcaggcactatacttag

SEQ ID NO: 66886 - DNA, 722 bp, Cucumis sativus; identical to SEQ ID NO: 65131
  Intron number 1 from transcript Cucsa.138880.2 (locus Cucs a.138880) derived from phytozome v7.0 (chr-ID scaffold0106 6; pos 132718 to 133439)

SEQ ID NO: 66887 - DNA, 393 bp, Cucumis sativus
  Intron number 1 from transcript Cucsa.139480.1 (locus Cucs a.139480) derived from phytozome v7.0 (chr-ID scaffold0106 6; pos 682314 to 682706 reverse strand)
ttgcaggtgatctcttcttcttcaatcttcttaattatcactttttattttttacttcaatttggtagtctccattacatattcgaacatccaacgtcttagccattctagatgtacaatgactcgttggtgtttacgatatggattttgtttcaagcttttaggtcaaccaaatttaagatggtaatagaatagttacaatgatcgatcattgtgttcaaacgcaattcgttatttaagagcttaacaattgaacttgcattgaatggtagtagagctataacaattattgtattaaataattttttttccaaaatatttttggtttatttgaaaaaaattttgaatgtgatttttgtatttattaggaggttccagtagatcaaagagcag

SEQ ID NO: 66888 - DNA, 946 bp, Cucumis sativus
  Intron number 1 from transcript Cucsa.109330.1 (locus Cucs a.109330) derived from phytozome v7.0 (chr-ID scaffold0093 4; pos 264557 to 265502 reverse strand)
caggacaaagtttgttcaaggacatagcaattgtggtgagcttgttagacgtctatgttattgtagctgcatttattaaattcaaacatctatatgaaattaaatattgtgatacatccatcatcgatgtctatactgttcaaaaaaatgatcaacatcatatgtagttgcttacctttttttctctcccaatcaaacaagaatacgaacaagtagtcaagaactgatatgcaattaagaggaggaattctatttacgatgcagatttgcaaaagatgaaaagtaggctatgcctcactacttcaaaagaagtttggagaatatgcattgagacatcagcttacccttattccatgttcttgtttgttggtgtctttttattttttattgtcttttctcttttttctttttaacgaaacaagaagcactacttaattccatattgacagaagtgaaagaggcaattgagagcacttcgattcaaataagtaatttattcatttattctaattaaataatctcaaaagatgaaagcccaatccatacatctggttcctttggggacatccgataaaattggaacgatacatcttgcacaagaaatgtgatttcatgtttttagtaagtattctagatcttattctgaaagtgggaagagaactgataagtgataacatgatgaaactttctatacatttataatctcaaatcttacaatgatttgccctattgatcaatgtctaaagtattgctttatgcaattatattattgaagtttagagtcaagggtaattgtatatgttctaagaatgcctctattgtgaagggtcagtactatactacctctcttctcatcttgtccttggccatttttgttaccatagctgtctaatttatcaactgattgttaggatcaccgaacttcccaggatcgccgagcttcaaa

SEQ ID NO: 66889 - DNA, 903 bp, Cucumis sativus
  Intron number 2 from transcript Cucsa.152080.1 (locus Cucs a.152080) derived from phytozome v7.0 (chr-ID scaffold0111 9; pos 398398 to 399300 reverse strand)
gggtgagagcatttcttaattgttcgtttgtgatcattagattgtctattcggctctattcttctatatgtttctttctgatataactattagtaaattttattttctgatgctttgctctacctataatactctgcttgggtttcttctttcttctttcttctttcttctttttcctttccttttttattttaaattgttatctttgacgtgttaaaagggaaaaaaagttcataatatggtttctaatgttctccgaatgattgaaggattggtggaactacgcttctctgagacttcagattgtgtaacatgcttcttgaatttctcgtgtgtcattttctgttccactaagcaacggtggatggtcatgaagtacattttaattgctggaatttttcaaacttgaggaatttagaatggcactgttagttctgttttcccacgagtgttgaatattcatcaatatgcttactttgcaaaagtcagccattgtaatcttttttttcataaaccattaaggttactccttatgaagattggaacatttaacaagaacatgtgtttggtttgatatcaagtgtcaaccatctttttcactctttatttcatgaatgttcctcatgctaggaattattgttgttcattcacttttccagaaagtgagcaagtttgttttccccccctaatttccttttttggttcaagttgcttgatattcaatacacaatggtaggaggatttggagcgtttattcatttaaccactattatgttcatgtccctatttttgaatttcaaatgtgcaaatgataaccttggagtttgacgagtttctatttgtttaagaggtatctgttaatctagatatagtaatagtactttgtttctagcagggttctcc

SEQ ID NO: 66890 - DNA, 694 bp, Cucumis sativus
  Intron number 2 from transcript Cucsa.123120.1 (locus Cucs a.123120) derived from phytozome v7.0 (chr-ID scaffold0100 0; pos 423509 to 424202 reverse strand)
ggtttcaaatcactgaagcacttaagggaaagagggtaagaaaaggcgtgttctatatataacaaattggagcttgaaatggaaatgatagtataccttttgtttattttaagcataattcgataaaaagtaacacacacatatatctctttccttgttggtctcttaattttatgtgtgatgactctgcgtgtgaagggaaatcatctgattaaagcatggaggcaaatgaagcccctaattagttcgaggaataggtgttaggtcaaattatgagagggtttctatctaaagcatgatatactattcaatttttggaatgctttctatcatgtgcaaaatatacaactcaaatttctgcagattaagctggtccgaacatctatggatatagaaaaaaagggggaagaaaaaagataatattatatgaaaagaatgaaattgatagtcataattcaaaaggatttagagttatgtctcattgaccttggtagaggcacttaaactagctctagtcttgcatggaaaaatgcattacatggatgcattaaaaattatatacttttcctgtttgttaaaatgttgcattttttttcttctgagttgtgtaagctgtgtgcaaatgcaatcagatgaaagaatgtaattgatgatcataatttgacagggggaacgagcagagttgattactcag

SEQ ID NO: 66891 - DNA, 505 bp, Cucumis sativus
  Intron number 1 from transcript Cucsa.123120.1 (locus Cucs a.123120) derived from phytozome v7.0 (chr-ID scaffold0100 0; pos 424534 to 425038 reverse strand)
atcatcttcttcgtatttaccctcttccattactggtaattattctttcttttattgggttttccccccttcctctgtgaattaggaatttgtgattctcttttttagaatacccttgtttgatttcgtataattaggtttgatctttcaccatctgcttgttatgttctgttatttcatgccctttttctttcttttcaatcccccttttgtgggttctttttctaattctagaatctatcgagaattttcatcgggttgccttatgtttttttttctttttcgcattgttaattaagagatctgttcttttgaaactgaaactttattaggaattgtaatctgttgttatagtcaatcaattttgaatgtttggattggttttttttttcttaactaaatggggcgtttgcgttttggttttggttttgattgctgaattataggttaaattttttttcggcatattgtatcaggatcttttagttcccttgtgttgggagct

SEQ ID NO: 66892 - DNA, 314 bp, Cucumis sativus
  Intron number 1 from transcript Cucsa.043820.1 (locus Cucs a.043820) derived from phytozome v7.0 (chr-ID scaffold0054 2; pos 481474 to 481787)
ctcgagtcagagtaataattcactttctcttgctgtaattttgcctctctcttttgttggttttacaaatttattgctgtttaatttgttttgttaactgacaaatgcatatcgtcaagttatttcctattaaaacgaaaaaaggatcatttggtgtcttcagtgtgtcttcagtacctatccttttaatataaatcagtcttcttcttggaagtaaaagttaagaatggttcctagtagtttgatttggcgcttgtgcttattaactcgaataaggtcgttttttctatattttttttctcaggagaggctgg

SEQ ID NO: 66893 - DNA, 753 bp, Cucumis sativus
  Intron number 1 from transcript Cucsa.133500.2 (locus Cucs a.133500) derived from phytozome v7.0 (chr-ID scaffold0103 7; pos 1184367 to 1185119)
acatttcgactgtttcttgtgaaattgctttctgggttggttttatttctcttggctttatttgtttttttatttaattctatacgtttgttcttttttcttttttttttttttgttagaatttcttctgttttagtgtcggatatattggatcgcctcgttttacatctttatctcttcctcaaacctgttttttcatatgaaattgagaatagaatggctggatgaaagaatatatgttcgttttggaattggttttatctttttgttcattttgtggctttaagacaaaagttcctttaaacggattggagtaaattttgagtgatctgattggaatatatcatacagatggttggtatatatatatactggaagacgtgctctggcctgttgggttgatttatatgttttgttttttatgagaaacgaattagcagtacaaacgagacctctggattcctgtttgtatatctttctgatcttttcttctgctcttaatctctgtcttaacttagaatcagatatgatatgtgttatcctccgtagggagaccaacgtgaaaaggaaatggttctaattgtgtttatgttacatttccgaatcttagttattcaacaatttagaacaatggaaagtttatttctgtgcagtttgtgtcaataactatacatcaggcatgtttgaagtgtattttctttgattttctgacttttagttattttttttccagctgcatagttgttgctcaaa

SEQ ID NO: 66894 - DNA, 603 bp, Cucumis sativus
  Intron number 1 from transcript Cucsa.004460.1 (locus Cucs a.004460) derived from phytozome v7.0 (chr-ID scaffold0005 3; pos 23325 to 23927)
acctttcgaatcaactcactggaagtaaaattcaggtatcgtttcgtttctaatttcaatcatcatcttcctacaatctttgccggtttcttgctaacctacccgatcacgatacgctgtaatgccagtggtcaaatttcacttcagcttggcgactgcatatcaaacttaatgcactgcttaatatgttttgacctcgttgagcttaataccttccattttcctgtcggttcgctaccaaatgttgtgttaattttctattattattcgtaattatcttgatatgaagtggcaacattagtttttcaagttcgatcgggtattgagaattgatgagatgaaattgacatgaactcgtttaggtttggttaggttttgtaactagtgcattttgattctatgtttgtgtcacctggcaataatttgaagttgtttcagtattgtaaaacagcgtccataatctttgtaggctcttactcgcacctctttagtgctttgagaacgggtgtctttagagttttcatgcaagtcttcattgcatttgagatgagctgacaaatttcagcctggtagtagaaagtgaatcgctttagcaggagcgat

SEQ ID NO: 66895 - DNA, 703 bp, Cucumis sativus
  Intron number 1 from transcript Cucsa.092150.1 (locus Cucs a.092150) derived from phytozome v7.0 (chr-ID scaffold0090 5; pos 81028 to 81730 reverse strand)
ataaggtaatggatcgatgatttttcatctcttttgtgtttgactatgcatgtactgtaagttcccgtcttctccactgtgttcgctgtttctacatactccaatgatagttgttctgttttccatggcagttagttaaacgccacggtctatccattgctgaagattaagaagccgtttcatcaagtagagtttatagttggagttaatgattttatttttgggacatatagttgtaaaatagaatttcacaataaatggaaaaataaaaaaagaataaagatgatggagatgatgttgctcaatagatgtgaaaatttttcaaatatgaaattacttgacaaactttaatagaatttaccattgaagtttagttgtttatatcaaattaagaaatttgaccggtatgtcaaatgaccaacgctttagttattattcgtaaatgtccaaatgatagtactgagtttgggaacttcataaactattttagctgtcttcaaatcttgttcaaagtgaagttcgaagacaggttattcaaatgtggtcctcaaatgtgaaaaaaaaaaaatgcaattgtgttgtgacatgtaatttcctcattcatttcagtaggtcaagaaccaagcggaacgctatcctacaatccaacatgaggaatgtataaagtataaactaaaagcccgtgcattagccttcgtgtcac

SEQ ID NO: 66896 - DNA, 491 bp, Cucumis sativus
  Intron number 2 from transcript Cucsa.192950.1 (locus Cucs a.192950) derived from phytozome v7.0 (chr-ID scaffold0133 5; pos 9743 to 10233 reverse strand)
agtgttgtgtctagcctatcaggtattcaattttcttcttctttccattctctatcctctctgtttcgtttgacttctgaggaaacaaaggaattgaaaatatatcattccagttttttgttcaaataaattttgtatgtgttgattcattgaaagaactcgaacacttcatgacttgaaatacaaaatcaaccccatgatctctgtcaatggactctctttctctgttctgtttttctcgaaatcaatagaaatttgttcttccttttctttttacatggaaactaaaaggaacccattatttcacaagcaaaacaaaataattttctttcatccttttcctttttcatggaaaataaaaagaaccccactacttaacaagataaacaaaaacaaacccatatctcaaaatcactaatctttctctcagtgtgacgatctgtttggctaaaaaaaatctgttcttcattgcaggagtgaactcgatctca

SEQ ID NO: 66897 - DNA, 1004 bp, Cucumis sativus
  Intron number 2 from transcript Cucsa.073080.1 (locus Cucs a.073080) derived from phytozome v7.0 (chr-ID scaffold0076 5; pos 617776 to 618779 reverse strand)
aggagttggattcgattgaaaaacgtcatcataaggtttctctttctcttccgctatttttttttttttttttttggtgtttattgaggatggtgatttgttttaagtttaaattagattatatctgatatgctagctgtgaaacctattaccatcaaagacctgtttgggaggttggaatgggttagggaatactaccaaaatctcacgtcgctcagataagaggatgatcataatatattaggtgggacaatctatctattttggaggaaaacaaaagtaaagctggggatgtatatgaccacgttgaacaatatcttatcattaaggttcggagatgtttggaaaaatcattcttactaatagaacgtattgaggattattgaaaagtggtgagaaaggagtgtaagaattaaagactatcaatctaaacataaatattaaatgggtagattaaatttctaaaattatgttgaaagatgtaaataaatatctaaaagaaaaagtgtgaaatataatagatcttatttaggttaagggattcaatagaattatgaattcctttagagcttgggctccaaatatttcatttctataaaaagaaggtgtgatcctcctttgtgaaccaaaaaacgtaagcaagcaaagtaacaaggagatgaagagagagagagttactaaactttgagtgaaagtgaacagagtgttagagtaaacaaaatattcttttcaaaagtgttcattctttgtaaattttctaaagaaacttagtgtctccttcttttgtcaacattacgattaacctcttacatttcagtcttcccaagaagtcccaagtcctaagttcttcatcgaaaagttttcatcaactttattgtaaaaacgtttgattttataaaaaggtaaatcttaataactatgagagttaattctttgttattattattgattttggtgacgattttggagggagtagacagggagtgggttcatacaagtaggaa

SEQ ID NO: 66898 - DNA, 684 bp, Cucumis sativus
  Intron number 1 from transcript Cucsa.046080.1 (locus Cucs a.046080) derived from phytozome v7.0 (chr-ID scaffold0054 2; pos 1686795 to 1687478)
tcgctcaattaactcatcaattccacaaattcctggtttgaatcactctctctctctctctctctatctgctgtttgtttatctccctaccaatcttgcaattttgtactgctttgtttcttttcttttttaattttgtgagatggatttggattctgcatgcaatttccgttgtttcgttgccgatatgatctgtacattataatgcttgcaaatttggattttctgtaatttgtgaatttttgacagtgtctggattgcctacatgactttgattgttgatttataattgatgtagtttgtgggaattaataacgggagtttctgcttcggatcccttacttttcttcttcgtcctttcccctccccgcgaatgtcggcctgatctcaaagaccttccgtggtctaaggtctttcgtagtaatgtagttttaagtgaagtttgatttatagcatggctatacataaataattagggcaaagaatgtagaaaagaaactttgtgtatgcattttatttcaaggtgattgatgttgatagtttcatatttcacgcactttaattgatatttcatattcaaacattctttatcaagctcttgaggttttatttttcttttttttccttacaagtattatttcattcctaggtgcggaagacaaaatctctcctatctgaagttac

SEQ ID NO: 66899 - DNA, 672 bp, Cucumis sativus
  Intron number 2 from transcript Cucsa.046080.1 (locus Cucs a.046080) derived from phytozome v7.0 (chr-ID scaffold0054 2; pos 1687483 to 1688154)
gattgttggtttgcattctcatacagttaaaagtaaaggaatttatgttattgaaccatttattgtctctttttgtccgcgttcttttgtaaatttattgaaattatcaacaatattttattttattttattttttaattgcctccccattaattaatttattagtgctttcttgttataacgagttgaagtttatgaacgttgaggggtgaattcagcaatgctattatatgaaattttgtatggatacaatgttatatactatcagaattattcattactgtaaataatcaagatgctggatacttcctaactttgactgtgtcattcagaaactcttgtgaaagcgtttgagattaatggatcgggctacatatatattttgtttggtgtcactgaaatatcatgcacactttagtttactttagaattgtgatgggaattagcttgagcatcttgctcgtgaagattattagtgatttctcttttttttaagctggattttatcgtgtatttgattgcatattgtttcttgttcttgctctttctctctcccggtggcatacttttgactctgggtttcatgaatttatcttttcccccctttattttgacaaatgttatatatgttgcataggttgttcttgctgcatccattgttagcaagtctgg

SEQ ID NO: 66900 - DNA, 580 bp, Cucumis sativus
  Intron number 2 from transcript Cucsa.048130.1 (locus Cucs a.048130) derived from phytozome v7.0 (chr-ID scaffold0054 2; pos 2936426 to 2937005)
gttgtggtgattacattggctcacctactaacttggtaaactctcaatttccactactccttgctttctaattttttttcttttatattctaaagatttattttatgatccctcatattttgattttagtttttatgtcatgaacattgatcgtagaaatagaggatgaaatattggggtaaaatctaaaaaaaaaaaaattaatcaaaagttaggacttcgatcaataacatgtagaaatatgttatgagatcatttttcaaaattaatcattgatgtacgaaacttaagttttaaatttgagtatattaacaacaaataacaatataacatgaccattttctaaaaaaagaaaaacaatgcaacatgatcatgttagaatctggatctatgaagaaaaaatgtattactttttcattgtagtggtggtaaaaagagaaacatattcttgataacctcaaataccttgaacttgttctgtttgatttctcccgtggtgaatgaatgacaaaccatgtgtatacacataaaatgacgtaagaattatttgtgtaaatgtggcaataaaaaaaaacagata

SEQ ID NO: 66901 - DNA, 818 bp, Cucumis sativus
  Intron number 2 from transcript Cucsa.134540.6 (locus Cucs a.134540) derived from phytozome v7.0 (chr-ID scaffold0104 3; pos 198673 to 199490)
acgaagcggtaggaagattgaacgaactagggaaggtagcggaccacgatacgatttttttcatttctctgtttgctaagatatgcgtgcgcttgcaaatgttttgaacttgttagattcagtgagtaattggacgatttgcatgtggatcttcgtctgttttatgtgattctgctgtagttttctattcataatataaaaatgtatagtatggaccatgtaaattgattttgttgactgtttgggtcctttgaagtatccccttcattgattcggatattaaaaagttccggctattttatataattttattattctttcttagaggtcttaatgtaaattttgattgaaagacttggggaatttcccgatttcttttttatctctgaagttttttccttggttgctttcgttttcaatcatcaaacactttattctatgccctactgcatatattatagcttagtgcatgaaaaattgtcctccccttcccccagataaacctgatgaacaccagaagttgagttctaatccaactagaaactgttcgatggtgagttttctgtgttgtgttaaatattccgagttggtaacacgagttgtcttacgattgttcccaattactaggtgagtgatgctgctcgatatcttgagagaacgttcttgagtccagcttctatcaaagcaagctttcttcttcaaaaatggatggaggatgctggattaagaacgttagatttctacttctcctcatctcgaagaattcttaaattgttgttgacttttactcttgaacatttttcaggtgggtcgactgc

SEQ ID NO: 66902 - DNA, 881 bp, Cucumis sativus
  Intron number 1 from transcript Cucsa.079130.1 (locus Cucs a.079130) derived from phytozome v7.0 (chr-ID scaffold0079 3; pos 1742032 to 1742912)
aacagggttggcttttgtcatttccttttctactttacatctgtcaatcttctggttgctctaatttgtgggttgtcaaacacttttgttcattcttctctaactctatcaattttgttcatgtagttttacttttggagcgatttatagtctttcaatatggttaagttacgagcatggattatggactttcatgtcttttaacttttgaaagtataatatcaggtttcttaaaccttcatatttgaggtctttaatatactcataaacttttttgcataaagttgaaatttgatggacatatcagatacataaatgaaagtctagggacttattttaatgttcagtgacttgtttgacaaaaattaagaagtccaaggacaatttgtagctgaacctttaaaatttgtacattgaagaatacagatgccatgtatacttttcgttgccatttaattgaatacttagtgaatcaatatatattcacaaaaatgcaggggttgaaatgaaataaatgaaacaaagtgtagaatgttaaaaacactataatacgaagactagagttagttaatataaccttttcttcgttgggctatagctgaatctctgcagtaagaaaacaaacggagctgttcatgtcatcttttctatatcaactcacataggccattgtctttctgttttgctagcgcaggaatttcttgtgccaaacatacaaaaatgttaagttcttgaataaaaatatgtccagcaaatttcattttgaccattggatgctttgaactgctttccctttcatctcaagcttagcatatctggtttcttgtttgttgcctgctcagacaggttggaggacatatcgtagacccgacgagaagtct

SEQ ID NO: 66903 - DNA, 358 bp, Cucumis sativus
  Intron number 1 from transcript Cucsa.065370.1 (locus Cucs a.065370) derived from phytozome v7.0 (chr-ID scaffold0069 6; pos 102035 to 102392 reverse strand)
cttcgaccttcaaggttcgcttcccgccgtgatttttgacttttcttttcataccttcacacgtgtcaagcaaaacttcatcttcctttatatgtttctttttctgtttttgttttgttcaataaaggaatttcatttttgttcttttcaaccaaaagattccgctttttacagaatttctctaacttctgtcttcttaatcatttatggatagttagtaggttagttgttgaatgaataatagaatatagggttttagagagattattattttggtttagggactaaatcagagggttatttttctaacaaattggtttttttaatatgaaaaattgcagcatctaggagtgacaga

SEQ ID NO: 66904 - DNA, 1022 bp, Cucumis sativus
  Intron number 1 from transcript Cucsa.074730.1 (locus Cucs a.074730) derived from phytozome v7.0 (chr-ID scaffold0078 5; pos 614051 to 615072 reverse strand)
gagctgatcaaaaccctactagtcttggtgagctcttttttttcttgtttaattattttccaaatactttgtattttttaatagaaagtttatgctttaaatactttttgttttaattcattttagtctttaataaatttttcatttatcatttatggatcaaagtattatttaaacacaatcatttatcatttaaatgtattggaagatttagaatgtagttataaattcaaattctttttaaagtatcaatttatagttttacattcaaccaaaagtaacatatataattaatgtggcagtctcttccttgataataaatttgagtttgttttgcttgataattatttttttaatggttaatttatttggttcttttaaatatatatagatataagagaaattaaataaaaaaactaatcaataaatatggagcttaggataatcagtagagttcactattttaaattttaggtaaagattaaaatgtataagattttgtaattgtttttagaagaacgttgaaagtataattaaaggaggtttaattaaaacaagtttttgaaatatttctaaatttctttagtagcttttataaatcatttttctttttgaaaaaagaaagttcatgccatatttattatcatcctaaaattttaataataatgttaaacaataataatcgcacggctaatttaattctaatatctattttatgagaaataaattatatataaagaatactttgttaatggaacatggttttaaataattaattaacgaatgaaacacaataattagaaaaactaacaattaattaatcatgcatacctggcaatcaactcaacattcaaacactatattcgtttaatccttttcgtgatctattaatatataataatttataaccaaagagtttaataaaaccattatcatatgatcttatttatcacacgagaactaattatggaataaaaataagaaatgtaaccttgcgagaatatttattaatcaggaggagc

SEQ ID NO: 66905 - DNA, 862 bp, Cucumis sativus
  Intron number 3 from transcript Cucsa.128040.1 (locus Cucs a.128040) derived from phytozome v7.0 (chr-ID scaffold0102 4; pos 162806 to 163667 reverse strand)
gcttaagcttactcagacccatcctgatcttgcaggtatttgtggaaatgatagctagttaaactgccttgcattttggttttatgatttttcctaatcatatcagcacctctattattcttcttgttaattatggcaattttgtatcttttaatttggtgaagaacatttttagtccaaaggaacaatccaacccttgaatttaatttttaataatctagctcctttaatttaaaagttgtaacaatttagtgattgtactttaatatgtaaccttttaatctctatcgtgaaaaaaatctttcaaaatttagtgatagtgatgacctgaccttggtagttcatcattttatttgatttcctatcagttttttgatctacatatgttagaaatcatattaaactttaacaatatttttcatggtagggattaaattattacaaagttgaaactggaaagtatgaggactaactttttagaaattctaaattgaaagacaaaatttttacttccagggcttaaaatggtttttaaccttaagtttgtgaccctggcatcttaccttaatttgatgttcgtttggactattcaagagataaattgtttgtgcttggcatgctcaaggttcagataagctgctccccacattatgaacttcacagaagtatccacacaacatttttgaattaatacgattgttatttttgttgcaaaataggtgcattttgttgtttacatgattactaggtggtaggctaatgctattaattaccccttgagaaatcgtgcgattaattttgagcattggttcatgattgtggatcaggattgaaaggccagtcaaataaaaggcttatccct

SEQ ID NO: 66906 - DNA, 874 bp, Cucumis sativus
  Intron number 1 from transcript Cucsa.128040.1 (locus Cucs a.128040) derived from phytozome v7.0 (chr-ID scaffold0102 4; pos 164240 to 165113 reverse strand)
tcacctccgccgtctccaccacccattccgattcagtaagttgctagtggttaatttttctctaatgtttcggaagcttttacgctcatttcctaattcaagttttaatgttttagattatgtggtttggcttcctctctgctttcatttctgtttcctatagctttaattttccccttatgtttttcctccgttctgagtacttcccccaccagtcctcttctgtgctttagtttcgaatctcagctggttctcttatgatgccgtgattcgattttaggggttttaccattttttttattatataagattaaacgatagggcttcattcgataaaatttgattcagaaatacgctttgaaccaaccattagatgctttgtttcaactcacgcggcgcagttatgtatccaggagtttaacatcatgatttagttcacgttaattgtgtttaggtcattaattggtgcagttcacgattcaaaaaactctattacctaccatacatgttgaaatatcgatttggtttttggacggatgactttcgagtctccaagtttactgcatttgtccaatcttcgtacttataagaataaaaaagatcagttccgaatcaaaaacctttactttaacaagataaggacagtgttcatatccttgtaagagtgagatcaatttagtgaagtcttacttgaattttaatgtgctgatttagaaataagttcgctaacactagttaaagaaaatgcatttcaccttatcatttgaaaatatatatcaaatttaaagggagattcatgttctatctatgatctattgacttctagtattgtgatgtagcaaaacaatttcgtgaagtttcattgttggagaga

SEQ ID NO: 66907 - DNA, 335 bp, Cucumis sativus
  Intron number 1 from transcript Cucsa.049090.1 (locus Cucs a.049090) derived from phytozome v7.0 (chr-ID scaffold0054 2; pos 3653872 to 3654206 reverse strand)
cttcaatcgttgcacctggacccaaatttaagtacagccccaacataaacaaccaaatatgatatatgtactgatttaaatatattcatttcaaagtggatagaacttcaaaagtattctcatacaaattaacaaaaacagaatgattaaagcaatagaatctaacagaataactcaaactttgtattaataatatggcaaacatacctaaataaagaggatagtgaaaagaaagaaccatgatataacaacgtttaaagaggatagtaaaaggcaagaaagatgaatgtgttcctgaagtgttttgttggttggaaaatgtgttcctgaaggtc

SEQ ID NO: 66908 - DNA, 379 bp, Cucumis sativus
  Intron number 1 from transcript Cucsa.149270.1 (locus Cucs a.149270) derived from phytozome v7.0 (chr-ID scaffold0111 0; pos 129632 to 130010)
gagaagactgttggttgtgttcatattgtctgcaggtttgttctctaatttacccttttactttttggtttctatgcttccaattaattctcaacctagtttgtgtttaaattgtagagctatatgtggatgaccttgtcatgattcaaagggataggttgtatgggtttggtatctggggttgggttaggacgaaaaactaagggcagttaaatcaaatattaatataatagagaagagcatacataaaataagtatgaagataagttgtatatggtgcagtatttataattaagaataagatgcaattgatggagatcttaattgaataatgaaatttgtaggtgtggatcggatttttgctacagctgtggagcta

SEQ ID NO: 66909 - DNA, 870 bp, Cucumis sativus
  Intron number 1 from transcript Cucsa.034790.3 (locus Cucs a.034790) derived from phytozome v7.0 (chr-ID scaffold0044 4; pos 765710 to 766579)
tcaccactactactactactactgccatttccttggtaatccctttctctttcttttcctttttcttttctgttctctttttataaattaatattcatcgaagtaattattcagtagaattaacttccttttttttttttttttttataaatttccggaatttataccttgcttgatattcaacattattttaaaaaaaattatatatagaaatttataaatactcttttttgttctattacctaaacatattataaaaacatttgaagattattttagattcttcagaattgaagtgtgttttcaagggttgggaaaaaagttcaccaaagttgtgaagaaaactaaacataatttaatggtaatcatatgaaacctcggtctttgaacattaatattctctttcataaacatttgttttattttttctgttttctattgttttctaatatttaatttttaaaaaccaaatcaagaactattttattttaaaaaaaattgatccagagaataaaagatagatgtgagaaaaagaataaacaaaatttttaaaaataaaaagtagaaaacaaaatcgattgattactgaacaaagtcttaatgtataaaaatttcatcaaaactaaccataattttcttttacctaacaattattctaaaaattggctacatattattgtgaagaattgaattaaaaacaaaaaaaataaaagcaaacgaactaaattaagaaaaataataacttggagatcaaattgataggtttacgaaggttggagggctaaaaatgttttaagaagaaaatattattttagttttaacattatattgtttgggattgtaacgtggtgaattgaacagataaatcta

SEQ ID NO: 66910 - DNA, 905 bp, Cucumis sativus
  Intron number 1 from transcript Cucsa.027640.1 (locus Cucs a.027640) derived from phytozome v7.0 (chr-ID scaffold0037 8; pos 418936 to 419840 reverse strand)
gttgatcaggtttgggttccctcacttgcattttaatttcaacagccccaccaggtgagtgaggttaataaataaagatagtttgatgtttcagagtcaggggattggggcaggcatacattttagaaaggagaaattaggctggtggggaaattaaaaatgatgctattctatttaaccgtttacctattctaagtttcaaagagggaaaagaaaaccacagcttctaagaatcaatagcttcaacgtgtcccttcatatatttggaatgggacacatgtatcaaaaaaaaagaaaaaaaatcaaatcatgtttcgagcatgtgtcttccaggtatctggatgtatcagtgtcagatatgtatttgatattgattctctacgtactttacgtgcctgtgctccatgggaatatactctaatgtggaccatgaggggtttttaaagggtttggatagtgaaggttgggtatgaatgtttttttgtggcggcaaaagcttccgaggggagaattcgactctctcaaatagccaataggttaatgtgttttccgttatcttgctttcgtatatctctttacaaatttctttgcaatcattgaggaattgttgaactcaagatattttagtgaataattacaaagtggcttgtgactcttattgaagaaaaaggcctagtaactaatgcctgaggttcacctaactcctcatcacacgacctctccagctctccaaaaatccaaatatttttaagctccttagaaacaataggactttttgagtggtgaagaggtcccgttttgtatgtacgtatacttttaataaatcatagcatagttaatcgtttttctcattttgattattaccaacagatatcacgcaagcttgaagcagtcaaccctacaaa

SEQ ID NO: 66911 - DNA, 717 bp, Cucumis sativus
  Intron number 1 from transcript Cucsa.011120.1 (locus Cucs a.011120) derived from phytozome v7.0 (chr-ID scaffold0015 4; pos 437015 to 437731)
cttctatttccaactccttcttgctgaggtattcttgttatgttttgtatcgaatctgagaaatcgcccataaggtgtttattgtaatgcatctttctttcttttttccattttttttttttgcaactatttagaatttgggatttggggttcgattatctaatgtttataggcttgaagtgattgaaaatttgcaatgctgggagaaaagctcaattttgatgaaaaattagacaagcccactaatgattttttggggggtttctttacttttgtttaggttgtgctgcgctcgtggtgagtgaattttgtgtttatttactttctatgtttggctgttttcgttgttggtaaactaagggatatggctgagttgtctgcagactatagactttggtattgaagaaacttaacagataagtctatcttttgagtcggcttggcttcacggttttgcgtgaacaagtcataggtgccgccatttgttttgatttttgaatacgttctttccaattcaattttttcccagacatttccttcaattcctacacgcgtctgcagtggagatgtataccttttcttcttctgtaacttgtaacaatttattgcagatcgaattttttaatttgcatacaatttctttttatatttttgcattgatattcatagagaaggattttgttgggttcttttgcagaaacttctttattctgcttg

SEQ ID NO: 66912 - DNA, 894 bp, Cucumis sativus
  Intron number 2 from transcript Cucsa.089560.1 (locus Cucs a.089560) derived from phytozome v7.0 (chr-ID scaffold0089 4; pos 962326 to 963219)
cattcaagccacagttcaaagaatcatcttcaaaggttagtggctaacaagttaaatttggtccttttttttttggttaatgaatttttagaagatggtttctaacttttaaaaagataagggttttatatatatatattgatattagagaaaaaaataatgatattttggtccattttaaggtgcactttcatcacccaactcactcactgatcatcatgaaagtaaaatataattttttaaaaaattaatcttttcagtactcaaatataattttgaagaataatgtgggttggattcttaagtttttaaaacacaccttatcctgttattatataaaactaaaatagaaaatagtccatgcaccttttgaacattttttttttaatttcaaatttaaaaacatatatttttaaaactcaaggaaaaatagacttcgtttttttttttttttaagtaattaaaagatcaaaactcactggttcatagactaatacagtactagtttgcagaataaaaaataaatattttttaagaaaatggtgatgatccagtctgtgtgtctccaaaacataatcacatcaatgacatgttaataaatgcatgacaacgatataccaatggttaaaacttaaaagcaaaacgaaattaaacttatcatctctacctaaataaataataaatacttatgtttactacaaaatctacaacctacaatttttgaaacgttgacaattttatgggaaaacaaatgtcaagtaatgtacttagaaacgtaaaatagataacataataagcaaaaatttcacagaagttttcgatcttatttttttcacgtttttctacttccaactgacaggtttatcagcagttggagttttatattcagattca

SEQ ID NO: 66913 - DNA, 959 bp, Cucumis sativus
  Intron number 1 from transcript Cucsa.162090.1 (locus Cucs a.162090) derived from phytozome v7.0 (chr-ID scaffold0114 4; pos 1825591 to 1826549 reverse strand)
tccaccgcatccaccaacgccccactgctcccaccgtaagaaaattctttcattaatcgtttcgtttctatttgaaatcttttgtttacaaacaccaatcacacaatatagctttctttcttctattttctctatagcaatggaaagtttgttatgtctaaaagctttcaaagtctttcaatagctttattttagatcaaaacgatacgagtgttcatcaatatccaaaggcaattttgaatgattcttgatttaattaattggattctagattttattttggttggagtaacacttgcaaatcacttgaatttttttggtgtgttttcacatctatcaaagattttagttgtctcacgtgtgaaaattatatattttgaagtgtgtatatatatacaccaaaggctttcaaaagtggtagttaagtccctctctactcgtatgttgtgtcgtttgcggtcgagcaagttagagaaaacgatatttcttttacttctcttcgttgatgagcaaagattatacatttagggtggatgtagccttaactttaaacactacatgattcatattaaggtcgtatctaatttgttatcaaaatagtatcgaatttgttattaaaatggtagtttttcaagccatacattcagaacaaaaacacaaaaacctactttttagctcaattaaattgatgagcaaatatcatcattcaattagatcaaacaaaaaaataattttttttcttgaattctcatttgtaattaatcttagattccaaagaaacaaaaaaataaaattgctatcagtccaacaaataataaataatatcctacaatgtgatcgtttcgattaattatggtaatgtaattgaaggaattgatcgataagctatcaaactaaattagaaattgaggattgaatatctgaaactaaacaaacacccgtttttgaattgaacagga

SEQ ID NO: 66914 - DNA, 816 bp, Cucumis sativus
  Intron number 1 from transcript Cucsa.114310.1 (locus Cucs a.114310) derived from phytozome v7.0 (chr-ID scaffold0096 2; pos 144991 to 145806)
acctattctatcctaaattgttactcacatttgttattggtagcatagtctcttaataattatcgacaaggatatccatgtatatgtcaaataatcttcattcttactattctaagaaaattattaaaagaaaaaaaaaaattcaaacagctaagtattttgaaaacctccgcaatcaatgctctggattcaaatttggtgaaaaatgtgaataaaccttcaaaatcttttattcaacagtaaatatgtgttgaatcactattgaaaggaaactggaatatcctttatgtcctccaagatcttcatgatctatgtctaatttcatattctaaatgtctttttaccaaacatcattatcttttaagaatgtttgtactggtgtatttaagttcaataacaagatgaacttgtgaagttcctgcaccctttctatattgatatcttctttgttacctcttagtacattcttttcctgtagaccaattttctgcaaatttatgcaaaattgatcttgaacacgtctgagcttcgttcttatataatcttatttgttcgttcttttacaatgttgagcatcacgatggcataatcatcaaagcgcataagtagtgtggtttatttgaatcttcacactctcttaattttatacctatcttacaatttaatatttatatactataagctatatctttcttgaagaacttttattgctatggatagtgggattactcaaagtgctgatcctttacttgtatccttaaatataagtccttttttcccctcaggtggaactttacgagaaggcaaaaagtctgc

SEQ ID NO: 66915 - DNA, 450 bp, Cucumis sativus
  Intron number 1 from transcript Cucsa.079780.1 (locus Cucs a.079780) derived from phytozome v7.0 (chr-ID scaffold0079 3; pos 2641132 to 2641581 reverse strand)
gtaaaactctggcttacttgctaccccttgttcaggtacttttagtttttcttattcaacagtatttttgttgtggggttcccgtaaatatgttgtagactaaactatcttctaatatttggagcctggtagtggctgtggtatttgtttcgtgttgtcactgtacagttctacatttagaaggattttttttctattaactatctcctatcttgttacattattctatgaattgcctgattccatctttgatgcaaattggtttgatctttttctttttcttttactctccttgtgtataagatcttggtattggcagcgtaacctattggatgaggaagtttgtatattgattactctgtgttatttacttgttttatagtatcccagtctactaattaagtagcatttgcgatttctgatttcttggtttgtagttgctgaggcgag

SEQ ID NO: 66916 - DNA, 666 bp, Cucumis sativus
  Intron number 1 from transcript Cucsa.094310.1 (locus Cucs a.094310) derived from phytozome v7.0 (chr-ID scaffold0091 9; pos 523395 to 524060 reverse strand)
agcaaggcatcgggtttctacacctcaaactgcttgtaagtgaatcctaaacccatttcttttggataaatatggatagtataaagtttttgcattcttaaacatacttagtttaattttgttttctattatgtatatacatgtgtctgtgtagttccttccaaaacatgatgatgaaactgcaacgatatgaaaatgattaacatgatgaaattacaaacacatcatataaaaaaagatatcttgtctttgcttattcttgggtggggaatgttttttcagattatgtatatgtaatctaacaattcgatatagaactcagatgctcatatacaaaggttggtcctggtcgtagctaggtttaggttattggtcgctctatttgatcctttcaagttgatcatatagttaatcaattcaaattctttgttcagtccaacaaattaatatcatttcacagtcttttctttttatatgattcatctgaattgcagctaaacataaacaatagagtttatataatcatttgcaaccattttagactatttttctacaaagtaatggatcatactatctactttattatgttgcaatctaattatctgttttatttttttcttatcttttacagacaaggacgcagtgggaatcaaaagcataaagaag

SEQ ID NO: 66917 - DNA, 467 bp, Cucumis sativus
  Intron number 1 from transcript Cucsa.118580.1 (locus Cucs a.118580) derived from phytozome v7.0 (chr-ID scaffold0099 8; pos 456319 to 456785 reverse strand)
atcatctaatagaaggaattcgaaacgacctaaatgtgagttttcgtttccttttatttgattttttgtgagtttctttttttggaacgccatgtaacttgcttttttctttttcttttttttttctttattttgtttcatgttttgatcttcttcctatttgattgttcgtctaattgactgattttagatgtttagggttcttactttacgagcgttgatcgatgctgatctatggatcttatagttaattattgaggattatgaacagttgtgtctatatgcttgtaatttagattaagtttatgaaactgatggattgattaggtttgtgcttcaaaaaatttcatgtttcttcattttatgcgcttcaaatgcttcttcacgtttggtctgaattgaatatcttccatttatgaaattcttttccagattcgaggtttacccagcaggagcttccagcgtgt

SEQ ID NO: 66918 - DNA, 502 bp, Cucumis sativus
  Intron number 1 from transcript Cucsa.060860.1 (locus Cucs a.060860) derived from phytozome v7.0 (chr-ID scaffold0064 0; pos 25375 to 25876)
aggatactgctagctctcctgttaatagtcccaaggtctctctctctctctctctctttaatttctttattctatttttgttgttaattaccataggaatagagaagattaaatttattaaactcagattcctcatttgttaatcaacagatatgattgtaacaaatgttgtgttacaattcttcttttcaacctataaaaatcaatcattacattgatttttaattactatattaaaaaacaataataaaagtgactttaacgaccgttttaaaatctctcccatataccgtaaataggataagattttctgttttattgatcctatgatattatttctttttctcaaatcaattttaaattcatccaaactctcgactttcgcttaagtttttgagttcaatagtattttaacgatgtcgggtttgggctgatatatgagttttctttggtctaaatatatacagatatctggttcaacctactttagcaagaaccagaa

SEQ ID NO: 66919 - DNA, 679 bp, Cucumis sativus
  Intron number 1 from transcript Cucsa.094200.1 (locus Cucs a.094200) derived from phytozome v7.0 (chr-ID scaffold0091 9; pos 413768 to 414446 reverse strand)
acattggaatttcaggtttctctctatcaatgctatcttcttaagtgcatctcgaaacaacgtttatattttctacactccattatactatttaatcataattttctacgtggaaagttatttcatctttgtttataatgtttactatttcttatccaatatctcttttcttttagccccaatatttagtatttcttactcatacaaaaaattgttcgtgcatcgtacacatactactataacttataaactatataacaacttgctataattatcaacatgtatcccaattgattatttcaaatatgaaatgaactgtaatatataaattctgtctagtaagttttgaagacaacaatacatatctataggctctttagaaggaaaacacttcaaatttgctaatgggtatgacataaactatgtagtattgacctcatcataggttcgattctcctagcgttatgatataaaaatcttagaaattttgatatcttcacattttcacgagttgaacatctaaatgtttatattatatcaaaaaaataatcgaatatataaaataaacaacaaaatttcactaacgtgaaaataacgtaaaataaaaaagtaatttaggagtttcttgtgaatgatgaacaatgacgaaagtttgtaacttgaaggtggagtgacatcg

SEQ ID NO: 66920 - DNA, 417 bp, Cucumis sativus
  Intron number 1 from transcript Cucsa.051300.3 (locus Cucs a.051300) derived from phytozome v7.0 (chr-ID scaffold0055 7; pos 471072 to 471488 reverse strand)
gaaaacaggtcgattgtttcatgccgtctactttttccgtctttatttttaactgtgcaatggctgtagggtgctaaaagtttgttttgggttatttttttttaacacgagaaattgattatgcttcgtagtgtcttctttgtgtaactagaagtaccttatgatttaagcaagcctgattgtcaataagattacattatgtggaactttaagattttgatattaagacacagtgcatctcattttctgctgtaatccatgacatcacctgctgcttcagttttttatacatcgtcctttgtatgtgtcagtgcttttatgtatctctctactcctttttataattattatctcggtatccttttctgccttcaccttcagttttggactgattctgttgtagctcaacattcaggt

SEQ ID NO: 66921 - DNA, 885 bp, Cucumis sativus
  Intron number 1 from transcript Cucsa.065450.1 (locus Cucs a.065450) derived from phytozome v7.0 (chr-ID scaffold0069 6; pos 172548 to 173432)
actttcgcttgtgggtggattcagtacttctctaggtttgtcaagtttattcgtgtaatttgttatgtgggtctgctttcatttcagtaatacgtaatgggattctttgtagagttcgttgggtatttgcttggtttcttttttcatttcttttttgtttctaccgtttgttcttcattcttgatcatctttgattatgttttgaagtatttgttaactgggtagtgaaatgtttctttaatcatatgtcaagaagtaaattgatgtttggcaaattagttatgattgtgcttcatctagtattttcagtctcaaaattgtggatgctatattgttaggatgtatctatctggtcacgaggctttgaagtggatcagcttgtgagaatcatgggaaattgttactgccgatgcttttcttgacgataattttcttgttttgacttcttgaaaaccattttctcaattgccgataactgagttcccccgtttggctactgtgctcattcacgtggagaacactttaaagtcatatgacttcacgtgtttttattatttcactggtcccattttttttctccagaacttccctcgtttcattctgtgaaacaagttttatgagtcctattgtacacaaaccattctactttaactttccatcatccatgcttaattttgacaaagaagaatcaggatggtctcctatcctctctctctggggtggggtttggaacttggttattttcaatttttagtggcacagctattgagctttggcacctgcttatcactgatgctccataaaaattttaatgcattagactcatttctgttcataacatttggaacaggtgcactttttgtggttctcagcggggctccaaat

SEQ ID NO: 66922 - DNA, 618 bp, Cucumis sativus
  Intron number 2 from transcript Cucsa.007210.1 (locus Cucs a.007210) derived from phytozome v7.0 (chr-ID scaffold0008 9; pos 64519 to 65136 reverse strand)
ccagtgcatccgggcatagatattgtttatcaagggtaggcttttcagtatatcaaaggttagaaggaaaaatgtcatttgaaataatggatatgtttttctagtcaaattcataaaactttaaaacttcaagttataggtttatttctttaattgtgtgtttaaaattaacacataactaaactctaagaatggctaacaaccttttatatttaatacatttatattttggatttaatttttttttaaaaaaggaagtgatgtatattaattataaaagtaaatttggacctatatttttaattttgtatttagtggatagatgaaatatttatgaaccaaaataaaataaagtaaaatacctattagatataaaattaaaagttttaagaaccaatcattacactctaaaatttggagaacaattaggtaatattttatagactaaatttatttgctaatttacagcaatatttactattggattgagcctagctaattgctatatttacgatgtattttaaaaaaatatatcaaataattaacttttaatatcaatgtttttattctttttttccctcttccttagactgcatttgattgtggcaggaagcaata

SEQ ID NO: 66923 - DNA, 1031 bp, Cucumis sativus
  Intron number 1 from transcript Cucsa.077530.1 (locus Cucs a.077530) derived from phytozome v7.0 (chr-ID scaffold0079 1; pos 680336 to 681366)
gttcttgccgaagtcgtggcctctcttcaccctcagtactacttctatctctctcctgttcattggtattctccatatttccattgacgtctttcttctgacttccaacttatattagaacttgtctaatgaaaggaaaaaagaagtcctcagaatatttatagttttggactagagttggttttggtggattttagattaataccatggtggtagtgaaaggaactatgagcgttttgtgaaaattggagctcttaccctcaaattaatgaatcgccaatgatacttcgagtttggtgtaagtaggtgcatagtgaagtagtctgaattttatgtgtgtacaagaataattaaagacaaaataggcatgcctaaaggcaaatgagaatgcagtaatatacgtgtttttatctggacaaatttcgacacttttcatttaaagaatgaaaagatactaatgtccgaaagattaaaaaaagagaggaaaaaaagtggcagactggcagtagtagaagagtctcattcgagacatttgtgttagctgcatgaaattgccagatgccaatacttggcagatcctagaattaaatagggagttgcatgaaactgccatttggcaattttctcttaataaatacaaggcttcaaaagtgacatgtttaatgggtaatacctggactaattttttactctgtgaaataaaataaattctaccactgtaaccctaacacgtttttttcatcgctctctcgctttgaggtaattaaaagactcattgtctgatgtgtgccttgcttctaaaacacgtcagaagtagatggaaggctggaaggaaatataaatgattcttcctgacacccactttgatatgtagcagagattatagactttcgaaattttatgaactaaaagtatcattttttgaaacatgatcaaataaacatcaacagaaactctaaaagtttcaaaactaacgtaaggttgagtcaatccaagacttttaggtcaatcaaaaccaatttcatcaagct

SEQ ID NO: 66924 - DNA, 934 bp, Cucumis sativus
  Intron number 4 from transcript Cucsa.077530.1 (locus Cucs a.077530) derived from phytozome v7.0 (chr-ID scaffold0079 1; pos 682003 to 682936)
gcacgccactttatcaaactgcgaccttcaaacaagtgagtggtaggaatatatataattaggtttaaatttgggccaagattctcacttttatttcatgtaggtctctattttataaatattttgttttagttgctaatctttaaataaaaaaagcatctatatcattaaccttgatagttattaacaagaagacttggcattattattattattatttttttgttagtttacttcatcaatgtgtgcccctatacatcacgtgtagtagttacatgtgatgggttagttgttaagttcctaaaaagattagggttcttattaaacagttaatgacgaacaataaagacaaagaattcatttatgtctagggattgaaattagaacatttacaaatcgagagactagaatatttgaaaatttaaggacctacaaaagtcttgggaccttaataggatttaacttttttttaataactataaattcagcctctgaaattgcggttcaatttagtattctagactagtctgattttttatacttttacctagtcaggttggtcacactaagcgacttggctgaatatgggtaacagaaaatggctactcggacttgggttgagtggacttctccttagtgttgaacgttgacgtgtttattgcttttacatagacgaggcattcacgtgactgtaactaggataattttttgctgcaaacattgaattcactgaaatttcaagattcaaagttcattcttcgatactaagactactatgcacctgatattgtaattattgttgttttcttcttggtttggtatttgctttgcattctctgcattgttccttggatccttattgacattgcgaatgctgtggcttcttacttgatttccatttttcactttgctatgcagcctactgcaacagaaa

SEQ ID NO: 66925 - DNA, 866 bp, Cucumis sativus
  Intron number 1 from transcript Cucsa.098680.1 (locus Cucs a.098680) derived from phytozome v7.0 (chr-ID scaffold0092 3; pos 573451 to 574316 reverse strand)
ttgaaaactgacagccctaagcagcaatccaaaaggtagtttcttttgctttttttttttcctgatctatgtgaagaaaattaggatgatcacatatcatatgtacagttttgattttgattttgttttatgtttcttaaaatatgttgagaaagatgacgagtttttggttgatttgagaaactgtctcaattttgtcaatattgaacctgatttggttttttgaaaacatgcatatgtcaaatctaatcctcttttgttttgttttgtttttttgggtaaaaattcagaattaagatattttctgccatgtgttctgagagcttgctgatgattcaactggaaaactcagttaaaaagttgaaacctttcatcagacatgtcaagagaaaaagaagaaaaaaaacccttattttttagaatgtttttaagaattttaagggttcagagagttcattggaagcatgaaaacacagagtattgaaataactttacaaaatttacataatttcactccaagggattcacaagatatgaaagaaataatctacaaacttgttgtgtctttcttttcttttgaagaaagtatttggattaggaatttggcaaactctaatataaatagctaattatttagattattgtattagaggagttttgatttgacaagaattcaattccttgtcacccaaaatcaaaccattcaacaaactcaaatctctcaataaactgaacaaaaaaaagtgtaatataagataataatttcaacttcatctagtttattaaatcgactttctaagtatttaaaaactaaaaagtcaatcaaaacagtttctaaagttcgtttgtttggtgtgtagatcaaa

SEQ ID NO: 66926 - DNA, 469 bp, Cucumis sativus
  Intron number 1 from transcript Cucsa.196820.1 (locus Cucs a.196820) derived from phytozome v7.0 (chr-ID scaffold0135 7; pos 375280 to 375748 reverse strand)
cgtttttgaactgccaaaaggtggtttaattttctattatgagatctaagaaagcgacatttataaggtttgaagacatgcaataatgctcgcggctttggatgttgaggaacgaaggaaaattcctaaaaattcgtttgaattataatttctctacaccgatattggttgaccatgtcaagcttataattcagtcgttttacatttgttttcatcttgaataatcgtgaagttttagttcatctccatttttttagagtaagattccagtacatcgcatctcagtaaggggaaaaacgaaacgaaaaccgatgatactagtcggaaaatatcaacagtactttcgagtctaagttatgcgatctacagtttaatctgtttcagtgtagaaattcgtttagtttttctgattcaatcctttgtggccttttcaggtcagcgcaccgccggaagttgctaaaattctaga

SEQ ID NO: 66927 - DNA, 778 bp, Cucumis sativus
  Intron number 1 from transcript Cucsa.072590.1 (locus Cucs a.072590) derived from phytozome v7.0 (chr-ID scaffold0076 5; pos 30152 to 30929 reverse strand)
agatcaacactacttggggttccaaggtacttttattccccacttaatataatggttatgttttggttttgaaatttatgtttgtttacttagagtaatataatatgtcaactaattaattgtttttttcaacaaacatttcaaatatgttgttagtgaaattttaaaaacaataacaaaattgaaagcatatatttagagagtagataacaaaacaatgaaaatgaagtcattttcataaaagttagttttcaacataactcaaaaacacacattttgattcttcattagataaaaattatttggacttagttgtttttggtctttcttcgttttctttttctttctctctttttcttttttaatggttcttgtttcacaccattttcctataatgattttcatctttataaatggaagaacatgtgaattataggccaactttcgctcgactttttcttccaaacaatttttttataataaaattagtcctgagtagaagtaatgtttataagttcatgatatatttaaaaataaaatgtttaccaaaatgagactttcacttttgttttacccctagtttatttgtaatgagtctaatacttcgcattattagccaactttcacagataataggtaagaagatgcgcataaataattatgaaataaggtcttaggtggtatatattattgagtggtcgattaatatatttgtattctaaccaaattccaaatgaatggtgttcgttttttatggaatcacagatagggtggatat

SEQ ID NO: 66928 - DNA, 595 bp, Cucumis sativus
  Intron number 3 from transcript Cucsa.047270.1 (locus Cucs a.047270) derived from phytozome v7.0 (chr-ID scaffold0054 2; pos 2356838 to 2357432)
aacttgattttactaacagtgtgaacattaccaaggtaaaattttggatctgtttgtctttattgaaaaggaaagaaaataaaataatgatgaaagtttgttcattttctcttatttttggacttcatattttgtcgtttccacttttcaaattatccccttgagttgttatctggattttccccttttcattgatgaatgaaatgttttcttaataataatagctacttcaaattcttaagtcatatatatgatattgacaagtgattctcagagagtttcttgtgtgtgaatgaaatttaactctccatacctggctcagatttgtatggagtctatgtctgtttgttctgaaacaacaggatattcaagtcgtggtgaagtgtgagttttcgtgattgatttgtcttttcttcttcttctttcttttttttttttaatatgttcgatagagtagcttgacactttgagctatctttgactttctattatttccatctgctgcctccaattgttagtcgtctaaggataaggatatttcgtgttggaaacacttctagggaacattccgcagagcatcttggcgtggaactga

SEQ ID NO: 66929 - DNA, 878 bp, Cucumis sativus
  Intron number 1 from transcript Cucsa.121760.1 (locus Cucs a.121760) derived from phytozome v7.0 (chr-ID scaffold0099 9; pos 195367 to 196244 reverse strand)
atttcagtgagtgcctctcgtcactcttttcttccatgtgtgtcaaattgatgcgaccccaggcacgcgcctaaggtgagaggcgaggcgaggcgccgaggggcctatgagcctcttggaatgccaaggcgaggctcttcaatcatgcagtcgccttcgcctttgtgattaagttttctttattattttcttagaaaacaaaatatttggccacagcccacgtcaagactttcaattactaaaacttcagaactcggtggcttctttcaagttccaccgcttcgatttcttcttcttcttttagcttctatttcttctccttcgtcgaaacatcaagttctttaatgtttaggttgtttcgcattcaagagagtgtggccttgaggtgactcaattcactacaacaaattcttctcttattttatatctgttcataaaataaaaacgatacaagtgagtgaaaactagtatgaaattcaaaatttgaaactgagaacaacgtttagagttcttgtttatttttacaggtcttatgatatctacgatggcaatattgtctagttctgaggattacaaacatttttttgtcctctctatagatagagatttaagtggttccatttgtgtcaagatgaaagaacttgtttcattacattaagctttcacatacacttctaaatgatagacaacttgttagtccggaaattatattgaataaactaattaatactcagaagggtagaatttacttttaaattttatggacttgagaagtcattttgtcctcttctctcctacttcagtggaggtggaggaggagagaaactttcatggctgactaaactacttgagtgatcttgtttaggaccctgcaaaga

SEQ ID NO: 66930 - DNA, 698 bp, Cucumis sativus
  Intron number 1 from transcript Cucsa.065530.1 (locus Cucs a.065530) derived from phytozome v7.0 (chr-ID scaffold0069 6; pos 257919 to 258616)
cttatcatacatttgcattctcttcttggaaacaggtttgtttgtttgtttgtttgtttttttttctttcttcattcattcataaagatattttttatattccaaatgattaatggtaaattgttagttaagttggcaatagctaattatttttggtaattaaaacttaatctgttggtaaaaaggagagtttgattaaaagaaaatgagagttagagtgtaaaatcagtttacatttgatagtgattaatcatgtccatgtccatgtcacattactcattatatatttatttataattatagagatatttcaacttcattttacactatactttaatttctattataatttatttcattattattaagttaaatactgtagaccaattgaaacaagacagagagtatgagttataatgagttgcattattatgatatattaggtttgaaaaaagtcaattatatatatgtatatattagaatgtaattaactagctagtagatgagtttattatatacacacatgaaatatgtcaacaaatttaacaaccatttaaaaattataaaagttacacaatggttttgataatttgaacttgaaattgtattttaattgattgttataaaagtcagtactgcattatttctctaatgggtagaatgtgtattaatacttgtatgtgactatgtgaatacag

SEQ ID NO: 66931 - DNA, 876 bp, Cucumis sativus; identical to SEQ ID NO: 62470
  Intron number 1 from transcript Cucsa.065900.1 (locus Cucs a.065900) derived from phytozome v7.0 (chr-ID scaffold0069 6; pos 513888 to 514763)

SEQ ID NO: 66932 - DNA, 219 bp, Cucumis sativus
  Intron number 1 from transcript Cucsa.095320.1 (locus Cucs a.095320) derived from phytozome v7.0 (chr-ID scaffold0091 9; pos 1228467 to 1228685)
tcatttgcgcctcccggatcttcctctcagaagtattttcctttcctttccctcccctttttgaattatttttcttcctttccttacccttgattgtttcctctctagggtttttctatttgagatatgatcattgctgatttcgatttgtgtcggtttatgatttgattgatgggttttgtagacgacatcgcggcgtcttgcggatcggaaggtgga

SEQ ID NO: 66933 - DNA, 807 bp, Cucumis sativus
  Intron number 2 from transcript Cucsa.095320.1 (locus Cucs a.095320) derived from phytozome v7.0 (chr-ID scaffold0091 9; pos 1228773 to 1229579)
tcttggattcttcgtttttgtcgtcattggatcatgtgagttttacattctggaatgctaatttcttccttttctctttcgtgtgcttatgcttatattatggcattttgtggatttttgttttgtgattacattagtctatctagtaggagcctgatatctatcccttctttataaattctcgtgaagacccaaacccaaagttcgagaatttatgtacatatatatatatgctacatgtgtaaatgtatttgtaacctttgtttctaatgatgggtagaaagaattcatccagtgaagggagtgcagcactgggtccaaaattgtttaggattggattttattgataattttctggctcaacagatggcccacgaacgattttcatctaaaatttctaagaagcataaatgctttagttttttagactggttttagacacttattgatgcaataaatatgttaaacatgcatagaacaacagttgttgaacgacaactagatgacaataatgatagctttgagagtgaaatagatgaagctatagcatacaattgcatcaacacattttatttgattttccttgtcttttggtataaaataatatatatttaaaacattttatattttaataagcgtgaccttgctgtgtctgtatttttcttagtaaaatcttaaacggttgttcatgaggtttattttgatgaagtgaagtggtttttggttgtgtatcggtgggctgatcgtgtgttccattgttggaattgtgcagctctgtttcagataatcaggacggcaacaggtgga

SEQ ID NO: 66934 - DNA, 802 bp, Cucumis sativus
  Intron number 1 from transcript Cucsa.176240.1 (locus Cucs a.176240) derived from phytozome v7.0 (chr-ID scaffold0122 5; pos 581318 to 582119)
tcacggacacgtcaaccaagttgcaaatcaacttggtcattattgaaccaaaggatggataaaattttccttgacaattgatatttttttagttgcgagtgtttgtgaactttttaagccaaacaaagagtcttagttctctttcaaaattctttgagtcaagttagccaatcaccccttaaagttcacgaaatatatcacatttttttatataaaatatttatttaaatccaaccaaactcaaatgatttgataattcaacttaacgtgttgagtcaagttggattaatagattttctccagtcatcgtcctttttgaacacacctaatgaaaagtccacggcccccagtcatcgtccttttttaacacacctaatgaaaagtccgcagcccttttattcaaccaaagtttactaaagtttggtatataaagtgcatttttaaaatttaaagagctgatttattctattatactatttttttatatagttcatcaagtggggtttgattttaaaaaatttaagcaacagtacaaacacaactttttgactatgaaataattggagtcttaaagccgtcatggcctaccaactgctaatacaaaaagggcccattgcacactattcacaggagaggtgttgatattgaagttagcatcaatgaatcaaacgtcatattaatatggggttcgcttcaacacaaatcatgcataatttcaagaatggggcacactttctgcaataccaagaagataatgctctataatatttttttgttatctctcaccttagattttgcaagt

SEQ ID NO: 66935 - DNA, 491 bp, Cucumis sativus
  Intron number 3 from transcript Cucsa.041750.1 (locus Cucs a.041750) derived from phytozome v7.0 (chr-ID scaffold0054 0; pos 312355 to 312845)
agaaacaagccaaggatcttgcaagtaagagttcttgcttatttctctctctttttcttttctttattaaattttgaaaaattaaatgggattgttaactttttcattgattcttagattttaaaagaaatatatagcattaatttgtaattttgttttttttctttctttcaaagatattataaaaaatgagaaactatagtacatcaaaaacgttatcaaaccggtcttaagtaattgtgtgatgggcgcaagtggttcaacgtaacgcatctttccttgaaattaaacctctctaaatattattgcatcccctcgaacaattaataattaataattattatggatagttgcatcttaagttttaacaacttaaggttaataagtgatttaacattttgtgtacgtactaatctctggaaattttgatcaacgttttacgaaatataataatagagaatccaaaggtggtgtcggtttttgaaaacaag

SEQ ID NO: 66936 - DNA, 529 bp, Cucumis sativus
  Intron number 2 from transcript Cucsa.041550.1 (locus Cucs a.041550) derived from phytozome v7.0 (chr-ID scaffold0054 0; pos 114954 to 115482)
tggtaagtgatcctctccaagcaatttttaccaatatatttacttttttctagtaggaactttagattcaaaatattaacatatataacaacatttaaaaaaattgtaaatatagtaaaatccgtcaaaacctattactgatcaactgcgtgtggcaaatattggtctatctatttttacaatttctttaaaaaatatttatatactcttaattattattcttaaaatttcttccaaactatagcaatactcatttttaactccttaccctttccataaattctctcaatattttgtatttaatcttagtttttaataatccttgaatttagaccatttctaaagttcaaaaggctcaaaaattgaaattccaatttttttgtctagagtttacaaacgtttaaaaatgcattatagatatcttgttaaaagtgtaataatttagtaagatttggtggaaaaaactcagttattaacaaccttttgttgaattaacttataaaaacagagatattcaataagtttacga

SEQ ID NO: 66937 - DNA, 707 bp, Cucumis sativus
  Intron number 1 from transcript Cucsa.122080.1 (locus Cucs a.122080) derived from phytozome v7.0 (chr-ID scaffold0099 9; pos 409056 to 409762)
gccctctcccgccatttcggagtttcttccatcaggttttcatcatctttttcttttttctttatctattctctttcctttttcaagctctttgtttcattctgcgcctagggcttcattgttcttcctgttaatttgatcctcgttttccctctttcccaatcgcgttttcatctcctattcctctttccgtgtgtgtgtatggaggaatggaggaatggaggaatggaggacgagaaaggagaaaggaagagttttagaaatacaaatagattggattgaattttagtgaaagggcatgaaaaagaaatgtggatttagaggggaaaattttgtgtatcaaaatccaaaacgtgctcttcaatactgttgatggtggctcaatctttatccttgatttttaacttcagttgatcattccgaatcgtaattcattagtttattttgtatgttatcaagaaatttattagagtgagagtaagatattgttagagagcaagaataaaacttgtattattaccatcacagcatgctttgatcatttggcttccttcatcttgatggttattggaacaaaagcgtttttcttattattcgtaatggaagatttttcattttaagatgcattgcgatggtaactcattgacattgatacggtgttgaatattggttaactctttttttggctttttttttaattgcagaat

SEQ ID NO: 66938 - DNA, 658 bp, Cucumis sativus
  Intron number 1 from transcript Cucsa.142750.3 (locus Cucs a.142750) derived from phytozome v7.0 (chr-ID scaffold0107 9; pos 960985 to 961642 reverse strand)
tctgttttccttttttttggagaggatttcttcaggttggagatgagatctgattgttggttttgtgatagatttgtttggaagtgtttgatttagatgtgatgtttaatgctctgtttcgtttgtgttttgattctgaatttaattttattacttagtcttgttgttgaacttgatctgtgtaaaacagattaagaagtgtttgaagaaattgtcgttttcccctgtttgatctactttgtttgattgaacttttgcatgtaataagattattttagaaaggaagaggaattctcatggtgattggtgtgaagacatggtttggcttttgctttctgattagaaggaataaatctcttggtgttctttgttacatgtatcgatttgtggtttcggtagtgactcgatttgggatgaatcaaacatctcttttgtttttctagtaattgattctgagactgactgggtttttgctatgaaatttatgtttacaggtgaggaagtatagagaattttagtagcttccatatcatatctgataccaggtgaaggcagtagctgattaggatttgtttttggtgtaaatctggttgttggatctcacccgagtttcgtcatctgagtttagcaaatatctgctgattcatttttgggggaa

SEQ ID NO: 66939 - DNA, 723 bp, Cucumis sativus
  Intron number 2 from transcript Cucsa.091000.1 (locus Cucs a.091000) derived from phytozome v7.0 (chr-ID scaffold0089 4; pos 2096372 to 2097094)
agcagctgccttacttggtcggcaacattgtcgaggtatgtttttttggcatactcaaacgaattatttttctctctaaatcacttgtgtacgaatttcgcttcttttttgtagcaagccaaggtcgaactttttctgtttatataaaatatatgaagtgcgtatttattattcttaattctaacttgtattcgagctctaattggaattctacatcaacccaaggaagcgcatggagaaatttcacattatttaatcttgaagtggattttggggaaagtatggtagtggatattatgaaataaagaattctaagttatttcataggtagtcaaatggccttaatatttatttatgctttgttgtttatttaatttaactttttctaagtaacttggggtttttattgcgtatattctgtatagaaaggtgattttttgaagtttctagtatatgaggtttagagatttttatgcagtcatttttcttaagaagttgctgcttctcttccttcagtttcgccatgttatggtgtgttaatcatggatgagttactgtgactttttattctacattctcttggaaccaaggttgatgtgtacgtttaatgcttgtaaggctgatttcatctcattttaattggccaagttggccttgggtgataatttgctcacattagctgaactctgttctttccccttgttgatttttcagattttggaa

SEQ ID NO: 66940 - DNA, 912 bp, Cucumis sativus
  Intron number 1 from transcript Cucsa.007810.2 (locus Cucs a.007810) derived from phytozome v7.0 (chr-ID scaffold0009 5; pos 10161 to 11072)
tcgttacggccgtgtaagtaattttgctcaatcttctttggttttcagatctccaatccattttttccctctaattgactttgtgtttaattaatgcttgtattacgtagtggtggttgtttgtttaatagtttattcgcagttttgatggaagggagcaaagtctttgtgagaatctgaatatctaataatacatatggggttttttattatatgtgcaacttgcttgtgctgccttttttggttttcgtttctgcatggaacttggattgtggttttgtaaagtaattgggtttgtttaatcattttttgatgatgattagtttatagtttctgtgttgggaatattttaaggtctttgatgattgcttaagctcttttgaatctaagtgctttctttttatgtaactttttaaattgttggagaaggctttagtggtttcctgctttaagtgagaacaacttgttgcttttgttggaagtgatgaactgaagtgcttcaaaaatagctcctcccttgttctggttttgtaaggggaaaaagtcagttatggaactcgcttgtttgacaattcatttagcttttgaagagtgtgtttgttttctcacaatttcttttcaataattttcagctttcttaaagtactaattgaggtcctagccaaatcccaaatcccaaaaacatattttttaaaagctacttttaactttgagaaccatcattgaaagtagataacaaaacaaagaaatccactggaaatagtatttataagcttaattttttaaatgggacttggatttttctaattatattttaaaggaataaatattgatgtaacaagctgaatgaacttttgaagcaagaatggggcaactgttggtttagtgttttttgctgataattgcatagac

SEQ ID NO: 66941 - DNA, 598 bp, Cucumis sativus
  Intron number 3 from transcript Cucsa.135660.1 (locus Cucs a.135660) derived from phytozome v7.0 (chr-ID scaffold0104 4; pos 462904 to 463501 reverse strand)
agcaggtattctgagaatttctttttcaattaaaaatgtagagtacctcttttaggaatgaaaagtttgggctccgtttgataaccatttgattttgtaaaaaattgtgcttattttcttataacttctttgccatggttttcaacttttctaactaaacatttgaattgttagtcaaattccaaaaaacagaatcataattttttgaaactactctttttaattttcaaaatttgctttggtttttgaaacactcctaaaaagtggataatacaacaatgcaaatcaacaagtagaaagtagtgttttcgaggttaatttttaacaaccaaaaaccaaaaccaaatggttattagacttagcgtaagtatagtttaattatcaaataatatcttcaagctttttttttttgcactcttataagatgtttctttctaatgcctatttttattttttaatattgactgcaacttcccttggttttagaaactccctgattcgaacattgctctttctgttttttggttttgtctggtgacattgatatcgtttatttagttcagatacctccaggagtctggtattttggtcttttcaa

SEQ ID NO: 66942 - DNA, 860 bp, Cucumis sativus
  Intron number 3 from transcript Cucsa.027520.1 (locus Cucs a.027520) derived from phytozome v7.0 (chr-ID scaffold0037 8; pos 249710 to 250569)
cccccgttacctgctcctaggtatgcagctcttctatgaagtatgtaaaccgtcttgttattcctataaaggttatatgctcttaccgtgcaaaacatttattgccaactattgttgtccacgtaggttttctgaaaccgtattctgtttgatccgcttaattgtttggtggtttctcttggttagttccttgctttgtgattgtatctttatgcatattttatgttgtcccgtgatattagtcgagatacgtgtcagctggtctgggcactcacaaatataaaaaaaaaatcttttatgcacaatgtgatctaattatcacatcctaatcaaaagcctgtccctatccaatttggatcatgaagtgttagttcgtgcaaataaattgattataaagacttgttttgtaggtttctgtttcctaaaagtttgattatacatcatatcattgtgtaaagatgggcttcacaagttgattttggcgatctaggatcgtaaacttaaatgtaggaagaaagattaagtgcaaacaaatgagcaaagagttgattaactatttaggaggttgggtatctaataaattgctattgaaccttttgcttgtttaaatgcgtatttgaaagagtagaaatcgtagaattaattgaaaacaacttgagatggcaaatcaaaataactggactttgctagatcctgaaatgaaagagtttatgtactatcagttgccaccacaattgattcttgatctcagagctttatctgaacgtacaaaaatatttttgtaacgggaactttaagatagaaaagaaattttctgtcatttctagttaaagggttttttaacacaacagttttcagat

SEQ ID NO: 66943 - DNA, 911 bp, Cucumis sativus
  Intron number 2 from transcript Cucsa.033920.1 (locus Cucs a.033920) derived from phytozome v7.0 (chr-ID scaffold0043 8; pos 483100 to 484010 reverse strand)
acagagtgtcgctggctaaaaacccttcagacaaggtacacccagagcttgccatgttatctttcctttctaattttaggttctcatatgattgttctacgagtaccttatttaaagttaatcattatcctcctttaaaaaatgcatatgggaaatttaagttggacttttgactgtaggatattgagctcttattctggagttgtcctttttttttttttttatttgcagttgatttttgaggtcgttttttaactactttggggtaatatatttaagatccctgttagaggagattgtgattattccctcccttttaggatactgggaaattttatttatttatttattatttacttttgatcttgtggtgttattggcttgaaagaaatagtacgagctgtagaggggttgatcggtcttgaggcatttgtttttttggaaattacctggtttagtactcttttgtgggtggtggcttctcaggtctttagtaattatcaattaggtgcttttgttttggattggaggctatttttaagggctagagctcatgtgtgtagacagtttttttatgtttgtcaatgaaagttcaatttcttatgaaaaatgagaaaacaaaatagaatggagtttttacgtttgagtcttgtgctttgggtaaagcatggttcaagagaagttcaaatcaacacttttaatcatatgccatgccaaattattatttgtctaatgatcgtcttcacaatggttgttgattttagattttagtattatttgaggaagccaaaactataaaatgattctagctttacctacattatgtgcaaaaaatgcatttacatgtgttaaaatttcattttcttattttaccagaaggaaggtgaccttgttttgaaaaaggctactga

SEQ ID NO: 66944 - DNA, 830 bp, Cucumis sativus
  Intron number 2 from transcript Cucsa.046180.1 (locus Cucs a.046180) derived from phytozome v7.0 (chr-ID scaffold0054 2; pos 1759821 to 1760650)
cagttgctgccgtgccttactttgttttcatcaaggtcggttgaagtattctgtttcagttttctttgtaattctaattccaagttggttttgtatattaattttttacttgacaagtatagttttcaacggatactcgaatcaacgatactctggagagatggtaatggtttgacgttttgaatgtctgatctttgaacttgacattgtaattttccgggttcctttcgatgataatgaaattgtatttcggggttagcttgtaaacgagtagtttccaatctatagtcggcccaattgtatttagtcaagggatggtaattgttttacgtttgggtattgatctttggtcttggctatgtagctttcctggctcaccaatcttactaggaaacacatggcctcattgatttcttttaaagcaagaaattaacttgaactttactggaaaatttttatcttttttttgagaatgaatcgaattcatcatgtttgactagaaatgaatatcaacggaaaagaaaagtagaactagaacagctgaggtctgaggatatgtggttgtaatggactttcaagtagttgatcagtaattcttacgcggtgattccttgtgcttttcggaatttcctttaacatttctctataccttttcttttccactgcactagaaacgactttgggtgcattgtagcaagtgaaggttaaggatactattctatatttccatcttaatcaccaagaaaattagagacacttagaatgtgtgggcttaatgtctctcgtggacaacaaagctaattgcattatagttaatttcgtatttcagg

SEQ ID NO: 66945 - DNA, 486 bp, Cucumis sativus
  Intron number 2 from transcript Cucsa.196460.1 (locus Cucs a.196460) derived from phytozome v7.0 (chr-ID scaffold0135 7; pos 120269 to 120754)
ccaaagtttacgagggcaagtatgaactctttgaagatctctctgttctagcactgctaattttgcttggatctttttctttttattgagctacttgagagaaaaggaatatatttgtttgggagctctcttatatttcgagatctagaaattgttttcgtatttcatgagaaactctacagtatttgaataaaatgtgactctgttgttttaggatttgttgcaagaatttctactcagattctacattttccttatctgtatgcgttcttgctgttgattcagtcatttgtatttgaattctcggaattctgtacggatcaaagtacagcctagcagtttgctgtgcttccatgatatttggtcgtcagtttgcttcaagtttctgggataattatattgagttttgctttgcttagttatatcattctatgtttcattgattgttcagatataagaaccagactgttgctatcaaaattgttc

SEQ ID NO: 66946 - DNA, 973 bp, Cucumis sativus
  Intron number 1 from transcript Cucsa.161810.1 (locus Cucs a.161810) derived from phytozome v7.0 (chr-ID scaffold0114 4; pos 1611654 to 1612626)
tcttgcgtgaaaagtctccgcctttcttttctcaggtctcatctccatctgggttttcaatttttctctgaattcatgcttttattttcaggtgattttgattggatttgtgtgcttcttcctctatctcaacttaattattgttctttgattctgtcttcttatatttttgcttggcgatttgggtgtgtttttttttcttatctgatttcgtcgccaaatttatggtacttgatcgtcagaagaccgttttactttcagttgttgagttttcgaaacaattgttatgttggtgattgggtaatcgcattgaacaccgttttgttttgacagggtttttgttttttgcttgtttgttctgagccattgactattattttgttgcgatggccttttcaaactcggtaggcggctgtgattttatagagtattgacttttagattattttcactctcttccttgggttctctgttgggatcatatataattgtcattttgatattattctttttagaagatgggtatgcgataaaatcagtggtttgtgtctggatttttatctgctaaagacttggactgaatggaataattggaaatttggaatctgattgctggttgggttttaactcttataacagtggtgtagagcatgaaaacttgaagggaagataaaagatcttgtttattgggaaatttaaaaagaaagttgtattactagcaagaatttacgttccgtgttattttggatatggagttttgcggaatataaaggatcacgttttttgggaaatcaaagtagaaagtcgtgttgctatttgtaagcattaatgttccgtatttattttggaaagtttggttcctttggagtcttcgtccagaaagtgtagaattgaaactgttgattgcattgttcttatcgggaatatcattttagtgactgttacctaattcaagttttgttgttatgtccag

SEQ ID NO: 66947 - DNA, 463 bp, Cucumis sativus
  Intron number 2 from transcript Cucsa.069320.1 (locus Cucs a.069320) derived from phytozome v7.0 (chr-ID scaffold0071 4; pos 138535 to 138997)
tcgttgccaggtgagttgcttgaagaagatattggaagttttatacctgtggataaaaattgttttggattttggttttcttcagcgaacttgttcttttgcagtttcaaatgcactccactgtcttttgattttatgatatttataacagtagctaaggctcatgtagttgggattatctgaactccctttttgtttgtatagatgttatttatatttaaaaaacctcaactcacctgtatgaatatcttaagtgaaacatccttaattttctgaaccagcaaattatttaagtgaatcaactcctagtaggaggacttaaggctctttaaagtcatatttgcatatatacaagctagttggtggtcagtgattcaccagtatttatggtattagattgttttgttgctaatgaccgctcatttcaggtcatcagaagcgtcagtcagtggtctgctgggac

SEQ ID NO: 66948 - DNA, 429 bp, Cucumis sativus
  Intron number 1 from transcript Cucsa.152600.3 (locus Cucs a.152600) derived from phytozome v7.0 (chr-ID scaffold0112 4; pos 27246 to 27674)
aaaatatctgaaaactcctccgctttttcttcaaggtaccttccacttttaggttgttcacttatttggatatctattgtatgttacgttggtgattattcattttttatactttatgtgagaggagaaagcttagggggaaaaaacttagaaaagaagtaaaaaggaaatgagatttttgtatttattagaattggaaaagaagtacatgttttcgaggagaaagagggaattgagagagtcgtcgttgaagaaggtcatgaactgctggaaagagagtgtggaaattgctatttatatgaagaaaattcaaacagatcgagaaagatgtttcttaacaattaaatttaaaagattagaaaagttatgtgaactttggcgactttgattattatgtttttactacttttgctcagagcttccatttcc

SEQ ID NO: 66949 - DNA, 764 bp, Cucumis sativus
  Intron number 1 from transcript Cucsa.054170.1 (locus Cucs a.054170) derived from phytozome v7.0 (chr-ID scaffold0058 2; pos 471984 to 472747)
cttcggcccacgacgctaaagtcgtggacttccaggtaattaagagtggagcaaagaaggaaaaggagagagattgctctcaattattttgttgggaaattattttaaatcttctaaaaatatttatgattgatcaacctatccaaataatacttatcttgtttatgccattattcgctacttaacttattttgatatattttataaatatcatcaacctcatttacatttttctcaaccaaaaaattacttaatttttcaaaacaatatgataaatagtagataatatagtaaaaaatgtagatgtagaattcattattttaaactcaatttgtttaaaatcacatcccacagacaatcaatgttttagtctcgaaaaaaaatttacgtggcgcttattctattttataatccgaatcgaatcatattaaagaaaattcaggtgtgaatttattttttaaaaaagatactaaaaacttaattttatatatattaaaaaatgaagaatgggatattagatatagtatagatgacgtctaatctttgccttttagtttaattttacttacccttgatattctacaataatcgtcctctcttctgaatttggtcgaaattttaaaacaaaatcaaagtttagacatcaattttaaaaatattgttgaaagaaaaaagttgaaaataaagttttacaatgatgtacacttaatttctgctgaattaggaaaaacatattaaaacttatatctataactaagctaata

SEQ ID NO: 66950 - DNA, 383 bp, Cucumis sativus
  Intron number 1 from transcript Cucsa.069500.1 (locus Cucs a.069500) derived from phytozome v7.0 (chr-ID scaffold0071 4; pos 287504 to 287886 reverse strand)
ctggtgagattgattttgattttgagttttttgtgcgattaagtgctgcgattttttctggttgttctaccggagattatgatcttttttctgaattggtgcttcttctatttctaacttagattatgaattgatttgaaattacttcttctagtttatgtatctgagtttatgaattgatgtgaagttgtgtgtgtgaaaatctaaggctgttgaggttatgaatttttctgaatttgtgcttcttctagttctaacttagattatgaattgatctgaaattgtttcttctagttctatgtatctgagattatgaactgatgtgaagttgtgtatgtgaaaatctagggctgttgaggtgcggaaaaagctgcaggttgaga

SEQ ID NO: 66951 - DNA, 811 bp, Cucumis sativus
  Intron number 2 from transcript Cucsa.087600.1 (locus Cucs a.087600) derived from phytozome v7.0 (chr-ID scaffold0088 8; pos 222915 to 223725)
ggaaagtcacgccggccactaggcagattgatcatgtatgttcttttccaatgatccttgattttggatcactatgcactttgcaacttcacttccgttcttccttttagaattttgaatctcgttcataagccaatccatgtttgttgcgtaatcctgttgataggttctcataatgattttgtatgctttgattgtatgagttttttattctcattcaacatgaatatcaggattgcatttcatcttgaccataaggagaggggtgcctctttttgtgatgtagctttcgattaaatatttgagttgtcaagggacctcaattgtttttaatctacttaaccggctaagcatgatgagacaataaatggtgctgatgggatctggagttagattttctctttaggtggatgtgatacaaatttagcgttaatgaccttgattgtgattgactctcataatatttggatgataacaagttgtatgttagttattgttcttggttgctatttttatgatgcacagtttcaatgtgtgtgtttgtatgtatttctttgagttattcatttgttcttgtaaccataagatgaatgtcctcattatgatttaggtttatccttcgttcatttacaattggtacaatcattggaaacctttggtgctgatggtttctagtataatttctctcttagtatatgtgattggaggttcatcactttattttatgttgcttatatttttttcggcttgttccaatcacttcttataatatacaggacttgccccgtacttttcctggtcatccttggtt

SEQ ID NO: 66952 - DNA, 931 bp, Cucumis sativus
  Intron number 2 from transcript Cucsa.168020.1 (locus Cucs a.168020) derived from phytozome v7.0 (chr-ID scaffold0115 7; pos 5815 to 6745)
gctccaaaaggtaagcctatcaacttatacgtcttaacagttaatcgattacacttttatgcacggtacattcaagttattttccgcgctgtttcatttttcattactgccgtttgttcattgaacagttgcgatttgtttctttagaatcagttgttgaaaattagccgagtttagagaatttcggacatgaagatgttattcaaatgaatctacatctgtataatctgtttataattgtccgctggctcctaacttgtaatacgatctaatgattcgcttgattagctcaggtgctttacttgttttttttttggtctggtaagccctatatttttagatagattatatagggtccagattgggaaaatggtgattatctattgtgaatattataaactgtgttagaacatagaaggctcatagaatttgtagaagataggtgtttcactcatcgtggtatctgtggttttgagatttatggacaaagatcattaatgctgctatgcggtttgtgaaatggaacaatgtttgtgacgtgctgaagttggtttgattcaataatttagtattatatgattgtgtgttgttctgggtcgtttgtgttttcaccttttatctttgccaaggctcagctctgatgtctttcccattctgaaaaagtactgtttaaaatggcgtaacttttgaatgaaatacactacatataaatggaagcgtttgacattataataataattattagtctttcgatacgtggttccatttggtagtgattttctttattgtatgcatctaggaatgaatttaaaacacttgaacacacaaagtacttggataatgtattagttttaagtgaataaactaatcaagcttgatacttctcttcccctcagctgacagcaccaagaagactgaccctaaggctcaa

SEQ ID NO: 66953 - DNA, 546 bp, Cucumis sativus
  Intron number 2 from transcript Cucsa.018340.1 (locus Cucs a.018340) derived from phytozome v7.0 (chr-ID scaffold0025 2; pos 768276 to 768821 reverse strand)
agactgctctggtctccaagaaagagaaggaaaaggtttttatccatcttttcttcgctctctgacatatacactttgatttgaagcagttctcatttcctatttttgtgaagtgtgtataggtaagtgacatttagtaattttgaactcacttttcattcgtccttcaactttctggtttcttatgaagcaaattggagagcgtttttcctatattttttagttagatttttgtgagaatggctttctcaattcttttaagtttcatatctatatattttctggaacaaaagaactccgctattgacagttgctatgcgaagctcgatcttaaagatgatgttggcatgattcaaatggttctcccaacgttgttctgtcgactcttcgattctgaggacagcttttgtagtttttttacgagaaccgctatatagtagtctataaatttccttccatttattaactgacgaactttctttgcttattatttatggagaattttggccatggactctgaaacctttgtttgatgattagttggag

SEQ ID NO: 66954 - DNA, 850 bp, Cucumis sativus
  Intron number 1 from transcript Cucsa.084670.1 (locus Cucs a.084670) derived from phytozome v7.0 (chr-ID scaffold0086 2; pos 353330 to 354179)
agtggtcggttccttcaaaggcattggaggtattgcttcttccttctgattttcgttcggtttttctgtacctgcttgattaggctgcttgtcgagcttcatttaatgattttaacgtaataattggttttatttttattattattatttttttttttgttgacgatggtgcattcttgatgtttttgaatgatgaatgtgatgcgatgacattgttatcttcatgaaaactaattacaaattagacaatgtttttgtgaacacaaatttggacggtctctagagtacggtaggcatgacttttgatgtattcttcgaaaagaaaatggtgtagcactagatgttaaatggattgagctgggaaatattttcaagttagtatcaataatattaggctttgaagtcaaatctgtgaaggatgccaccattttacagctgttttgatgatccaagacaattttaacctttcttttcgagcaatttacgtgaaggagattggaaatccttgaaatcagtcttggaatgtcctattagatatgctggtgtcttcgatataacgatttagaatcaaatctacttgtctaattagcttgtggaagctcttctagatgtgtataggaaatttatagcaacaataagtttgagcgatccaattttactgtctagtgtagctattttcactaatccagcataatggctgtccagttaatggttaaatttttctttttaatatatatgttttctgaaaatttagtttcagttaagtgtgcgcatcaatctttcctctatgaccaatcagttgaggtattttttttcaggaatcagagtggcttagggttactttgcacaa

SEQ ID NO: 66955 - DNA, 644 bp, Cucumis sativus
  Intron number 1 from transcript Cucsa.096490.1 (locus Cucs a.096490) derived from phytozome v7.0 (chr-ID scaffold0091 9; pos 2090950 to 2091593)
gattcgtcaggttctctcccaggccgtcagtctcggttagctctctctctctctctctctctttatcgagcttttcacggttgttctgtggatcttgatccttctggggagaaatgatattgtgggctgtgattaaattttgagatgttggtttcttttggcgcttggatcttcggagaatgagtttcacaaatcacacctacctgtttctttgtatttaatgtgcaaaatttaaaattgggtcgaggagggttttagtttatccgctaatttatgattccaatgaacagattttcagtggttcttgtccaatttggctttcgaattttgttttccttaaggaaacgggaaagcgaattgttgtcattttcaagaatatgttgtcattttttattgtatgattaaggatcttgcttgaaggatttcatatgtcttgggagattaatatttgcttttttcgtttgggctcgtcgatgaaagtttttccacatggaggatattattagaataaatggacccctgatgccaaataaatccatgttttagcctgtctgagttaactattactgacgttttatatgaaaggtgttattgtgaagattcttgggttgaaaatgagtagttttgtaattttcttttcaggc

SEQ ID NO: 66956 - DNA, 548 bp, Cucumis sativus
  Intron number 2 from transcript Cucsa.096490.1 (locus Cucs a.096490) derived from phytozome v7.0 (chr-ID scaffold0091 9; pos 2091687 to 2092234)
gaacctggatttaagagggtaagatgatagctgtgacagattttttaagtttgctaatggaacatcttttggtttctccatcaaatacattgtccattgagatttattttccttgtaaattttacttttaattatgttttaccaaacattcaattctcttatttccaagtattgaattctaaggatttgcttcttggtgtagtttgacaacgattcagaaaagtggaatataattttgattctagtacggttatgttagcacattggtctatcgtttttccagtgttatattgattctaagatggggatgtttgtgtgtctgctagtcatcttttggtggttctataacattttaaaaactccttggcattctcgagtttatgaagtgtcttattattctaaactgatattttttgcttcccttggtgaaaaaggataatatgatcattataaactggctgcattttagctttatcagttaaagtttgatttcatcatgtaactttcttcattcatatcaaatgcagggggatatcttattcttacac

SEQ ID NO: 66957 - DNA, 662 bp, Cucumis sativus
  Intron number 1 from transcript Cucsa.085980.1 (locus Cucs a.085980) derived from phytozome v7.0 (chr-ID scaffold0087 0; pos 296111 to 296772)
ggtactgctaattttctttctcgtaccttcttgtttactagtttgattgctagtttgaatgggaatactgtcgcttaattatattttaataatagtataaatgtgagcttaagacttattatgtaagttgtttgattgtttttttcaatggtgtgctgagagacttcatctttggtcgttgatttggattaggatcttgtttttctttgtgtattgcatgtcttgtggtaaaagttgcagaatgatagcaaaattcaaggttgagaaaaataaagggaaagagaaaaaagaaaacccatggctgatggcttaaactttatgtgttatatatggactatggatcgcgagcattgaatccatctccacccgttggcacttgaaaaactcgtagatggcgtcaaaacttaccttttagcagccccaaactttcaattttgccttctactgtcagataaagaagaataaaaaggtttcctggcacctttgctgattactctgttagatgcttgatgcacttgcaataatcatggattcatgatttgttgttggattttttcattctccagacctctggtattgattcccttttatgattcctttaggatttagcatgctccgattgaaattaatttcaggtatcctcaatatcatcgtttgcttcc

SEQ ID NO: 66958 - DNA, 817 bp, Cucumis sativus
  Intron number 1 from transcript Cucsa.052720.1 (locus Cucs a.052720) derived from phytozome v7.0 (chr-ID scaffold0057 7; pos 181558 to 182374)
tttttggcgccagtaatatcatcaaattccttcaggtctttttcatccgcctttttaatttctctcatgttttggtctctgttttattttaactctccaatttctaactgttcggttattttgcaagattgaatcagtgaattagggctgaaaatgtgcattcatttgttagttgttactcactaacgaccttgttgctcttccatttttgttttacacattaaaaaactatgcagtgagatttggagcatgatgaaattaattcttaagattttgtttgatcctacccacttaacctactaaatatctccatttggaattctatgctgaactttaaattattcacattacttgcaaaacaaaataactttttaaacttccataatttgaaaagtagccaaaccaatatgtaatgtaattatatcaatactttaacactcctacgctccagtaactttttacactcatatgtgtttataatgactatgacagtaccatatgtaccaaccaaaaaacttaggttgatggagttctttccagcaaatttgattatatttgtacttttaactttcgtatgcgtcccattatgactatgccattaccattacttcatattctcttgtcaacccaaaagcttaaaactgatggattctttcaagtaaacttaattaataccgatgcttcatttcccattttcccttgtttgaatagtataattcacaatacaagatccctatgggacaacccacttgtcatgaactgaaattctttattgggggattgattaaacaggaattgcctgaatctcaaagggcag

SEQ ID NO: 66959 - DNA, 704 bp, Cucumis sativus
  Intron number 2 from transcript Cucsa.164640.6 (locus Cucs a.164640) derived from phytozome v7.0 (chr-ID scaffold0115 3; pos 39564 to 40267)
tagccattgcaaaggaactcttaaggtacatcattatattttcaggactcgttgatagcttctcttttatgttatccttaatctttaactgttctgcctcatttgaacttcaaaaggaatggaaaaagttgaaggatcttttaattgaaaagttatagggagtgtatgaagaactgttttcaaaacaacaataattaagaaaagacggtgtttgggtaactatttttatttatcatcatttttcagcttttatgctacagatgatatgttcttctgaataattaaaactggtttttctcccacattaatcttaaccttaaaagccattcatccagttactaaaaatcaaaacagcaaaacagcctcctaaacaaccccttggtttcatttattatctctcctcttagaaccatgtttataaaactgttctctctctacctctctctggctcccttcttgcgagggttttcatggacaattagagtgagtactgtgtggtctttaaaaggtaaacagataaaatataattccagcttatatatacacacacacacactatcactgagcattttttggggggtcagaatgtgagtacttgttctaaaatgacttgttaaattctttcagctgagtaattattcttcaatggatggtgttttgtactgtaagcctcattttgagcagctattcaaggaaactggcaa

SEQ ID NO: 66960 - DNA, 670 bp, Cucumis sativus
  Intron number 1 from transcript Cucsa.193330.1 (locus Cucs a.193330) derived from phytozome v7.0 (chr-ID scaffold0133 5; pos 287391 to 288060 reverse strand)
agcagtgcaggtacatttgagttgcttctgctccatttaaaatgcattttcaattgttttgttcatttgtgctgctacattttggcagaaccttttttagttagttcctccttcctcatacttttgttacttgcgttgtttgttcattgtttgtcatccaaaaaacattagataaactcctaagtttgctttttgaaaattgatactttatgtggtttgttaaaccaccactaaattgataaggttaaaccatgaatcaaatatgcgatctatttatgtagatttgggggtggaaatgactttgttggtgaggagagtttgactgaattctaaaagcttaagtagatggaagatatttaatttgtctgtcacagtaagattagagccgcaaaaatgagtatacttcaatggttaaggcatttcccttgaggtcggaggttcaagtctttgccacacatttgttgcactaaagactaaagagaaaagattaaatccctatttttttttacattgtagatgacactttttcaaatattgttgtctttccacaattactattggcttcaattatctggttaatgtgttggaaaatgtaaaggaagtcgaggccattaagcctgagtactattattcagaatttgtcagcaagagaaggaggaagtcttgatag

SEQ ID NO: 66961 - DNA, 916 bp, Cucumis sativus; identical to SEQ ID NO: 62337
  Intron number 1 from transcript Cucsa.120360.3 (locus Cucs a.120360) derived from phytozome v7.0 (chr-ID scaffold0099 8; pos 2434440 to 2435355)

SEQ ID NO: 66962 - DNA, 909 bp, Cucumis sativus; identical to SEQ ID NO: 62976
  Intron number 1 from transcript Cucsa.058500.1 (locus Cucs a.058500) derived from phytozome v7.0 (chr-ID scaffold0061 4; pos 656487 to 657395)

SEQ ID NO: 66963 - DNA, 744 bp, Cucumis sativus
  Intron number 1 from transcript Cucsa.065610.1 (locus Cucs a.065610) derived from phytozome v7.0 (chr-ID scaffold0069 6; pos 303836 to 304579)
ccaatctcttccagatctgaaacttctcatttcaggttcttccctttttcttcatcttcccacttttcgatttccttctacttccaccttctacttggtctctgttgctttgttcattgtagttttgtaatgcggttgtggttttgcttgaaatttcaattgggtattcttcttttttctggtttcttatattctttgatttagtaattgtctctttgtttaatcttttgtaatgggtttgtgattttgtttgaaatttcacttgggtattcttctgttttccttaaatttttttattgagtaatcctctctttgtttaatctcttgtgacgggagatttatgattttgtttaaaatttcacttgggtattctttctgttttctgttttccttcattttttttattgagtaatcgtctttttgtttaatcttttgtaatggggttgtgattttcttctcagaactaggaatttctctaccccaattttacaatatttgggttgggagttgattatttgctgactcaacttgacaaactatatgtttcttctttgttgtggagagatctaaagacttggggttgcctgattttactttaacctactccatcaggcttaatcagttaacaggaatcctgtattgtatgctaaataaaataacttttaacgattagatacttgcatattgtgtttgatctttactccctccttcctcaactgcattgttcacaggatacttgagttg

SEQ ID NO: 66964 - DNA, 942 bp, Cucumis sativus
  Intron number 1 from transcript Cucsa.132240.1 (locus Cucs a.132240) derived from phytozome v7.0 (chr-ID scaffold0103 7; pos 247212 to 248153)
tgtcaataagacattcactgtcggtgacaaactcggtaaataacccttttattcgaacgctttactaatgtcgtctctgtctttgctcctaacaagtatttgcttacaactctttagaactcaacgacatggttgtacaactaattgaacgaatcataattgcgtcgtatttgactttgaaaattaaaactcattatttacttagtataggttgcatttctaacttaaaactcatgaagggaacccggatattacaaaaaggtttgttttatgagttaaatttgcacaggtaaacatatccattagcatctaagttcaaactttaaagggattgtttgaggcactaagttcgttattatagtttgtggattataatggtttgtgtttggtatgacttgtaatacctcatcctacccaagacaagttgataatccaaacacttcctaacttatttaaaacatggagttgtgagcttgaagacgctgttaagtttggagagttaaaaaccattcaacccacatcgtaaggagttaataagacatcatattgatgttttttgttcctaagactctagaactcctttagccaaacaaagagcagagaactagtacaagtacttgaatggtgttgaatttcaatcaaatctgtaagaaaaatagaagagtcaagagaagtaagacagcagatcaatgtcacatttcaactaacaggtaaaactattgagatcaaagagtacagaactaaagatgacccatttccaattaccctagtgagctttctcttctacaatttggctcaaacttaactgtgtttccttttcacaacattattttacacttaattttatttgtttattttaaacattcgactttcatatgagatttacttcataattattttttgtataaataagatcttctctcttttgtttccagaattcac

SEQ ID NO: 66965 - DNA, 979 bp, Cucumis sativus
  Intron number 1 from transcript Cucsa.045010.1 (locus Cucs a.045010) derived from phytozome v7.0 (chr-ID scaffold0054 2; pos 1120068 to 1121046 reverse strand)
accctggtttgggatacgttactcttttaagacatgtaagtattgaaatatatctatatatatatatatatataaaccattcattaatataaacatatttaagtttcacttatgtttgtatgtgttggttaaattgtctaatcataatcgatgacagacaattttttttcttttctttttataaaaaatatttcaaacatttcttggatttattttgttctgataatgtttaactcttgtggactgcactgcactcaccttttttctctaacccagtagcctaatattacgtgtcatgtgacaaacttgtcgtttaaaatctaatattagatataaaaagaacttggattctatagcacttaaaattggtcccaaccattttttaactgttattttctgttattgaatcgcacacatagagtaaaatatcaatagcacttttaatgacaatatgctatggacaacaaaagaaaggcacaaaataagaaaatagaagcatacattaaaaaagatgacagattttttttctttctaaaacagaaactgaaccaaaaaggttcatatacgttcaaaaatacaaaagttagcatttttatgccaaaattttctaagcatttatgacattattgtatcatgaaaaatcattttttaaactttgaatgatagttgagtgcaacatcataattaaatattaaataagaaaactatatttttttgaaatgatgtaaaaaaaattattacatgatattctgacaacttagttataggtacaaacataagtaaaaaaaacaaattttatggcatgaataggttgaacttgaaaaaagattggtaatgctaagtactatttaaattatatgtatgtatgcagttttgttcgtaaccacaaagaagtaatttactatatatgaaaataggaaaaaaaagaaaaaagaaaaaccaattatgatagaaggttgctattggatatgacaggttc

SEQ ID NO: 66966 - DNA, 732 bp, Cucumis sativus
  Intron number 3 from transcript Cucsa.112420.1 (locus Cucs a.112420) derived from phytozome v7.0 (chr-ID scaffold0095 3; pos 1013895 to 1014626 reverse strand)
aagctctaagagtagctcctcaatatctagaggtgagaagtattttatatattcattgtgtgcattacatttcatctaaaaaaattagacggtggtttcgagaaaataactaggctgtttacacttcaacgagtctgggttgtgaatataatcattactgaagagacattgtttggaactaccaactgcggagagtacctcaatattttctacaaggttttttacttatattcctatctcttccactccaaatgtttttaagcagatttgcgtagcactaaactttaagtgtcgactaaaagaaaatttggaggttaacagggaaattttggacgtgaacaaaaattattattcggggatcaatattttgttaggctacctgagtctttgtgctgcttgaatctttacatgttaatattataattgaatgctaagaaacagtaattgcggtggacaaggttaaagaagaaaaaggaaaataaatagaaatcttagttgaaaagtcaaaagactgatgatgctcaactctaatttagaggtccttcaaacatgcaaccaactagtagaacatgcaatccttttgagacaattacaaattcttatccttcaattgaaaagatgtgagaagaaatgattcttgctctagagtagattatcgtattattcctgggatgcatttcttaatttcaatttgcaggcttacatttgccaaggggacgcatttttagctat

SEQ ID NO: 66967 - DNA, 1009 bp, Cucumis sativus
  Intron number 1 from transcript Cucsa.068290.2 (locus Cucs a.068290) derived from phytozome v7.0 (chr-ID scaffold0070 7; pos 47620 to 48628)
aaattcaattacacgaacccattgaatctttcggtgtaagtctctttggatctgatccaaccccattactctctttttgttaatctttcttcccttctacttttctatgtcctacttgttcaatttctttgatttttagagctgggtgtagatttgtgttgcttaattcctcttttttttgttctgggtattggtgtattagtgtttattttcagtttttaaccctaaattttgttaatttggttcgggagatgcctctgttgaggtttgtatcgtttggttttcttgctagtcgctatgcaatttgagatcagttaatatagataggtatggtggcttagagctgtgttaatctatgtacattaagtcttagagagaataattgggattgagaagggttattgaaagtgtgattagcgaattccatttatatctctctgtggaagacttgtagtagattgataatttgttccgcagatctgctgttggcctttctcttctcggctcaacccaactccacaccccaactcacgaatctattgaattcatttttctgatcccatagttccttgttcttttggctattcctcttcagattccaaaaccgtgactacttcatgtgcctgtttcgctgaccaaaaccagaccttcttccctgagtcacctctcagaggcaagagatcattcccaccctcatgtgtcaaagtttttttcatttaggaatatcgaagtgagtgagggctaatcttaaaggtttcattttagtatcttttgtgtatttagttaaaaccaacggccccactgaacctgaaaatttgggttgtttgggttaaaaacaaatctcaatcagaacttggccaattcacgaacatccttttaagaatatggcataagaactcaccagtgctaagacaaaatttcatctattgctttcttaggatctctcatatatattcgttagtgcataattgcaggttattgacaaggtttgagtggtgaaaataacatc

SEQ ID NO: 66968 - DNA, 596 bp, Cucumis sativus; identical to SEQ ID NO: 62424
  Intron number 2 from transcript Cucsa.077390.1 (locus Cucs a.077390) derived from phytozome v7.0 (chr-ID scaffold0079 1; pos 562307 to 562902)

SEQ ID NO: 66969 - DNA, 289 bp, Cucumis sativus
  Intron number 1 from transcript Cucsa.092320.4 (locus Cucs a.092320) derived from phytozome v7.0 (chr-ID scaffold0090 5; pos 229300 to 229588)
aagcaactagcaaaacactacttggaaattttacagtaagttacaatttcatttctaggaaatttccaggatggagctggattttcgatactgtactgctttcaattttggggttttttaaagctttctttatttttcttctttctttttctcttttatgtttggctgcgtcattctgcttagggtttggttcttgctggcggcttttgattttaatcaatcctcttcattgaagttttgatttgggtgtgcagtagatctggaaagttggagcttttttttctttttt

SEQ ID NO: 66970 - DNA, 860 bp, Cucumis sativus
  Intron number 1 from transcript Cucsa.097820.1 (locus Cucs a.097820) derived from phytozome v7.0 (chr-ID scaffold0092 3; pos 45999 to 46858)
cggttcgccgccagtggatttccaccattctcgaggtatttcccttttatttcatatctaagtgtcatcgttgttcaaccaataccttctccacgatctaggtctactcctatgttgtcatctctttcataatcgtcctaatgaaaaaggatgatgttaaaatatgtttttggtccttgcactatgaatgttcaaatctaatctcaatcggcaaatcttagtcttcctaaccataaacttctaatagaaattgcacatgaaaattatattttaggttgggaatgcgaatacatggataaggtctgaggataagatatttgcaatattgtaataagttttcttagagcaaccaaaatttaaaagataatatatgttatgttgaaaaacatcaaaactattgttctgacaaatgtatcatattatagtattagtatatgggtaagaagttaggcaaggtggtttagaatgaaaatttggagttgaatggtgcaagttttgcccagcatatattagtatatatagttggttcacttttaccataagtaaattattctacttcctaagaaataaaaatttaggcgtggtctgaagtgcactcactctcactaaaataatctgctatatgacataactatacatgaacaagtgataaatgaaatagctagtacaacgtagactatatctgattattgttcatttaatctaagatttatccattggttattataataaaaagacatgtgaatgacataaagagtgtgtatatatatattatttctcatataaatgaactatatatacatttctttgtactaaattcttcaggacatagacaagaagaacattcttgcagtccaaac

SEQ ID NO: 66971 - DNA, 622 bp, Cucumis sativus
  Intron number 1 from transcript Cucsa.120220.3 (locus Cucs a.120220) derived from phytozome v7.0 (chr-ID scaffold0099 8; pos 2216554 to 2217175 reverse strand)
gctgttctaaactgagtcatcaactgaaattcgtggtatattcatgcaaattcgatttgggttctctttattttctctgaaaattgcagtgcctgatgtgttcagttgattgaagcattgaaattattcaaagattgaattgcaaatgaatctgttcgaagcttccttgacttttttttaccttttttttcattgcttcatgtagaacaaaagtagtaaacaagtattcttattctgttgttctgttcgtttctcacgtgttttattcttgtttctggattttcaatatgggaagtgatcatttttatcttctgttttctgctatcagccatagattttcgcgttgtttgaatgatatttaaacgtccagttcggtaatggaataagggattggtgattagtcagctgacgttagatggagtttcagtttctttgattccgaccattatttggctccaatgctttgagtatcacagactctgtaatctcaaagagcagatttcctagttcttgtgttttctattcgcttttatatttgtgctccaatttaacccatttgacaagctagagatggttagttaccactgtctttgctttttttgttttcaggcactatacttag

SEQ ID NO: 66972 - DNA, 599 bp, Cucumis sativus
  Intron number 1 from transcript Cucsa.165250.1 (locus Cucs a.165250) derived from phytozome v7.0 (chr-ID scaffold0115 3; pos 603426 to 604024)
ggtatcttccctctttcttcttactcccattgaattcttgttggttttcatttctcttcagtctcaatatcttgtcacttctctctttccttcattttctgagaaacttagcttcttgtgattctgtgaagacatcctttgaatttgtgtgtgtgtgtatgtgttttgttcaattggaatttctctgagaaacttagctgtgaagaataatcgtccgaattgtgatagtatttttcgttctcattccttattttttttctctttctactattgaatagcctagctagttatgattatgtggatgataatttgaatttgtgtgtttgattcgaatgttgtgtttgcttttatcaatctgagtttctttgagaagcctagtcgtgaaaaagaataatcgttcaaattgaattgattataagaacattttacctggttattttgtatatttgattcaagtgttgtgcgtttgatgttttaatctaaactaaatttctcttgggaaactaattacgaacgacggattgaattgatttgagagagaattgtgaattttaattgattcaggaggagcttgcggttacggaaacttatacagccaa

SEQ ID NO: 66973 - DNA, 399 bp, Cucumis sativus
  Intron number 2 from transcript Cucsa.003830.1 (locus Cucs a.003830) derived from phytozome v7.0 (chr-ID scaffold0004 6; pos 2625 to 3023 reverse strand)
gggtccaatcatattggtaggaatttaatctgatgctttagtcatacaacaaaccaaatccaaggcttcctcaacttctttgcttcttttttctttcaatggttttatgcttatagtttagttagagggtaagacaaatagttatgcaaatacatgggatgagagaagttcatgctagctggacagaaaatggattaaacaaaatctcaggtcatagcgtgctttccttttgtgtaggtaaagagagagtttatgcaatccgtatgaatattttgaatggatcaaacaattgtcaggagagagagaaggagagagagagagccttatgttcatcaaaatgtctttgtgctttgtgcaacttgtgcttatacttgctattgctgctgaaattctatagat

SEQ ID NO: 66974 - DNA, 1000 bp, Cucumis sativus
  Intron number 2 from transcript Cucsa.067130.1 (locus Cucs a.067130) derived from phytozome v7.0 (chr-ID scaffold0069 6; pos 1532572 to 1533571)
aaaaatctgattacgactggtaagtaaattaaatttgctccaatttcatgtctcagtgatgaagtggatttcatgttcaatttgttgtatatgaagtttgtttccaatctaagagtagcattgattggtacagtagggtagcgtgttgttcattaacaaatgcttttttcaaattacttcaagaattcatgtagcattagggatgtaaacagtacctcacttgagttttctggtcctacaagaacctaaataatgcgtctggttcttgttttcttcttctacatgtggttctaatacgtcgtctttgtctgcgagattcccttttatttaacccattaaagcggaatgaaatatttgaaaagtccaaaagacgacacatgaaagtcattttgttcctcaacgttatcatttccctttcttcttcttcttttttttatgaagaataaaacagagctcttttacctttgcctttttttcacatatattgtgtacttccctttaactttatttaaagtttttcatgggataatcgatttcttcaactgcttcgttttttaggaaaaaaaaaccttgaacgtttaaaataaagtgatatttgaatttctttgctaatttcaacaaaattatcatcaactcctttttaactttaggttagataattttgaatgggtaaatgctctaagtgtactttttcatgtgcaaggaaacaataactttcttctttataactatattgatttcgtgattcgagaaccccacctaccctaacgcttgcaatggattagataaatagatcccttcaatgatctcgttgtagatggggccaatgtttggctattattgttgatatggacacaattagtataaactcggtgttaatcccttatttgaattataatactttaagaatgttcctttgctgtgaaattaactattcattgtaattaatctctactgtttctcaggctcctcacaccacctggcaccccactctttccat

SEQ ID NO: 66975 - DNA, 351 bp, Cucumis sativus
  Intron number 1 from transcript Cucsa.147830.1 (locus Cucs a.147830) derived from phytozome v7.0 (chr-ID scaffold0110 7; pos 179317 to 179667 reverse strand)
gcatgtaagttttcttacatattggaactatattaactcttcatttcagccatttattttctttgactgatacctttacctgaaataattattagaagttagttcctttcttgtttgagtcattctcaaaattggttcatatatgaaattcaatcttgttttctacttcttttttttttttgctggataacagtgtgtaatatgaaagaggaaaaaactccaatttacttgaaacaaaatatacttttcccgggaaaatcagttgagaaaatggtgatgattaatgtttcattgttataaggagatggaacttctatctagttactatctcatgattcacacttctcaggg

SEQ ID NO: 66976 - DNA, 696 bp, Cucumis sativus
  Intron number 2 from transcript Cucsa.115570.1 (locus Cucs a.115570) derived from phytozome v7.0 (chr-ID scaffold0098 8; pos 182315 to 183010 reverse strand)
gaatcagttcaccaagacccttgacaagaatcttggtaatgattaaactctaaattctcacggagattcctattacattgttagtgtttttcggtcttctgtttatactttttttgtgttttcaactggaatatttgttatgaagtatgaactatgttaggatattggtgggctaggttgtatgaatgcatttaatttaggagaggtgtagaagtttctgctatggtgaaagaaataagtagttccataccttattgattgatggtttggtttgggtaccttgagatgagatgactatgttttgatggcaatgcaagttcatttgggaattggtagtaagcttcagtctcttggaaccttaattcttgtctgaaccttttttttctccttaggtaacttggattattctgcttagatcttctcacattttgggttatttagtcattctagtgattgtattgaaatggtcctctttatagtacacggttgtgaatgaaatgtttcatttttgtacattccattttggtcatttggaaaattttgacctgattccatgtggttttgattagatttaaggtatattttgaattttgcttatctcatcttctatgtggttcttcgatagttgttggaatgtccttagatggttggttttaaaagcctttccattcattttcagcaacaaacttgttcaag

SEQ ID NO: 66977 - DNA, 935 bp, Cucumis sativus
  Intron number 1 from transcript Cucsa.108250.1 (locus Cucs a.108250) derived from phytozome v7.0 (chr-ID scaffold0093 1; pos 431957 to 432891)
atcggtatgtgttcaattcattgccaccaaaattttaagtttacgaatttgtgaaattttgttgtctgtagattttcatttcattttctcgtcctgtctgtgtctggttaggatggaatgtaagaattggaaaagggaggcatcaggatttgtaatcatatttacatttttgcattccattagaatgacgaaaaaacatcttcccccatgccttagaggataaaaattaacgactttcaaggattgagagtcaaggaatgaaatttgcatcttgttgcactgaaaaacttgggccacacccatcaattagaccgtgtttatccttcttccgttctacccttttctcatctcgtcgaaccattttccttatcgcatagcagcaatatttgattttcctttcgtcttaacctaagatattagctatcaaaattgtctaggtatctattcattttacaggagtggtataaagcttcttcaatgtatgaatctcaggtccttcgctggtctttagccacgatttagactattggatcaccacttgacccattaatatctctgaactttttgaagttcgtcttttgttctcactaaggtggatgaaagtgccattttgcaaaagtcaacctggacttatcaactagacaagaagcttgaaattcttcactaacgacagaaattattttcatactgattcactggcactatatttctttctttcctcaatcttaaggaggtttgtttgttcagctttttagtttgattgagagtgattactagtttgcctaacttgtctggtctattgcatttggagaacacttgaactattccagatatggatctttgtagaaatctgtcagttcaacacaatttgttggtgttgttttagtgattagtttacttcaactatgcagagtgggatccctggggtgttcctg

SEQ ID NO: 66978 - DNA, 597 bp, Cucumis sativus
  Intron number 1 from transcript Cucsa.117100.1 (locus Cucs a.117100) derived from phytozome v7.0 (chr-ID scaffold0099 5; pos 809235 to 809831)
atttctccagtttcatccgccagctcaatacttatgtcagtatatatttattttaatttctctctctctatatatatatgcttttttattatttaatttcttttaaaaatattgttcttattttatttccttagaaaatattagtttattaactagtttctgtggtttagttgtactgaaacaaattaacaaaggaagttagtaacacctaggattatatcaaaaccattaagtgttttttctttaggttttctaattttagaacttcagttttcaactgtgtggatttgaattttttataatcgatatatatgcaaggtatttggaacgtagacaaatgtattgttctttggacgttgctttggtgatagtgaatagttgtttagttggaagttaaaaaaacattagaaaaagaaagggaagatagagtttatggatataaacatggaaacttgaatggtaaacgtaggttgttagaccaaacacatttttagtcttcatggggtatagaatatgtactttggtgtagccataagtattattgctgatttgtggggattatatattgcagggttttaggaagatcgattctgataa

SEQ ID NO: 66979 - DNA, 884 bp, Cucumis sativus
  Intron number 4 from transcript Cucsa.142330.1 (locus Cucs a.142330) derived from phytozome v7.0 (chr-ID scaffold0107 9; pos 639429 to 640312 reverse strand)
aaggaagaggaaaagccacgatcaaggttcacttctgaactttgaagtttggatattttgattttaattgaatttttcttgggacaaggaatgcattttagttgggttaagggatattattaaaatatccttcaattgcatcaagaaaaggtggggataattgcttgaggttctaccttaaacattcctattgaggtcaagcccctttacagtgtcctaaatagtcccaaaaaattcctaaattgaggtgtcaatgatgtctttggatttttccagaggtgagtttttaccatttcctacgtgatgtggcattttctcttcggtatcttctggtgtttcctaagagcgtcaaagaatatttgcagcaaatactttgcagtcattctagaagaaggccagagtgttatgagacaacactacccatgaagtggttaagattcgagagaataagtacttttggtgggacatgatttttggtttctagcaattacatgaaaagttgttttcagatttttttgttattcattcacctcgattaacaataatgggagtgttcaacttccatggttcctaggatagggtgaatatctcatcttctcttactcttattttatgaactccttttctataaatcttgccatctctctctctctcttcatatgtgtgcatgtgctcgtgaatgcacacgtctaagtctctgtatgacatggcatacatgtacacaatatctggattgtgtacataatgtgtataaatgcatttacaccaactgtcatgggattaaagtttccttttttcttacggatgaaatgcaattacttttccttactaacatctactttatggcaggttgaacttcgtgacgttgagagtggaaacaaagt

SEQ ID NO: 66980 - DNA, 952 bp, Cucumis sativus
  Intron number 4 from transcript Cucsa.101510.1 (locus Cucs a.101510) derived from phytozome v7.0 (chr-ID scaffold0092 7; pos 769457 to 770408)
gtcgtatgcggtttctatatttttaaagttttctttttcagcggaatcttattcattcatttggagcagtgtattttactaagaagcactggacatgggtataagacacagatacgacatggcaacatgccatgtttttaaaatctaggacacaacacatgaaggatacatttattaaaatattcatttttaaaaaatatatatgacttttatattgaatgaaaattcataataaatgaattgatgcatttatatgcttgcaagacttcacttgatgtattccagactcaaaagttatcattattgtcatatatatgtgcctttttagtttacccaacaaatgttctatgcatgtctaatcattagttccactaagttactaactagtgtctgataggtgtccaccaactgtcgcagtgttggacacggacacactagccaaactaaagtgtctgttcttcttagatattttatataagatataagaattacatagaaggatatgtggcaaaaagatattctttgaaatgttgaatcaatgtctagttgacttcactaaatcctaactggaccctttaaaatatacaattttccccgttttggctatgtaggggtttatcctactatgttgtagggaattttcggggagagaaataatacaattttttagagggactgagaggcagtcttttgatgcttagtcccttgcgagattcaatgtatctcttttggctctggtaacatttcttttcctggtgcccttagattctgatgttatcatcgtttctctgtgtctaaagtttgatattactcttcgagtaggttgctattattattttatgatataaatgttggcattttgttggatgctagaccatgatatagttttcattgtacccttcatagtgcttctttattatttcaaaaagatctcatagaggttgatgccagg

SEQ ID NO: 66981 - DNA, 689 bp, Cucumis sativus
  Intron number 1 from transcript Cucsa.117350.1 (locus Cucs a.117350) derived from phytozome v7.0 (chr-ID scaffold0099 5; pos 932636 to 933324 reverse strand)
ctcgacagggagattggttttctcgaggtttatttcattttttttttcttaacttcctatgcatgccattgccaatcccttttctttcgtgaccctgaagaaactgcttctccttcacaaaccccacacccaactcttgtattccactcccatttttacccaccattacaccatttcatctaattaccacctaagggtagctcttgttgtatactgttttgagtatttcataccttttggggggtggtggtgggggagggtacccactggggcatcctcacctcttaatatgtttcaaaccaaaaggagtgttgtttgtttatttgcttgcactcttgtcccaaaatcagttgtcactcaattaattttgtctctcttgttcttttcttttaaaaggcctaatgtagatgtttaattacattaactttgttcctttacatggcctttaccatttgaactcttgtttatgtgcattgaataccctaccatcatctttcggtacaaagtttatggaaactgaacacactacctatggactacaagagaaatcccattcccacattgatgttcaacctaatcatttgggtttttgattccttgcattgccttctcctaaaattaacaagttttttcttcatattgtctctggagcaggaagaattgaagtctaccgaaggtcttcaaccggc

SEQ ID NO: 66982 - DNA, 372 bp, Cucumis sativus
  Intron number 2 from transcript Cucsa.102540.7 (locus Cucs a.102540) derived from phytozome v7.0 (chr-ID scaffold0092 7; pos 1542225 to 1542596)
attgaacctccaaatcgttcaagtgactgcaggtaattgttttttcaggtcaggaataattagatcaatgcatcttgttcttgttgagaaccaatagtgctagtaactacctgatacagctggggagatgtcatattttcttggtggtttcatgcgtacctcttccttcaatcaatgcatatatataatgcgtgcatattgctctaaacgtttgagatatttgttcatttttgtgcacatggcttgtatgcttatcaattgacttgtctaatgcgcatgttttcaagacattttctactttcctttttatttgatttaaaatcgttgatgtattaatatcggtaagttgcaggtcccttgcagatcagttag

SEQ ID NO: 66983 - DNA, 596 bp, Cucumis sativus
  Intron number 1 from transcript Cucsa.117840.1 (locus Cucs a.117840) derived from phytozome v7.0 (chr-ID scaffold0099 7; pos 168532 to 169127 reverse strand)
aaagagaatccccttcttggcccttcttcttcaacgtgagtttcctttttttgctattgggtttttgttggtttaatctactgttttattatgagtgtgtagcatttggtattgttcatgttctttttgagttttttttgttatgttctgtttatctgaggagtattgtattatgctatgttatgttatgttctatatagtgttaaaaatgtggtgtagagataatttgaatgtaattggagatgatcatggctgcattgaagtctatctttgttgccaaattgaagtttatatcagaaaaaagttggtgtgatccttgatgaagttttcttctttcccttgaaataatgattaatgaagttttgggttgttgtaacaagctgcaattgtgggatttacccaacagcaaggcttcttttgaaagtgctaggcgaactttttgttgacctttctggtgaagtaatttaggatcatgtgggtgtattcacctgttatatgattgagaattgtaagaaaaatgtgcacgttgtagaagaagttattgtacataagtctttttcttactttatttaatcccaaatttcagattagaaaag

SEQ ID NO: 66984 - DNA, 371 bp, Cucumis sativus
  Intron number 2 from transcript Cucsa.172880.1 (locus Cucs a.172880) derived from phytozome v7.0 (chr-ID scaffold0120 1; pos 5137 to 5507)
atcggctttgctgtaagatctatggatctatatgtttattattatatgtttatttatttttcgtaaaatttgatagccattttaacacatttgttggataatgtataaaactacgtttcaaaatctttactactaaaatcaacaaaactactataaagaattagagtgttggaggactgaattttgttagttttggagtgaacaaagaagcaaacaaaatggattggttttgaaaaagaagaaatccaaaccaagggttgaataaagaataaacccatgtccatgggttagaataagcttaattggtggattttgatgtttgtgtaaaatttgcaggcatcaattctaggagaagcgatcaccggaaaggg

SEQ ID NO: 66985 - DNA, 905 bp, Cucumis sativus
  Intron number 2 from transcript Cucsa.018240.1 (locus Cucs a.018240) derived from phytozome v7.0 (chr-ID scaffold0025 2; pos 660069 to 660973)
cttgaaggtaaatctttggaaatactcttacaaagtttctctcagaaagagaagttgcatagcaatgcttgggatagtgtttcattatcatcttatttttagtttttggttcttgaaaattaagcttatagacattgcttccacctctaagtttttttgttttactatccactttgttcctaaaagtcaagtcaagtcgtttttgtttttttgaatttgactaggaatccaagcttttctataacaaatatgaaaaccaaaattgaaagtttgaaaaatagggaggaaacaaaacataaatttcaataattgaaaattaaaacaaaatcattacaaaatagggctaagagttcattgaagaaaaatatttgtcctacgtatgtttggcgtggttgccagcttcttcatttaagaaggcaaccatcctgtaattgatgtctgagtaaagtcttgaaggattcaaacattttgggtgggtgttcaaagcttcaaagctcttaaaagtcgaattgggttatgccaaatgtagtttaatccttaattcgtgtcagcaaaatttggaagaaaaaaaataggacaatagggcttagatgaagaaagaatactatttccattttgtggtaattagtttgtgaacttggaaattaaacaagaacataaaacgccataatcatcttgtcttataattcgattataaattaaagctttgatcttaaaatggaagaaggtactttcatttgaaggcatttccttcttgcttgctctatcctgaacattctcaaactgttggtacataagttaaagcattttttcaaagcttattatttgtgtggtttagtttttaaagttgaattagtatgtcatttgcagcttccttgaccatttctaggacccctttgcaacag

SEQ ID NO: 66986 - DNA, 1049 bp, Cucumis sativus
  Intron number 5 from transcript Cucsa.011500.2 (locus Cucs a.011500) derived from phytozome v7.0 (chr-ID scaffold0015 4; pos 730204 to 731252)
tgcacgtcagttgattgaacaaatcaggtaaaccttccaattcaactttatcgaactttacagtttgaaaacttccttttaaagatctgacttctggacgtgagaacagctctttggaaatctgcagatagtatgcacgacaataaccaaaacatgctatatttctattaagtagataacctattgtaaagtttggatcttggcttgtcaagttatgatttatagaaatctgtagattgtgtactactttccatatttggtgtctttgaactatgttggttgcccttcaagagacgcttcttcaacgtgactcaaggcttaatgggagagatccaactatcttgatattgtcattgggggagcatttccctgtttctccaacctttagtgatatctcctctacaaataaggcttgagaagagaggatcacttttatcctaagaaatacggacacttaagtttggctagcgtgttcatatttgacacatgatgaatgattcaacacgtgtaggacacgtatctaacacttgctagtataacaaatgtgtcaaacatggatagaacatggatagaacacttgttaaggaaactgaaaaaacacacacatgtgacaataataatcaatttgactgtgaaatgcaacaaactagttttcaagcttataaatgcatcagtccatttactttacatttgctcttgatacaaaaatgatatatattttttaaaaatgtatccttgtcctaaatttttaaaaaaatgatatgtcaccttttcttgtatctgtattcatacttcttagctttcatctctttcagttcgttgtttagttctgaagtctcaatggaatctgaggtctcctaacttttttgagtggagactgactaactagaggagtaggatcttttgtggtgatcatttattgatggattgaatatttaaacttggaacttttaacgtccaatcaagatagccatattcaaataacataccgaaattattcctttgtttctgcagtttatcaggttcatacaaaccattactaatctctc

SEQ ID NO: 66987 - DNA, 776 bp, Cucumis sativus
  Intron number 1 from transcript Cucsa.129060.1 (locus Cucs a.129060) derived from phytozome v7.0 (chr-ID scaffold0102 8; pos 144449 to 145224)
gaaggagaaatttaagtgatgagtctatggggaaagaaaaacgaaagagaaaattatagggaaagagttttgatgagataaaatgatggataaagagccgacggtggcagttaattaagtgtttcatgaacagttacaacggttatgagagggaatttggaattcaaaagtttcaactgccattagaacacgtggcataattttattggttacttgttgatcaaagcttacggatttaatttttttaatgaactactgatagtaatttgaaataattaaatgaattactcttgaccaacacaaaaaggtgatatttacttgtttcgtgaatttttttaatgtatattgaaaaccaaaaggttcgagtaaaaattttggcggtgtctatattgagaagtgcatacgttagtgtgaaaaatgaaaaatagaatcataaggtgtgggaaacacaattttattaattgtgtataatagttgtaattcggtagaaggttatttaaggataatgttaattagaattctccaatttcagaggatgtaattcatatcgaaaaacttttgtcaactgttgtttttctatgcttagaattgatcaacaacttgaatacaaatatagataggaaataactctcaccttatcactatgtattttatataaataaacacatcgctttgtgaaaacaaataaaccaaagacataagttgtgggatcaaagatgcttaaggaagatggcttgttgcaaccctagcttgcttgactttttgcaagggagata

SEQ ID NO: 66988 - DNA, 614 bp, Cucumis sativus
  Intron number 3 from transcript Cucsa.046430.4 (locus Cucs a.046430) derived from phytozome v7.0 (chr-ID scaffold0054 2; pos 1912172 to 1912785 reverse strand)
agacgatactatttgaggtctaagcatcaacggtatgactggatttatttttgtcgtcgacgttttggaaattgtggtaaaatattactcgagtagattatgttttaaaaaagaaatcattcttttttgtgatgaatttgagctgagagattcagaccttttgttcccatgactttatggagttgttgaccattcatagctgatgaaattccaaaccaagtattaagttcagatcttgttattgcacatctttatgtggaaaattctatgtgttctgtttatcaattgaatcattggggcttagaccaatatgatattccagtttcatgttttgtggtcaaagaatttgaatttacatgtgatgtttacaaatctttatcctctcaatgctttgtggtattactgtctagtcattgtctgaactgaattttcaataattagactgtaaagagctcaatcttgatcattttattggggatgttgaattaataataaaccataagaacgagtcggcaaggttacttgtgaattttcattttattttgttcattgatggccttaattttagtaatacgacaagtatgatattgatttcttctaccactcagattgca

SEQ ID NO: 66989 - DNA, 308 bp, Cucumis sativus
  Intron number 4 from transcript Cucsa.146320.1 (locus Cucs a.146320) derived from phytozome v7.0 (chr-ID scaffold0109 8; pos 1961 to 2268 reverse strand)
gccttcgcaaaggagctcgtatgtctctcggctctggctttttgtttgttttataccaaatgtttttgtacttgaattagaattagaatttttcttttcttcccctcctatttctggttttgaacttttcttttggtaagatctttgccaatctgttatccaattttttgagaaaaaatgtcaataaaagcttggattctttagccttaatgacatatcactctgatgtctgcctaatgagtaatgactgcctcttttacatgttctctgcagttttgttcttcgccatttcggccttttttgagctt

SEQ ID NO: 66990 - DNA, 786 bp, Cucumis sativus
  Intron number 1 from transcript Cucsa.163040.1 (locus Cucs a.163040) derived from phytozome v7.0 (chr-ID scaffold0114 4; pos 2490906 to 2491691)
cagctgctgcaggttcttttttccttttccttttgttttgttggggttaaatttcaaatttaatctctatagaaaattaacattaaattttgtatggtttaataaaatttgaactaatagtccaagaactatttatggaattttatcaatcagtacaaattttaaaatgggtgggtcactaaattgaatttagtaaatcctaattaagactttgtaatgttttttttcttctaaaacccgaagtttaaagtccaatccttagcgtttctttttagaaaattaggcttctcttcatgaaacattcgttgcatgggtatatgtttattcggaagctgaattgcatccaagtttttttctttttctttttgaaaaccttgaattcatagtaaaattttaataaaagaatgaaactttaaaaaattacttcttttagatttggtttacttaacttgtggttcttaattgtttttcaaaatgtttcttgtttcttcccatttttcttattgttaaagatttcacatttcttaattaaaaacattcgaattcttagtcagttttcttaagaaataattatttgagtaagttttcaaaaaactgtattcagcctgacaaacaaggaaactcataactagaagtagatatcctaaaatcaaaatgagaaataatcatcaaccataaagtttctctcctttttccttcctcattaagtctcaacaaacttacatcttacgattatatttttatggagcagctctagaattgataaagaaagaggaggtgcaagcc

SEQ ID NO: 66991 - DNA, 622 bp, Cucumis sativus
  Intron number 2 from transcript Cucsa.032150.1 (locus Cucs a.032150) derived from phytozome v7.0 (chr-ID scaffold0042 9; pos 1563850 to 1564471 reverse strand)
aatcgctacaaaggttgtgaatttgaatgttagatacttccattctatgaagacggatatttggctagtttaattataacatagttagtaaggggtggctttagatgaggttaatggttttacttagaaattagaagtcacaataatgtatctattgtcctcgttttcttcattgcttgttctctgtagcgaattttggctgtgataaactgataattaggtggctaacataattatcagactcttaaggcaactccccaaacacacacacacgtcctgatacctgtacttgggtcatagcatttttgttgtcttaatcctgcatagcctagttttaggcacctggcttgttatcaatcaaagaaaggatacactgtattggatggttgtattaggaagtgaaaacaatgagctaaacgttaagtcaggaatccagttccatcataattcttctagaagttttgctctccctttttgagcgtctgttttgcatctatcttttcaacatgtatcaaacatttgagtttttcttttaatgacatgaagatatcaagaacctttatatcttttgttttgcttgtgcgagctaggccgacaggagatacatttaacaacaaagctg

SEQ ID NO: 66992 - DNA, 496 bp, Cucumis sativus; identical to SEQ ID NO: 64806
  Intron number 1 from transcript Cucsa.160070.1 (locus Cucs a.160070) derived from phytozome v7.0 (chr-ID scaffold0114 4; pos 357983 to 358478 reverse strand)

SEQ ID NO: 66993 - DNA, 667 bp, Cucumis sativus
  Intron number 1 from transcript Cucsa.158400.1 (locus Cucs a.158400) derived from phytozome v7.0 (chr-ID scaffold0114 2; pos 528141 to 528807)
cttctcttcttttctctctctgagctttcaaacaggtacgccatgacagaacttcctattgttattttttttttttacttttcttttatttttcatgtctttcgtgtcgatttctatgtttctatctcttcgtttgattgttttggatgatgggtttgctttatgtttccctttcaagatctgggttgtggattaattttgggaatttcactaaattcttcattcttttttttttttgttgtgtgtgtgtgtgattgacttgctcttggtttgaacttcctccttttctatatacccttttgctcaaatattctgggaatctctcattctttactttttcttcacttttccccaatgttcatattctctccctttaaccacccgcattgttcatgctatagagacttagttttataatgaatatataacagtttacaattttgggataagcctgctagtgataaattatacctttggaccattaattataattatggatgtcagagtcatcatataccaagttggaacattttggttgggggttaaaggtgttaaaaaaagttttatgaatatgaagtgtaggggtagttgatatttcagttttctctaaacaaactggtggaacaccccaggtattttgctctaattcaagttttcaacatagaaa

SEQ ID NO: 66994 - DNA, 628 bp, Cucumis sativus; identical to SEQ ID NO: 62276
  Intron number 3 from transcript Cucsa.107730.1 (locus Cucs a.107730) derived from phytozome v7.0 (chr-ID scaffold0093 1; pos 49191 to 49818)

SEQ ID NO: 66995 - DNA, 664 bp, Cucumis sativus
  Intron number 1 from transcript Cucsa.112120.2 (locus Cucs a.112120) derived from phytozome v7.0 (chr-ID scaffold0095 3; pos 815147 to 815810)
cttctccggcgactgcaggctgcaaagcttccaaagtatacgccgtttatccgatgtcttctccggctagctacattcttctcttaatttatctatctccgtatctttaagaaggaggtactgttgtttgaattgtttcgatcagaaggagaaaaaagagggcattgtgatacatattagaattgtgaatattctgttatttcatttattcacaagctaaatgccaatttgaaggctggcttttgcgattgaagaaattggtattctggatttcaccatttatgacgtgagacttaacctcatatcgatctatctatcgatataatttttcaatcttcatatctgttagaagaaaaaatgctgatgcttagattgatggaaatgtagtttcgagtttcttttgattgttattcggattagatacttgtaaagttctggtttttatagttgacgattggtcgtgtttggttgacaaaatggacttgttctttgttcggaagtgacagagacaactctaggaactctagaaattgagttgtgattcaattttgttctatggttctaaatttctactatcaaatatcacattttatttatatgaattttattttacgttaatgccaaatgacgttttttgttatttatagtgtcttgaagcctaaca

SEQ ID NO: 66996 - DNA, 498 bp, Cucumis sativus
  Intron number 1 from transcript Cucsa.045550.1 (locus Cucs a.045550) derived from phytozome v7.0 (chr-ID scaffold0054 2; pos 1397060 to 1397557)
taatctccccccttcatctcccctgccaacacaaggtaataatacctttaaacatgttggaatgacttaggcgcatccaccgactaaagctttagagaaactacactaaataaactcttttttaactttataagcatcttgtattatgaattattctctctaataataaactattctccctccaatagttgatgtattaattaacacactcttagtaaaacacatgaatctctatctccgtctcttctgttttacattttcttttcatcttttgcaggaaataatagcaatactgttagaatagttataattgttgcagtctccatcgctgctgtcatcattctccttgttgggatttgcttggttctgaaattcagaaaaagaaagcagaaaggactagtactaagaaattttggaggtgagtggtttatgttacccttaattctacaaaatttctaatttgatatctgagtcttaaaccttaaactacatttttag

SEQ ID NO: 66997 - DNA, 704 bp, Cucumis sativus
  Intron number 1 from transcript Cucsa.150150.1 (locus Cucs a.150150) derived from phytozome v7.0 (chr-ID scaffold0111 0; pos 1099693 to 1100396 reverse strand)
atttgcaagatatttttttcaaccgcttatttcaggtaccccatcttcagattcgacgtattttatttaattttttaattggggtatcttctttaatcgatcttagttatgatttctggggtttatttttggagaaaaaatgtctttgtgaatgttttgaccgatgtgagattgaagacttgacgttttggtttctgtagttggggcaaaagatccgatggagtaggtattgtttggagatggatttttatgatcgggtatgaattttgtggtttagtgtaagccgtatgattaatcccaaggtttgatgtattttaatcgtttggtgtaactgattattaatgaatgtttagggggaaagggtagtggttgatttattatcgatgtggggttttcattttaattataaatctgggaacgaagggtttgttgtttgacaaggattatattgatgtcttggttctgagttacagggatttgtttcttgtgtcgcccccccccgaatctccttgtgtttattgcatgactagagttcacgctcatggttgtggtttttctctttgttgaaagccatcaatttctttctcaaaatttcctttgttcactttattttacatgatacatcagctggggtcttattgcattcagattttgaatatattgggcttatgtattgcaggttgctggggagcttgaaaatatag

SEQ ID NO: 66998 - DNA, 584 bp, Cucumis sativus
  Intron number 2 from transcript Cucsa.166800.1 (locus Cucs a.166800) derived from phytozome v7.0 (chr-ID scaffold0115 4; pos 159220 to 159803)
ttgaaattcatttgctcactgctcaaggcctgcaggtattacctttctttctcttgcttttgattcatcttttatgatccaattatagggaactggagatattttagtttcaggggttttagtttgaagttgaaataggtcatgtaaattgatgtagaacgttggagtccgtgtaaattactaaatttatatcttcatcaagttatcaataaccatggcttgttttgaaccatgaaaatactggctacttcttttggtttgtaatggtataaacttttgaaattgtatacaatttttcacacttcacgtgagcagtaattaaaagggtcatgtgaaagaaagaggtgatttatcaactttctaagttattcaccacaagtccaaggattgtaaactttgctagagtaagcatagctgaactggaaaaagtatatacgatagctttgaggttagaggtttgatccctccacctcatattgtaaaaaaaaagattggaaactctgattggttattatttcgaagttgtgtaccttgaattttgtcacatagctcatgcctcacttgctgcatctaccatgcagcct

SEQ ID NO: 66999 - DNA, 429 bp, Cucumis sativus
  Intron number 1 from transcript Cucsa.036150.1 (locus Cucs a.036150) derived from phytozome v7.0 (chr-ID scaffold0046 4; pos 132025 to 132453 reverse strand)
ccaaaaaaagtagaaataaaaaaaaacaaaaaaaggtgatttcaatccattcattcattcaacatatacttccttatatcaatggagaaaaaaataggtattgattaaaattccaataaatcaaaagaggaataataatcatcatgatgttataaaagaacagagaaatcgaaagataaggctttaaaagcaattacagaccttacaaaatttccgatggcaatgataaacctctaaatttaccgtatatgaaaaaggaaacaaaaattgcaattacagattaaggaaaagggagaattattcaatcgcataattaaaattgaaggagattatagaaatatgtaccaatttcagcagcgattgaagaattcaattgtagatttatggaattcatttgactctgactgtatcttcccacagctttattga

SEQ ID NO: 67000 - DNA, 663 bp, Cucumis sativus
  Intron number 2 from transcript Cucsa.049840.1 (locus Cucs a.049840) derived from phytozome v7.0 (chr-ID scaffold0055 1; pos 19286 to 19948)
caaaaaatgtaagctttcttcttcttctttatttccaagaacgtgggaagctccacaggatgaacttctcatgttcttttttccgatttgatcatatgcttttttttttccttttcttttggggttattagttggagtaaagtgaagttattgaatggtgaaaagaaacagaaaagttgtttcaatatgaaacttaagaatggaatgaattgtttatcagtttcagatttaatattgggtttgtattgattaaaactcaaggaaaaaaaaattcatcagatttacaaataaatgggaatgttatattaagtaaattaataccatataggggtaattttgtcttttcataccaactactgttttcttctattgagacagtttgttgtcttcttcttctacaacttcaagtttgttgatatgataaataaaatttcaaaaattcaatctcccgcgagatttgggacgaaattaattgatgattttcgaatcattccgcttcgattcagctacccattttttttttttgagaaaaattcatctctgagggttgattgaacgaattgattttggaaccaatggtgatagatttcgcattgaatatgataattagcatcggcttcgacttcagattgttgcagaaatttcgagtatatatccgaaaga

SEQ ID NO: 67001 - DNA, 611 bp, Cucumis sativus
  Intron number 3 from transcript Cucsa.158620.1 (locus Cucs a.158620) derived from phytozome v7.0 (chr-ID scaffold0114 2; pos 730055 to 730665)
ctaaacctcaacgacaaactcacaagttacttcaggtacgagttgtgttcctttttccattttgtttggtgctttgcgttgtgataattcattagtctatcttcctaagtagaggatgcatccttcagaggagatatgtaccgctctctgcttcagagattacttcttcaaaatttcgaagtaaagtgaaagggagagaaatgattgtaaaacttttcttacaaggtcgttgaacaaatactttatttggattctccctcttgaatatgaatataaacaaattgaaatctagtattagtttggttctttaagttgattgaataatcttattttgaattcattccagtcagatctacatcaagttaatcattttcaattggccaattgccaaattgaaaactgaaatactgattttagttttgagagaatattgcgtctgttggtagaatttgtcatgtcgatgataaccatggatcctccagcgcctacacataacgtgtatcacagatatttgggaagtatagtaaaaagattccatgcttttctttaaaaaataactcaacaaatatgttggctacctaactcaggtgcttggaggaagtgctcggaga

SEQ ID NO: 67002 - DNA, 738 bp, Cucumis sativus
  Intron number 3 from transcript Cucsa.086370.1 (locus Cucs a.086370) derived from phytozome v7.0 (chr-ID scaffold0087 0; pos 518135 to 518872)
tggtgcttatattgttccaaaaccacgttcttctggtaaggttgcccttttgcaattttgttctttcccaagaaaggggcctaggatttgctttgtcatgtgtaagatgatcattctagtgcagaacacatatattaaaagaaatgaatgcaacaatttttttatattcataagttcaatcatcataattttgcttcaaaaaagtttcaatcatttgatggcatgaaacacctgatcggtcatgttgcccttccacgcttgcccttttatgcgatctgcggttctagttctatttggtaaatttgatactgaataattggatataaaaattccgatcctttatcatgtttttaatcaagctggccttcgatcctacagcataactacaatatattagagatggaactgatgggttcacaattaatgctctaattgtatttttttgcatgcttgattcttgaaatcaagtctattaaattgatagtgaatttgaagaatgtagaaccaagggcattgtttttgggtattgaaatcgaaaaacagggtcagacgtagtgctcatatgtgcaatgtagtttacttgcatcatgcaaattgtctctttgttggtttcgataagatctctaaaccacaaagccttttcaactagtttaacgttcattgacaataaacggtctctatggttattattcacaaaccttgaggcttttgccatgtaacctgcagaacttgtagaag

SEQ ID NO: 67003 - DNA, 656 bp, Cucumis sativus
  Intron number 1 from transcript Cucsa.049900.3 (locus Cucs a.049900) derived from phytozome v7.0 (chr-ID scaffold0055 1; pos 65233 to 65888 reverse strand)
aggagctagggctgcatttataccttgcttcttctgtatgcttcgtttatgattgaattttcgtccattttgaaaaagcttattctggcttctgtctgtgcgtttaatttccatttctgtagttagaaatttctttgtggcgtttggtgggaacggggtggaaactactataatggtaaagttttggtataggcttattttgattgggtttcgctctctttttctgctcgttcaattcacgaaattgattggtattggtattgtaaatactgaaattgtttgtttaaatgtcacttgattgctagtaatttaaatatgacttcgtttgctggttccgtcgttaatttaggaactctcctttatttcttcggtctgtctttccctttcggatcgatgggatcgggtttgatttttaggagctaagattgctgtattgtttaatggttatatttgtgggacagcagaaaaatgatcttctgggttatcgtaaggaaattcgttttgtcgtaaataaatcacagttgatcttcccccctttttttggtgtttaatcgaaactcttgttgtgattacattctgtttattatttcaaggtgtaatttgtgactgtttatttcttttgtatcaggtgtcgtaggctgaaggaagggggacat

SEQ ID NO: 67004 - DNA, 603 bp, Cucumis sativus
  Intron number 2 from transcript Cucsa.032900.1 (locus Cucs a.032900) derived from phytozome v7.0 (chr-ID scaffold0042 9; pos 2158773 to 2159375 reverse strand)
tggtcctgttttctcacactcatctaatatactcggtaagttttgattttacgctgcaacaagttttgagctatatatttactttgtagaagtgctgtttgttgcctaaactcttgtaactgattttggaagtcatagcgagggggagttataggaagctatatagctctttttctagtctatgaaaaaagaaagtgaagtatttttagttggttttgtctttttcaattgagagagaaagctgaggagaaaactagaatttgaagaggtaagattgtgtgtatttttcggtctatccatcacagagaaggtcgtgtgtatttttcttggcatttcatcttaaatagtttgttcatgttctacattcattttaagaaaccataaaaaacaaataattttttaattcgttttttattatacatgtgctattttcttgatttggttgcttctttttacacttcttttgttgtttttcttcttgagtttaaatttgggaactacgaagtcaggttgtattcaacaattcatgtgttctctcgtcagatgaagtctggaattccttactgagttctctttggtattcttgcagccagggaaaaggca

SEQ ID NO: 67005 - DNA, 802 bp, Cucumis sativus
  Intron number 1 from transcript Cucsa.042620.1 (locus Cucs a.042620) derived from phytozome v7.0 (chr-ID scaffold0054 0; pos 992875 to 993676)
aaattgatcgatcaaatatcaaagctgtaattttcgtaagtaaaacttcaacactccatccatatgcatcaattacatctggtattttgtcaagagtattatttttataagacacgtgaatcatttctcacattgtctgaattttttaaaagccaactaagcgtagagatgttcatgttggtatgaaattttgtctaggccctggaatgggtgagagaaaatgattggggagcatgacctccccgctgcctctttttcaaggacatgtagaatctacgtaggaacccaagtatcaaaagaaaacctatgataatttatttactataggtaataaataaaaaaaaatacaaagatataaaagaagaaaaatatatttagagcaaattccctaatgggctaaactaattctaacagtatattattattaattgcacatttagatttatattatatataaataatttaataaaaaattatgaaaaatggtaaaatggacaaatataagcgtaataatttgatattattgaattgaaattttgagtgcaaatagcaaaactatgaatggtagtgaattggtgacttattgtaaatgaaaaaatggttgaaaattttacaaaatataaccaattttcttcaaattttattcatgaaaaaacttatgaaactctatctagtgatatatctaaaattttattatattttataaatattctagtttattttaccatatatattaatcttatattcttcattaattctctcccatggaaacccttcttttttttcttttttgtaggacttg

SEQ ID NO: 67006 - DNA, 257 bp, Cucumis sativus
  Intron number 1 from transcript Cucsa.086090.1 (locus Cucs a.086090) derived from phytozome v7.0 (chr-ID scaffold0087 0; pos 385758 to 386014)
gtgtttgccctgttagcacccatctgttctctggggtaattctcgatttccttgtttctctttttatttttcttggattttctaattctattttgtgataatcgggaactactccgaattgggattttctgtctttgttgagagttgtttgttgtgtgtttctcccaattcatatatgattaggaattaggatttggtaggaagatgatagggtctgaaatgaagtgttttgaatttgtattaaacatggcaggttg

SEQ ID NO: 67007 - DNA, 637 bp, Cucumis sativus
  Intron number 1 from transcript Cucsa.077160.1 (locus Cucs a.077160) derived from phytozome v7.0 (chr-ID scaffold0079 1; pos 298543 to 299179)
gaattccattgctgagaaacttcaaggcagatcaggtactttttattcatctaaaattttccatctggcctctctctctctggtttgaaattagaaggtccacccaaattcattaatttttttaaaaaacttctctctaatttgttcttatgatcaatttaaatttctattgatttctcaatcatttttgttttgttttgttatttttctctttaaccgatcgaggatgtttatgtgtttggagtaattgtacggaccaataaagttggtaaaataactaaaacaagtaaattaaaccaaacccacttaaaaaatagggtaaattgagtaaagggtttgtctttaaaaagggttaaatttctaaatttgttatctcaatttcataaatccttcaattttgatgttaataaagaaacaaaaattagcttattgttttttttcttcaataaactgaagtgagagattcaaataaaaaaaatcttttgatcatgtttgaaattttctaattttgttatactgaatatatgaaccacaaacctgaagatggtcgttagtttatgctagttgaagtatataaagctaatatggattggtatttttgttgtttgattttgttaggaaagagttgtagattgag

SEQ ID NO: 67008 - DNA, 809 bp, Cucumis sativus
  Intron number 1 from transcript Cucsa.175770.1 (locus Cucs a.175770) derived from phytozome v7.0 (chr-ID scaffold0122 5; pos 302622 to 303430)
atcctaatatcatccgattgttcgatattattgaggtcagtatttagctcttcaagttctctttgtggatgcttagaaaacatttagatggtgttgaaaagtttatgttttactctgcattttttttctcgaatttgtgtgcttttagagaagctttagataacatttcaaggataagaaacaagtttttacaagattgtgttttgtttttgttgaagttatatgcttccgagcacgttgcattgagaagggttgttcatgtttggggttccaatttgattaacccctgatgtggaaggcaggtggtcgataagaattttgggaaagttgctaattacactgttatttatgaatctttgcagtatgcaatagatcttgcatgctaaatataataatatggagtaggagggaaatgattatttttttcaagctgttcagcttcctcgctttataggtgggatacggagcagtttcttggctgacctgatttggtgttggataaggtctggacggtccaatgtgtgtcatcacttatagggaattagtattatttattttccgcttcacggaaatccgttgcaccagttcatgcaatcttacctggaacattgtggttttattttgtaatttgttatctgcgggaggatttggagtggaggtcgtaggaattggtgatttttgagcccttcacaatcttcatcagctgaaagagaaggcttgagagaaatttattgtattctttcgcatttcattaagagagttatctccattcaggttcctgggaagatacatctggtactggagtactg

SEQ ID NO: 67009 - DNA, 768 bp, Cucumis sativus
  Intron number 3 from transcript Cucsa.039090.1 (locus Cucs a.039090) derived from phytozome v7.0 (chr-ID scaffold0051 1; pos 9209 to 9976 reverse strand)
tcatatatcaggtactgatcgtacatttcctcttttaatcaaaagtgttataggatcaagtttgcattcgtaattgagatttggaacgatgtatgtacttctgtttccgtttatgaagtatctctctgcatttttgtaaaacttttcttccaattgagtggtacgacttgttttcggtggaatgcttgacacttcagtttgaggtatgatgaaaggagagatctttcatttttttcttgggcacatagagttgttgtctgttgactgtttcttttcataaaaaattatggaatgttgggtcaggacaaggaggaatgtagtgaaattgattaaacacagaataaaacctcaaattctgtatttacggatcaactgtttttaagaagttctatttttcaaagcatgattaagtttacagttgaaatacttttaatatgtaaatgtgatccaaatcgatgagaatatttcatctattctatttcttgctgtatgtcaaaacttgttgttttcaattgtttttctacttgtttagcccagtatagaaatgacttgaaagtacaatcaatcaaaataatgatttttttctctttcttgttatctatatttttctctatgctaggtgatacgtttgtcctttcttaagactaatcatttttgtattttgtggttttgacatgtcttagggtatctagatttactttctttggtgttcacatttttttgtacaaatcagtttgccccacttgatacagctgctgccatagacac

SEQ ID NO: 67010 - DNA, 812 bp, Cucumis sativus
  Intron number 2 from transcript Cucsa.058660.1 (locus Cucs a.058660) derived from phytozome v7.0 (chr-ID scaffold0061 4; pos 787962 to 788773 reverse strand)
gaacctagtcagtgaggtacagagcatagacatttgcatgatttgatattttcttgtgttctggcaatttttgttctttatagggagaaaataaaagaatttattatggccggttgcctgaaagtagacttgaaggggtacaaaaatgcagtccagtttaaaaaaatgcaaggcaccatttaatctattttctgcactaatgtttgtgaaacaattcaaatgctattcccaaacctttcaacaagatagtgcttttttaactctctgaaaatggaatgtattccaaacatatatgccatggttccttccttcgacagggtacatatatctaaatttgctatttttagatactttttcaaacctattgccaatactaagtagcagccaaaaatttgtatccatttttcatgatattatatatatcttggatcagatatatgatgccgaattcttcacgtactttcatctaaaaattgttcatcgcaatgtgcatttgaacaactccgacatgaataccaaatattttcagttacaggatgtgtttctctttcttgcatggccgtcataacgtcaaaaaagtatcttctacataaggtcgatgcattggtaatctgtagttgtctgtatgaatttgaactctaggtgtgttagtaagaattatctagccactcaatttggtcaattgaattactatttgtgagtaaatgacctaattctcttcctattcttaagtcctttgccttgcaatttccaatctgcagatgtgctgattattcaaattcatgtttttcaactgtcttatagattcttga

SEQ ID NO: 67011 - DNA, 648 bp, Cucumis sativus
  Intron number 1 from transcript Cucsa.058660.1 (locus Cucs a.058660) derived from phytozome v7.0 (chr-ID scaffold0061 4; pos 789036 to 789683 reverse strand)
aagcctgttgtttcagctcctttacccaattggaggttttgcttaatttttcttattcccttaaacccctcaatccccgttcatttttcgcattttttcccatttgtttttgtctgaaattacttgcaattccatggagttcgaacgcttggatgtcgagttttttatattttcattttgtgctgtactgcatttatactctatgtttaatgggtttctatcataatggtctgtgctgtacttaatgatttgttgtctcgtactatctcgttggagaactttttgttgttatcagattgtttcacttacggaagtcgaaagtagtttatttatggaatgttcaagttctgcatgatttctgatggggttttagtacttctggggaaacgttggttttcaaggttctttagggttcaatcagggctagagatagtaatttccattgggtatatgtgcaaagttctagttcatcacctaaatacgaaaatagggggaaaaggacaactatgcactgttctttttttctttgctgttgttgcatttgggcagatgtctagactaattttgatctactataatgattattgggtgtgctctgttgttcttatttcagtaaattgcaagcacaaacacattctattagttcca

SEQ ID NO: 67012 - DNA, 647 bp, Cucumis sativus
  Intron number 1 from transcript Cucsa.087980.1 (locus Cucs a.087980) derived from phytozome v7.0 (chr-ID scaffold0088 8; pos 431591 to 432237)
gcactctctcataagctctgaggcttcttctcgtatacaatattcgtgttctccctttgctttgtgccatcttgtaatcagctctcattttggggggttaccactgctttttactttgtcgttataatttcttggagggatgttgttgaatctctttgttgttgtaaccttttcggcggcaacgcctttcagattaatgggtttcgtgtaatcagattttccagttgctaaatgcaaaggaaattggaattgcttaaagtttgtgaatgattggcctgtctgttacacttgattttgaattaaatgtgttgtttttgtttgtagaggctggttatctatctataaaaactgtcgggctttttctatgagttctcgttttgatttgattttgaaatgaaatgtgttctttggaaaaaaaaaacttttctagaattgttcggaagcagagccactgtttgaataaatgtctgtaagaattatagggcgacagagggccagaggcttatatttatccaatcggttttgaagaagaaccgacgtgatccgactcgtttacatccatacagttgttggttttctttattcccactccaaatagaagcgtaaatctttcaaggtgtgatgcagtgaaaacttggaagagagag

SEQ ID NO: 67013 - DNA, 698 bp, Cucumis sativus; identical to SEQ ID NO: 63509
  Intron number 2 from transcript Cucsa.087980.1 (locus Cucs a.087980) derived from phytozome v7.0 (chr-ID scaffold0088 8; pos 432391 to 433088)

SEQ ID NO: 67014 - DNA, 747 bp, Cucumis sativus
  Intron number 2 from transcript Cucsa.045760.5 (locus Cucs a.045760) derived from phytozome v7.0 (chr-ID scaffold0054 2; pos 1486376 to 1487122)
attcatactaccagctttgaatttcattagctaaggtgtgcgttgactctctctcatacgtttctcactctgtttactgaattaatttatttatcacgtttcttattatttaataatttgtttgtgtattcacatgttttcctcttattttaatcgttcatgtatttgtctttgtactcctcgttttcctcctcgaaactgtggattctctcgggtatcttcacttcattttttctttctttgataacccattttgaaatacccatctgccaaatcatgttttgatgtattctcccgaatagaaaagcttcattgtgatttgtcatttttctttgatggggaaagccgtttttctcgactctgacctccctctcatccgtgttgaaaaggtgttggagtagtttgttgggttgtttttgctctctctgtttccaaaacaaaaatctcgagctgtgtgatcaaatgtttttggtttaacttgtggtaaaactcttaccagttatggaaatcaccagcgcccttaattatttttctgctaaaatttcgccaaatttgtgtagattctttttttacagctcattctttctcttctccaatctgtgtatttaatgatgccgttcacactccctctccttctaaatcatactttgcatataagaacatcaaatttctacaactctctgtcgtagtggtttcatcattttttttaagatactttgttttattgtttgggaatagggatctacc

SEQ ID NO: 67015 - DNA, 527 bp, Cucumis sativus; identical to SEQ ID NO: 62092
  Intron number 2 from transcript Cucsa.130140.3 (locus Cucs a.130140) derived from phytozome v7.0 (chr-ID scaffold0102 9; pos 98124 to 98650 reverse strand)

SEQ ID NO: 67016 - DNA, 707 bp, Cucumis sativus
  Intron number 1 from transcript Cucsa.114400.1 (locus Cucs a.114400) derived from phytozome v7.0 (chr-ID scaffold0096 2; pos 240376 to 241082)
cgagcagccgtctttgttctcggtatttctcttacaagaattacttcttacgtagttacgtaggtacaccatatcacttattaaattttgttcacgtagttgaacattaacgaaagtagtatggaatatttctcttattttcttttcctattctggatttgttttcttctctttgttttccttatttggaagttctcttcgaatgaaaccacacacgcacacacacaaaataaataaataaataataaataagaaaagacactaaagggtatggcttgaatcctgtaagggagtatattaaagttttttaaaaagttttcctctaaattaaacaatggcttgaagttaaagagaagtggctttctagctaccagtttggttcaaagtcaatggttttggcttaaatataatatacaatagtaaggcaatatatatagagagagagagacttaacaaaagttaataaaaataacatatggaaaaagtgagtcagttttgcttaataatatgatatggaacaatttagtaaacctgagcttatgagattgagaatggtacagatgtgtaaacgatatcttggcgtaccttttaatcacatcttagtttcttgttttgctctaaagaaataatatctttatgtcgtatttggttcgaagaaatgtgatataatagagtaactagctaattatgaaaagtggtgggcaggg

SEQ ID NO: 67017 - DNA, 833 bp, Cucumis sativus
  Intron number 1 from transcript Cucsa.132860.1 (locus Cucs a.132860) derived from phytozome v7.0 (chr-ID scaffold0103 7; pos 711761 to 712593 reverse strand)
ctcgtgctttcaagtatcgtggccgtggacacgaggttatcttctatttttcttcccattctaacttaattagttcatttgttcccatctggcatatatgagttttgtttgagttatatttcaacattgctgttcaacaacaaatggggtttcgaaaataatatagtaattacagtctggtgcgttctatggtctacgtttttgttacgaattcgagcatcaaaggaaacagtaaacgtaaatggtagaataatcgaaaggtggttcactaactattttaacatcatctaagtgcagtggtagagatcaactatattatcagagataaacgtcggattacagattatagagagcttataaagtctatatacagtgcattaaactattctaaaccttagagccaaaattgtaaataatataaatatgaatacaaccaacacccataaaccccaatctaggcttgtagacccagacttattgatcggttagcgagatccagtgattggtcattcaaagcagcaagtaaaaaattaagacattgctgtataattagaaacaattttaatgcgcatacatatttcaatgaagaattgtttgagagagcccaagcttcgtcaggggaaatcggtacttacccgtaatggtttgtttattggaaatccggtttcaaacttttttccattgaattatagccatgtgtatttcatcaacaatgtgtacgtacatgtataatttttcttattacggtgtcgttgtctcatccattgtcattttctaatgatttgattattgcactaatcgagatatacttttgactggtgttttgcagatca

SEQ ID NO: 67018 - DNA, 889 bp, Cucumis sativus
  Intron number 1 from transcript Cucsa.170070.1 (locus Cucs a.170070) derived from phytozome v7.0 (chr-ID scaffold0117 4; pos 349870 to 350758 reverse strand)
tccaatcactttcagaagggtgaacccttggtaattacctactgagattgtttgatgtgctgttaaataattgaattgaatggttgattattacgtcgtacttgctttcgagtaattgtctggagaagttctggaattggtttgccttaagaatattgtaatttgtttatgtggatttttcttggcgattcaaactcagccggcttggtgccgagaagcttaggcagtatcttctttactcaattaaagtcggctagttaggttttcgatttttatcgttgaaaattaaggtgattagtattcttatttttgttattgttgattacagaaatgatcctaaagcttccatgtcatgcgatactaagcttagtgtaaattactgcattgaaatttatgtgaagtactcctacttgttcttccgttcttgagttctctcctttattatcattttgtattttttcgatgggtaaattcatgaaatcagatgtgtgtcattatacatgtatgttgtacgtttaaattgaaaaatatttcattttctttattctgattaggaaactctaagaattttaagaatttagatagatggctaccctcgagtttgaactcattccctctgactctcttttatttttcttcttttccttctcgagtctgaatgaccttagccaaccatggtgaactgagagttatctattttgatgttcaagcagttcctcccgtagatagtaaaacttttctgttcttaacttcttatgataaatattatataggtttttgttttacttctagtcatgtttactgtattaattttctatctatttttctacttttaattatatatcctgtaaaccccccccccaacggttgcatcatttttcttcaggat

SEQ ID NO: 67019 - DNA, 916 bp, Cucumis sativus
  Intron number 3 from transcript Cucsa.147570.1 (locus Cucs a.147570) derived from phytozome v7.0 (chr-ID scaffold0110 7; pos 19930 to 20845)
aaaggtagtttctgcttcatatggctaattaattcattcatttgtctaattgataatttgtaatctctaactccagtttcatgttaaaaaacaaaaaaaccttaagggctggggagagagctcccccacccaagaaagtaattaacaaaaagctttccaatataattattttgataaagttactgtggtgcaatggataacggatccctttagaatttaattatcagggtattaattgaggagatcgtgctatccacctcacaaagccaaaggattaatatatttagtgatggtccttttctgatgcacatcttttgcttggtctggggtttagctttagcatactcctttgtcttccttttccagttatatgatatgattaagttccccccactttgtagggtcatattcttctgattccttttcagaaaagcacatgtatatgtaacaaatgaaattattttgtaacagttctcactctttttgacattcttttcttttgaggttgtctgtgatgtgcggaacatatcatgcttattttgactaattatacctaatgtcgttttacttttttttctcagtaattgcatatcttacagctttcttcaatcttcagctatcataactcattctgagatggactaatttaggaagtaataatggctttctaattccctattggtcgttggagtgaacaatattctaagtggagtagtgggagttgcattgattgtttgctttgacttctttactttgatggtccttttttgtcttcatttaaacttcatgttctctcgtaacataacattagcattttcttactggccagcttgttcccatattttggtttcaaattgcatgatatctcttcttgtgtgcaggttggaaggactggttttctgtgattcttggtagt

SEQ ID NO: 67020 - DNA, 961 bp, Cucumis sativus
  Intron number 2 from transcript Cucsa.128900.1 (locus Cucs a.128900) derived from phytozome v7.0 (chr-ID scaffold0102 8; pos 54394 to 55354)
agaaagacattcacaatttaagacaagagattgaggtacccgactaattttcttggtattcctagtgtcacggtcatacttgtccaagaagtgtttcacatggccacatgcccattttaaccttcttttatcatgctttcatcatatgtattttattatgcaagtgactcctcgccattttcatatgaagggcaatagtcacaaaaatgctcataatatactatatgggcgtaagataaatcatcataccttcatacctaaagttataagctattaaggcattgttgtcactttttgctttctagcctacaacaactttctttctcaagcatgcgttcaaacatttgcgatttttttactctaacccaattttctgaagccgttttctccagaaatggggtagaaattgcaaaatatgcccattgtgccaactatttgcattttgattggttgacctgttcaaggacaagaacaagtgccacccaatcgctttgagactcttaagaaagtgcgatttgacacctggcattcgcaatctgtaattttgttaacatgtctttgttgtgattatatttgattgctttttttgtttctcttggttcccaattgatctgatgaaagaaatacttcatagcaagtaaattactttttggtgtatgtaacatttggtcattgttgtattggtagagagaaagtcaaggtgctacgcacactactatttttgtactttatttcttaaaataaggaatctaaggtgtttggcacactccaaattttctatttagacatacgtacttttctctttatttataatatttcctatttttacgcaaccatgtatgataagagaagaatgatcattatgtagtgacaattgagattaatctttactccttcatttcttccataaaattaaggtatctggttgtcataatattgcagatattaagaaagctgaagc

SEQ ID NO: 67021 - DNA, 698 bp, Cucumis sativus
  Intron number 2 from transcript Cucsa.093990.1 (locus Cucs a.093990) derived from phytozome v7.0 (chr-ID scaffold0091 9; pos 217775 to 218472)
atagactcctggcccaccaatccacgtaattataggtaactaaatattttaattttccatcccccacttatttttcgcttcctgattaccatatgaaaattttagtactacacttacactagaaggcggttcaaggaaattcaactcgaagataccatgaaaccattaaaccgccaaaagaaaagcaccgctatacatatgctgccgcctttgaaccagatttccagctaaccaatgttgcttttttagtttatgctaacgtttaatatggtcgaagagtcagaatttttctaatgcatacgcagcaaaagatattgagggatacttcttcaatgaaccataaatatgggagtcctaatgcacaccattaaatgacaatcaaaacatgacaatttattaaatcaatctttacttgcagacaagagtcgcaatgcacatacgaacaaacatatcgacgtctccaatgaaaatatctatatcaacggatattctaaaaaaataaaaatacatcactgaccccctccctccctccctccctcccccctccctccccccaaaaaaaagactgttacttaatctttagctataagaaaatattttcttcagaaatatgtccttgtgattatatgtatgtatgtatgtgtatatatagacacacacactatatatatattatctacacccgtttcagggaaaag

SEQ ID NO: 67022 - DNA, 313 bp, Cucumis sativus
  Intron number 2 from transcript Cucsa.116570.1 (locus Cucs a.116570) derived from phytozome v7.0 (chr-ID scaffold0099 5; pos 469489 to 469801 reverse strand)
tgcagattcttgagcttggttccaatagactgcgggtttgctctctaaatcttttgttaaaaaaatttcacatatcaattagtctaccatatgaattttatctgtgttttctagcaagagctgtattctttatatgcaattaaagactcaatgcacatggtgaatcaaaaaggctttaaaataatagttgattattctctcctgaagaattaaacaaataaaacttttgtttatctccactagtctttttttcttttcgaagatctttggataataatactgtgattgaagtttctaccctgcttcacaggta

SEQ ID NO: 67023 - DNA, 1029 bp, Cucumis sativus
  Intron number 1 from transcript Cucsa.059080.1 (locus Cucs a.059080) derived from phytozome v7.0 (chr-ID scaffold0061 4; pos 1172263 to 1173291)
ttcttctctataaagagctgggaaggaggcttaaggtattcatcatgaacttcagaatgaattgtttctgtcattttcaaattgaatgttcgtaaatcctgttcatagctgcactgcttgttttgacattgttgtgattatgaattgtgttttagcgtacttatacttgaaaattcatcaaaatttctttgagaagagttttgaaaacaaatgtgaagactagacagctattgattagaatggttttctaacacttcattgattccaattggataatgattttgtttctggttttctaagctactttcataattttttttaaaattattgttaactgttcaatattttttttaaaaaaatagaaaagtaaccgtttaagattcttttttttcttttcgaaattggactaagattacacccttgtttaaaaagtgataaactaaatgtagtttacggggagaaacataaatattgagactttataaaatactaagaagtgctaggttctatactaagaagtgctaggttctatactaagaagtgctaggttctatactaagaagtgctaggttctattcatggtggctacctatgtagaatttaacattcaatgaattttacatccaaatgttataaagttagtcgggatgtttggtgacattagtcaaggtgtgcataattcgctcgtccactaacaaatttaaaagaaaactactatatatctagacacaaaattaagtgtaacttctagctagaccaacattgctctatggtaactgattttggttatgtaagagaattgatggtatgccatttaaatgcatagtttgtcctctgttctattgttcttattatactgcagaatggtttctgaagttcacttcgaaatagcattttctcccttatattatcttgagcaatatggatgtagaatatatatatatagatatatatttatttatctcattttgctgattgttttaatgtgcatcagaaaaccaatccagtggtggctgagattttctctct

SEQ ID NO: 67024 - DNA, 667 bp, Cucumis sativus
  Intron number 1 from transcript Cucsa.065490.1 (locus Cucs a.065490) derived from phytozome v7.0 (chr-ID scaffold0069 6; pos 210479 to 211145)
caagaataggtttggagaactttcaggacgcttaggtttgttactgctagtgtatttcccctttgggctctgatttttatttttgctacgttacttgtgcctgaagcaaatacttattgaaacagaattgtctaaaatgagctggaactcaaacatcgaggttcattgcatgaataacggttatccttatagtactgcttcttttatggaatactttgaaggtcttacgtatgatcatgtgaatttcattttttcgggtgcctcacattctcaggtactataaatcttttttattttagatgctctccatgaatgtcttgtctggaagctggacttatagaacttgtggcatttaaatgctgctttatctttaccttatagacttgattctctgttctgtagattttttgacaattgtctcaagtaaaaaaggggaaatcatgtgacatttcatcttctaactacttttggcttctcaactatggccttttcattttgctttaacttcctgatgcatgcttgatttgacatttattctcaagatcaaagggtctttatatctgattttcatgattccaaattaataaacttattttcccgacatggaagtataatattttaatttcattcaggagactgtttgttcatcaactaactcaagttacaa

SEQ ID NO: 67025 - DNA, 973 bp, Cucumis sativus
  Intron number 2 from transcript Cucsa.065490.1 (locus Cucs a.065490) derived from phytozome v7.0 (chr-ID scaffold0069 6; pos 211327 to 212299)
gaatgtaagggttaatgcctgttttgtttcaagcttttgaatgaacactatagtatgattgtttgttaaacagaagttttcaaatagtatgattgtttgttaaacagaagttgtcaagttaaggtaatggaacaaacattcagatattgaatgttacggttctataaaatcacacgctgcaaagaagagatacttattgactctttatttagattatttttctcagttcatgaatggaggcatttgtaagagaaagcagttgatgtcatccatttctggtcaatcgacaaacttcatttttaggctgtttattatttctctcagttcataaatgatagtgcaatatggttctgagggttttcttatgctacatgtagaaaaattggcttgtgccatattagtcatgttgtaagatgggtaacttattcaatgcacgaaatcaaatttagggtgacttaacgagtatcttgtagatgagatacaatctttctcagttcataaacgataatgtaaaatatgttcatttgttttcttatgctacacataggaaaatggctttagacgtagtagtcatgctgtaaagtgggaagcttatttgatgcaacaattgaatttggggtgatttaatgagtatcctgtaaatgagatacaatcgcaccatccatttatacacatatcttctatcatatttcaacgttaacttgtaattacttggtgcatctcattttaccaagtactgttctgttgtagtattaactatcctgctaggtatagtaccaaagatatgcacaaaatctaacagcaaaatcataatacagaaaaatcctattttatatcattttattactcatgattgtttgctccttttcttctttctgattcaattataatgtttatggaaatttaaataccagttcctaaactccgtttttctttattactttttcaggccctcggaggcattcaaattatc

SEQ ID NO: 67026 - DNA, 366 bp, Cucumis sativus
  Intron number 1 from transcript Cucsa.043160.1 (locus Cucs a.043160) derived from phytozome v7.0 (chr-ID scaffold0054 2; pos 73091 to 73456 reverse strand)
tagcagccccaacatccttttgtaagcccaaactcaattaaatcttccccttaatttatgtttgtttttgcaatatactcatcgtctttaatcattatcatatgcatgcaaaatacatcaagattcaatctttactatcctttttttagcttaagaaaaaaaaggtcatctttatatgtttgagacatgatgaataaatgcatctcttcgtggttgatgaggatatgttgacctagttgagatatctggatgaacctccttattattttttcttgagtaatataatttgttctcaatttttttggtacatatacatatgtggttcatgcagggaaggaaattcctacaataacccttatttagtgg

SEQ ID NO: 67027 - DNA, 739 bp, Cucumis sativus
  Intron number 1 from transcript Cucsa.083930.2 (locus Cucs a.083930) derived from phytozome v7.0 (chr-ID scaffold0085 8; pos 614778 to 615516)
agagagttgactggtaagagctcaagtgttttctcttgcaagtctgttttctttgaattttgcagtgggtagaaatacagagccttgaaaagttcaaatttttctttgaaattaacacttaaagatattaggatttaaaatacgagataatttccaaaaccaaacaccatccattgtccctctcctgttgcaacttatgcaaggaacattggaaaacctcagacaagtatgttgtttccttcctggtttcgagtcacattctcttgaaaggactttagaagtttgtgatcatcaatctttctaccaagggttcaaaggcaaggggagcgtccttttgggacaacatgatgaagcctttttttggtaagtttagaagcaaaacaatataggaaatgtaccaaaacttagaaaagaaggcatctgcttgagaaaatttggttctgactccagcatgttggttgagattttctttgtgcttacaacttaatgtgcatatgcaacatctggaaattcttgtcttaacttccttgttctttccctcgctgtttcctttaatcaatatttgcatggaagtttagtttcttattggaaaagaaaaattaccgaacttgctcttggaaacatgttggatagtagtagcagggtaacttttgtcataacttctcagtttctcaggggaatagatcattttcttacttgtgcaggggttctattagttgttcccctagatctagcaatc

SEQ ID NO: 67028 - DNA, 697 bp, Cucumis sativus
  Intron number 2 from transcript Cucsa.019350.1 (locus Cucs a.019350) derived from phytozome v7.0 (chr-ID scaffold0027 6; pos 203652 to 204348)
cctcaggtgattttgaaatttcctctgttctttttctctcctccattttggaattttgtttcagaatctctaagtgagtaagttttatttcatgggaagatgttgttggtctgttttattggatcaaattatgaattttggagattggtttgttgtgaacttgtgggctctaatggtttatctgcccttttgatttgatggatcaaatgttaactgtttgagtcggaatggctgtgacttggctcatgatcgcacacggaagctataaacctttataactttcatgtcatagctgatttgggatgtgctgttaaaatagactgaaaagtttcgaatcagtatcacgaatagatccaaggactgttatattggttttggttctatagaacagtggttgcattgatataatgatatgatgtcgtggtattgagtgttatggatcccgctatatgctcttgcctctcattattgattctaaaatttttgaattctcaaagatggaatttgcttcaatgactttatgaagttccaaaattacctatcattcattagctaaatcctttgatgaaaaaacaaaatttgctttctttgctagaattcttttagtaagcgaacatccatgaggtcttcgaatcttcggtgagattgaattggctgttttgttcaataattcatttgtcttagggagggattgaag

SEQ ID NO: 67029 - DNA, 975 bp, Cucumis sativus
  Intron number 2 from transcript Cucsa.191640.2 (locus Cucs a.191640) derived from phytozome v7.0 (chr-ID scaffold0133 0; pos 18159 to 19133 reverse strand)
aggggctgacatttactcaagaagtaaatccggtatgtttataccttttgttttgatggaatgttttgagatgttgagactcccacgttggaaaaaccaaggggactcacactccttataagatagatggattactcttctcattaccaattgattttgaaatggaactccatactattaaatagaatgctattttaatcgccaatgatcgtgtttttcttgatatggattgtccatttggttagattagaggtgttaatactcatcattctactgaacagtgtagatcgatagagttttctcatttaaatttgttaaacaactttgttttttgtacgagtaccttcactttttatacttgaacactatctaagcatggcatttctatattgcatcatccatctctatattgctactgcaggtatcagatttcgttttgtttcttacaatattttagctcaggtgaggaacactttctgactcatttcattctttattcttaagttcagttttacgcttctgttgtttgttaaacatcctttttcagtcaataatatataagcagaaatgggttgctcttgctccatgtgacggaacatcacaagttctgttcttcatggattcaagcaacttcctttttatttgaatgcattttttatactattgaatctattgaatataacccatagaccttgatgatttcgtactctacttttgatgaaaagggcaagccgtagataaggttgatatattttcctggcatgccagtcaaagataattaatgctattgggtagatcttgtggaaattttcgaaagtccaacttttgtagctcatatgaatcttaatacatagtcaatgacaggataatgttcatttctatgggtgccatattcaattggacttattgattctgtttaagatattggatcacattgcatattgactattgtttttgtattccctttgtaggtct

SEQ ID NO: 67030 - DNA, 591 bp, Cucumis sativus
  Intron number 1 from transcript Cucsa.069330.1 (locus Cucs a.069330) derived from phytozome v7.0 (chr-ID scaffold0071 4; pos 146729 to 147319)
gcttgaacaatagttccggcggcacttcagatttggtacgctttaatttaattagtttcttgttcttcttctttagattttaatgattcaatggatcgtaattcactcttttgctccttttttaataattttttacttggaaaagtggcgagtgctgcaaattttcgtagttttagattcatttgtttacggcatttttttgttgcctttctggatctccaaatttctctttcttctgaactttaaacaagaagtaatcagaactttggactgattgaatttgatgacgaattcatctttgtttttctcgatttagaaatctttggtaggattgttttagatcttttttggacaaattacaagaaccacctaatacaattacacctcaaaactttaaattataaaaactgacgatgtatctaattttaatatatctatataagtttgagattaatatttaatttttgtgattttctttttgttgaagttaatatatggttttactcctattatatttagaaatttgttcaaattttttatcactttctctagtagataataatttattttatttccttaggttcaatattg

SEQ ID NO: 67031 - DNA, 921 bp, Cucumis sativus
  Intron number 3 from transcript Cucsa.069330.1 (locus Cucs a.069330) derived from phytozome v7.0 (chr-ID scaffold0071 4; pos 147957 to 148877)
atagtggcaccactgccttaaccgttgttaaacaggtaactaattagttcttaattactacttaaatttttaaaattgaacctataattaatgttaaaagtttggttcccgtaagtatatgatttttgaaaattaaacatatatatttacttgtttgtttggaaagagattttagttcataatatatattttttaaaaattgaaaatggaatgattttgaaattagaatttaaaattaaattttacttattcaccattctaaattttaattaacatatcacagttaaaaatgtttgtgttagtaaattactgatactttttctttttcttctttttgttatcattcaaatatataaaatttgaaatagtttcatttcaacactctttgctggttaatttaaaataaattttatgattttaaattattggatttaaaacaatttctcaatctttttgaatctaaattaggatcaagtcttaaactaattttaaaaaataaacaagaaacaataaatctagtgaaggagagatattcataagcttaatatctaaaaactaaaataaaaaactcaaagaaccattattttgttgtgtaattcaaatatttaaaattatgggtaggttataaaagtatgagtagtttttaaaattttattttatattttagaatttggttgaaaattctgatcttttaattaactgtgcaaaattttagaattacatgaaataaaatcaaaaccgttatcaaacaacactttgaagtctttgttaatttctatgttgactaattaatcaaccaacgagaattttgtttgcatttttaatagacactattttctattgacttttcgagtttaaatttgattctcagttgtttttggtatgaatctaaatttcagggtcgacatcttgttgttgcaa

SEQ ID NO: 67032 - DNA, 742 bp, Cucumis sativus
  Intron number 2 from transcript Cucsa.179800.1 (locus Cucs a.179800) derived from phytozome v7.0 (chr-ID scaffold0123 3; pos 174547 to 175288 reverse strand)
ctttgctcaccattgtctttcgttgcttcttgaaggctattgagctttttcttcataccattacgataaacatttcttatcaattatgaggattcttaattacgattctcaattttccatttgggttcaacgtttatattacatttctttttgttagcaattagtcctaaaaattccactaattcccatagaactagaaaatcatctagctaatttcacttgaaaggatgctgctggtgaatgatgacgggggatgtggtttgctttttgttgggcagtggcaaggaacatatgttttttcgttatatctgatcaaataatctttgcaaatgtcaatcaataatgaattgtcgttcatatgcacattttctgaattaagggaggactgagtaacatcgggtatagtttttgtcatgatgcaaacctgctgcattgttgattgtctcttgtttgttattttttgtatgttttttcccctcaaataaacttgtatttataagttggagaactacacattttccatcttgagattatatgaactaagaaaatcatactatttttggactataattatacaatagttgcctccatggacggtctctgcatagatgatcttcttactaaaagttaacaacatctgagattcttttacatttattctgttctatccatgtatctgactctaatctgatttgtttcaccgacaggtttcagtatttaagtcggtttggtcatattatta

SEQ ID NO: 67033 - DNA, 552 bp, Cucumis sativus
  Intron number 1 from transcript Cucsa.178740.1 (locus Cucs a.178740) derived from phytozome v7.0 (chr-ID scaffold0122 7; pos 1096597 to 1097148)
caaagctggtatagaattcaatttcactaagttgtacgttaaaatatgatattagttttcagactatactagctcaaaacagggttttcttagctgttggcttttttcagttttcaactattcttacccagtagaccacatagaatttgggtttttggttaaaaaataagagaagattttaaagttatcaatagaaatgtcgaaactgctactatactacagatacttagttaccttgaccgaaattatgtgttgaagtggttggtcattttaaaaatcaaatctttcattctcttttcatcactatttttgttctgttcaccctcttttttgcctcttccatccataattaattctctgatgttccaaaagagcaaggtatgtgtgttggtgcttccagcgagcttgataatttagctgtaactcgtgcaaggagaggagtaaaagggaaattcagttagattttgaccacataattgatctaaacaatctggatttgctgcagttaccatcgttgctaagaactatcaactttaaccttttttatgtaga

SEQ ID NO: 67034 - DNA, 357 bp, Cucumis sativus
  Intron number 2 from transcript Cucsa.105350.1 (locus Cucs a.105350) derived from phytozome v7.0 (chr-ID scaffold0092 9; pos 78344 to 78700)
gccttgcaagtggtggcttcgaggtcacctacctggtaaactgatttgatttctagtcacatcttcttgtttactctctctttttcttttttttttctgttttcgactctgttgataatgtaatagcatgactcattaattggtaaactacttcctttgtttggatgaattgtgatgagaattgggtactcgggaatccttgagtaggaattcacgaagacataattgcatggaataaattgagtagaacaagtgttgggaggggtttctgataagttttgattgtctgagtcagttttaattgactttcattgcagactttttgttgaaatgctgcagctctacctgctgatacca

SEQ ID NO: 67035 - DNA, 1013 bp, Cucumis sativus
  Intron number 3 from transcript Cucsa.075540.1 (locus Cucs a.075540) derived from phytozome v7.0 (chr-ID scaffold0078 9; pos 203357 to 204369 reverse strand)
aagaggcgtttggacactgagcggtaaagtttcttgaggtctttttagtttatattatgcagagctttttatacatcacaattcacaattatttaccacagttaacaaaacaacaacaatcactttatgattttcaatcaagttttgaattgaacctgaattcagcaagtattaaaaaattgggtcattccatttatttatgtgatcctcattgacccaagatgatatgtgttatatattatttgttaataatctgacagtttatgtggtatgatatagtagtaataataataaaaaaggtcaaaataccttttcaatccttgtactttgaggtccgttcaaatttagttccaatgctggtccaattttaatcttgtatttttaataaatattaaactgcccttaagtttttttttttttttggaaattggctatataacaacaacaatttttatgaatgtgttttcaaaatttattgtaaaaatgttatagcaaatttttttttcagaaagttcaaccataaactagtggtaggacctcaatttaagatttcttgaaaattacaataactaaaattggacattggaaagtatcttcaatgtatagagaccaaaacaatattttaaaaatggattagttctttcgtagtctttgttcagaattccatttcatttgatacacttaagtatcaactgctatatgtttaaaatgttgagatagttgctatttatgttattatggtaccattaatttatttgttaccggttctatatatgtcatcttacttataagctagtaacaatctagatgagatctgctgtttgtttatttcattctccattctcttgttattgtggaggctgtgtgctgttatacatctgttctctaatctcgttgggccgttgctctgccgaatttcttatattcttgcattgaaattaaatcgtaatagacaacagaaaatatccaagttgcaatggttggcaggtttatcgaaggtgacttcggacagt

SEQ ID NO: 67036 - DNA, 652 bp, Cucumis sativus
  Intron number 1 from transcript Cucsa.124850.1 (locus Cucs a.124850) derived from phytozome v7.0 (chr-ID scaffold0100 1; pos 685519 to 686170 reverse strand)
ttccttattctctctccttcaaggtatgttcttcctttgccgctccactgaactcgaacccatttgctcgatctagctcgttttcacgagctccaaccatcgcgccatatgcgcgaacttctctcataattgaccagaggattagcatttgaactttagactgaatagaccatagaatcgagaaagtcctgtagagaaatctgagctcatcttccatttccgttgcgatgtctaaatcaacataatcatttaaaaagaagaagaagaaagaacccctcgcctttagtcgtaggacgagaggcccacaacagctttattcgtggggtcttaaaaaaggaagtgagcataaaacataaacgacagtagcctatgtaggaaatggaatatctttaaaatacaatagttacaaacccaaccctcataacggtaaatcgttacgacggaaataatcctttttgtacactctttaataatacaattttcagattgcgcttaacgttttaatgaaatgctattgcttctgaaattaaatgaggcactgtggatgtgatactattatagttgtatgatgttgaaggattgtgttctttctttctgattagtttttgactttttataaaacagaggagcttgagggatattgctgaacttt

SEQ ID NO: 67037 - DNA, 446 bp, Cucumis sativus
  Intron number 2 from transcript Cucsa.100750.1 (locus Cucs a.100750) derived from phytozome v7.0 (chr-ID scaffold0092 7; pos 42521 to 42966 reverse strand)
ccttgcagaataccatattatttgcccctagccaagtattgagatagttataaggcaaaaacatttttttttctctgttacaagtaaccatttgcactaatgactggaaatgtgtattgttcattgaatattgcatcttcatttccacattttcttgtttctaatggccatttgttatggttatatctttgtatcatgtggacgcttgctactgagtatggttttcgaaacttgtattactctcaactattattgttggtgctcatacttcaagtgtgatctcattagtcatcatttagattggttagttatataggcattttttccctttttttgttgtgctaaaaaaatgtatactccactatacttaaattcccatttgccacctactttgagttttatacattttttccatggacaaatcataatgttgtgctaaaagaacc

SEQ ID NO: 67038 - DNA, 683 bp, Cucumis sativus
  Intron number 1 from transcript Cucsa.006340.1 (locus Cucs a.006340) derived from phytozome v7.0 (chr-ID scaffold0006 7; pos 255442 to 256124 reverse strand)
agattgttcccaatcacaagcgatcccatactacggtacgaagttaataagtttagtctttcaacttttcaaaaaaacaaaattatcaattccttctttcttaaaatttgatttaatttgtatgcatatctgattttgacttttgatatttttggaaattaagtttatgattaaacactagctacacttctttttcttattctttacaacttaaaaaattagttcaaacccattttccacagttccagctaatttttagttttttataattttatttttcatcttccaatttaattgtggatccaaatgtttcttttataaagaaacggtcagtaaataaactatcatttaaaaaagaaaaccattaaatggttatcaaaatagagtttatatatcaaattttaaaactaacctattggaagctcaaaactctattaagatcgtaagatttaataatcttttcaacgtgggatctttactatgacgcattaagttagattagtgtttctttcggttcaccgtttttcggtggaaaatccatttttgggtagtggtttcgtaaactgtaatatagtaggtaaaacatggagtgagtgtttttgtttattgataaattgttgtgaagtgactaagaggggaaattttgttattgaaaattgaaagggagagagcagtgggagtgt

SEQ ID NO: 67039 - DNA, 1017 bp, Cucumis sativus
  Intron number 1 from transcript Cucsa.091240.1 (locus Cucs a.091240) derived from phytozome v7.0 (chr-ID scaffold0089 4; pos 2256372 to 2257388)
aatcccacataccatttgtcctgcagttccttgtaagtagctttatgagtttcaacataattataaataagagatacattcagctactttgtgattggtagactagtggatttcatccagcttcctgatctagttgtaatttagtttctatgtttgtttgcctcccttgttctctttcttgttcttttgggcgtatgtgaatgtgcatctctttcatgtggtatttgttaactggtatgcttagtttttactccttttagttattgtggtggatgtggatgtcatcgtggataatccactggaggtataagctcaccgtcaattcaattttaccattggttttattgtcttggtctcattaaagctcaatagtggaattatagcaacaattcactataaagctagttgaatgaagtctaagctagctgttaacttgattttatattagctttttatcttgttctcatcaaggctggagaatagttctataacataacttagtcaaaattatgttgaagtatcaagtacttgacttgcttttgtctaatattgcacctttcacaattatccttgattttattacttactctaagcactttgcttatcacatatataaaatattatattatgtcggttattttaaggtacccatcttcaattagtgtatctccattagtgtgtatcttctattttgctgtgatcatcagggtattgtaagtggcaaagtgaccttgctgccacgatccactgagattcagctctttgtcgctccgattcaaaaaatattttgctgtggtcaaagccatttttttttcttgaggctatcatacctgtttttgaaatgcaggttcctacattgcttttccctttgttttgtatcataaatatcttctagtaaacagttaagcattcacttcatttggtactttggaagctttatttttttaatctttatttgtgtagctctagaccttttggatctgatgtactgtttctgctaggttgactataatttgt

SEQ ID NO: 67040 - DNA, 878 bp, Cucumis sativus
  Intron number 1 from transcript Cucsa.084750.1 (locus Cucs a.084750) derived from phytozome v7.0 (chr-ID scaffold0086 2; pos 412970 to 413847 reverse strand)
atctctccgccgtcctcgaatatctggccgccgaggttagtgcttgatcttcaaatctgatcttttacccgtttctcatttgtttgtcttatagtgttgttttccgatcacttgaatcggagttgtcatattttatttagtgtagttccttcttcttaggctctggaattgatttgtagaagagaaatttcatcttctgttgatgatcagtacagaagtggatgaaggtttgtaatgattttgaaatcagggattgggattgcatgaaattggagttactatcactgctttcagaatagttatcttgagctttgaattgtgggcttctaattggttattagtttaaattcaatgcaccttaaaatagttttgcttactgaattaggtcgtaaagcctcaagataacttggttgtttctttatgttacgaaatcaacaaataaaaaaaagcaaaaaagtgaaaactgtggagaaatcaacacagtgtgttggttatgttcctgagcagagggagagatcagattttatttgagagtatcagagtcgcaattagtgttagattgtttatatagggcacccctctaaactataggactaaaaacgtaaatagcataaatacaagtacacattaggttttgtcgacattgtctttgggccccttttgaagtgcgtcgctcttgaactctggtttactaactagtcagtgagaagtaattgatgttagattacacattcaaggcattctaatgctttagatgaatggagtttcatttgaattcatcccgatagtttcttaacgataatgatgattttgttttgcatttgaggtagcaatatatagtaaaaaactccatttgtaggtgcttgagcttgcaggca

SEQ ID NO: 67041 - DNA, 231 bp, Cucumis sativus
  Intron number 1 from transcript Cucsa.011380.2 (locus Cucs a.011380) derived from phytozome v7.0 (chr-ID scaffold0015 4; pos 639438 to 639668)
gacggtaagatatcgagtctctcattcccccacttgtttttaatcaaatttaattgattatgattttgggtttttgtttctaagttatggaactgaactctgttgtcagctttagttttattgttatgaaaattgaattattcagattcatgtgttgtaaacttgttttcttccatttgggtacttgttacagcttcgcttttttgttttctttttcttacaatttaggtg

SEQ ID NO: 67042 - DNA, 697 bp, Cucumis sativus
  Intron number 1 from transcript Cucsa.175480.1 (locus Cucs a.175480) derived from phytozome v7.0 (chr-ID scaffold0122 5; pos 157357 to 158053 reverse strand)
ctcgtacttaccactcccagtgtatttcctcttctctcttttcccttttttctactttttattgtgttctcaaggactgaaattgttctgatggtttggttgtagtcctttttcgagaatggaaattctgggttgctgtttttgtttaattctgttgaattttgctgattttttttggatgggggacagtttttggtgtagaattcaactgggtttcgtttgaattttggtatttgtatatttatatactgtttggttgtgtctggtttggtttgttgtttagttgaggttgaatttatctttctgttatcttcatggcacagtgaaggaacttcttttgtggaatgtatgaactgtgaagtaaattttggccaagtttttgttatggattgctgtgtttagtcagtcttttccctgaattttatttccattctgttctcttcttatgatcagtccttttatcttacatattgaaatcattttttagatactataaagaagaaggctctgggaagctaataaatgaagcacatatgaactattggtttgtccttgaaggcttgaatttagcagtgagtggatggaacaatgcttaaaaattgtgggagaatatagtagtagaaagaagaaattttactttgaacttacttgtaaggctatacaataaataataataataattaaaacaacttacttc

SEQ ID NO: 67043 - DNA, 978 bp, Cucumis sativus
  Intron number 1 from transcript Cucsa.102970.3 (locus Cucs a.102970) derived from phytozome v7.0 (chr-ID scaffold0092 7; pos 1879420 to 1880397 reverse strand)
gcggaagtttctcttactttattctcttgcctcaggtaagttcgatgcattactcttgacatttttttgtaaagaaaactgacaagaaactgatcgtttggaattgtggaattcatctaacgagcctctgtctggcgatatgttctcttttgtaatttgacctttttctagactattttctcttctttaattgcatttcttgttaattgcctagccgaattgagtaaacgtaaacttctccttcaattgaggggtgtggatgtggctatcggttatttgaatctctcctctttacttttacagtaatggaaggcttatggtcagtatatggtgagtttgagtttacgtatcgtggagttagcagagagcagatagtgttgtctctatgtgttggatatgcagcttctctcttcgtcggtacctttttgggcattctatccgatttgatgtaattttaactcgattcttactcaattaccttcttattctgaaatgtcgtcttcgtctatacgacagcatgtacaagaaatgaaaatatgttgctggattctttttctagttaggcatagaattataccggctactctgatgtgtcgaagaattttgtttacgcagtattccgatgttagaaactcagacattttttggtgaaggaaatagtgatttcacataatttataagctcctcgttatgaacatttggatcggacaatgtagttttatttttattttttggaacaaatataaaggaaaagatactgcagtctaaagaatttcatcgttgtttttcagtaatcatcactttctaggttgtcaccttgattcctatgctcactagagagtagaaaatctcctccaatccaatgctccttttcaaatttcactactgagaatttatttgtaaatacagtgcagtagatgatgctgttcctctgatagatgattctaatgttgttgtagaggtcaaaagaaaatctgt

SEQ ID NO: 67044 - DNA, 508 bp, Cucumis sativus
  Intron number 1 from transcript Cucsa.010580.4 (locus Cucs a.010580) derived from phytozome v7.0 (chr-ID scaffold0015 4; pos 11443 to 11950 reverse strand)
tttggttctgttagatttagatctggaattgtttggtgggttagtcctcactttctttgctcaaaagctttctacttttcgtgtttttgaagttttttcttcattctctttctcttcaagtcgtcgtaatttggtctattcattcttatattcaattattttcttcattttttttaatacccatcttataaattcctatataaaaggcattgctagcaacttagattttccaagcagctgaattgaagcttagaatttggggaattcactttgaagggtttgggtttttttttttttttcggttgtttttggtttgactttgttgcattgcatttctaatgtgatacattctttattttgcatcaaatccaagtctattgtctatttgagtttttggtttttatactgagaaatttcaaccattttggttgggttttttgtttttgaaattcaattgtgatgtttgatgattttgatgatccagtgtttgaagtgaagatctgaggta

SEQ ID NO: 67045 - DNA, 807 bp, Cucumis sativus
  Intron number 2 from transcript Cucsa.122440.1 (locus Cucs a.122440) derived from phytozome v7.0 (chr-ID scaffold0099 9; pos 659064 to 659870 reverse strand)
gctgtttcagcaacagacttgccttccagaaagtagcttctttcatatttctcttgttttcttgtttttataagatttaaatcacataaaactgatgcaaaaacttgattctgaaggactttgagtattttggttgaattgtaatgataacactcaagaatataatgataatgatgacttcatgctcaaaactgtcttgcatacatatgcttctttcattctaattgcttgtccttgagatgctgaattaattctaataacttcgaccctggtcactgcccatattctctcaataacttttgttttccacgattaatcaaactagttaaatcttgaaatgaatttgagctggttagtgcttatccccagaagaaattaagttgcactatttcctgaattccttctgataagaaatggttgaatttgtagtagctcgcagctatgcatacaagtaaaattagtagtgtgtactgttatgggacccagatcttttcaaaagctagtcctatcattaccttcttgtatcaaatgctatatatatatattttttaattcacactattttttgttgtttgttgcataatcattcttctaaattgactctacacgatatagcggttaacgtgttgatattcctgatgtgtggaacctgcaaaatatttgttttgttatcttgaaggcaaaaatttgagttatatgatgagaattcaagttttgccttttattattcttctgagactccatctttctaatttgagtattggtatttcagggtgaaaaggttccctttaatattggaaaatagga

SEQ ID NO: 67046 - DNA, 622 bp, Cucumis sativus
  Intron number 1 from transcript Cucsa.102300.1 (locus Cucs a.102300) derived from phytozome v7.0 (chr-ID scaffold0092 7; pos 1328782 to 1329403)
aacaagtcgctgtgaaagtcattcctaaagcgaaggtctgctacctttttccccagtttttcaactaaatttttgctactcactctgcataaatattatgtcctttatgattattgggtgaagggtgaatcacttattatgtcaatcttcatatttacatgcctgtggtcatgcgatctggaaaaattattgatatcctccttagtatgcttagtcttctccttcatacctaagaatcagaaatcttctttggttttttggagaattgacttcatagatcaattcttttagtctcagaatcccaattggttggaaatctatgactttcagatccattttattttgaattttgaagcttacattagtatggtgctaccccacggtggttgactccaccaaaccaattagaagtctagaacttgaaattgccgaaacgtttttgtggaccgggaactagtaacagtttcattacgcttaacagttcaattttatcttatttgaagtagaatataatttaatattttgatcttgtatatcgatgaaaatctgtggcattctcttgaattgggcgtctggttacttgtttctatttgactgatcctgttttacgaactgttgacag

SEQ ID NO: 67047 - DNA, 591 bp, Cucumis sativus
  Intron number 2 from transcript Cucsa.006170.1 (locus Cucs a.006170) derived from phytozome v7.0 (chr-ID scaffold0006 7; pos 34626 to 35216 reverse strand)
gtcattgatcttcattctcaactaggcaacaggtttcttttgtttcttactttttgtttcttcctttttaatctttttagctctcttcccttttctttttttttttcttttctttcttctttttggtattttttgggacaattggaggcttgagccatgtggtataatcatagtcatggaagaatataatgtagtcttttttctcaaaagaaggggcaattttgactttttacattttctataaaggggaatggaaagagtggatatctctaactactcagaaaaactcacccatgttttacaactttttaagtggcctgacattgccaacctcaaaatatcattactttcatcttcattaatttggaaatatatatatatatatatatatatatatttgtcacccattcttatattttgacaaactaaaatggagagactttttcttatttaataaattaaacattttaaaagaagaatattatagtggtaggacagtaagtattttcttatttttaatcataagttgaactaaaaatgattctcacctacactaacaaactaatactacttttcttcttcctgttacag

SEQ ID NO: 67048 - DNA, 599 bp, Cucumis sativus
  Intron number 1 from transcript Cucsa.016780.1 (locus Cucs a.016780) derived from phytozome v7.0 (chr-ID scaffold0023 2; pos 79 to 677)
caaagttgtttcctaagaatcgtctgctctcggaagtaagcaattttgttttcttagtttcaaatttatgtgtcttgattttgttacgaaaggaagaattatcttattgattgagaagaaacttagttcaatagttgaattcttatttcctgtttaggtatcactcttgagagaccctatgaaatagatattattatgtggacaatttttccccttatttctaatcttttatattttcatatgatcttgatattctctctttgatttgactgatggttgcatgaagttgaaacgatgtttttgagtatttcggatagaagttatatgaaaaaggattgagaattgagggcttatgacttattcattagactaaatcccttctgatttgccaattgtgcaattccctctatgcaattagtgagcaatggacgcttctgttgggcataagcataggaacattatcatctttgattttcttggctttcttattgaactcaagttagttgttctaaacaaaagggtgctttccaaatctgttttactactcgtttcatggaagcattttgttatactcttagacctttaatcttatgtgcaga

SEQ ID NO: 67049 - DNA, 516 bp, Cucumis sativus
  Intron number 1 from transcript Cucsa.093850.1 (locus Cucs a.093850) derived from phytozome v7.0 (chr-ID scaffold0091 9; pos 129537 to 130052 reverse strand)
agcaaaaggtttaaagttgaggactgtatagctgttgaagatattgatgtagtgaaaaatcatcgaaggtaagttctagtcacttacatgtgagttgtggctcttagttggatgacagacttagacgtgattttgaaagggttagagtcacttgattcaatatttgattttacaaatttgaatgtctattgttgggtttgggagtatgcagttgatcgacgagaactatttttcttgatttaacagacgaaagctggcttcaaaaactcggtcgtcgagaggacaggagatggcgatctgtgaagcgaagaaaaagatgatgaagactaacaatccttcattcatgttgatcatagaggagagaaacataaagaagaattatgcggtgaagctccatacacttttacaagttgtttaagttaataatacattacagcaaaataacgttgtgttaattaccatctccatggttgtttgacagtacattccttcaagttttggcaaaaagtatctgag

SEQ ID NO: 67050 - DNA, 814 bp, Cucumis sativus
  Intron number 1 from transcript Cucsa.096620.5 (locus Cucs a.096620) derived from phytozome v7.0 (chr-ID scaffold0091 9; pos 2168246 to 2169059 reverse strand)
cccgctgccgccgctcgccacattttcagtagtgggtaaattttggtgttttcttataaattctttctggaatgttttttaatacccactaagatttggtttgatggtttggattaagccacatttggtcaaaatttatttggagaccgttacattttattttgtgtttcggaactagggagctaagtttgattatggttgtgttaggggctttgatccaagattactaaatattttggctgaatttcgaggtaggtagctttacgcttgttggatattatattaaactgaatgtccgtgaccaagaatccttgttgttgatttaagcttttggtgatttaggatgatattcatttacatacgatgatatgttgtgagaccccttatgccatgcacgatgtatgttagttcaattagtgacaactgtcctcctacccgtagctatgcacaccatacaaaggtttgtgttcctttggttcacatgataacagttcaccagattgtacatctcatctaccgtatgactggtttcattgttcactcagatgaccttacatgttacaattaggttccactagttacagacattcagttgcatctgctttcatagaccgactccagtagtggaattatgagcaattcgtgacttactgaatatatttattatccttgcaaatagtttccaaaataccctacattttgctaatattttgaacaagaatcctatttctgcatttaatccgtctggaagaaattgataatacatcattttccattctcacaagggttgattgaagcgttgaaataacataca

SEQ ID NO: 67051 - DNA, 719 bp, Cucumis sativus
  Intron number 1 from transcript Cucsa.058990.1 (locus Cucs a.058990) derived from phytozome v7.0 (chr-ID scaffold0061 4; pos 1103052 to 1103770 reverse strand)
agagctaaggttcatcttccttattctctttgtattctttatcttaagtttattatattctctcaacttttgcaattttctcgctgttgtatgtatggtttgatgatttaaactactacttgttattctgaggttgcatttaaattacttgttaatgtttttggggtttatgattttgaaaacaatttatgttgttttttttttttttttgctgttatcctgggatgcattttggtgttcgagagtatacttcgtgttttaggtctagcattgtgatggatgtgtatgtaacttcgtaattgcttttgtttagtcttactaaaccaaattctacctatttattttagggtttccttctgccgatatcataatatggtgtaggtttaatgtttatccccgatattgcgaagtttaaagggttaagattatataaaatcatcgtagaattcgcgagcgttttgttgttttttcttttgtttttgccttccgtacttcggaatcttcacactcgtgttttcgaagatttttaccttttttatcttaattttgagttcataagttaaatatttatcatatgcttccggtgaatggttgttcatgtgttttttctcataaatcatgtgtaaattgagatgtattttgatttcgtcctcttcttttgggtataagttcttactttttataatgggggttgtgaatgccagtggaagaagaagcgt

SEQ ID NO: 67052 - DNA, 789 bp, Cucumis sativus
  Intron number 1 from transcript Cucsa.184620.1 (locus Cucs a.184620) derived from phytozome v7.0 (chr-ID scaffold0127 4; pos 284887 to 285675 reverse strand)
tcctctcaatacccacttccccacttttcactattgtaagctccttcccttccccccccttctccaacttctacaaacttcattcattccccaacctttttctgggtttcatgttttttttttctcccttctctgtactctttctttcctttcctggtgtttttgtttttcttttgagctctttgcttttctctccttgtttatggatcttcaattcttcaatgagaatgcttttttttttcactttggggtttgccttttttttttagctactgaactatgtcatttttactaatatctttgttaatgtaatcaattacatcattttgaaagtgggttgatcgaatattaacaataacaaaccatgggacttgttcaattctgattcatcatggaaatgtgctttcttttcacttttttcatctgccaattacaagacttctctgccagtttatgaccctaaatgctttctgtttgtttcattttggaggattttggatgaaaaacatgggtgcattttgtctagttgttgtttttgtgaagacgctactgatccgaaactagtccatgtggttttttttttttgataatgtgttgaactaaaacgctaaaaggaaattgtgtgcaaattgtacgaaattttgttgaattaggaagtttgaatgattgaaagttccttatggttcttgtttacatagtaatgccatgttacctttcgttccctgctgatccttcactgtgaaatgtttggttactgactacaatctgtttgatggttgtccacacaga

SEQ ID NO: 67053 - DNA, 947 bp, Cucumis sativus
  Intron number 1 from transcript Cucsa.105550.1 (locus Cucs a.105550) derived from phytozome v7.0 (chr-ID scaffold0092 9; pos 174743 to 175689)
ctctatgtaagtacaattcattttctatggcagcaaaacgtagtttaaatcagtgatcgggttgaacgcatcggaaaattgaattcccgttctgacaatcaattggtcaattgagcggtgagtttattggaaaattactgattcaagctagcatggaaccgatctggtcgtggttgtcaattgtgataattaactcgtgtgtgacctaattatctttatttcttgtgttcaagtggattatcaattgaaaatgagtagcatattatatgagagatttgagctccaattttcagttgctgtcgttacattgtattggagcttggaaggttttgaaatttagttgccttttgcttggttctcaaagtttgtaaatgtatcttaactttgactctgggtggtgtgttaagtagttctaactttaaaaatatttaatagattcttaattttcaattttgacctatttatgaactttttaaattcatcaatcacatacaaaattgcaaccatagaattccatccgacatagaatttggatttgtatctagccgatcagttacttcttaaaaaattcggatgtattagatcccttaaacacagaattgaaagtttagggacttatgaaacacctagatcttatcggacacaaagttgatagttcaaggacctatgaaatattttgaaagtagggaataaatggacacaaacctacaatttaaccttatattttagtccatcgattgctttacggagtttaatggaactagctgggctataaaaatgaatccattatcgtcttatgtctggaatttgtttatttctccgtctttccgcagtgttgtgtagtcttcatggatttttattgcagctgaaattagattacattgtacattttaatgcatctaacatatttatctttcaatagagaatagaggacaagggaaaggaat

SEQ ID NO: 67054 - DNA, 490 bp, Cucumis sativus
  Intron number 1 from transcript Cucsa.105210.5 (locus Cucs a.105210) derived from phytozome v7.0 (chr-ID scaffold0092 9; pos 12052 to 12541 reverse strand)
tgcatctctttaggtggagctccgaccccgaccaggtattcaatcattttgtttcacttcatttcagattataatttccctgttcttcgttattattcaatttttttttttactaatttgaagtagcaatcatacaattagttcttgccaaatcactgattctgtatattgaccattcaaattttttcatcgatttccattaaataaataataaactaattaggccaggaattgacagatgggggaactggcaactgagaagcatgttcaatacatattatctgttgaaaaggtgcgtttcccatttatggatcttgtgcattttagggacttttgtcatagatcactttgaaacatgatattgcactttgattcgtgatttcctgtaccagtagaattgtttgtgaatgattaaaaaaatacgtttttgagtcatttcaaaatcactctttctatctgtttattctattgttttgtgtacagaaaaagg

SEQ ID NO: 67055 - DNA, 767 bp, Cucumis sativus; identical to SEQ ID NO: 62983
  Intron number 3 from transcript Cucsa.098580.1 (locus Cucs a.098580) derived from phytozome v7.0 (chr-ID scaffold0092 3; pos 525757 to 526523 reverse strand)

SEQ ID NO: 67056 - DNA, 822 bp, Cucumis sativus
  Intron number 1 from transcript Cucsa.098580.1 (locus Cucs a.098580) derived from phytozome v7.0 (chr-ID scaffold0092 3; pos 527127 to 527948 reverse strand)
tctctctctctctctgctgtcggactgcaagggaggtatgaattcttattcaaaggttagtttcgtatttgaatacctgctgttttacatcttgccctttcgttagttgaattagctaattcttttgccactttctttttgggtttgttcttgggttggggattggttgttggtcgtatagttgatttctgttggtagcggggtaaattgatgaggaagcttaaacattagcatctttaagtcttgtgctttccggttttatgtttccttttaccagaatgtgcggatttttccctggtgcgtgtgggaattatgtagttatttagttgacctacgagggttgtcgggaaacaatagaggatatgttattcggatactggaagctctagcttctgcctttgaatgttgtgttgtgtttcgtcaccgactccatagtttgcctttgtgtagttttggtttgttttgcggcagtgcaagaatgtttgtgtaggcaaacttgataagcttttgttagatgcggggtaggtagttgtctttgtgcactatttaggttacatgctttcagcggggatttgtggtcatgatgatagtcataattattcagctcccccaactgtgtagttatggagattgtgattcattttgtcaatatgggctaactatgttctttattgtcaaattacattctgtatcaatagttggataggtttgttttgaattcttcataaaattttgtttcattattaatttatttcaattcctctgtaatacagtaacaataggtatgtttttatctttgtttgaatcaggtgcattgattaa

SEQ ID NO: 67057 - DNA, 473 bp, Cucumis sativus
  Intron number 1 from transcript Cucsa.078550.1 (locus Cucs a.078550) derived from phytozome v7.0 (chr-ID scaffold0079 3; pos 932485 to 932957)
ctaacttcaccacaaacctggcactcaagatcaacgtatagatccgtttcaatggaacatttaaaaatgaatgaatcttatgtatgaaataaatttaatacaaaatctatcaactatagaatgacaacacacacaaagccttaactcgaaaatagaaacttaagcacaaaaaaataaaaagaagcaaataaataacttgaagtaacaatttagaagagaggagttcattaatagttcgctaccacgatctaaagtctcagagaaggttcactcacatccaggttttattatactattgggttactttggagatgtgaaaattttcaatcttcaatcaggattttttttcaccaaacctgattttttttcattaattgatgattcataatcagataagacaaagtagggtgtactgataactgatttgattctgattccaaaacaattcaattttttgttacaggtatcagctt

SEQ ID NO: 67058 - DNA, 770 bp, Cucumis sativus
  Intron number 2 from transcript Cucsa.160590.1 (locus Cucs a.160590) derived from phytozome v7.0 (chr-ID scaffold0114 4; pos 748327 to 749096)
ttctcttagcattcgttgagcaggtacttaactattattttggctcatcatctgaagttgtgaatgcaatcctaaaatcaatggtttctttagtgctgcaaagtgttagctgcatggtttctatgttctaccttacctgaaactagggattatagtcatgagacttggagaatgttcggggttgatttttaaaatcaccctaaaataacattataatcattcataattagtttagatggtatgaaaatcacttttagaagtgtttcaaacattgaattaattttgaatgattatagacatgtttgagggtgattttgattctgattttgatttagacaaaactgattttatccgttctaaaatcattcttaaacgtattcttaataaatgcatccttgtcacaaatgattgtgtatgtatgactactttcactgctgaagctttaaacacctcgcacgaactttcaatcctcttgataaaacgtttttcacatattctaacttgatatgttgagatatttcttcatcacattgatgaattctgtttagagactgattgatttggctacttgtacaaaatacaattccagattaacattttaagagaacgattgatttgtgatgtgctcaacggttatctttttcctaagcgtaaataactaatcctaatcttaagctaggattaacaattgcttgtcctttactcttaataaaacttacagaagactgattttgaacaaatgtcataacatgttttgcagctcgataggg

SEQ ID NO: 67059 - DNA, 747 bp, Cucumis sativus
  Intron number 2 from transcript Cucsa.099160.1 (locus Cucs a.099160) derived from phytozome v7.0 (chr-ID scaffold0092 6; pos 48962 to 49708)
aacggtgtaagtttcttttctctctcaatttacgatcggaactgtctcatttcggtgaagttaaaagtaattatgcaaatttgtagattggaagaataggtggtgtgaatttaacttgtttgcattgatattgggagataattcattagatgtagctggattttgcatgcttcacatttcactatattcatatttctaaagtttaatcttttgttgattgataagttgcaggttttgtttaatttatatggagttaacttgacagttaacgctagtttttccaaagtaatttgctgtcgttaatatcccatggaaatgtaatgtaacttcacagcataaacaataccttcgccatttagtgccaatctgagcagttggtttggacaaaacatagactaatgacctagagggtcatgacattgttgaaataaaatcagaaaaaaaaaaaacttttgatgtaggaaatcttgtatccgttggattcttttattttctttagttcttgaagatcatctttgtttattgcctagaagaatttactctttggtaactttagctttataggtggatgctttcattcaaagggcattcatctttttatttttgacagaatcaataataagaatcattctccactttctttatatcatttgccatttagtacttaattggtagattacctacttgtaattttagtataactctctttccctataacaggccagttgctacaagctgcattttggt

SEQ ID NO: 67060 - DNA, 844 bp, Cucumis sativus
  Intron number 1 from transcript Cucsa.132340.1 (locus Cucs a.132340) derived from phytozome v7.0 (chr-ID scaffold0103 7; pos 322976 to 323819 reverse strand)
ctccattcctcgccttactttgcttgacgattcaggttctctcttcttcttttctccatttcataatgctctgtttttttgtttttctctatctctctctcagttctgttttttttcttcagtttgttcaatgatgagaaaatgggtttctttagattgttttttacttttcttttgtgggtttttagagagaaaaaaattgggaattttattgttttgtaatggtgacagagaacaaaacagagagtactattttccttttgcgggtttttgttgtcatatgtctgacattaaagcttttagtttttctttttcttttgggctttgtgggttttcgtcaaaattgtacagaaaatctctgttttcttttttttctttctgtttatgtgaattctgagttaaagctgcaaaactttggaacttcttgattttttttgtctctctttagattctaaggaaaaaggctactacattttttgaaattccataagcctatggttgtgttgatacttcactttactttggtaatattcttataaaagaattttagttttgctcatgttggcaatacgtttgattatataacatattttgttgatttgataactttttcgtattaagtttttttatacgaaattattgccatacttttattcttcaaaagttgtgtggagtaaactttaattttgaaaatatgaacttagaattggttcatgttcatgaagaagacaaatgggttgaaaaagaaatgtgaagcaacaacaatggagttaatatcactactcaacttaaatcctttcaatttacagctaccgagacccgatacttaaacgcaagcgaccga

SEQ ID NO: 67061 - DNA, 411 bp, Cucumis sativus
  Intron number 1 from transcript Cucsa.124160.1 (locus Cucs a.124160) derived from phytozome v7.0 (chr-ID scaffold0100 1; pos 191934 to 192344 reverse strand)
cgctgtgattcctcaatttcaactcaaagtcccaggtgggtttttgtttttatggtgttttaatctttcaatgagggaaaaagaattctgggtcatgtgcattgttatgaacattgaatgggtatcgtttattttttttagttttgtttagaatatctttgagttgggtgcctgttttattctctgaaaaattgtgatattttgtgcaatttttggatttttgtttagaagaaatcttattttttattatagatgtcagattctcatctgggttggtgttgtttatgaaaaaagctttagatctttgtttctattttgcatctgtgtttctgaccctcgtcatatttgcttgatgggttttgaaatctctcaaaaggttggagcattttgacatttttcgatcttgctcat

SEQ ID NO: 67062 - DNA, 481 bp, Cucumis sativus
  Intron number 3 from transcript Cucsa.123010.4 (locus Cucs a.123010) derived from phytozome v7.0 (chr-ID scaffold0100 0; pos 310205 to 310685)
gagaagggtgggtactgggtaggtgtttgtttgtttgttttgatgttgtggattctccattttgtttgtttgttttttcttttcttttctttttactctctctataggattcttctataagctttttgtgcttatgtttttgtttttctgattggattgattcggacaggctgatggggaaagttgcatcagataagtgccataaatgggttttcaaagaacctacagaatgcgagccaaacatttcaaattactggcaaagttcatttgatgctgtatgcaaataacaaagaaaaaagagaaaaaacaaacctacttctgatacattttgataatccatctagttttttttttagtttttgctgttgattttgatttgttattcatcattcataccagaactttaatgggttcgtctttgtttttctttgattgctaacttgcagcttcctcccgagtggactgatcagtttgattcagg

SEQ ID NO: 67063 - DNA, 649 bp, Cucumis sativus
  Intron number 1 from transcript Cucsa.065420.1 (locus Cucs a.065420) derived from phytozome v7.0 (chr-ID scaffold0069 6; pos 142871 to 143519 reverse strand)
catgttggtgtggggtttgagagctctctaacctactggtgtttatgtttatgagcgtacatgtactatgcactaggattggaactcaaaattataataattatttctattaagatgatacccaagtggcccttcttttttaatttgtattacgaatctgcatctacttcgatatcctgccatttcttggcattattatgtcactaaatataaataaaactgatgtaatctcttaattaaaacaagcttaattatatggtagtttaattagccaaagtactagttcttgatcttttgatttgtttttttacttttggtttgtaacaaaattcgttaaagagtgttgtataggaatcacttttatgaaaagcaactgattaacaacttacaagagagaatcgagtagtaactgttgggggagaaaaagaaggcctaaaaggattgttaaaaaaggcgcaaaatacgcttctaataccaacaagtccaaattctttcctataaattccaaaagacaacaactctctttcttcaaccttcgttcttccttcatcttcttctttcttttgaagcttttagatatggattcgtctcatccatcgtcgtctccaccggagcttgatcttcacactctcagacccatcaaggtact

SEQ ID NO: 67064 - DNA, 755 bp, Cucumis sativus
  Intron number 2 from transcript Cucsa.075940.1 (locus Cucs a.075940) derived from phytozome v7.0 (chr-ID scaffold0078 9; pos 463130 to 463884)
tacgaagaaacctgtgccaaaggcctaaatattaggtttgtttttcttttaaattatgaaaaaacatactgcttttgttgcctctagtacacgagcgacgcaactttgtttggattgtttcttcaattactgtcactgttgattccttcacagttttcagtcacaacataaatggtgcatatgtgaaatgacccaaactattttaaattgaatgctaagagtaaaccttgatatattattctaaataagagaagttgagtattttggtttttgttggagtatgtgggtttagttgatagaatggcgctgggattattacgttccccactgtggactggatcagcagtaatagtatcaagctattgtagttcatatatttgtaagtttaggagttcaagttttaatgttatctctggatatttatcctccggttttcttagctttaatattgtatggttatgtaactcctacaataagattatcatgcattgaagtgggcctttaacatctcaggtctcaacttggtgtattttctgctttaaaattttaattctgttgctgttgcatgaacctcttactatgtttattctttgctcctcgttgacatcatttctcaggcttttccttacatttaaatgccttgaagctgctgcagctttagtattttgagtgattaattttgataaagttgtgcttttgtttaaccttatttccccaaaccatgagcagtgtggaagaagcaaaacagaagattt

SEQ ID NO: 67065 - DNA, 495 bp, Cucumis sativus
  Intron number 5 from transcript Cucsa.067090.1 (locus Cucs a.067090) derived from phytozome v7.0 (chr-ID scaffold0069 6; pos 1501365 to 1501859 reverse strand)
ttaaactttatacctatcaggtatttgatagaaaataattgcagtagatttgatttttctatctctatacctccttgtggtaggtacaagttacaacttcaagagagtttgcgtcattcgagttagtgaatgaaggtatgaggaatgatagtttgtgaattgagattgtaaaatttggttgaacaagtttggttagttctgttacagtggccactccacactgtgtctctatagtatagaaaatgatcatatttacactcctcttagtggaagggtttttgttccattttcttgtcgaattatttgtatgtgacttgctactgaaggtttctgctaatgtgttaggcttctgggaagcatatgtttttgcatgtaacaatgttataagttaataataaacagcattttggtttccagatcaatattatgtggattttattgtttgataattttactattagagtcttatgatcatttgtcttttatggtgcagat

SEQ ID NO: 67066 - DNA, 782 bp, Cucumis sativus
  Intron number 2 from transcript Cucsa.012800.1 (locus Cucs a.012800) derived from phytozome v7.0 (chr-ID scaffold0016 4; pos 561097 to 561878)
cttgacaccaaggcaagttcgttgtcgtatttctgcatgttcaatattattggcaacatatgttttcaccgataaaattttaattttgttggaaatcacaaatagtaaccatttgaaaatcacaaattaaacactactcaaacctccaacttttttccttttattatctatattttatcaaaatttgaaaactaaaaaggtagtttttgcttgtagaatttggctaaaaatgcaaccaatgtatttaaagaagatgcaaactagtgtaagacatcagagaaaattggcttaattttgaaagaaaagaaatgttaccacaacggagcctatattttctacttttttttctcaaaaggaaacaagataatattatatttttattctctatctttgccctgctaaaacgagttacagtttcgactgtatcatgggttcttaactatatttcttaagttttgttccattctgatatgcactttgttcttgtgccttgtgctttagcttgttctttttcattagtattattttattatttattttgaaattcaggtcattccatagatacaaattaagtttgaattttttgtttttgtttttatttacattttttttcttttaaggtttctatatcttcttcaactcaattgtgtcttttagattttttttaattgatgcatctattaagtgatttctgtgctttttaattcttttaacataaaattttaattatctacttcattttgtcagggtcctgaggttaggagtggtgacctaccacaacc

SEQ ID NO: 67067 - DNA, 508 bp, Cucumis sativus
  Intron number 3 from transcript Cucsa.144320.1 (locus Cucs a.144320) derived from phytozome v7.0 (chr-ID scaffold0108 0; pos 722835 to 723342 reverse strand)
caacatgtttttaaaatttgaagaagtgtttcagggattctttgattgatcgaatttactttagttgtgctaaatcttatacttttgatgactttgagttcaatatgagatctatggagtctatttattcagatatacgaagttatcttagtaatgttggatttgagaggtggtctcaagcaaattcacgaagaagaaggtacgatatgatgacaacaaatccttcacaaagtgttaactcaattttgaaagaggatagaaacttgcttgttgcaagcttacttgatggaattagagagttcttgtaaaagtggtttcatgattgaagagaagctagtttgtcaatgaaaacaattttaacctcttgggctgaaagtatattacgcaagcaacatgaagaatcaagaagtttcttggtaagagttcttttatttattttttattcttttcatttagatatattatattgatagaagaaagaaaggaagtgttatctatccgtgatagg

SEQ ID NO: 67068 - DNA, 657 bp, Cucumis sativus
  Intron number 1 from transcript Cucsa.120810.1 (locus Cucs a.120810) derived from phytozome v7.0 (chr-ID scaffold0099 8; pos 2862232 to 2862888 reverse strand)
aggaggattcacaccctattaagaactttcaacgagtgagtaaccttattattattttttattattgtagtcttgtaaagttttgggccaatggatgatttaacaagtttttaaaatgaatttcaaaaaacaagtgtttgtctgcaagttgctaaaatctgataacgacattcacttggaaatttgtgttacgccactaagttgggtgagaaaaaattgggtataggagagcctaattagccgacaaagtatttttgtgatagaattactaaaattgttgtgattttgggagatgcaggttgaaaaaatattcaccatttaaaacaaaatttcaattttttaaacattcttaattggaaaatggagagtttatgttgttataaattcaaaaaaatcacaccaaacacaaaaaggaatggtgtaaaaaattaatccaaaacttaaatcttgaaagataaaaagatggcaacaaaagcaacctgaaaataaaatgatgaatccataagtacaaaacatgcatgttggtattgtttatagaaaagaagaaagtagaatttatgaaagaaacaacaaaaaggaaatttaaaaagaaagagagagagaagaaatcattgagttgttgtatgattgggatgccacgtgtacgttatgcagttg

SEQ ID NO: 67069 - DNA, 650 bp, Cucumis sativus
  Intron number 1 from transcript Cucsa.176290.3 (locus Cucs a.176290) derived from phytozome v7.0 (chr-ID scaffold0122 5; pos 603783 to 604432)
atttcatttcttcttgcttcgcttcatatcagcaggtcgtcggtattggaaattattctttctttgcgattcttcttttgtggtttcatatgtttttttttttcatggagaatcttggattgctgagaattatctcttcgctgtctttaattacttatagattctcaatgtgcgaacgagagataatctgtgatagttttcttgtccttttttttttttgcttatttatggattctagataacgatcgggagtttaatatttgaggaggaggattctaaattgcgatttgctaatatgaaagtcggtgaaagatagtgttctatgccttcgattttgagtttttgaacgaagtcttcttgttttgtaattactcattactttgtatgtctcggacattatgtcagtttttccacagaatgaagaaatcgtttcttaaaggtttaggttagatcgaatcaagattaataaaaacttcggaagtttagaatgggtaataaagtctcggcggatgcctcaataaaaaagagataattattgccagaaaatctaggaagtaatgtgaaaaagattgttgcaaggatgtatatatgctaataaaatcatcctgatattcgtagaacttgttctttgcaggcagatactattcaga

SEQ ID NO: 67070 - DNA, 747 bp, Cucumis sativus
  Intron number 1 from transcript Cucsa.117130.1 (locus Cucs a.117130) derived from phytozome v7.0 (chr-ID scaffold0099 5; pos 830529 to 831275 reverse strand)
cagtccaagctcgccgacgaggttcggctatctcttcccattcttcatactatttcatcgcttacctttttgctattttactcgccattgctttttgcagtttgtcgataattattaaatgctcaaattcatttcaacttttttttttttacttgttatttggattgatgccgctataattttaatatgattgtgttcgtaaaagctaaaactccctacaatttaatcttgtatgcattaatgactcaatccaccctaatttcaaagcttatgcatatgggaatttggagaatttaagattatatatgtgggcctctattatttgattaaactatgcaattatacttcagatgcttagtttaatgaaactattgtctctatgactcactctccatttttcaacttcgggttattactcatggccaacgtttcagttttctttaacgtccggcataagaattaggattgcactgatattgttggatttgatcgaggacgtttcaattttgatacgactaaagatgttacttctctagaagtttgaagtatataatcaatacttctttgataatgcaatattgttttgaaaaataagtaattctcgaaagggttgaactgtattttcttttccattatcttttgtgtgattctgtttctagtaatgagtattattctacaggcgtttcaatttaagtgtgggatacctccttttattattgttgcagctaccgccaatatcagttggaa

SEQ ID NO: 67071 - DNA, 899 bp, Cucumis sativus
  Intron number 2 from transcript Cucsa.041680.1 (locus Cucs a.041680) derived from phytozome v7.0 (chr-ID scaffold0054 0; pos 252680 to 253578 reverse strand)
cttgaccactccacattctcaaacttctccttgaggtaatgattttaacttcctctttttcatcatattcttcttctcttctgctgtttcttagccttttgatttgatgaacagtggatctatatgctttcaacctaattgtaaaccccctttgttactttaattaatcatgtctacaactttcttctgtctttgtgttatatatttgtttattttttaacttcaaagccgtaaatttctcctgtttttctctttgatgatctcaaagtttctatgcgccccccatctgggaaagatctctgctggggtagatccacatggtaaattgttgcttgcttgtagtttgccccaccaatggggccaaactcaagatacccatcttgtccctattcttatacctcttaagctgtttatacttaacaacttttgcttctcaatgggttcattttacctgtttcattcttcaatattctcataacatgtttatatttctttttactgaaaatctttgcctttcttcttccttgatgttactgtggatgtcgacttcacagtcagggtcattgtctctagaactgcatttggaaacttttaatgtttttctttttccccaccatatcatgtattttacaaattttgatgatgttcattcaccagaccagagtggtcaacatcgtttgattctcttgattcacttttatcctcttttggaaccattcatttgctttctcggtcatgtattagtgtgaataatcttattttttcacgattttggttattgctaattctttggtctctatacttctaaactgaagacttgtgggtttgtgagagtttttgaatatatatcaatcatcatttttattaattgaaagaaatggttttgaaatgcagagatt

SEQ ID NO: 67072 - DNA, 811 bp, Cucumis sativus
  Intron number 1 from transcript Cucsa.041680.1 (locus Cucs a.041680) derived from phytozome v7.0 (chr-ID scaffold0054 0; pos 254002 to 254812 reverse strand)
cttaggtttgtgtttttacatctctgtttctatggatccttttctgggtgtcttccttttttctttcccattaattttcttgtttttgttggttaatctcttgctttttgggttatttcatgatctatctctacaattttctgtcttggttttgttttggtctttggggtttgagttctgtttttgattcctgtttctttggatttgggtttctttcgtttgagcttcactgttcactctaccaagatttggggttctttaaatttggggttcttctaagaaaataaagtagatttcttccactatggttgtttttgctgtgttttttgtttttgtactgattggtttcttcaatcggttgtttacttgatgattctttgatggggtttgtcttttgattttgaagtttcttcaaattttatgccttttttgggtttggtcatacgactcttcagattaattctcttcctaatctttcctcttgctatcatctacttattgccggagatggttgctactttagagacttttcggtgttgattttgagctttattttctgggtttaatccaacatgaaatgatcttcaaaactcagtgaattttgttcttgtttctgcttttgggactattcttcgcttatctttttggttgttttctttgactattcattccagaggttttcttcatcttccttctcatcacataaaataacgtttcagttggttctggagtcttctattctgccttaacttgcttggatctctcttataattcatgatttcatgttcatttctttacttcctgtaggtta

SEQ ID NO: 67073 - DNA, 542 bp, Cucumis sativus
  Intron number 1 from transcript Cucsa.163690.1 (locus Cucs a.163690) derived from phytozome v7.0 (chr-ID scaffold0114 6; pos 121333 to 121874)
gtaatttgacacacatatctaacttaatagtgttgtaatgttaacaacacaaaacgacctgatggagtcgagacggaaactcaacaaacaattttacaaaactcctttttaataataataattttaacaaaagaaaaaaactttaattcaaaaaagaaaaaaagaaaaaaagaaaaaagagatttccaatagaaagagaaaggaaccgtgtctgtgtgtaaccagaggtcaaactctcccaaaacgacacccaccaccgcaaccaccaccaccaccaccacaacccctatacgccacccttccactctccccccgactcccccttctccccctccttctccttctccctcgtatgctgattcccgatcccccttctccttcctccatttctccactcacctccgggtaatccaacctccccccctttcgttcctttttattatgaagagctacgctaaggtcagcaccaccgccaacaacaacacctccacctccactaataacaagcctgccaacggatttctccctaattctttgaagtt

SEQ ID NO: 67074 - DNA, 793 bp, Cucumis sativus
  Intron number 2 from transcript Cucsa.186180.1 (locus Cucs a.186180) derived from phytozome v7.0 (chr-ID scaffold0127 7; pos 37015 to 37807 reverse strand)
ggccgctgcctcactggcagcaccctccaccgctcgtcgactcgggcgatatcccgccggtgatcatttcacctcgcccttcacaacccctacctcaaagctcacccattgccactagaaagagaagccattcatttctgtctgatatttctcaacatcctctcaagcatcaaaaagtggtttagtaacagtctcaatgactctaattcctcattctctctaattcttttcaatgcccttctacttaatttattgtcatcttttttctttttgctgtgattgtgagatgtgtaatttggagtttgttccattctctatcaaatcacaattacaaccaaaaaaaaaaaatgtgggttgaaaagaagaaaaataagggggaaatttctcattcactttgatccaagtacaaagtacttgaacaaattctttcgtgatgctgcaaatgccatacatttgaagaacaactgtggctttgtttatggatcatttttcagttctgtaccatataactttttattactaatgaaaatcaaaacttttgctgctgaatgttgaggttaagagttcatttttgtgtattttttagccaaaaatttgggcccttctgtcgcttttgctctgttttaagagatgaagttatgattaatacatgcaaggaaatagatcttcacaaagattctgtctctgtctctcaagtatttggagatccccaccattcatagtgggtatgttgtggctttaattagtgcaacaatctttctagattccctttcattattaaagcattcaaaat

SEQ ID NO: 67075 - DNA, 603 bp, Cucumis sativus
  Intron number 1 from transcript Cucsa.096550.1 (locus Cucs a.096550) derived from phytozome v7.0 (chr-ID scaffold0091 9; pos 2114900 to 2115502 reverse strand)
gaaaccggcgaagaagagtcgccggacgaaaactggtaagcgtagatcgaggtaaggaacggaattttctccggcgtcggcggcggcgattttgccggtggtctgtgagagaagagtgagagttttggaaatagaaagaaaaaaaagaaaaagaaaaagaaaaatagaaggaaattaggttttgtgggaattatatatttttaattttaaaatcatgttcttgtggctttttttgttactcttttagatcttagaattgtaatttgtgtataaattaatatatatataaatatgtattttgtgtttgtttaatttcaaatctttatgtgtaaattattaaactaaaatttctcccaaatttgccttctcatctctatcccttctagatcttaattcttaaatcaattctgaactttttgagcatcgttacgtatagaaatatattgattgataaggtataaatgagtaattaggaattgatattccttaattgtaactctcgaagggaaattggaagagatttgattaattagtagtaatatttaagagagaaaatagagatatggtgattttccaaatttagagagagtaagatcaaattga

SEQ ID NO: 67076 - DNA, 817 bp, Cucumis sativus
  Intron number 2 from transcript Cucsa.129580.1 (locus Cucs a.129580) derived from phytozome v7.0 (chr-ID scaffold0102 8; pos 457384 to 458200 reverse strand)
tcattactcctgcgtttaatccttccaacttgaaggtacgtttttcttgaaaatcacttttgagtctttaaattttcaaagaacttataaccctttagtttcttttctactttttctttaaattgtgatatcttagtcctactaacaatttaaccatatctatctttaaatttaaaaaacagtttagtttttatcttcaaatttaagaatctgtaactaaaacttatcctctaattaatttattaagtcttaacattaaaagtatagagactaaatcgttgctaactacactttaaagattaaattgttacgttataaaaagttcgactagcaaaattttgaagactaatatcatttaaacaacacctttctgtacttttttgttgtggagatgctaaaagggcattttcaaaattgtacacatccactttttgaaaataaaatgtattcgtcggttttttaatttttaaagagttgtttttatatttaacaaaatgactaacttaccgacaaaaagttataattaaaaacctttaaaacatgtcacatccaaacgcacttataagatacatacgtatgcacggataaatgttgtcgagtgtgttctatattttctcaaatttttgaacatttcaaacacattattgaatagtcaaagcatgcaaaatgaaaaataattaaatatatatcaatgcgttttaagaaattataaatataacaaaatctatgtatatggaactttatcagtgttggactcttattcataagaaaattgtaatagtttacattttactaatattttgagttaaaacaggca

SEQ ID NO: 67077 - DNA, 723 bp, Cucumis sativus
  Intron number 3 from transcript Cucsa.109540.1 (locus Cucs a.109540) derived from phytozome v7.0 (chr-ID scaffold0093 4; pos 464883 to 465605 reverse strand)
gaactcccaaaggtacaatatgtcattaaatttatcttccccatcagctcaagtttttaagtaaaatggtaaattgacattgttatcagaatctagaaaaaaaatcatgtgtttaaacttctccagtgttatttccttcctaattaatattgatttcacttgttggactttgtacatatttcaatctcacaagagagagttagatgatataacattaaatctaccttcatccatgagtgtaagcttttagtcaattgccgattcgaaattatctttattctcatgagttctaattgaatctttttttattgtgggataaattgtggtacataccatatcctattttcttgagttgaatggtttccaaaccttccttggaaatcaaatagataatgatgcatttcatttggctttttattcatcaaaccaattgctgtatattattgtcttcaatatggtgtttcaatagccttccacgctattcattctgtatcggatttgtttgtcaaaatagcgatttgcatcaaggaagaagctcttctaatgaacaaaacttctgcatatatacacacgtgttataaataattgattgcaacatgaaccatcattcatacatcgtacttagtttcttgaagggagatatagaatttgtttcaacagccattcaccctattcattatgtctttgttatgtttcatgaagtcatttacaacaaggaagaag

SEQ ID NO: 67078 - DNA, 919 bp, Cucumis sativus
  Intron number 2 from transcript Cucsa.142870.1 (locus Cucs a.142870) derived from phytozome v7.0 (chr-ID scaffold0107 9; pos 1099734 to 1100652 reverse strand)
gttggagagcgtaagaggaaagccaggtttgttggtgatcttttaaatctgcttgatttgtgggttatgtaaaggaattttatcaacttaccaaactgagcatagtttgttagaatacactgaaggatacattaactgaagaattcactgatcaacgttgccttttgttttgattttgaattgaaacaagggactaaaattctacaaatcatatggctgaagcttcaataatcattagctatgtagttgacattgaatgacttctttttgtttgatagggtacgaaagattaatagaaaaagttttagcagttaagttatgaatgtaaacattgttggaactaatactttggggctttgttaatccattcttctgctgaatcttgaatgctgggttggaaggcactttgctactctatttgatggggatctcttgtatagagttttctttttgtaatatagttgtttcctataaaagaaagtcttgaatgctaggtttggcagaccatctataattctcagtgatctttgtgaatgttctagagttgttccatgtttattagtctaataaacatggaatacttataaacattgaacaactctgcttacaacattttgtttaatttgatcctagagtttagtatgctaattatctggtattctttgattcttttctttacaccttatgtagctctgttgaattgtataatatatctagattagagttttgtatcgcccctttggagacatctgataaaattggaatttggaacgatacaagcaaattagagttttgtatatgaaattaaaaagtgtggttaaaggaatttgttttaatccctttcagtgttttctttcctcaacctctggaattggcagtggatgaatgaatcatactttcttgtgtttgttgacagtgg

SEQ ID NO: 67079 - DNA, 443 bp, Cucumis sativus
  Intron number 1 from transcript Cucsa.166270.1 (locus Cucs a.166270) derived from phytozome v7.0 (chr-ID scaffold0115 3; pos 1513748 to 1514190 reverse strand)
gcttcttattgccaccatacatagtgacttttttggtaaatatagtcaacttcttcatgcattatcatacatatatatagtatatacacacaaaaaaccaatcacatcacacatgtggttatcaaaattgatgagacattatcatatttatttttaacttgttttctttacagatatcagtgtagaaatcttggaacatgatacaactttggctactaagaatgacacaaaaaataacaacgagacagcattgcatgtcatggctagaaaaccatcagcaattgatagaggaaatcagctaaacttttggaaaaactgcatcaattgttagtttatacgtttaattatccttttaaattcttcattttgtcaatattaatggcatatagaacctttattttgcttcatctttgattgcacagccgtgaaaagagtctccaata

SEQ ID NO: 67080 - DNA, 535 bp, Cucumis sativus
  Intron number 13 from transcript Cucsa.108610.1 (locus Cuc sa.108610) derived from phytozome v7.0 (chr-ID scaffold009 31; pos 801038 to 801572 reverse strand)
cccgctcttcctggtattcccccccttttcttacgtagaatatggttaattgactccttgattttggttttcttatatttgtattatgttaattgatgaaagatttattgtctgatgatatgttttttgtttatgtgatgcaattagagcaattaccgtttaccagagtgtttctctttccctttttcttgctatgctgtcaggaccaccatttagacagtaaccgtgattttctttctggatatggtttttagattgcatacttcactttttctggttgggtttattttttgtgtggatgattcactacatatgtgtaggatactctgcttcttccatttaaggcaatagtgagattctttaaataatttagtttgtggatggttatatggcttatgctgtatattcttgagtaatgaatgagaaaataatttcagaatgcgctctatgtattttctatctgaaagaattcatggtttgtttattatgtggataagatggtaatccattcatttgaataatctgcttgctagga

SEQ ID NO: 67081 - DNA, 918 bp, Cucumis sativus
  Intron number 9 from transcript Cucsa.108610.1 (locus Cucs a.108610) derived from phytozome v7.0 (chr-ID scaffold0093 1; pos 805162 to 806079 reverse strand)
gaaagttgtatcaaggtatgagtgttgcagttgtcatcaattcatctcttctgtatgatattttagcagtgttctgaccctttcttgaagcatcttattttgcgtaaaacgttctgacgttttttttatagcatgggttaattactaaggaaaatctttcaaacaatgtttaggaattatttttttacagtgaacgggatgtttgccaaagaaaaaatggttttgtttttccatttcagacataggacaatccttcgattccttctcatcttttatctgtaagttcgattcttcgtcaaggaatttgcagttccaaggagggaggactttttcttagtttataaaagaatattcagacactcacagatataaaaatcaaaaagaaaaaatcacaatcctctctggcaagacaactttttccatgaaaaaaatatttcatggagaattgatagtgaaggccaaaagctaaaccatagtgataattgataacgaaatgggatattaaacctaaaagttctgaagatgggctatgccaagagtgttgattcttggccattccaaaatctacccccattctctttctcggccactttgaatactttggttttgattgtatgaagcctctcctacattgttagactctcctacatcgttagagcttgcttaatttattgggtttatgtgtcaaggaaggcatagaatgcttagagatagatgatctcagtcgagaatctattcgttttgttaattgtagattctttcatgaggaaataatgtatttaatcggtgctcatcatcttaagcctatttttatttttttttcactttgcatatatatgagatatgtttcttgtccttgtagaatacattttaatgaacgaattatttcctttccagtcaaaagcattcggaatttaa

SEQ ID NO: 67082 - DNA, 777 bp, Cucumis sativus
  Intron number 1 from transcript Cucsa.118230.1 (locus Cucs a.118230) derived from phytozome v7.0 (chr-ID scaffold0099 8; pos 56521 to 57297 reverse strand)
gtcttcttgctttcgtcgccttctctcaggtgagctcctcttctcgtaattgtcaacagtttcgggattttttttttcttttttttaatttcaattgcatcttagaattgttccgacgagatttctatgtatgtatttgtggtttgattggttattaatgatttggcattggagttgaagttcaaattctttgtagataagagctgaacgtttggtgtaattgagaattggtgcttaaaaacacattggtacactttagggataatttaggttgggaattcttttggaaagacagactgttcaccggttctaagctcgattgttgagggacattgtcaaagggatataggattgtgtgttactttcttttacatatgagttcgagtgtctgcatttgtttaatattgctagtctgttcaattttcaatttcaagttttttctccgtaatttttacttacacttcacaaattatggttttcttttcgtgcatttaaatttgtgagacttatggttttgtaacatgttgtaatcatttgattgagaggaataagaattgacactatgagagacatcactccatatcaagcaaatggagcatgtttttcattatcgtaaaattttttaattcttcgtactggagaacttactggtggtgagcgatggaatatattcttgcattcctttgcacattaaattgtgtagtgaatggtttattgctagtactttttgttatgcgttaattgttctggtttttattccagctcatcagaattcac

SEQ ID NO: 67083 - DNA, 485 bp, Cucumis sativus
  Intron number 1 from transcript Cucsa.044800.1 (locus Cucs a.044800) derived from phytozome v7.0 (chr-ID scaffold0054 2; pos 977799 to 978283)
aattttctgttgagagttcttcttcgaatttacaggtactgttcacatgtttattgaatttttctttgcttttgaactttctgctttcaaacttaatcgtattggatttatcttcagtactcacaactgagctaaactgaaatgaactgatagcaagctttgaagtattcgtgacctttacggtttaacttcgtgttttcaggactgttcggtagtttctgtctattctttggaaatgttatggaataatgtattcggtttttagtttgtcctttttttaattaaagcttctcagatatttaactttcgagctgagaatttcgtttaagtatgatttttcggaacttatttgtgctaatgttaggtgtttctatactatttatgtgtgctacacgcatttatgtacgttgaagtcaatactttgagttttgaacttatggtcttgttttgaatttatgtttcagggaatagttcttgtgcagcta

SEQ ID NO: 67084 - DNA, 959 bp, Cucumis sativus
  Intron number 1 from transcript Cucsa.162350.1 (locus Cucs a.162350) derived from phytozome v7.0 (chr-ID scaffold0114 4; pos 2029626 to 2030584 reverse strand)
ttcttacttatcatacttcagatcccgctcttcaggtgtgttttcactttcttccacttttttaacctctgaaactcctaatgattttgtactcggagttaggacggattagaactgtttctctttactaatgtttacttccagttacaattttgaacagcttctcattaactctcttgcttctttcactttagtttgttgttcatactttggtatatgtttcttcacttgtttgtataattttgaatttctgattcttgattaaactaattgtaaacactgaattttgtcctctgtttaggattagttttagtttatgtgttgagttttgtgaattaaaactattattcgaggacacactaggaagagagtgttgaagagtgggatgaaaaagattgaatagcttaagtttgtgccatttcttttatctatttgaatcttcggtccaatgtgcttccacttcttgcgaattaagggctcttctgtagaaaggaaggattatggtttatggatctcaattgaattaatatgtagcattttctataggtttgagattccattatccttaaatcaattaagaaaatggatcaaggaactgcctaatgtgtgtgtttgctttgagatcaatatgcttatgttatctagaaataaaatttggagaaaataaggaaatgaacgactgtgaatttcttgctttcattttacacgatgcttcatcggatattagttatatattccttccaagttccaatatcctgtactatacatttccattctttgaaattatgattcttggctactaaaagtttaataatagaaaaaaacattgttcctttgtccaaatatttgactttgtgatatttattttctgcaagtttggaacatccatgttgacgtagcctttggtgtatgatggatgtgcacattacataattcaaaatgtgtcttctcaggatctc

SEQ ID NO: 67085 - DNA, 843 bp, Cucumis sativus
  Intron number 1 from transcript Cucsa.148790.1 (locus Cucs a.148790) derived from phytozome v7.0 (chr-ID scaffold0110 7; pos 782858 to 783700)
tcttcatttctccaaatccgtgggcaattttaaaggtaatgatctgatttctatcaatcttttgaattctaatggactattttttgcagtctttttctaagttttagttttagttttagtttgtttcctcttttgcatttttgaaactttctacgagtttaatgaagaattgtagggaaacgaggagggttttctttgaatgggaatacccatgtccttctttattgagcttgagcttgtgtcgtctgttttagccgctacgacaaaattttcattactgggtcttgtagattgtgattgcaagatttgccatgctgaaatttcttagtatattactagaattgcaatgcctttccaaaacctgtttgttggaaattttgtgttttttacgtatcaagaaatgaagttttgatggaagggaatgccaccataaatgtgcaattagaagttggaaactctgttttcataaacccattgataaagattgagagagcccaacaacaaaatgaacgggcaaattctatcagtagagttagggtttaagagcaatagaactttaagagtggttgaaaaacttgtggggagctgtgaaccctttctagatttcacgcctctctcggagttttccattatttagatcttatttttgcttgactggagccctttcttagatcagtgacttttcctttttggtgttttctttttatgtcttctgtattcgttcatttttttttcccaatgaatgctcggcattttactgaagaagataagttttaaacagctcaaaagttttctcgatcctttgcagacagttttatccatcttctgtactagtttgtctgg

SEQ ID NO: 67086 - DNA, 741 bp, Cucumis sativus
  Intron number 1 from transcript Cucsa.092480.6 (locus Cucs a.092480) derived from phytozome v7.0 (chr-ID scaffold0090 5; pos 331642 to 332382)
caggcggagagtttaaatcacgatttgtggtatgccctttcttatcaagggttaacgttgctatggcagagtttgagtctgtatgtagttcagagattgagatttgggaaatgatgatggaatctcttaagggtcctctttcttcggagggaaagaccaattactttggaagattaatttctttggccttttgtggtttgtttggtaaagggataggaatacattcgtaggggttgataaggtgtgggataatatttggaatttgacacatttcagtgcttttcatggtggctcttaatttaaatttctttcataaatatcctttacttttggttttaaatgtttaaggttcttttatgtactatccactctggttggacgtttttgggcctctctgtattcttcatttgtctttatcagagttccttgtatatttgtatcaatacacatctcactaatcacgattcaaattctctgatcaacacaaactactacaaacaaactcaaaacataaacgatcctaaattcttaatgagagtattacaaaacagaaattatttgccctgcatctgtaaggttgagtttgatattggttgcccctttcttaaaaatcactttgttcgataaaatcatgtcgtaatattgttaaattcttattctttctactaggatcaaattttgatgtttaattttctcacttttcttctatctaaatgccagattggaatccacatacaggac

SEQ ID NO: 67087 - DNA, 1010 bp, Cucumis sativus
  Intron number 1 from transcript Cucsa.176690.1 (locus Cucs a.176690) derived from phytozome v7.0 (chr-ID scaffold0122 5; pos 829397 to 830406)
gtgtggttatttggtggaatgtcaccatattgtttctttcttctttttcttcttttcaccaaaatgtttgcaacttgaagaaggttgtgcattcaaactatagggagagcgcaaccaagtaattaaataagcaatgcaaatggtttcaaaagggccggagaatatcaatggtataagctgtcaaattttgttattttatgagccaaagtcggtgcactaattaacattccccatgggctcgaaactgtgtcaccccttcatggcttcattccatcttatccccatttagcaagttgcctatttgtctcataagatttaacacttaattcccacaccctcttttcttttgtttctgccacaaacttaatattcattcaacaccaaatgctacacacatctatgtatggcccatacggatttttccacctctacgactagtgtgaacatcaaatgagaaaatacttttagtgttataaattttttcgtattcttctatttgggaccaatttttttaattttagtacaacatgttaagttatatgaatttcaaatccacttaattacgctggctttcatacttacatatcatgggattagtgaaactaatatttttgtttatctaataagtggaggattgtaaataaaaagggaagagaagggtgttttggtaatatcaattgataaagttactctttcgcttggtatttaaagatgaacgcacatgtatttcgtctgtggtccgaacgggaaaagccataacccacaggctgagctaataattcaaccgccggatcgcccaaaagaatagccgccgtccaccgccgtggcggctggcaagtttgaaatcctctctttcatttttaacaagttttgttgtttcttggtctccggtggaatttgtaaaaacccagtcttcactggaaaatgctttcgaaaccctctgtatcttctgttctaatagaccgattcaacggctccgatccaatccattgtcagaaagaggctcacaa

SEQ ID NO: 67088 - DNA, 975 bp, Cucumis sativus
  Intron number 2 from transcript Cucsa.181910.1 (locus Cucs a.181910) derived from phytozome v7.0 (chr-ID scaffold0125 1; pos 120286 to 121260)
cgcctcttccactccaccgtcatctcctttttccggtaagtttcccaaccaccgttccatgatatgccactctaagttaagtatatgtgtggcttttgattacgtctttttgtggggtttgtgagctgtgcccttctcattgggcattccattaatcctaagttctaataataattttaattcaatatgtattgattattgttattatgaaatgactattctacccctcctttgtacctacaaataataatgcattattcccaaattgcccatactctctttttttgatgtgaaacaaaatatttctttcaatttcactcctactatgtttagctatgtatatatatacaaactttattcatcaaattaaaacttgccctaacatggattattttcttttttcttttttgttaacttcaataattatagtctatagtgtgaaccattaatttttgaggtggtaattattaggggaaaaaaattaaactattgaaatacaaattgtttaaattagtatgttataggaaatatgagtgtattatctaaaagaaagagggagatattgtgttttctttaagcattttatttttgtatgcatttgtcttgtaattttaatatgtagggataggggttgagatttgattcttgatatatatttgtttgatcggtcatgaaggtaattatttttaataagttgaattgcatcttagtggatcttgataagggtggtttcttctttttcaatgtggggacgaatctattttgtatttaatgaatcttttaattatgcccacaaggctacttgatgttgatttttctagacatagattcatctactgtaattatttgatgaaagtaataaatgtgatttaaaaaacgattatgcaacaagtcaatattaacatggttggttcggttgtgttattacttacggaggtagagaatcatttagatttcgaagaagatcgacatcgg

SEQ ID NO: 67089 - DNA, 487 bp, Cucumis sativus
  Intron number 1 from transcript Cucsa.121070.1 (locus Cucs a.121070) derived from phytozome v7.0 (chr-ID scaffold0099 8; pos 3102911 to 3103397 reverse strand)
cgttgggttaataaactcagacccaacttgaaaaagtaactaatttttacttaactgccattcattgccttcatttagtttttcttgatgaattccaacgtgtttgacgtgggttttttgtgtttagtttttgttgtttgttcttctgcttgctaactgtttgacaaaatgactgatagagtaatttctagattatgattcctcaaattgcggtatgggtttttcttccttgagatttcgatttattgccttagaatatgaattgatttgttttgtttttctgtgttcccctaaatccggcaagtgggttgtttttgttgactgatgactgtttgtgaaaatgtctacaagagtaatttcttgaccatgctgctgctattcgtggtttttttttcaatttctttgaatgttgtgtttatctgttgggttttcttgtgcttcctcatttccggcaagtgggtgcaagttcacagcagaggaggaaaaa

SEQ ID NO: 67090 - DNA, 950 bp, Cucumis sativus
  Intron number 2 from transcript Cucsa.058750.1 (locus Cucs a.058750) derived from phytozome v7.0 (chr-ID scaffold0061 4; pos 868969 to 869918 reverse strand)
gtgggaaaaatcagattccttctcgaactttacaggtaagaaatgtttttttaaaacattttgggtgagcttgtatccatttccatttagtctctatcttcttgcatagagttcatattttttaaactctttcttatatatagaatattattttgtcagggttatctcgtggtacaatttaatttgattgctgaaactatataatataactttttcgaagtttggtttctcgttgaaaaattgttgtacacttcttttaagttagttaccatgtccacaccatagatagaaacactccagttggggcacaaattagtgaagaatattaaggataattattttgaggttctattgctacatatccctttgagatgatcagtgattaagatttggaaaaataagttatgacctcattatgtgattccatcactttttttcagctccttgcatccaattgtcttcaattggattatttagatgctttcagaagtaaagaaaatagaactggtaaaatgcatttatgtaacaatcaagggacaaatattgtattataaaaataaactatctactatactagtatatgaccaaggacaaagaagggatcctctgaaaagacaaaactaaaactgtgagaattggcttcaattcttctacagcttggtcaaaatggttcgagttgaagcttatcgtttaagtgagcaaaatgctgaacttattcataatactttccaacatctacaaagccattaattttctctctgtgacgcatatagtttttgtttttctgtggacagttgagttatagtttattctcagcatattcattcatagaactcgattgatatgaaatcataattgatgcaatgaagcattttcaagttggtttctttctgctgttagctgaatattttagctttcttgatctgagcaggtgttacaagatcacagtg

SEQ ID NO: 67091 - DNA, 653 bp, Cucumis sativus
  Intron number 1 from transcript Cucsa.058750.1 (locus Cucs a.058750) derived from phytozome v7.0 (chr-ID scaffold0061 4; pos 870706 to 871358 reverse strand)
gtttcttgtgtgagaatctctgtcttagaccatcggtatgttgcccatttcttctgttgaatatctttgttttgtttttctgtcggtaatgtatttgggttggaattttgttgctaactattcgattgattgattgcgaaatgatattgtaatgagatgattagtgttttctttggttcacgattcatcaggtttgagattacgatgattcatgttctttatagtctgattatgcttgctttagccatacgacatcgtttcctctcttgttagccatatagttttaccgttgattgcaatttgtatctacttgttaaaaagtcccattttctctttttagaagtagtgaaagttgatttagctggatggttgaaatgtctttagattcagatacagtgctttaggttgcggtttctgggaaagaaaattgttgaaaaacatgctttggttcaaaattctttaccatgttcttgcttctgttcgtaaatcttgatttattgagctgttactgtggctgtctgtcttcaaaatgggtatcgtgtagttttatgattgttactttggctgcattgtgaagtgtagtgagtttgaaatttattgggggcgttttttgtttttgaaattatctgtctatccgttcatcatagttatat

SEQ ID NO: 67092 - DNA, 903 bp, Cucumis sativus
  Intron number 1 from transcript Cucsa.101160.1 (locus Cucs a.101160) derived from phytozome v7.0 (chr-ID scaffold0092 7; pos 435294 to 436196)
ccttccttcattcattcgcctctctttaatccaaggtttgtttctttctttcttcctttttttttttttttctacttcatcttctcactcccctatctggggtttcgttcttttcccaaattatgctgttttcgtctctcatttctctactttattgcttttaactcattttcccttatggggttcttcaattttggctgatcttgctgtttcttttggaattctgttttaaatcgccctggatccgaggtttttgttcgtacaatctacctagattccttctgtttgtttgctgatctgaaattttctatttgggttttgattgtctgtgcttacggaactgagatctaggatttggagttgtgcacccttttatttctgcatgcaattctgtaatccggcatatctggatggctttctgttgattactgcatgtttttgtttaggacgaactgagttgggtttttcgttgtcgatctgttttattttttgtttcgctgttctggttcatgcttgggatgatttagttgctttgtatactctgcttttgtactatttttatatcttagatcagttcacgtagcttctcgatctgaaattggatatggttaaagtttatggtcagcttgtgatcttgcattatacaaaaattggaactttaatcgttttcattagtaagatctttaagatattcgattaccgggttgatttttttgtgtctggattcttttatttgttttgaaagtagtatgttggttcttcctgtattatttcatgaatctgggatgatcaattctatgacttgaatttatggaatgtaaatgaatattttaagagattgctttgtgtggcttatttattcaacttctatttttaacacgttttgtgcaggttttgaaaaaa

SEQ ID NO: 67093 - DNA, 952 bp, Cucumis sativus
  Intron number 1 from transcript Cucsa.192280.1 (locus Cucs a.192280) derived from phytozome v7.0 (chr-ID scaffold0133 3; pos 157535 to 158486)
ccaaggttaagggttttcctgcttggccagccaaggtacaatcttcgatgtcttgttttttctcttttctttttctttttaatatgcatgttcgattatgcgtatgtggtgtattgcactttgggaaatgtgttttttgctttctcaggaagtattattttcatgagtgtttaggtggtactgtgattaatttttgttattttcgttcctgtttgtttcgtcttacttctcatcttctttcagtctactggaattatttttcaatggtgtactatttgcgttttgttgttgctcatgcgatgtttggctgtttttgaactttttgagcttgatgttattgtttattttctctagttcttcgactcatattagtctgttcctcaagattgtatttttgtgttacaacttcaaggtttttgtctaccttttggcagacagttatgaaataatttgttcaatctcatgtgaaaatatatgttgtttttggtatacggtcctgaactaggatcagggcataaccgtgcgttctctctcttgggccaataagttttctttgagtaggaggaatggaagttggaaattgaggcagaagaaaaatttaaaccatagccaaatagccaccaaaacgtaacataaaataagaggctctagttgctttgataaaatattggagattactagaaggtttaatgacttaggtctaaagaaaagcgttaataatcctatgttcttgacattattttatcgagtgtggaggtaagggagcattttttggggggtaggaagctgattgttacgttatttttgcaaaaagagaagttaactgtgtggctaggttttggaatatcaattcatctgagcaaggataactacttagccttttggagttataaggtatgatggtgttatgtttacagattagcaggcccgaggactgggagagatctcctga

SEQ ID NO: 67094 - DNA, 417 bp, Cucumis sativus
  Intron number 1 from transcript Cucsa.056510.1 (locus Cucs a.056510) derived from phytozome v7.0 (chr-ID scaffold0060 3; pos 1951 to 2367)
catttacacggtggagcgtcttggctttaccaagggtacacaaccaaaacctatgctcttcttctgtctttcatgaaatctcttctgtttcaggttgcttgcgctgactcttgtgcactgagactggatagctatgccatgttttatagttatggtatctcagttgaggctgttgagagctattagtttcctgtgtaggattgaaagttcccttcaaaagattcaaaatttccaagcccatcttcgttttgttttagtttttttggcttgctggtgggagctttgaagaaatgtgataaaatttgacaaagtagaaaacgaaatgattatgattgacactaacctttgcttgatctttctgcatgttgaggtataaaaccagttgggggcattttttttttcatttcagggtggtcg

SEQ ID NO: 67095 - DNA, 281 bp, Cucumis sativus
  Intron number 2 from transcript Cucsa.010370.1 (locus Cucs a.010370) derived from phytozome v7.0 (chr-ID scaffold0015 3; pos 5054 to 5334 reverse strand)
cctgcaccatcaagatttggtcttttaaggttggataaaagttttgatatcctatcttattactttgttttcacatattcatttaattcattggacaataaactcaaatacttaggcattaaaaactattgcagttcttggaacttcagagtatgaacggcaagcatagcatttaaattatttcttcttagtgtactaacttctagcatattgatatgaatttcattgtcatattgattcatgcagatcagttgcattgacttctcaatcacaatacttta

SEQ ID NO: 67096 - DNA, 977 bp, Cucumis sativus
  Intron number 1 from transcript Cucsa.048910.1 (locus Cucs a.048910) derived from phytozome v7.0 (chr-ID scaffold0054 2; pos 3515283 to 3516259)
tttcaggtgatactttcgactgactcttattttactattctttgtagatctcttaatgtctatgatatactttaggacatcctatgtgctaactttctttctaatcttaattcatctgaagttttgcatgcatttcttttatatgataatgttggtataccttgatggtattatggagactttgaagatattcaactataggtttctcaatggtgctttgtgatttaacttgattatgattttgatggtttcaaactgtttggttgattaatttgttgaaaataaaaacatcactgtgcagcaaattgacctgatggaagaacaaaaacctactctttatttatgtgtactagttcagtgtaaattgaaaggaaacttgagttctgtttatttcatttcaagacaggaaatagaaatcacctaacttttatatagatttcttttggctacctaatttagtggaaaaacttttaaaatagatgatacaaatgagatggtaaaaattaacttcggaaaatgggaaattgggttaacgttgagttttgtaagttaaaataaaataaaatctgtaggtaccgccatttctttctacatctaacttcaagagcttctcttaatctgtctgcttggatgtgtcgctatttcagcaatgctaaatagcccaatttctttgtatatatgagagatacagcagcaccaatttttctttttgtctgttgtacctgagaccatacaaatagctaattgaagatcatattgaagaacacaatgattaatacaacttcatataaatcatgatatctttttattcatctctaaaaaagctcgttacacttaccaaataattttgaagattgctttactgaattttctatttgtttatttcaaaaactccagtagatttcagatagaacctaatatagatctaatttattttctggcttcatacagatattgggtcagttgtgtctactatc

SEQ ID NO: 67097 - DNA, 515 bp, Cucumis sativus
  Intron number 1 from transcript Cucsa.161960.3 (locus Cucs a.161960) derived from phytozome v7.0 (chr-ID scaffold0114 4; pos 1720826 to 1721340)
tgaggctcgagggattcggatctcgcgtctgtggggtaatttcattgttcgtatcatttgttttgttttgtttttcttttcgttttgtctctgcaaattttggtgatatggaagaattatttggtttagatatattgtggttgatggtgtaaattgtggtttgaattattggattgatatgcaccgacatttttctagactgattggaatagggatatttgctttgaatccagtttcttcgaattattattgttatttttttgttttctatatgaatgcgaatgctttatgtatattagaagaagcgatctgaatttttgaattaatatggattataaaattgtggaagtaagcgagaaatgcttgtggcgacggaaaatatattgggatagatgggttttattttgttctataggagcttaagacgataatggttcaatgttcgagaatcaaaatccattgatgtaaatgcttttcatgatgttgttgtagagcttcagcttactgcgttgaag

SEQ ID NO: 67098 - DNA, 619 bp, Cucumis sativus
  Intron number 1 from transcript Cucsa.074620.1 (locus Cucs a.074620) derived from phytozome v7.0 (chr-ID scaffold0078 5; pos 491106 to 491724 reverse strand)
gaacccttctgatttcttgttggatctttctagtatgtccttttttatattttctttgatataataattgctctttcaatttatatatatatatatatatatatgtgggatctttccaaagacagtaacaaggttaaatttttatcgttccgaaatcactcgactctcaaatatgtcgttcattaaaaatctatattaatgcaagaaccaatggcaggaccattatttagagtatatttagagtgattttgaaattgctaaaatcatttttatggattcaaaaccactcttgaacaccttcagccatgtaaaacccatgtaaaatcaatttggtgttgtttaggagtgatgttgaaagtgacaaaagtgattttctccaccttaaaatcgtttcgataatggtggcacaaaattacaactgtgatgttgcatgaattattgttttgtaggtttgtcaatgaacgaggcagaagaggaggcaggcttggttaaggagaaacttatttcatgttacaagaacaatgctatagctgaaaagttgctgttagaattacaagatagtgatgaacaacatttggttgaagagggagcagaggacaagagctttggacgttggtct

SEQ ID NO: 67099 - DNA, 821 bp, Cucumis sativus
  Intron number 1 from transcript Cucsa.166160.1 (locus Cucs a.166160) derived from phytozome v7.0 (chr-ID scaffold0115 3; pos 1442371 to 1443191)
caggtaaacttcatttttgaatccctaactcttctactttttctctccatttcactattgttgtgctccttctgtttgctgatcgaaaaaccaaggaggagaaaaaaaattgtttcattgtggttaaatctaatttatttaactgcgagttaaaattgttgactaaattactggtgaataggaatgaaacagactgaagaaaccctggagcccattttccgtccttcaaccaacctcctatgatttgggccgaagagttgtttgtgtatatctctctctcaacttcctttttcttcttcttgcttttactgcaactgaatttgtactttaatgtcttttcatttcacaaaacatgtcacttgttttagttcttcaagtttagatgtcttggttggttaatgtttttcttgttccctttcttctcatctgggttagagcttggaacattcactgcttgaattgatcatgacttcttaacttgaacaagtgtaaaatttcaattttttgggcagttctagtggttctatgttagatttcatacctttctttgagtttccatttatctcttgggtcttattttgtttaactagggcccttcttagagttgctgaactttcttgggtcgtattattccatttattcttaatggaagcttagcgttttgttttattttattttttgaaaaaccttcttctattcatttctaatttgtcctatctacttgtttgcctgtgctcacttctctgttatcttccgttgtaagtaggattgtttatcatttttcaagatgcttgatctgattgatatcttttttgatgtag

SEQ ID NO: 67100 - DNA, 946 bp, Cucumis sativus
  Intron number 1 from transcript Cucsa.147650.1 (locus Cucs a.147650) derived from phytozome v7.0 (chr-ID scaffold0110 7; pos 86407 to 87352 reverse strand)
tcagcgatcccgtttccgttaacaatcctggcaaggtttgtggttcaattacttgttcttagtctctttccctagtttcctattgtgagttatggatgctcgaacctaattttcgattttatgtgcgattagggtttgtgattttttttttttattagttgttgagttttgatctaaattttattgggtgctgattatttttagcttaagaagcgagtatttgactacttggggcaggggtgatgaactgatgatgattcgtgccaattcttagtgttagctgagttctagacaatatgtgtgtttggtttgtcattgagcagacaatatttgtgctttccagtctttactatgaagttagtttttcaattcaattgagctttaaccttgtaaagttcagtcattagtcctggtaataatcttacctggtgagttgaaatgttgatatgaagctccttcttctacatgatgtgcaagggatttgattagtttttgaataattattgtagaagtgaagtacattgacttttaggtggttttgggttttgtatcttatctgtatataggtcttggttttccatttgttattgtaaatgaatgggttcgtgaactgatagagtggaagagttaacgcagctccttattattagtatttgctgttcagtagcacgtcttgtaagaatgctgtaagatggaacgagtgattaagaaacccataggattattaagctgctcgcagcttgcagtggcagcaaatgttgtttctagtctcacaagttttgaataaatttatccatacaaaatttctactttttaattgcctttgatttatattaaaccacctgtgagttttatgtcttctcgattgatgactaaaattggaactggattatttaataattagtattgtgcatttttgtttgagcaggattttcacaagggtaga

SEQ ID NO: 67101 - DNA, 826 bp, Cucumis sativus; identical to SEQ ID NO: 64274
  Intron number 1 from transcript Cucsa.180090.1 (locus Cucs a.180090) derived from phytozome v7.0 (chr-ID scaffold0123 3; pos 434625 to 435450)

SEQ ID NO: 67102 - DNA, 560 bp, Cucumis sativus
  Intron number 1 from transcript Cucsa.195780.1 (locus Cucs a.195780) derived from phytozome v7.0 (chr-ID scaffold0135 2; pos 118868 to 119427)
taaaagaggcttctctatctttatccgtaattgcggttagtttcttttgctattctttagcttctttaattcgaaatttatgaacatagtgttgtgggggcttgtttgttaactgacgttttatgttttatgttactgttcttgtgcaaggtgcatctattatctaattccaattgtgtatctgattttttattggatttcattttctgggagcgtgttattttgatcattaagttgggtttttcgaatggtgagttcagaatgaatataaggtgtttggtgaacggattctgtgagttccaagattcattggaagtgggtattttatgggttcctaattagtgatggaagtgcatcatacatcgtgtgaaattttgtttagaatctcattttggtcatttagattattgagcttaggcagaaactttactttctcgtgtctattgatcagtggatcaaataaagatctaagctggggttgtttttgagcaccttcaacagccctttgttactttgtgcagtgttttaatataactgtggtcttcttcaggatcaacctc

SEQ ID NO: 67103 - DNA, 740 bp, Cucumis sativus
  Intron number 3 from transcript Cucsa.161440.1 (locus Cucs a.161440) derived from phytozome v7.0 (chr-ID scaffold0114 4; pos 1339120 to 1339859 reverse strand)
aagaacttcttcatcacttaaagtgtctgaaggttagttcttttgcatgcaagtgatgtaattcgtcatttatctgaatgccaagtagttgtggagtttttatttgtcattatgtagcatgaaatgcagagtttggagttatggaaaagcaatttcatgttctagccaatatcgcatgtaagacaaacgattgcattacacaatttcatgaaagaagaagaaacttagatagcaagagtgaaagttttagggtttcaattttgtggaaaggttggtctaaatgttgacatcatctgtctaataaaatcatgcaaaatcaagtgaattcattctctacccattggtgcatcttcatgactatgtctaattggattactcaatttcatgaaagaagaagaaacctatttagcaggtgtaaaagttaatggttcaattttgtcgataggttggtctaaatgttgacattgcctgtcccgaacaaatgataaaaaaataaaaatgttaaatgttataaattctcatattaactgcttatattggagatgcagaacgacagagtccttaaaattttaaatagtaaagcacttcattttcagaatttcagataagctcttgctgtactattaacttttgtatctatttccaaattaaggattgttgtggattttattatcattattttgaatttgtatttggatggttcagggaagaaggttggtagagctactgaactcccaaag

SEQ ID NO: 67104 - DNA, 1065 bp, Cucumis sativus
  Intron number 1 from transcript Cucsa.088560.1 (locus Cucs a.088560) derived from phytozome v7.0 (chr-ID scaffold0088 8; pos 838468 to 839532 reverse strand)
gaatattgcaagcctacagggaaattcaaaggaaggtgctatatgttcaaatgagttgtttttcttaagaactgttatcaaatctgcttaattctcccttctttgtttattttggcttatctgatgaaccattttgcttttttttcttcttgaacactgtcgtccgagcattagctagtggaaggatgatttattattaaagctaagaccatggaaatattttaagggaaagggcatcagtagaaactgaacttgttggtgtaatttttccattgaagaaaaatgcctctggacagtgttaaaccagtggtgtataaatcatttattacttgtgtgatgatccacaaggggtggttgattgctatgtaatcaaaatttccacagtgaattatcagaagctggaacaaaatgttagagctatctcctaggacaagtagaaatccaaatatgggtttggtttctcgtggagagaacgaggataacaataataataaaaaaaatactctgtttatgattgaaaaggtttatgttatgttttaatggctgggttaatgatagttggggagttgtcaaaatttcactaccatataaactttgtttcttgattgtaaactttatttttgtgctataccatttccaatattgaatttttatttgatagaaatatgtatgaatataggtacaaatagagatggaaaaaaaacgaaccaagtcaatttgggatgacattacaaccatatttatcaagcttgtgttgttgaaactttaaaaaggaatatgccaaatgaacatttaagtaaaactggatagaaaattttgattattgcgtttagagagaaaacatataaggtacattggtcaaaaaagtattgataccatcatgatgacttttgatgtggaagccaactgagatgcatgaatgaaagtatttaatcttaagcattcttccttaagatacacaattgggagagtatttgggcgtggcccatttagaacgatcggtcataagctctattttaatttttttcaggcctagacgaaaccataaccgcagttgcgaagttc

SEQ ID NO: 67105 - DNA, 855 bp, Cucumis sativus
  Intron number 1 from transcript Cucsa.130170.1 (locus Cucs a.130170) derived from phytozome v7.0 (chr-ID scaffold0102 9; pos 114205 to 115059)
atcttcaaggccactgtgagacttcatttctttcttctctttcttttaatgggttttttttatttatttttatttttattctttttgcttattttgtttttgttgctataaatttgatttagaattagatggatggaagtgttgagatgtcaatttcacaaaaaagaaaaaaaaaattcataagaaagtatccaaatccataaaatgtctgatgtgaataggtgttcttaaaaaaatttagaaacaatctttttaaactataaaattattgaaaataattataataatttgattgtagctgcattattttttcttttgaaagatgaagatatattttatttttgtgaaggtgtcaaaataaatatggttaaacatgatatgacaatattaggaaaattataataatatgaaactttttcattgttttttttccccctctaaaagggtgagtctactaaggatatgtttgctattttatccaaattcacatttttgtttccaaatttataaattagaatgaattccataccgaaaaagtaagactatatttacatttttttgaaaaaaaaaatgataatgtatttggttgttggtactataaagtgaaattaggaaaatgatgttaagtgtttaattattttattagatatactaactaaccaatacagagtttgtgaaaatattaatttagggttaaatcatgtatttggattaccaactaaagacacaaaaaacacaagagattcaactagtggtaggagtaaacaataagtttattagaataatttgagtaatattataataaggtaacaaaggagaatgaaatatgatttgtttatggaacaaaggaataca

SEQ ID NO: 67106 - DNA, 682 bp, Cucumis sativus
  Intron number 1 from transcript Cucsa.037070.1 (locus Cucs a.037070) derived from phytozome v7.0 (chr-ID scaffold0047 6; pos 47601 to 48282)
ttctcctttctacaccctttctctttggaatttgggtatgaatttacttcttattcttttgatttcttagatatctaatttcatttccattttcacctggtcctttcttcttttgggattcaaccatttgtatgctcttatttcatttttattttcttaattttttttttacaatgtgttgtccaagtcagttttttcagctacttcatcgtttccttcaataattagtctacaggtttttatattttacttgtttcctttgaaattcttgttaatttggctggtgtgtgtgtgtgttgtgctgaaggtgaagttgtagaatttttgtttttcaattattataattggaagagctttgacttcatgtcatctgatggtaagaagctcacaatttgggttttattgaattcatatggggaaaaggttgtttctgcttctgttagtaatcaaattgttaggtttttggaacttagctccaaatctaatcatatgaactttggtgattgatggtttttgtatatccctttctagatgagatgtatatgctttggttcattaattttgtttctctggatgtatttgtatatatgtcttccctctatagatgtcaagattgatgttttctctttccctctttccatttctagatattgggcttagcgataagctgacgtaaattaag

SEQ ID NO: 67107 - DNA, 499 bp, Cucumis sativus
  Intron number 1 from transcript Cucsa.124050.1 (locus Cucs a.124050) derived from phytozome v7.0 (chr-ID scaffold0100 1; pos 109310 to 109808)
cggcgttggagtcttcactaaggttttcttttcactcactttcattccggatcaataaatatgccttgtattatctttaggaatcttctggtttcttttattgcatttctttgttctttgcctttactgattactaaagaaaaatttccccccaacttttttcaattactttcccactcatatgcccatttcccaatttgaattgcaagataatttacttatcactgtgatctgtaatgttttgagctttttgaactgatttttttgttggggatttctaatttttagcgaagtttcgtcagtattactgccgtttctctgttttgcatgcatactttcattaatcgatatcatcgaaggacacgggccctgttcttttgtctgatcatttcctggcatgcgttttgtttttagcttattgtcaaaatttccccaccttctgcttccctgtgccctgcattttgattgtcgtaatttattgtgcagactgctgcagagt

SEQ ID NO: 67108 - DNA, 623 bp, Cucumis sativus
  Intron number 2 from transcript Cucsa.077040.1 (locus Cucs a.077040) derived from phytozome v7.0 (chr-ID scaffold0079 1; pos 149769 to 150391 reverse strand)
tgggaagctgatattacttcaaagcttgtgatacggttagtctaagattcttagagcatgttggggagtttcacttttctcattttcaaaagaaatttttaatctttcaaaaccaatttttacgatgtaaaaattgcatttgaaagttcaaaagtaaataatatatttcggggtgaaaaaaaatcactccacttctcccattgtttcttgttctacttgtcttgctcattttctgggtttgggcatgagagtcccgatggtttctcattcttgatgtttattcagaatattttgactttataggtcttatgcatattgtttgctggggttcttcaacctttatactcttgtgtcttggttcttagaagttctacttatttactttcatagactctggccctttctgaagtgcactgaagcctcaggataatttattctcggatgacctttattttttcactttgcgagggtttgactcatatttctctgagatctcaatatgattgaagagtgatctgggagaaaaattagttgaagaaaaaagatattggaagattgatttattagttggttttgatcaagtacaatcctatttaaacagattcttttaacagttttgcttg

SEQ ID NO: 67109 - DNA, 708 bp, Cucumis sativus
  Intron number 2 from transcript Cucsa.127090.1 (locus Cucs a.127090) derived from phytozome v7.0 (chr-ID scaffold0101 7; pos 899253 to 899960)
acaatgtatttatcttaactgattctctgtttcatgcttaccttggtttgctttgtttaatttctttatttgggtctagattttgcaatatttaacatctatttatcgttatgactagttcttcataaccgctggatctttatgttgaatttgagtttaattaatgaggcaaaacgtgtggattattacttttatagggaagagaatttcttgtagctattccgtgaagcttattgttgaattcttaagcttgtgaaagccttgtttcttcttcagctgtactttcttttttgtcattaacagattttcttaggcgttttggtactcatttagttttttgtttttgaaagttgagcctattttctctcacttgcatatcacggttttcactttctttaaataaaaaaaatagttgaattcttaaccagattctaaaaacaagtttttaaaaactactcttttagttttcagaacttggtttagtgtttgaaacatggatagaaaaatagataataaagtaaaatttagaggcggaaagggtatctataggtttagttttttttgttgaaggaatgattgcaaaggttctgatataatccatggagagtgatactgggaggcttatattattttgtcatttaagcataatgatctcctttttccttcttctcagattataaaaatcaaagatattattccacctccaga

SEQ ID NO: 67110 - DNA, 929 bp, Cucumis sativus
  Intron number 2 from transcript Cucsa.178350.1 (locus Cucs a.178350) derived from phytozome v7.0 (chr-ID scaffold0122 7; pos 532033 to 532961 reverse strand)
atccactgcaggtgtgttttcttaagtttttttttttttttaaattttatgctaaggaaatgtttgtcggcttgtggttttagggttatgttctctaagtatttcgagttttcttggcaaatactggtttttggaatgaagttgaactagataggtagaattgcggttgttgaggaaggagagtggatatctaagagactaggacgtctatcattctttttaccataagaagtagattaagttgagatttagatgatgctgtacgtgagtttagaaagtgagtacgtagcaccgagccctacctgtaccagataaagctacgcttatttgtttaagtttccattatcttttgaaagttcgtagagaataatacattgagaaagaaatctgtttgtaattccagtatttttcttggtttatagtccataggtgtcatgatacggatcatgttacggctatgattcattagagtcttttcttattcttaacccttccatttagctgaattttagtctctttgttgaaggacacggtgctgctaatttatctctgatagttctgcctggaatttggttaataaggttagtaggacttagggttttgtaactttagctagctaatgattattaacgtcttcaattgtaatattcctttagccttgcggagggtttatagaccttgactcctacattgttcgttttccttcttttgaggaatgtacatgttcctattgtttcttatttaaacaaggaacttagaaccttgattgttggacagcaagaacattcatgagtcatttccctcttctttttgctgtgtgtgccatatggttaaataaacttcttgatgttaatgagccattcaaattgcatttatttgtttttgaatttataggttgttgagaaagtagaaattgaatatatacctga

SEQ ID NO: 67111 - DNA, 785 bp, Cucumis sativus
  Intron number 1 from transcript Cucsa.177360.1 (locus Cucs a.177360) derived from phytozome v7.0 (chr-ID scaffold0122 5; pos 1390678 to 1391462 reverse strand)
accaaagtactaaaaatatttataaacataataaaatttaaaattgaaggatacacgaacatgatattttaatttatttgagtgtttttaaaaatgagtcgggataaaagtattattattgtttaattaatttgatttaaaagtaaaaattaaagtgagtaaaaatacaaaaaaatgttaatataaagagaaaaatggtattttaggcatttgaaaaaaaaagaaaagagaaaacaaaaaaagaggccggtggatatttgaccaaaagagttacaaatggcgggagagttgcatggagtttgatacaaacctttgattgtccagatttttaaggagacgatccgatttcctcgctcaattattattttctcacataaaattataattaataatttacgattttccccccaaaattcacgagaaagaaaatccctcaatccctcaatccctcaatctccaaatatctattttctctcttcatcctcatcatcatcatcaatgcccattgccttttcaatccaaatcccttccttttccctttttctctccctttatttctactctttttcttcatcttttcccttcccttaatctctcctctcttcctctgtatgttcttcttttcctctattctttttctccattcattcataatcatattctctttttaatcttcattatttcattccttcattcattcacctcatcttgtagagaacaattagaaagtagggctttcgcatggagaagaagacttatcccataggtgaagattcttatattct

SEQ ID NO: 67112 - DNA, 881 bp, Cucumis sativus
  Intron number 1 from transcript Cucsa.182110.1 (locus Cucs a.182110) derived from phytozome v7.0 (chr-ID scaffold0125 1; pos 222754 to 223634)
cgtatctgaaaccctaacttccatggcaaggcaaatagcccacatgatttgaaaagatcagagaattaattaaatatatattccaaaagtggaaaatattatttattgcttttgggtctttgggagagttcaatttgtttttcattgttactcacaaattttgatggccaattctctctttagattgttcactttattcttctttgttctcatttccatcttcctccttcatcccaatgttgttctctgtgatggtactgatctctctctctctctctcatgaaaatttcaaaaggaaaaaaaatcttgattttcttttttcattcttcactcaaacatgagtttatgtttgttttaatttccataattttcatcattcttttcttttaaaatgcttgtccatccatctcgattttcttttgtttaagactatggatgatcgactttcttttgtttaagagtatggattggaagtggttataaaattgttgaaataactctaaaacatgattttaataaatctaaaccaattcttattatatgaaaccacgtttcctaaaatttagaatgaatgtataattttgtttagttcatgttataagtatattttcagttttgaagtatgaagtatgaacaaaaagttaaaactaaaattccaaaaccaaaaaacaagttttgaataacattttttgttactaattttcaaaaaaaaatttgtagagtttttgaaaccatttggtaaacaaattaagaactttcgagagataaaactgaaaaacaaaaaacaaaatagggtcattaaatttacctcaacataaaccaacgagaacctaaccatatcggccccgacatggccactttttgattttttgcagtgaaag

SEQ ID NO: 67113 - DNA, 615 bp, Cucumis sativus
  Intron number 2 from transcript Cucsa.090570.1 (locus Cucs a.090570) derived from phytozome v7.0 (chr-ID scaffold0089 4; pos 1796161 to 1796775)
ctcccaacattattgttagaggcattacttttgaggtgctgtggcttctaaaaactgattttatattcatagcattatttgagattttgaagctatgtaaggtgcaagttaagtttgtagttaatgatatatatcgtacggcgtacgcacctgagataggtttgagcaggattctatagctcaatcattgatcaatgtctgtcttgttacggaattaattgttgcttttgtatggtaaatcaacatgcttgattatgtgttattgtgatgcacacagaactcattcaaccttcgagaagctccagagctgttttcttgcgatgatggaacttacattacacaagcaatagcagcaagaatctacggcgacaaatcagcttttttcaactgtggattcaaagggtatcaagacacgttatgggatgtacaaggtcgccatttcttctcacattgctacattgaaggagccatagacttcatctttggtagtggccaatcagtttatgaggtactcagttcaaatgtcaatattctgttatttaccccattgaaagagacttactttttagcaacttgggaccataaatgcatgttcttttgacaatgtaggattgc

SEQ ID NO: 67114 - DNA, 712 bp, Cucumis sativus
  Intron number 4 from transcript Cucsa.103650.1 (locus Cucs a.103650) derived from phytozome v7.0 (chr-ID scaffold0092 7; pos 2400761 to 2401472 reverse strand)
catttggtccagaaagtactaatctggtatgtataagtcatctccaaccccaaatttttggtttattgggtctgtttacaggtcgaataattgattgatctttcaggagcgattatgaaattgaattcaattgaaaaagttctccatagtgctgaaaacatgccaaatattttgaattctgattatattttggatcttagtaattatcattctggactctttggtacattcgttaaactaacctttttgtgattcatctggccaaccaaatcgtttatttttacttcctctaaattctctcatttgcagagcttctatggatgtaagatctacatttaatgaacaaaaaagggcaaaagttcccgttatcgttgattccattatattaaggaatggttttcatgttttaaagacattgcttttgctaatttaaaatgttaatgcaggaatatttttgtttctgacaacactcattattgacttcttatcgcctggaaaagatgaacttcaaatactaattggttgtcgtggttgctaaatatttttcttacatttgttgctaagaatgatagtatcttttttctgtaattcaaaatacttaattagtatgaccatctcattgaaacatattctctttgcttacgattgtagcttattcctaatccccgtgtattcaggaagtctacaaaaaaagtatatcttccataatacc

SEQ ID NO: 67115 - DNA, 868 bp, Cucumis sativus
  Intron number 1 from transcript Cucsa.161240.1 (locus Cucs a.161240) derived from phytozome v7.0 (chr-ID scaffold0114 4; pos 1148577 to 1149444)
aaggcacgactactcctcttcctgagaaggtgaagcttctttcattcttggttatgtgtttgttttttgacttttcttgaattattgggtttttgtgttggtggtttgagaaaagatagcgaaggattagtgaaggaaagttgggggcttgatttcttggacttcttggctcattactgggcaatcccaagttcttcgggggcggtctttttggttatgagctgatgcaacttttagaaatggcatagttttgctctgaacttctgagagggtttccatatatttggagctaatgaagaaatgggaatttgctattctgtttgatttcatttttttttctttatatttggaattgttttcagatagtgtcatagtatccatttcaaacttctcgagctgcaaggatctgattgtgaaagacaaatactttgcatggaaattattgtggctctacctttatctttccttttgtgattttattcaataccctatctctcagcctttctttctttagtcttcccgagagaattatttcttgtaattttattcactttattagctcttatttgtctccatcttgttgattgatcattttatactgtatttagcataggattatcttcatttagatttgttcttctggaatgacgtggaagtgatatgatgcccatttaaataatgcactctatttttatattttagttttttgggacagtaatagtgagagattatatctgggagtatcccttcatgaatattgtaaaaaattgttgtcatggacgttttttttcttcagtttctttttcaaatggtttatcctctttatgcaacaggttcaggttggtggttctccattgtataaagttga

SEQ ID NO: 67116 - DNA, 360 bp, Cucumis sativus
  Intron number 1 from transcript Cucsa.166050.1 (locus Cucs a.166050) derived from phytozome v7.0 (chr-ID scaffold0115 3; pos 1339533 to 1339892)
cgaagttcgatcgcggatcaaatttgaagcctaaggtctattgctcttcttcttcttctatgaaatttgggttttacttggtgtcatgaagttgatttatgagttgtgttggtgattaattggtatgtggaatggagctaagatttgagaaatggttatgatttgtgaaggtgaaggtgggttttttctgtttttcctagatggctgataagaaagggaaatgagtttgtttgagataacaatttttgttttctgatgggaattctgagacttccttgtgccgattttgatggaaattagtacataaactttgttctttctttgttgtgtttctttcattttccctcgtgatgtgtagat

SEQ ID NO: 67117 - DNA, 1015 bp, Cucumis sativus
  Intron number 1 from transcript Cucsa.032420.1 (locus Cucs a.032420) derived from phytozome v7.0 (chr-ID scaffold0042 9; pos 1719936 to 1720950)
gaggccctgccttccgcttcacggcttccgaggtccttttcccccttcttattcttcttcttttgttgtttttccctctttttttttcctttctattttcttactgtgaatgatgtgttcctgatgcatgttagatgcttgagttgaaattttttctgggtttgctcaattgctacgtctatttgcttgattggtttttttttttagaaaaagattaactttactgattattgtgcttgttttttttttttttctgtattggtgttttggggaggtttcttatcgatttcttttgaactgattagctgttttgttattttctaacttgtattctgtttttttttttaaaaaaacatttccccccatttcttaatccacttgtgattgtgtttttccccttttgaattacgatgccctgcccccaaattactacttctgtaactggtttgctttcattgcatagagtcgaggttgtggttggtgtaagtgtaggtacctgcatttaggtaaggattgcagagagggagattgttgggatttgctggataacggtaatttggaagagtgccattttcaatcacgctttccatatttatgttttggtgagtggtgagagaatttgaagttgctggtagttgaacttttggtttagagcttttgataaaatttgttccagacccaaatggaatagatctaaccatctgaatttgagtggatattgtgttgaccccgtttcgaaatggaacagttgggtatcttttggcctttttgctgttcattcgtaagaaggtaactaattttcctgccggatgtattttgttctataaggaaatacattcttgatatggagttgaaaattgtttcagtcaaatgaagtttttctgttcttgctttaaggctgctgctgtagttgtttcttttctgggcattataatctcataggttacaattccttaaaagtcaaaacttccgttgaatgtaatattcaattcttatttttatcaaggtcgcggag

SEQ ID NO: 67118 - DNA, 368 bp, Cucumis sativus
  Intron number 2 from transcript Cucsa.090130.1 (locus Cucs a.090130) derived from phytozome v7.0 (chr-ID scaffold0089 4; pos 1510367 to 1510734)
atttgttgtgtgaagtctttgtttgttgtttgcattgcgagtttttgtgttgtttatgtgtttactctgtttggattttcggatggaggggctgaagatttctcctgtttttttttttttgtatgatttgaattttgagtagtgaatagcttttgttttcttgggattcaaaagctctttactgagtgcgttggaactctgacctgttcatggttttttcgatgagagatttaattggaattttgttgagcattaaatgtaaaattgtattcagggaaagaaattgaacttttcctttttctagctcggttaggattttttattcattttcagttacggaagcggttcctgttttagatcatcacaaa

SEQ ID NO: 67119 - DNA, 775 bp, Cucumis sativus
  Intron number 2 from transcript Cucsa.136720.1 (locus Cucs a.136720) derived from phytozome v7.0 (chr-ID scaffold0104 4; pos 1298224 to 1298998)
aatcctaattctagaatattggccttgaaaggtattgtatgattatgttgagttgacggttttttgttttcaaatattggtgttgtagaaatgctgatataagaaacacagattttagatttggaatccatgatattatttctaattctgtgtcattttggaagatgtatgccaatcattttctaaagcattctattgtttaatgatggtcaagtttgcctttagacctttctttttgtttgttcatgccttttgctgttcttccctttccattacataagttcaatgatggccaagttagtggaatttgatttgaattccgtctaaattaggtttactcaacctaacttctatgtgaggagatcattctacatggccaagtttctaggtttttgagttcaactgtcatacattccttaaatggagttttgaaattaatgcgtttaaaatgtctgggaaatgaacatgctatagaaaccaggagtcttttccatctggaaagacaagattcatatcaacatttacatttgaagtatgccgaatcacttgaacacatgttcttgatttagtgactgttctgaactgaactcactctatgcaagccttatgttgtgaaaatcctttccatgattgatgtggctcatttattggtatggggtttctaccaattacccgtgtatatattatttttattattttttttacttctgaacttttgcctctcttgcaccatcatgtagctcaagtccaggggtcaactcaagaccacctacaa

SEQ ID NO: 67120 - DNA, 807 bp, Cucumis sativus
  Intron number 1 from transcript Cucsa.166360.1 (locus Cucs a.166360) derived from phytozome v7.0 (chr-ID scaffold0115 3; pos 1571631 to 1572437 reverse strand)
agtgtcggtgctggattcaaatttcaaatatgtccatccaaaatgagctaataaaatatgaatggaaactcattaaatttataaaagaaaaaaaaacaaacaaacaagatattgcatgcttatattattattactcagaaaaataaaattggaaaatatgaattaagttccaactttgtaataataagaagaagaagaacaaggtgctactactagtaagagagagtttggaagggtagtatgatagaagggctatggaaataggaagcattgatgcataatttgacaaatcatgtgggaattatatagacacccaaaaaataattttgcttctcaatcattgtctttgctaatatatatatttaatagtgaatggcaagacatgttcagttcaatctcttttttaggggacaaactttcaatattctctgtgggaaaagcctttttttctttcaagaataaaattaaacaaaggactttaatttgccctctaaacttagggtacaatgtgtttggtcctactgttttcttccatttactttcattcaaattacgttgtaattttataattggaagacaattgagtcgatattcaattgcaaatcttgactattactcgactcaacacaactttttagtcgctttttcttaagaacaataaaagatgatagagaataacaaaagtcgcacttttacaagtcgtgatcattaagtgatgaaagtcattaaaaaaaggtgatattaatcgttattcataatttttagtacatgttaatagtactcatatgtaatgtggttcgacagcct

SEQ ID NO: 67121 - DNA, 599 bp, Cucumis sativus
  Intron number 2 from transcript Cucsa.158300.1 (locus Cucs a.158300) derived from phytozome v7.0 (chr-ID scaffold0114 2; pos 413108 to 413706)
cctggaggacccaacttgccatttggacttggaaggtagctttaaggcttttgagcatttattatctctttattgaggatgttatattggttcagatcaatcttttggaattagaagagtcgtaccccctatatttgattctttttaatccattgatgtagtctgtttgttaaacattgccaattagattacttactctaggccaaaagtttgataacatatgtgaaaggtttaattacaagttttatatatcagcttttgaggtttggcatgtctgctgctttattattttaagaaatacgtgatgctcagctattttcaagttggtaaaattattcaggtttgaataactataaagctcaattaaatataaattgaaagtttataaccccattaggattttttaactgaagaaaacacaactaaacttttaaagaaaagaattaagtagatctaatataatcttctagctaaatgaacaatcttaactacattttttttaaagtgcatgagagagcaatcttaattggcaaccaacataaggaaagagttaaaatttctgtacttcttttgtacgcaggagcaaggccaaattccag

SEQ ID NO: 67122 - DNA, 406 bp, Cucumis sativus
  Intron number 1 from transcript Cucsa.021690.1 (locus Cucs a.021690) derived from phytozome v7.0 (chr-ID scaffold0030 9; pos 72528 to 72933 reverse strand)
tccctcatttgactgattatctccctgaccttccggtagttgcaaaaatttgttataatgcctcaatcatgtcataaccaattgagttatgtttagaaaattttcttttacttattttgttatgtttgattctgattttttaaaccttactatttatggaatttatcttcaatgattaaagtaattaaaatagttagtaatccacaagatcatggttaaaaagttaaatttcactttagtatctactctgctttgattgtgagtgtatacgttttatgtttttgttgttttcctttcccctccgtaattttaaaattacctacttttatggacgaatgaagaatgaaaatttgtctgttctttttttacaggcaaatctaaatcctctacaagacaatcctgccta

SEQ ID NO: 67123 - DNA, 323 bp, Cucumis sativus
  Intron number 1 from transcript Cucsa.106610.1 (locus Cucs a.106610) derived from phytozome v7.0 (chr-ID scaffold0093 0; pos 149515 to 149837)
atctacagctacgagctacctaaagaacccaaaaggtaaactaaacaaacaataagttcaaccctaagaatcctaccagcatttgaagaagagggcggttttcttactaagatatctgtcaggctaccttccgtagggggtgactgcaatatcggtgttgtctacaaaaaaaaaaacaatccaaagaaaattccaaattcagatccaactcccacaaactcaaagaaattaattgtaataatcaggaagtctcaaacgaaaagggaaattgaagagagataataactgaacttacgatttgaagggatttgagcgtctctaag

SEQ ID NO: 67124 - DNA, 900 bp, Cucumis sativus
  Intron number 2 from transcript Cucsa.120460.1 (locus Cucs a.120460) derived from phytozome v7.0 (chr-ID scaffold0099 8; pos 2554039 to 2554938 reverse strand)
ggcactggctgctctttctggaaaaccagttccaggtccggtgtactactcttttaacttacgctcattggatgcttttcgtttaaatctaaatgatgggttttcattttcctttaacagtgttcaaactgatgaatgaatgctcattgcaccccattgccttcttaaatttgacatatgtctgtgagagaggttaagaaattgacaatcaagataaacagtatcaagtaaacaaaagagaatctacctaaggattttgtgattcactaaaagtagtgtgtttgttagttagctccattgcttaaaagagcaatttattatataagaaaatattagattaccaactctagagttgagagttatttagcaaactcctccaaatttgaagttcaaaatcgtaaatatcataaacaacacaaatacaaatgcaacttagtcaatgaggctcgtgtttggtgatgtggagcgggaattctaacaagatgaatgaaatagtacatatttgcgtttatcttctgtgaagcttatgttgacgtgcaattgggattactgttcatttgtctttgtattttacaaaggaagtgaaattattctaaataatgaatgatttgttaatcgaaaacaaactaaaagaagctgccaaatggtggctgattggtgagagtttttacaacatggataaattacttcatgagtctgagatcgtgcaaattaaatcttcattctaacttttctctaagctctaatactctttttactagtactacacaactgatttattgaaagctcaaattttcccttctcatgttcctggaactgaaaaccaatttgtgcacgtttaatagatttagtgatttggtgtcaggagttgttcgtgaacggaagttgtcaagactgcca

SEQ ID NO: 67125 - DNA, 909 bp, Cucumis sativus; identical to SEQ ID NO: 62679
  Intron number 5 from transcript Cucsa.022980.4 (locus Cucs a.022980) derived from phytozome v7.0 (chr-ID scaffold0032 0; pos 263701 to 264609 reverse strand)

SEQ ID NO: 67126 - DNA, 464 bp, Cucumis sativus
  Intron number 1 from transcript Cucsa.032360.1 (locus Cucs a.032360) derived from phytozome v7.0 (chr-ID scaffold0042 9; pos 1689824 to 1690287 reverse strand)
tcggccgccccctcattcagactaatccttacgaggtaccgctttttgtttctttctctaatgacgaaaaaagaaaaagaaaaaagaaaaaagaaaaaagaaaaaagaaaaaagaaaaaagaaaaaagaaaaaaaagaacaattaatgctccagttctgctatttctaccttggggttcttattttattgtttgcaaacgatggatgggttgtggggatgttggggaagagcatattttagtgtgtttccaactatattacgtgcccaaggtgtatgttttcttgcatattcttcgttcatggtattgatgtgcggattatggtgttagagcccctaaaaggtggttagtatcgttttaaaacaatgtgtattgctttagcttaatgcccatttttttgtttcttggattggacttaaaacaccatcattttgattaatctgttggtacttatcgttccacagg

SEQ ID NO: 67127 - DNA, 288 bp, Cucumis sativus
  Intron number 1 from transcript Cucsa.089100.1 (locus Cucs a.089100) derived from phytozome v7.0 (chr-ID scaffold0089 4; pos 396771 to 397058 reverse strand)
attcgcttctcatttcccaacttcaaattggtatatatctttttcttcttaatttcgtgttctagatcatttagtaattattttattttttgacttttttttgaaaatttatagaactattttccctccatatcatataccattgtttacatctatctttcttaaatatgacccttttttttctaggtcgtttcagtttaggattcaatgattaataaacacactaattaatttataacaaaaaaattaaacagttatattgttactacttgatagtgaaagctctaa

SEQ ID NO: 67128 - DNA, 567 bp, Cucumis sativus
  Intron number 1 from transcript Cucsa.115690.1 (locus Cucs a.115690) derived from phytozome v7.0 (chr-ID scaffold0098 8; pos 265519 to 266085)
ttcgtgtcgagaccaagactaaggtttagattattcctttatgattatctgttttttttctttctttttttcttttaatgattttgtttgtgattggctgattttggaggtttttttttatagttcttcgaaactgtggagtttagttctgtatatgtataagcttataaccgactctctgttctagcttgttattgaattccaatttgatttagtgattagtgatcttgttgaaatctgatttgagttctggaagttcacgagttatgaaatggtgcaattttattgatggttggaagattcaacagattaaaggatgaggagacaactagttgtgattggatcaatgatttggggagatttgaacaatgatcatgtgatgaagaactatatggtggaattgaatttctacagtttttttttataattgatattacttgaggatacattaacaaatctatctgttttttcatttacatctaagacaatctgatattagcatcattttttttaattctaaaactctgccggaatgtaagtaagaattttcttaatttatgcaggaca

SEQ ID NO: 67129 - DNA, 382 bp, Cucumis sativus
  Intron number 1 from transcript Cucsa.090000.1 (locus Cucs a.090000) derived from phytozome v7.0 (chr-ID scaffold0089 4; pos 1403220 to 1403601)
ccaagcgattgaaaacggtgacgacggattctccggtatgtggtgttggtttttcttctgcttggttacgaagaaattttggggttgagagattttttttttaatacttggtactattttgactactgaatgttatgcatttcaacgttgaagtttattatttattaacttttttttttaacggagattgatcttctgtattatttttctttttttggtattccatttgttttttaggggtgagatgatgcacttttgattgttgaagagttacggttgaaatttttatttcaaattgtgattttctcgtcagttgaaatgattttggccatttttgtttgttgtttttgcatgatcttgccaaacttgaagcaacaaagtg

SEQ ID NO: 67130 - DNA, 1020 bp, Cucumis sativus
  Intron number 4 from transcript Cucsa.013920.1 (locus Cucs a.013920) derived from phytozome v7.0 (chr-ID scaffold0017 8; pos 46710 to 47729 reverse strand)
ctttgacaagggtatgttggcgaatctcaccaaatgtgaaacttttagttaattggatgccctatttagtaaagtaatatgaatctcttaattgtgtgtttaagtaatatgaatctctcaatgatgtgtttggtctaaggattttggaggtacagagttatgaactccactccttgtttggcccaaggagttagtgagttccatcactaaaaaacatcaattttatattttatcaacttcttacacggtggatcctaagagttcacaactatccaacttcataatttctaactgtatccttactctaaacagcccctaagtgatagtggctatttcaattttcaagtttttggacacagtgttgttgggcatcatcaacttggtcatttacttggcactccacatgcttatagtatgttaggtatctatctctagtatcctgcagaaatctaacaaaacaagaaatagccaaacaacacaatatggatggaaatatctcagtaacaatgttagatcgagagctcttcattatacagtgagaattatgaatctgagaaagctaacaagctcttcttcctttgagaaacaataatcaacccttcgattggaagcaatagaaataaggcccgccacctcaaaagactcacaatcagtaagaaaataaggaaagcccaaagaaagcagggaaagacatggagggcgttgacactgagaaaaccaaatgtaacttcgtagataaactacacaactgtttttcttatctgcccacatatcatcccaaaaaataagtaccagacccatcccgaactgagctcttaatgaactaggaagacagagggaagtccagcggtttagagttttttactagtcttacaatccttgaatcagtgttttgtttacaatgttgtggtgtatgatgtttttcatatagaggaaattgaatttttatttaacaaaatctcgacatactcatgtttctttttagggaaagattcccttaatcggctgtggtggcattag

SEQ ID NO: 67131 - DNA, 642 bp, Cucumis sativus
  Intron number 1 from transcript Cucsa.089910.1 (locus Cucs a.089910) derived from phytozome v7.0 (chr-ID scaffold0089 4; pos 1318553 to 1319194 reverse strand)
tcgattgatttctttggaattagccaatctaaccggtatgacaattagtgtttcatatcatataaattttgcacatcgaagcttcaaacttccaaaatggctcgaatattctcttgcttattattattttaccatatttgaaaaaaatttcaaacaaaaattttattatttaaaataatttccttaacaacaagctaactagaaaatttgttattaaatttatttattaaaagcaaattataaccctcaaatttccctaacttttttaacatacaaaatctacaataatatgttcaacataattacttccggctatgaactctcctttttttaaaaaaaaaaaaaagtgaaaacgaaaaacaaaaatattatttattattaattatttagaaaacgagagatggcattctttttcaattttcgtctcaaaatatttttctcctccctctcattttcaactttattcaaccaatcaacaccttccacgtttcagctaacccaaatagttatatttcaaaagtgtcggtgggtgtaaatgcgtttgtttctttattattattattattaattaattgttattgttttgcttaatttaaacttcttcttatattttattatgtagaaaataaaaaaattgtttaa

SEQ ID NO: 67132 - DNA, 796 bp, Cucumis sativus
  Intron number 1 from transcript Cucsa.075590.1 (locus Cucs a.075590) derived from phytozome v7.0 (chr-ID scaffold0078 9; pos 249467 to 250262)
ctcttcacatctaccaccctcttctccaccattcggtttgactcctccctctccttttctttcttttaattctcttttgatttctttttcttgtaatttgatgtttaagttttggaactatcctccatttaaaagatttgggaaagacataatttaatttatacttctaaactttgcacaaataaaacaatatgtattacttaaaatcctaaattttcttaagctaattaatttagttttttggacaaatttttcttcgagagccgttcatgtgtacttagttaatttgtcatatcgacatttaaataattttttaaagtaattaaaaaattaattgatttataattgacggacgtttttaaattaaattatatatttacaaaatataacaaaagtttgaatgatggatactaatagattaacaatgtatactaatgctaatagaaatattttgttaaatttttaataatttcatcatttatcgtaatctttctataatttaaacaaatacatttaaatggatatgatgaaatttggtggatgaaagtgtaagatttatatggataaaacctcaaaattaatttagggatgtattgaaaaacctatatagaaaatatgaaggattatacaatctttcacaaacattttgctcttgctcttggtcttttctgttcatgtttgattttatattttgaaaagtaatttttcatacattcaaagaaatttcttgtcatatcattttgattgttgtgttaatgtaggtaaaggcgacgaaatattttttgattcacaagct

SEQ ID NO: 67133 - DNA, 731 bp, Cucumis sativus
  Intron number 2 from transcript Cucsa.066970.1 (locus Cucs a.066970) derived from phytozome v7.0 (chr-ID scaffold0069 6; pos 1350174 to 1350904 reverse strand)
cgcattgcttagttcgccagagcctgatcctagaggtacgaaattgatttttacggaagatcaatttgtgggtattaatgattttgagcttttatggaagctttacttagcgcttgtagaggaatttggacttggatgatattactgattgcttgaaatttccatttagattgtgaattgcttcttgttaagtatgggtagagatttgacactttttgtttagagattgagagaaataacgaacattgcttacaatcagaagaatttgctgctgttacgaacccaattcgaaattcaagataaacgaaaaagaaggaagaaaagagattataataaaattataaaaatgatcacaaactcattcgagcgagtctaaacctcaaacttttgaggaatcccaacctccccaattgacttatggagagttcaacgtgtgcaattctctcctgttccttctggatttccacaatttaactaaaaaaactcaaaaactaaggaaagcactaaccactattatagagaatcacactacctaccatttgacttagtaggaatacaagggataaatattaattgatatctaaaaattttaaatctataaactaaataaaaataaataaaataaaatctttaggatcgtaacagttgtgtttgttcttgtgaaaatcataatggatgtgttgatgaatagctatttgttgcagatcaaggtctcttttatcaaggtggct

SEQ ID NO: 67134 - DNA, 626 bp, Cucumis sativus
  Intron number 2 from transcript Cucsa.094880.1 (locus Cucs a.094880) derived from phytozome v7.0 (chr-ID scaffold0091 9; pos 927175 to 927800 reverse strand)
ttgaacaagatattattcctacttgcaggtattaatttcttttctttttcttaagagaaaactctttctcaatcacatccatctagcaagcttaaattaatctcaaaacacattattaattaatgctattttcttttactaagaatgattataaaaaacgcactacaattatatattgaacaacttgttgtttgattcctattagttgttggatttcaagtgtgaggtttctctaactttttggtcaataaatggagtcaggtagttattatggagtagatgtatgagcatatataattcaattagttaatatacatattattttcttttaaagttagagtaaagatttaaaattgaatgcacaatttgagtttaaaatacaaagtattgctattttttaagattaaactacaagtttaataaactattattaacatattttaaaagattcatactctgatcaatactttatgtattcaactaaaatttcaaaatgtgatatatatttaatatgtatattatatggtgatttgaatttgaattttctaacaaaatttcagcgatttattattttccttttgtcttttttagggaattgggcattggaattgtggcatacagtcctc

SEQ ID NO: 67135 - DNA, 611 bp, Cucumis sativus
  Intron number 1 from transcript Cucsa.147950.1 (locus Cucs a.147950) derived from phytozome v7.0 (chr-ID scaffold0110 7; pos 244206 to 244816)
gcatattcaaagcttctacttatcagcaccctcaggtttctgcttctcctcgccttcaattttccctttcttctctcttaaacagtatctccgataaatactcgaggagcaatgtctttcaaccacattgtttggacatgatttgagatttgttgctttgactttcaacaactctaaattttctttgttttgagattcaagattctgtggaattcgactatttgtttgggagtagattgtttaagtttgtaaaacgacggagtgacggagtgacggagtggatgttcaatgaaaccatgacgtagatcttgatactttaagttctgatttcatgttttagcttttagtttcttcatccatgactggtttgtatatttgtttccttatcttttacttctcaaaatgtatatagtaagtgaatgtgatgactgattacaagtaaaaatgaaccgtcatttcgtttgcttcggttctattttcttttagtagtttgttgtgctaaatggaagaatcttcagggaactaatcaaatctttagttttgtatttgttcaattatttatctctgaaatggtttttgttttggtttcagtggcggaggtctattggcat

SEQ ID NO: 67136 - DNA, 661 bp, Cucumis sativus
  Intron number 1 from transcript Cucsa.048520.1 (locus Cucs a.048520) derived from phytozome v7.0 (chr-ID scaffold0054 2; pos 3202451 to 3203111 reverse strand)
tcttctcctcggaatccccctggtatcaagcgaaggtaattcaacaaacttcttacttttgttttattattgcataagaatttatctaaattatagggtttattattagtttgttaaatttaaggggttttttttatcccaaaaaaaaaaataataaaaagggtttgatttagattggcggtagagtttgaaattgaaggattatttgtgtatatataatataattgttcttgattgggagatttagagagggggggttgtaattatcaaagctgaaaaggtggggggaaattgctacagaggtttgccctttcattgtatagttgttatcaaatccaactttttcttttgttagtgtgtgtgtgtgggtatggtgttgcaaaacccacctgagagaattgataactgtggtgtgtatttgttgatgctcttgtctttttcagttgcttcttcaattattctccctcttgaacaaatcaccaaaccccccccaaaaaaaaaaatgcaaatagggctatggagaaaaagtggttattgatgagagggggaataattaattataatatatattttggtgagaaaatgaaaagcatatataaatatttgtgtatgttgttgtgttacaggaagagccaagcaaggaaggtggtttgtgttccag

SEQ ID NO: 67137 - DNA, 741 bp, Cucumis sativus
  Intron number 2 from transcript Cucsa.031510.2 (locus Cucs a.031510) derived from phytozome v7.0 (chr-ID scaffold0042 9; pos 548904 to 549644)
aagcgtgtccctgaaggtccttacattctccaaaggttttgtcaattgttactttttctagattacattatagtttcttgcagacatcatcaagcattaacattctgtcgtggggcttttgtccaattacattacaactagtataaagacttaagaatgatatatccattttgtgatccaacaaaagatttctcttttctaaccatcaaggcaaggatggaaaatgtgcaattagtaacatttaataaacaaataacaaaaattgcatgaaaaatattgagggcgaaaatctacatttccaatcaacccagagaagtgctgcttatttttattcattgcctatgttccgagtcttcttactttttgatgcaactcttgcagtcaaacccggaaagtcttctgttattttttccctcgaaaataaattatgaagtccatcttttcatttcttgtgtacctaatcctggcaaaatatataattttctttttcacagtaaatgataactagaatttataaattgttgaccttttgtctcagattatctgttcttccttttatattcctttgcatttggtctgtaagtatgcatgtcttttcttgagctttcactaaggctcggttacatatcagttaatttccaccattgctttatggcatatatcctgtaattgttttatattttttctctttgaattgtggattttattccttgcagtgggcaatctataggtcccttgtca

SEQ ID NO: 67138 - DNA, 208 bp, Cucumis sativus
  Intron number 1 from transcript Cucsa.099550.1 (locus Cucs a.099550) derived from phytozome v7.0 (chr-ID scaffold0092 6; pos 301479 to 301686)
tcctctatccaacaacccactgccaagcttcgcctgtaatctccatttttctctatgtttcttcaatttcatattgctttgagttttttcttctcttatcatgtcgccccgattccttcgattgccgttttcgagagatttgattagcttattaatttgtttttggtcattagtcgtgatttgctcgatatttcgccgacccttaccg

SEQ ID NO: 67139 - DNA, 678 bp, Cucumis sativus
  Intron number 2 from transcript Cucsa.159870.1 (locus Cucs a.159870) derived from phytozome v7.0 (chr-ID scaffold0114 4; pos 224312 to 224989 reverse strand)
tgggagacaaagataacttcaaagttctatacttggtgagtctacttcttttacttgggttcttcatcaagttcatcaggattgtgttgtatttatgcactgaatttaactaattccaaaaatggattgattttctttctttgccgaattttgggttacgttttgaagcaaatctacaaatctgatttctttgggatgagtgcctatatgtttcacaattcatgtcagtgttcatctttgagatctctgtttattgaaaatcagtgggataatgctgaatgaaggcttcctttttgacagtttctataaatgtttcaatatgccttttaggcttaagtcttgaagcccaaatttatagcctccaagctcgaactttgagaatgcattccaacattttctgagaagaattgaaacacacacacacacaggggcctacaaaatggcttgagacatatttcataaaagaaaaggaaaaccaaactttcatcaagaatgcattgagacatttcatcaacaaagaaaaaaattctgctactgatggttaattgcaaacgattctgaattggcttggagaaacttgagtgcttaaaaaatatgttcaattctcgatgatgtttaacctatacctgtttcataactgtattcattgtattattattcttggatacaggtggtacc

SEQ ID NO: 67140 - DNA, 779 bp, Cucumis sativus
  Intron number 4 from transcript Cucsa.170720.1 (locus Cucs a.170720) derived from phytozome v7.0 (chr-ID scaffold0117 9; pos 76775 to 77553 reverse strand)
gtgaggccagtatacagaggtaaatcttcgcctttctcatttcattttcctcagctttggggtccaaattgttgggaagcacttcatagcgataatcttgataagaatgatatttgggttttgctagtttaaaatttaatatgcgacataatttctgtattgataggataatcttgataagaatgatatttgggttttgctagtttagaatttaatatgcgacataatttctgtattgataggtaagtgtctgtcttattagaagctgcatcttaattggaggattttgtacggatgatatacataatgttttttttgtcatttcgccgattgttttaaacgaaactagacggaagaaaatggcaaaacatgtatgagaagaatattttgtaattgcttgagcataacttcctctttactaggatagttgcaaacaaatttagctagaatattctaagggtattatatttatgtaaatgagatagttgtaaatttaacaattaacatttaacattttataaaaattgcaaatatagcaaaatttgtcaaattatatcaatgatagagtctatcactgatagattatgttgtaaaaattggtctatcaccgatatatcatacgagtctatcagtaatagaagtctatcagcgatagttttactatatttgtaattttttttaaatgttgctatatctttaattatcatttctcaaatgataatccattacaactaccctatgtaaatttgatttgtggtatatagggagcattctctgca

SEQ ID NO: 67141 - DNA, 690 bp, Cucumis sativus; identical to SEQ ID NO: 62663
  Intron number 1 from transcript Cucsa.135560.3 (locus Cucs a.135560) derived from phytozome v7.0 (chr-ID scaffold0104 4; pos 389388 to 390077)

SEQ ID NO: 67142 - DNA, 298 bp, Cucumis sativus
  Intron number 2 from transcript Cucsa.167120.1 (locus Cucs a.167120) derived from phytozome v7.0 (chr-ID scaffold0115 4; pos 503857 to 504154 reverse strand)
ctgtaagatagttgttcttgaggttttacaaaaggttaaatgttgctcatcttgtttttattgatagtttcttttcattttttttcaccctgaaatgaaaaggtagacataaaagttttaatcgataaattttcaaatgggaacctagtggttgatgcaaataaactatccatgattcaataggttttctatttgattatgtaatattcttatatcccaaatgtaattttaacataattcttgatcttgggaacctcttttaggtgattgattggaacccggcttctgcaacaaaact

SEQ ID NO: 67143 - DNA, 627 bp, Cucumis sativus
  Intron number 2 from transcript Cucsa.022180.1 (locus Cucs a.022180) derived from phytozome v7.0 (chr-ID scaffold0031 3; pos 85633 to 86259 reverse strand)
atcatccatttgcaagctttattgggtaacaagtaattatcttcatctctctctctctctctctctctctctcactcacttcttaccaaagaaagaagaagaagaagaagaaattgttctttccatatttgtgttaggaaaaatttaagataatcctttagttttttaaaattaaatttgtttttcttttccttttctttactgtgaattgtattattatctatcttaagtatgagagttgagttttttaaaagttattttttaatgttttaaaaacttaaacttttagtttttcttaaactaattttaaaaaaagaataaataacaaataataaaaaaaacaaataattaaataaataaaatacagatattccgtacttgataggtttaattttcaaaaaccaaatagtttctccctgattttttatttctaatttttggagcaaataatatttgagaggttgaaaaatacaagttaatttagattggttgttttgatatgatgttaaatgtttccatttcaattcaaaagatgatttaaagtattatatgctatgaggatgaatttaattgaataataaattatttcatattgttggacgaatttttgtggcaaattcattacag

SEQ ID NO: 67144 - DNA, 413 bp, Cucumis sativus
  Intron number 4 from transcript Cucsa.162530.2 (locus Cucs a.162530) derived from phytozome v7.0 (chr-ID scaffold0114 4; pos 2135971 to 2136383)
tggtggaaccttatcggcagcaatcaggcttctgggtatgttcaggttcttcggtactctgtttttttagttttgaaattgtttcacaagaacattaccttataaaaattgaggttcgatgaattaattttgggacatttcttatcactaaaccttaaaagagaaaatccgtgggaaaattttgcttgttttatgtccatggtcttttctggactacaaaacaaaagtatgggattcatcattgttttttagatttcttgattaaaatcaattattatgcataattatgtttccctcgttatcttgaaaataaagaattaaaatcaaatgggaccatcatatcttaataaattagtttagtttcaaattaatttggttttgtttttaattatccttttctgttgttagaacgg

SEQ ID NO: 67145 - DNA, 706 bp, Cucumis sativus
  Intron number 3 from transcript Cucsa.159000.1 (locus Cucs a.159000) derived from phytozome v7.0 (chr-ID scaffold0114 2; pos 1014818 to 1015523 reverse strand)
ccgttgtctcgatgtaagcagctttatggcttagcattacattttcatgcatttttctttgccacaagatgaagattgagctctttagtttcttgttctttctattcctgattgcaagttttaaattgaagtttggtttcattgttaagtttctgcaggagtgctaattttcctctctttcttgagctcttgattaactttacttacagggcatgttatttttgttttgaagaaggttccactttttggagtataatgtacttttgttagttctctctcttcttgccacttttaagttggaactagcagttttggacgtttattactttcattgctgtatttctgtgccaaatcccatgagtttattatgtacttctgttgttaaagtttgtgtacctaaatgagatgcttttgagcttccttaggaacactcgtttcaatttttgtttggttaaaaggtgcttcttccttaatcttttatgcataaataaaccatttacttcttcctgaaaaagaaagcatacctacttcggtaaagccatttgccaagagatgtggcgttcgacattcactgtctgaatgaaaatttttgttttatgaaagtgtctgtgtatgctatgcatgtgctttctagcaaagttgctgttattttacttcttcgatatttgtagttagcaggcctaagctggtttccggatcagcagaa

SEQ ID NO: 67146 - DNA, 897 bp, Cucumis sativus
  Intron number 1 from transcript Cucsa.135440.1 (locus Cucs a.135440) derived from phytozome v7.0 (chr-ID scaffold0104 4; pos 308856 to 309752)
ccaacacttttttttctctgaccacaatactgaaggtgtgttcttctgtattctactcttgtttaacttctttttctggtgcagatcctgtggttttctttctaattgtttgaaattttttctgggaaatgtaattggtttagtttgcgtgggatttcttgtttcttccctgagtttctttaagaactgactgcgggaatgcttcttgtttcttgggtttgttactgtagagatgtttaagtttgggaatgggatgatggggatgttgattttgtgttgtggaacatgggttggagccagggagggatattgttgtggaacctggtgtgttggggggtttattttcttgatttgtttacttggggcggggggggggagtggaatttgtgttgggggcttgaagatacttaatgctgtgtaagaaatttttaatctttcttttttgaagattctgtatatcctttttctgtttctgggtttggcttaaatatttttttgtttgtttcactttggaatctaactaactttgatacctttattactttgtttttgctgccttttgcctttattttcattttggttcaaagtgggtttgctttctcgacgactgttttccccaattttttttatagttttgaaagttcaatgaatggggaagaaaaatggattgctgatgacaggaaaggtcaaggcatgctaattttatcatctactgtgttttggattctgtggatgccttttcttttcgtttctacaaatcacatagttctcttagtttagtggaaacctcaaaatttaaaactggaaagaaaaaagactacgcttgatattgtattgatgcaaatattacttccattttcaggtgctaaagttttggttgccatttcagttcatcag

SEQ ID NO: 67147 - DNA, 529 bp, Cucumis sativus
  Intron number 1 from transcript Cucsa.074580.4 (locus Cucs a.074580) derived from phytozome v7.0 (chr-ID scaffold0078 5; pos 402813 to 403341)
aactctcttccaactcccataaccactcttcactggttggttctgctttcactctacaactcttcaattcctcttttatttcacaatgtggcttcaattttccccttcaattgcttctacgcaacgtctctagatttctcttttctttcggtgacctgtgttccttaacttgatgacaatttcttctcttggacttatcttatactttacgaatcaaaaatgatagaaatgtactgaatgtgccacctccaatgatattttgaagtccaacttggtgttcttcatttgttagtaagcttatacttggtttatctaggttgtaatggttgactggttaatgtatttggcctactcctgggagtatgattctaaagactgtttctggatgtgcattttgtggctagagggagatttaacactttctatgctaagccgattaagagattgtcgttttcattagttatgttgttttgaatttctgaatagaatttcagtcgtgcagggactagaggaccagcataactttctc

SEQ ID NO: 67148 - DNA, 533 bp, Cucumis sativus
  Intron number 1 from transcript Cucsa.099270.1 (locus Cucs a.099270) derived from phytozome v7.0 (chr-ID scaffold0092 6; pos 125876 to 126408)
ctagcaaatccttccatcctcaaatccttatacaggtaactgattttttccccattttcttttggttattattgttattaatcaaacatttgtgttttgacatgtaggaagaatagtttatttggacttttaaattaattattgtgagaaagaatgagtcaaagtcattggacgactgagctgagctgagctgagacaacgtcgacgataagttagatgcaatagaattagacaatatttggtcgaagtgagtataaacatagatcgataaatcaatttaagctgctgagtattaattagtatttgaaatatcatagatattgaaaaaaacgatactcatttcaacctggtctactgggtatgatttaagagaaaaaaagagtttgaacataagaaaaaagagataggatagaataggatgtggttgtggttaaataaaaataaagaaatgggggagttagtcttatgaaaggaaaaagcgaaaagaaaagagggtgaggaaatgattttgatttgatatgatatgacagagt

SEQ ID NO: 67149 - DNA, 913 bp, Cucumis sativus
  Intron number 1 from transcript Cucsa.107940.3 (locus Cucs a.107940) derived from phytozome v7.0 (chr-ID scaffold0093 1; pos 194896 to 195808)
ttctttctttgaatcgatctttcttgttcttactggtacgtgaaccgatcacactcacttttcttttcttttcttttcttttcttttttttggttatttttgtttaagcgtgttgccttttgtatgtgttttcttcttctgtcgattacagatcacatgcccgagttcttgaattggttgtttcgttattttcttgctaaccaattttggtttcggttcgtttcgtttgttttagtgttttaattgatgtccccaattcatatttctttggtggtctggtagattgatgggatggaacgtagtgtgtatgtctatattgggctttttctaatagtggacgtaacttgactgttgtaatgatgtgagatttgtgtaattaattttgaatgagatggcatttagaaaatgctgacttttattcgtttcttttccgttgttcttgatttctttcgtcgagttcccagaagtggttttgttaacgttggggaaaacctattgaattctcttcgttttcttatgatatattttttttttgtatgattaattttttcttttctgggatatatctttttaataattacggagaatagttttttcccctgttataatcagtggaatgaattctttacttgagggccaacggttgaatctggcgtggtcgtatgttcatctagaaagtttttttgccctttctccattgcaaagttttttctgtgtgctagctcattcttagtggatggagagctttctttcttttctgtatgcagcacactcttacagctaagagcttgtgctttatctctgattggtgtagttgtatggccagggtcgctaggtactgctttccagcatgtaatgtattttcttatattatgcagtgctcctgcccttgaattttgggtttaaaacttgt

SEQ ID NO: 67150 - DNA, 797 bp, Cucumis sativus
  Intron number 2 from transcript Cucsa.168350.1 (locus Cucs a.168350) derived from phytozome v7.0 (chr-ID scaffold0116 0; pos 118487 to 119283 reverse strand)
gttcgcgattgggttgacttgcgcgtatacaagcggtgagttagagtattcttcaatttaacccttttttttttcagttaatatttcttagtagcttctgcctttaggtgagttgagattagagtgtaagtttttgcctttttggttgagtgacgctttgtaagttgcttattcttgaatagcgtcacaagttatgctgtatatatggtaaaaatgtcatttcccctcgagtgtagtatacgaattaaagcagttcgaattacaagtttttttttgtaccttttgcattccgcctataggagtaaggaattggtattagataacatagattccatcttaagccagtcctcaatgataggggtatctatctatcttaggaaaagtgtgagttgcttgtcatgctccccagaatggtacctcctttgggttcaccattcttagtttggatcttagttttatgtttggacagaatgggagtcgatggaccttcctactatgttatattatacagattccatttcaaaattaattaccaatgagaggactacctaatctatcttatcttatcttatgaagagtgaggtgctttgttttttcattctcaacatatggctgtaaatttagtgttggtgtaagttttcagttgagttcttgtttttttttgaaaaattaagtattgccttttggaatatgatgttttgtacttggtttgcaaatgccaaatagttccttgtatctgagctttgaacggatcatgaacagggaaagtcattctcgaggctgcagctctaactgct

SEQ ID NO: 67151 - DNA, 867 bp, Cucumis sativus
  Intron number 2 from transcript Cucsa.009110.1 (locus Cucs a.009110) derived from phytozome v7.0 (chr-ID scaffold0012 3; pos 41158 to 42024 reverse strand)
aaggatcaacttgtatgctcatattttaaaccattttttaaccaacttgtatactaaacctactctttaacaaaattataaacatacataatattctaaacaatttataatgataaagaaattctaaaccaaatatttatttcttttctcattttttttaaattacaaatttagtgtttttgaacttttaagttcgtgtttatttgatcaaaaatggcttaaatttttaattttatttataatatatctaatataacattcctacaatttcaattttatgtccactatattccttaagagtcattttgataattgattattggtttttggttttttttctaagaataggtttctattggatttgtaattttttttcctgttttttaattttaaaacgttttgaaaaaataaattttaaaaacggtaaaattgatttcgaaatttgtactaaaaaacaataattttaaaatttatttttctccctcctttatcacattttcctatttttttcatttgttaaataaaattaaagggtaaattaaccaacattcaaaatatcttttttacctttcaattctaaatccattatctcttattttattttctatttcatagtaaaattgagagaggtgaatgtgataggttgttttcaaatatagaaaaatatcttaaaatatttaaaaattccaaattttcgtagttctagcttaattttaaaaacgaaaaatcggggaagtgaaataaattattattaaacatagaatgaggtatatgttaggatttggaattgaaaatgacgacatatgtaattgtttatgtgttgtggatgcagcttgttttggtaacggattaatcttttgtctaatt

SEQ ID NO: 67152 - DNA, 844 bp, Cucumis sativus
  Intron number 1 from transcript Cucsa.182680.1 (locus Cucs a.182680) derived from phytozome v7.0 (chr-ID scaffold0125 6; pos 36574 to 37417 reverse strand)
agaagggttttgaaggaaggtttgaatttccttctttgtcttatgtttgtttgatttctgggtttgctttctctgttttttttttttgttactatttaaatcaaattcaatgattacgtttctgggtttgcttttttgtttttgttgcttttgatattcaagtgggttatgctttttatggcgtttcaatgattttgttttattgttgttgctgggaatttgtaagttgtgtactggaattgctattctaaccataaatctgatattatgacagcatgttgatgccttcattaatgaattactttatgtttgttttccttttaattctttttttttcttttactccaatgattgctgaccagaaataaggtgttagaaatggtgttttcttcacaggttgattacttgctgtgttatatttatttatccgaatggtccatttcttatcatttatggaactggacgatgaatctgctggtttttagttggttcttcttatcagtttttttctcttttagaacatattttttgttggctttggtggaaaaacggaattgttttcagttatggataaaaagaccctatgtaattatgtaagcatgggaatgggaggctactggtttttggttttttgttttctataaaagttttatgtagctatttgagaagtacttcttataatactctcttgttcttttgattatgctgcaaatttattctctttcacacacttacatttgtttcctttgcttttaattttcttttaatcacttctaaagcttattaaaatgtactgttaccgtattcaggaagcagagagattgaggaacctagaaatcacggg

SEQ ID NO: 67153 - DNA, 903 bp, Cucumis sativus
  Intron number 2 from transcript Cucsa.135760.1 (locus Cucs a.135760) derived from phytozome v7.0 (chr-ID scaffold0104 4; pos 571463 to 572365)
gcagaaggctttgaagacagtttctgcactttcaggttctttttatttttctctctatttatttatttattttctctaaagtgaagctaattaattaattttgtatctaacttagattgcttagagacaaaatctctttaaactctttttaaaaattacatataaatgtctctctcaaaagaaattctgcgttgggtgtgatgtatgtatatgttgattgttgagagattttgatcctctaacttaccccaaccccaccaccaaacctaacccacatgccctttcctttggctgctttaattttcactgatctttattaaattattatagaaaaaaatgattaaggttttctttaatcataaaaaaaaaccactttcaaatgtttcccatccacaataatattatatttactacataatcactgttcaaaaggttgatttgatctcataaggaatattctctccatagaaacaaaaagatgtctcatctaatctaacagatatgaaattatttaggtaccagttatatttaatttttttaaaagaagtatttttaattaaaatgaaatccatctgttggtattataattactgtttttcaaaacgaaatgacaatggaaggatggaggagtttgaacatcaacatgtaaaattactactactatcaaatcacaaaagcttagtcaacgagttttgggttagaacttattcttttcaacgaagatatgtaacaatgtatacagatttttgtcactaattcgactcctatcagccatataattgatcattcagttgaaaggactctaagaataattgacctaaattagatatgatcgttatatatttgcgtctttctttaaataaactttactttgatcggattgtagggattgatttaattgca

SEQ ID NO: 67154 - DNA, 787 bp, Cucumis sativus
  Intron number 2 from transcript Cucsa.181730.1 (locus Cucs a.181730) derived from phytozome v7.0 (chr-ID scaffold0125 1; pos 26423 to 27209)
ctctcttccaccgactccgaatctgattactcccggtaacctcagtaatttgaatacttcttctcttattatgatgttttcatacctttgctgatgttcattagagtttgaaacagatagggtgatttagttattctgagttcctatcggaaaaaagatttaatttttctgagtttgtcattttttaatgctttctgtggaactctgttgagagccttatttgatttgttcttttttggcttttcctctcttattggaagtcttgtgatttaatacgcttatgattaagttgtttgtgagagtttcctggaatgagaacttcatcgcctgtttcagaattcgaaatttatggattttttttatacaaaaaagctaagaatttggggctcatcgtgtatttcctactctggtacaaaagaggcataaatgtgtttgcctcttttagtcaataaaaaatggaaaatgaaaattaagaatgggttctaaacacttgtttttctcaatagtaataaataagaaacaaaaccattagaatggaaactttaccccataaacgaccataaatttcaaaaacagaaaactaaaaatgtaatagtcatcaaacaggcctaatttataacctaatttatactgttcaagattatgtctcagtgagcgatgttactgggttttctagtcaattattttttgcaaagcacattttatgtacccaagatagttctaaccagttcttgtatgtatacatgttgaagcaatagctcttctgaaagtgagcctgaaacatcaa

SEQ ID NO: 67155 - DNA, 362 bp, Cucumis sativus
  Intron number 2 from transcript Cucsa.091110.1 (locus Cucs a.091110) derived from phytozome v7.0 (chr-ID scaffold0089 4; pos 2170595 to 2170956 reverse strand)
gaggaaagttaaacgagttctcaaggacattgaaggttaatttcgatgttttttttttttgtccttcctctgtatctatctcgattcgtgttcgtactgcgattttctgttttgcgaattcggtaatattcttttggtaatgaattcaaataagtttttttttactatctgctctggcgttcttaacattctggtttttgttcagtttcttgtattgttctctctatgtaactcgctgttttctatttgctaggatttaatctactatttctttgtagaatcgttaccttcttcatgatttttctttggaacatggactggagaatatctgtttaattatgaatgtgacttttcaggagtat

SEQ ID NO: 67156 - DNA, 784 bp, Cucumis sativus
  Intron number 2 from transcript Cucsa.096590.1 (locus Cucs a.096590) derived from phytozome v7.0 (chr-ID scaffold0091 9; pos 2142464 to 2143247 reverse strand)
ctgaacaattggctgctgcatcagcccaggccgagatatcctttgttccttttagctttaggaaattcctcatcttctagacatggtcctatttatcttagctaatgccttatatcaatacttcctttcgagtgcatcttttttattatcatttaaatccattattgtcttgataaatgaaaagacctttctcagtttatgttaaaacattcgttcatagattgtctattgcgcaatattttgactctacaatttcatttacactaggaccccctaggggagcaaccccatttgcttgggctgcctcctctaagtaacacctagccagaggtcgcttgctcagatttttgggtgagcttaataaagaacaccctcaatgtctccagagtctaggccttcggatgtccacaaactcttttttttaacataaaaaccatactttgatgaagaaagtttttcatggtatgtgtttaaatgattgggtttggggatctagcaaagtggaccattttccttgtttaatatataattgtattgggtataacgtataagaggaaaaaaaatgaaatgggattgcaatgtgccaggagtctgcctagttaaattttatgagtggtgagaattttcattatgttttctaccttcaagagtcaaacgttgaaactgatttttaataccagtgtggctttgtaaagtagtttaacataagtaggttaactattcaaattctgaagttattttgcttttattcaatattgttatattcttaattttatagaacaga

SEQ ID NO: 67157 - DNA, 607 bp, Cucumis sativus
  Intron number 1 from transcript Cucsa.096590.1 (locus Cucs a.096590) derived from phytozome v7.0 (chr-ID scaffold0091 9; pos 2143329 to 2143935 reverse strand)
ggccttctccttggcgatattgaggtcactctctttatttccactctgcaatttacttccctttctttcaagggtttctttgagttttgctttaattttgattactgggtgtctgtttcttcgcttcgttgtttcttgtgttggatgttatttgaaatgaaggttagattggttgttttggcaaatggggttgtttgcagttttaattctctttactttagagttagaggtaaagttcttgtgctgttctagctcagttaattgatttcttagccatttcgtaaagatcagagtgaagggtggtatttgtggtgcttccagttaatgggtcttctgattctaaatggtgctgttgaaagcagacttggtttgtctttcacattagtgcgtgcgaatatgttctagctcttattcgatggtctatctgaattttgattctatagtttctttctagagtttgagtaatttctatttcatggttgattctctaagctttaagctattttcatgccttttctttcagggtgctatattttcctttttaaaaggtagttgttatttgggttctgcattcttcctgaccatgagattttgcagcattcgaaaa

SEQ ID NO: 67158 - DNA, 1020 bp, Cucumis sativus
  Intron number 1 from transcript Cucsa.030390.1 (locus Cucs a.030390) derived from phytozome v7.0 (chr-ID scaffold0040 8; pos 3312 to 4331 reverse strand)
aacttcgcctttctcacaatcgtataaggtaacttctgttttgaggaaaattttgtcggggtggggtttttggtttgaattggtttctcttttatgtctaattttagactgtattcggttttccgatgagtttacttattgggttcttagaatgattgttatgtgaagattttctgctactttgtggggattttcatcgaatagattacgatcagtttaattaactatcggattatatgcatgtgtcttcccatatattatttttttttcattttcttcatggtgttgggaggggggaaagaaaactacccaagtcgttggcatagagttcttttggatgttgagctaacttgatgaattgagttctactagtttaatttcgaagggattctatattttgacagtcggttgaattgagtattcttttccatgtcaaatcataaattgatacttttagaatgtaggaggaaagttttggtgtctaatgcaacattgttactgaattcagccattactaatgagggtgaacttagtgacaagtttgatagttttgttatggttcttgtagaaaaaaagacatgtttatttgaactttttgcttttaaagtggttactatgtgcagtatacttaatttatatttggaatgatgttttttcgtctcatgtaaagaatgtagcacgtattatatatggtaatgaatttgattatgtatgctaagaaactatgtatcacctaggtactttggggtttccccttggtaaaggacttgcttaggtatctttatttcatttatggtaataaatcttgtttctccatttaaaaatttattggattaggtttttggtttccatgtctctgaaggattttacacttattagcaggaatttatttccagtcaagatatttgcacgtttacttatttttcttcttgtgacaatacatgtagatgtttcatcaatctttgtattttcagtcttgttcaactctctttttaccccctctgttttttccctagagtt

SEQ ID NO: 67159 - DNA, 860 bp, Cucumis sativus
  Intron number 1 from transcript Cucsa.118200.1 (locus Cucs a.118200) derived from phytozome v7.0 (chr-ID scaffold0099 8; pos 29788 to 30647)
aggttgtcgcgggtggtggtgattcttccaagagcggagaggtgaaagggtttgatgataaaaagggagaaaatagcaagaaagtgtaaggtgtcttctctctaaactaactccttccataggattttcggagcttgatttcagagttgcttttccactttttaaaatttaattgttaatttttcaatttatgcaaaatagtcaatgatcaacaaacaaaagaaatagctagggtttgatgaatgttatgttgttgagagagcttctctagctctcaagactgtacttttcttctttacttctcttttgctaaatgttattgtgtacttttcttcttttacttctcttttgctcaatgttattgtagtatggtgtgagtgttaaaaggtgcgtcaatctagttccatgagatgttacacatctaatgattttttttatcatttgttaaaaacaaaaaacaaatttacaagataaaattcaaaagaggtcaacactataggttattttttgaaatctgaatatagaagaaaattgagatgggtaatatttatttaagaaaatgtcataagatgaaattatttctcaaaatcaattgataatagaattataactaattggatatattaccaaattaaatgttgattttaagtactctttcatgactcatatatactcatattttgtcttgagataatatatattaagaatcctaccatgaaaaaattaagaaaaattataatgtttgtaaatacatgtcgctataattttgagatgaaagattgtgttactattatctaatatgatatgaattgtatagggatgaaggaaaaaagaaggagaaaagagaaaaagggccccga

SEQ ID NO: 67160 - DNA, 779 bp, Cucumis sativus
  Intron number 3 from transcript Cucsa.162000.1 (locus Cucs a.162000) derived from phytozome v7.0 (chr-ID scaffold0114 4; pos 1747432 to 1748210 reverse strand)
ttaattgcctcgtaagtactaaatctagtggactgatggtcatggtattaaacaggaaaagtactatcacgtgaaatatttggcctcacaaagatgctaaataaattttgtataattcccgacggtgaagaaaaattcttatgaactcctgatactaaataatggtggaaaaaactgtaagctatcaaacttgaaacaaagttttatatgtgaaggcttgtaggtcagtgcaactttcgacataattaccaaatcaaatgtttcagtgtgtaatctgtgttcagttgcagttatctccaattaagaggttagaggttagaggtttgaattcctccaccacatgttgttggactcaagaaatgggagcactacttcatttcttttttcaattaaaaaataaaaagtgtaaaaacacgaaaaacaagaaaccaaaatgaaaaacaaaaaacctatatgtttgatattttgctttttctgaaggatgtgaataatgtaaatatagatgccaagactactgttgctaaaccatgaatagacaatgaacaggttaatttctaaattactcttatgcaattattgaagtacaatgatcgtcctaaataccttgcaagaagcctgtgctacctgcacaaatctcctgcaaagatttgttcattttaaatttctgttcaatttttgctgtgatggtttacttttaaattattgaaagaataatgccctatatctactaattagtgtgtaatccgtgatatgtttgttttttggtgcttgaagtaaat

SEQ ID NO: 67161 - DNA, 865 bp, Cucumis sativus
  Intron number 2 from transcript Cucsa.123950.1 (locus Cucs a.123950) derived from phytozome v7.0 (chr-ID scaffold0100 1; pos 16161 to 17025)
agttgccgttggtggcgccgtaggaggagccgtcggtaagaaaaaccctaaattttctttgaagaagttcatttctattatctgtcgtcttcttattcctaatccggttttccttttctttttcgagttctgagttcccggttatggtttgattgttgtttcgaccatcggtgattgagtagttatgtgtgtgagatgtgttggattagagagttttacatgagcaggaagctggatattttggtcaatttgtgttattgcatctttgattgaatcatgtttgtttctcagtgataatgtactactaagaattataccgctatgtaaccttcagtaccctttcgaatttttttcatttgtataaattaaggctttgtttgtttgatcatatcacttgattgtggacttcattttgcccatgttaatgattaattttgacgtactttggtaggtttggttaagtatggagtcaactaatctcatgttatgtactcaaaacataaattgaccggaacttgtgttaaagcatgtagcttagcgattatcgtttacgatccatcttccatcccaaaatgtattgactacttgatgctcaaagctgcaatcttaaattgccagagtatagtttttcaagaagcttgttatttgatttaatctatgactgtcgagcattatgaactacctagtgctaccatcttgatgctatacatcggtcaaagttctatatatatatatatatatatattttcctcgcccccccgagagtttctttccatgctttcatccgaatttttaagtatgtggtatgtgttggctgaggattctataactaacaggtttgtctttctttttctaggtgctgtat

SEQ ID NO: 67162 - DNA, 902 bp, Cucumis sativus
  Intron number 1 from transcript Cucsa.181220.1 (locus Cucs a.181220) derived from phytozome v7.0 (chr-ID scaffold0123 9; pos 199958 to 200859 reverse strand)
agagccagcttctcctttaccacgtcttgcctaaggtatatatgtatatatatctttaagatactctcgcgctatggttgcattatctcagtctaatcacactttaattgtagaaatttattccaagaatataactgtaatatgaggctgcaattctaagtattactctattttcatttacgttttctagcgcatatctatggatgcaatagttatatagcaacttattgacaaaatagatttcaaacttaactatatgttctccaaattaacacctagaattcatctagtgagtagttgaaattttccaaacactcatttgctaaattaaataaataactctaaatattactttcggtttttgtttgaaaaatagtaatcattcttgcaaaaaaaaaaataagttttgagctatttcaaatctattttagtgaaaattattattctttcgaacgaaaattagaactttgaaatgttgtgtgatagtgatttgaaagaatattaaagtttaagtgccaccacattattttaagtcactgtcatactcgaacacgatttaaatcttatatttgatctatcaatattttcaaaaatctttagttttaacggtacgaagaaaaagttaatacgcaagatctcaactttttttagagaataaaaatatgaattttttaattgagacttatcaatttttttatagaatagtgagaagtggtttttcttttctatttactttaaaaaatggtaataggatgcataatttatttgtttaattgtcaacatccaccgacgttatttttcatgcaattgaaagctatggtattcagaatttaaaattttggttttttgaattttgatgacatacagttctacactttgatcgagctgcaaacagtcagtaa

SEQ ID NO: 67163 - DNA, 1006 bp, Cucumis sativus
  Intron number 1 from transcript Cucsa.189540.1 (locus Cucs a.189540) derived from phytozome v7.0 (chr-ID scaffold0130 5; pos 356629 to 357634)
caatcacttgccttttcatcttctcccccgacctggtgcgattattactatttttctttctgtcttctttttcttaattatcatttttattcacatcatcctatatcttcagattattgggttcagacttattaatttatgacttaacattctttttgtagctcgtgagagagttgattatacttttagatttcaacatgaaaaagggtgatttattttcttttaacttttgtattatgtttaaactcaaaaggttttttgagctatgctatgcaaacatgtagtcctctaaactatagcttttgaattattgctcatgcgaaaacttaattgtgtttcaaactaatgttttttattattattattattattttttaatatttagtggttgaatgtgctacacttgttttgtgaagtctagtcagatatttaataattaaaatttattctgtgcaatataatatttattaaataatttcatttattttttaaaatgttgcataagaggagtacactttaattaaaattggaacagtcaatttttatgattttcagtttcagatatggagaacatttgaatgtaaatggggtgactcatctattgcgcaacccagacagcatccatatgctcctttcacaacttttgttttttagtttaaagatggagttttcattagatgtttgatggaatagaaacgaagggatttttttttttttttcctttttctcatcttttccttataataaaataaactgaatatagtgacacatgttttattttagcttattaatattaattctatggcatgtttctctattttgttatgaaatggtgaatggtaatggacacagcaaattatggacagattctcttggaatgaattgcagtgacgtattcagtttagtaagaggattgaactaagacattattaaaattggattaaattacttgttgtgagtttctaagagatattttgtgtacataggctcagaaacaagcaacgaa

SEQ ID NO: 67164 - DNA, 975 bp, Cucumis sativus
  Intron number 1 from transcript Cucsa.151190.1 (locus Cucs a.151190) derived from phytozome v7.0 (chr-ID scaffold0111 6; pos 47498 to 48472)
ccctcgttcgacgtctgtgcattcaagatcttgaggtaaattctaagttttctgctcattctttcatgcttactcaatcctatttctatacgttgtgctatgaaacttttcgaacaagaatttcatttccaatctctcttaacgctcaccctcgcccattctccactctcacttgatgctcggtctggtgggtacaagaattgagatcgcatgtaacgttcttcttatgtaatcttgtgcttccggatgcgtgcatctgtttttttatgaagttttcatttctccttctgaatctcgtggaccgtaactggcatagtatatgagcattttatacttttggtttatttgttttatttctgattttgattggagtgttccaatgaaatgagttctgttcagcaaggatttctttttgagtaattgatgtttttttcatagctcctttcatatgcgctgctttttgcttgtccaatttttttgcaacatatttttgttggtaacccgtcaaaattgtgcgcatgtctgcaccgaactattactaaaatacgatcactagggattttccaataggtgcaatcatttctcatcagacgaagaaaatttggccaaatttaaactaaaatgtcgggaaccagagactaaattcaaacgtctcctcatcatttttcagacaatgcatttgctagtgtagaggccattaaattgttagtttatttgagctagacctgcctctgtctcgacatcaactttgctgtagatgaactgaacatgtttatagtctgggaaagcattgatgggaactgttgtgctattatttaatcgatctcaaacatttcattaaccctttctgttagtttataaatgcactttaccacaggaagcttcagtgatgattcttgaattgattttccatcttaattcattggtgattcttttaataacttttctttttttgaattctcagaatctagaaat

SEQ ID NO: 67165 - DNA, 872 bp, Cucumis sativus; identical to SEQ ID NO: 66595
  Intron number 1 from transcript Cucsa.116760.2 (locus Cucs a.116760) derived from phytozome v7.0 (chr-ID scaffold0099 5; pos 602085 to 602956)

SEQ ID NO: 67166 - DNA, 788 bp, Cucumis sativus
  Intron number 2 from transcript Cucsa.167470.1 (locus Cucs a.167470) derived from phytozome v7.0 (chr-ID scaffold0115 4; pos 806963 to 807750 reverse strand)
ggtatacttattttttaaccatatcgttttagtctctacattttgaaatattatttttaaatataacaaaatgtcacaatttccattatcatgcatggtcaatttgctatatatttgtaagtttctttaacttagtttgaggggtagtttaatttggttgattttaggtaaataaataaattgatctttgttatctatatacaattttaccataaatttagaaaatacatgtttatatattataggactaaattaaatttaagatttattattgaaaataatgaattaaaattaaacaaaatttaaactataaagataaaattggaattttctttttccttttcttgtgtgttgtaaacagattgaaagtatataacaagatgaaaaaaaaaattaaaataaaatataaaagaagcgatagattaggtctgaatttgaatgaaatgaatcttaattatttattttgtaatcaaaattaaaagggttgtttgagtgtaattttgaaaattaaatagattaaattacaaaattttgatctttaatcagacgaaggttagaattattcggtcttcaatatataattaaaatttattgttctccatgatttataacatattctatttacaatacaatattcataggattctctcaaattatatagattaaattaagtgaaatgcataaagtagttttttttcatcgtagttactatttctaaagttgttgatttgttgttgatgaatccttcgacagtaagaaaactgaattggctgcatttagtgaaataa

SEQ ID NO: 67167 - DNA, 438 bp, Cucumis sativus
  Intron number 1 from transcript Cucsa.091770.1 (locus Cucs a.091770) derived from phytozome v7.0 (chr-ID scaffold0089 4; pos 2682370 to 2682807)
gccgcctcattgttgattttctctgtaattttttctttctctaacacccttttcagttttcgaatctgcaatcgcatatttctcctgtttttgttttcctggccttctctggactttctgtttagtggttggttttctatcaaattttgtatttttgagagttgggttttcggtttttgaatctgcaatctcttatttccatttctctagactctcgttgattttctctgctgttttcacttcttaactcttccatctgccatttcccctgtttttcccctcctctgttttacgtttgagaactttgttgttttcatcgttgattttctgtccttttaagttttctaccactgttctcaatgctagagattcttgtgctttttttgcaattgcgtgttaacattttaatgttctttgcgctctttttttctgtagtgg

SEQ ID NO: 67168 - DNA, 980 bp, Cucumis sativus
  Intron number 2 from transcript Cucsa.165880.3 (locus Cucs a.165880) derived from phytozome v7.0 (chr-ID scaffold0115 3; pos 1189336 to 1190315)
ggacgattggagagcataaatcaggtagattttaggtattttttcccttcatgggagtaaacatgacaatggttgtcagtcgagttcattgctaccttagactcatattacttgacacattcacacagcttacccattctcaagtcaagtttgtttttgtaggttaaccttctattgcttcatttcttcatccaagaagtcttgtaacattggatatctatcccatctatgatgcaagatcaagcaatcctaaatgttttaacgtacctatcttattctaatggatgagttttggtttaaagctttttaccagtttagttgatctcactcctatcaatggtgtcattcaagaaaagatagaagtttagcattcgtcagtactcttcgtaactgataatgatgatagctaagttggcattagcactagtcactaacttttcaccccttgcctgttctgttgatcttattacagttcatactgaatattaaatcattctatatcaatgctttattggtggcacatttgtaccaaaaccattcagccattctttggtctgagaaataattaaattttttatcttgagtgcacttactttgaggaaatgtctgcagaaatctgcagtcactagcaaaaagatttttttattgtgattgcatattgacaaaagtggagttacaaatttttggtattgtctatagctgcttgattataaagatgtagaattgagtgctctctctcacctgcacgtattgcaccaacaaaaaaatctaaagagtagaggaaatgaacaatatatctaatttattgcactggtttggaagtttttatttgaaatgctgcacaactttttaatttccagacagcatatactgggagtaatcttcaaattcatttttaagcttggttggtggtgcaggaaggttctgatcttcgtaactctgttgaatgcaggtagttgccatcaagcaacttgatcgaa

SEQ ID NO: 67169 - DNA, 946 bp, Cucumis sativus
  Intron number 1 from transcript Cucsa.059030.1 (locus Cucs a.059030) derived from phytozome v7.0 (chr-ID scaffold0061 4; pos 1121421 to 1122366)
ggattcaccaatcttgggtgctgtgggactccgttagatatcattacttcccctgtgttctgagatgatattattttattgattctttgatattttccttgtttctgctgtatcttatgaacacatgtcaaaatgttttggtaatcaaaaaataataaaacaataatggttctctttagtcatagctcacagtcatttcaagttctttaccatatttctatgcttttacttttctcctcctcctcctacctatctaccctttggttctttttttacataatcataacttggagtaaaccttgcctttttcataaaggaaaaccaatggatttcttcttttctcctatatttaaaagaaacttgttgtattctgtctcatctccaggagccacctccttctcagcctgctataacctgtgaaacttgttagcttctgaaagaaaggcccacctttttcctttcttcttattgctatttaaggtttgaaaaactgttcccctctgcttatgtttatttaactattttgttgaaatggtagtttcttcagtgtctgggtttcgtggtagaattgttttgctggattctgaagaacaccgctgtttaaatatagacccttttctttctcagttcaattcagttcaatttcaacagaactgttcaatttgtacctccctccattgtgattgtttgagtactcgagtggacctgacactttgatacaattcatgtctgctttccataattgagatttgagaaaagagctagatgctgttaagatttttccgtttgactcttgttatttggtgttccaatcttgtgtaagtttctgaactgagaaattttggttggggaactttccacatcatgtttagtttagttcatgtaagataaaatattcggtagattttgaagtggtagtttcgtttttgcacatggaccccaaagg

SEQ ID NO: 67170 - DNA, 565 bp, Cucumis sativus
  Intron number 2 from transcript Cucsa.059030.1 (locus Cucs a.059030) derived from phytozome v7.0 (chr-ID scaffold0061 4; pos 1122566 to 1123130)
taaaaagaggcttccttacaaaaagcattcaagaagtaagtttggacacctgccgaaaaactctaatttattgcttctaaattttgttctctgtctccgaagtttatgttacccataatttcctatgttttttggttatctgatatcttcattcactggagttacaagtctcagtttcatttgatttcttttattattttgttgttgttgttattgtgtagcctatagaataaatcctatttgagtaaacaagtaaagtggtgcggaggggggtgggggaagttatttgtgtagtctgtttctaactttctggttagaaaagttcaaatattgtggaactattaattgttgagaggggattaattggattgaggagaaagttaaattgggaaaatagtttcaagctggttttcttctaaatatagcaatggtcactgggccaacagcattctatttcagtttttctgtgaatttagtaacctgatttcagtgtccttttccaaataatttactttaaacttcatctgtagacaagggaggtccaaaatcaactcgaaacgaccac

SEQ ID NO: 67171 - DNA, 667 bp, Cucumis sativus
  Intron number 1 from transcript Cucsa.104370.1 (locus Cucs a.104370) derived from phytozome v7.0 (chr-ID scaffold0092 7; pos 2919997 to 2920663 reverse strand)
ggagctcaacccctaatctccaagcgatttacgaggtactttctcattttttcttctttcaatctttctgcttttttggattaatactgtcgtcgagaaggatggatgacataaattatctgggttttgaactttctgtctgaatttcaagtattgctattttttgtgagttcctaatcgttcttaggatttgaaattcacatgtttatgttatttttcctatattgtttctcgaattaggattatgtgtcgaattggagattcactcttttgatgatagtttttttacggtttcctgttggcggcatttttttttctctgaaatatatcgtggaggtgtgcacacaaaacatcacataatcattatgttgttaaatgaattgggactttgtgaagtgtgtaaattggttttgaggattcaaattattagcttctttctctttctgatgctcagtgtcctgacatttcaaatttccacttgtttgcataaaatcgtattgttttttgctgtcactgttttgcgcagcatgcattttttatggattgaatttatattgagatttcttttatctcataattataactgattacgggtgttgtacacgattttaaccatttggttctccgtgcagacgagaagttattgtgacttcatctgtcttaactt

SEQ ID NO: 67172 - DNA, 726 bp, Cucumis sativus
  Intron number 1 from transcript Cucsa.100160.1 (locus Cucs a.100160) derived from phytozome v7.0 (chr-ID scaffold0092 6; pos 746008 to 746733)
attttctctcttctacagtactaaaagcaattgaagtaagttttcgttaatcccttttcctgttcatttcctttctcaaagaagtgttcgctttcctctaatgggttttgtttagtttctgaatttggtaaaggaaacgactctttgagcatttcagtttcataaatttctcttctttttcactggtagactcaacttactttgaccaccgggggattattgttctttatcatgtttgagaatggaggagggtttcccattttcactgaaaattgtgtggttttaatccctcaagagtgttttgtggaatgttatgaggattttttgttcttgggtttttagtctcttgaaatttctctttgtgcctggtggaagattttgtaattggatctttaaccatagggtttgcttttacataaatctattcttgaatggtaggtggatcatgattcatgtgataaattgtcatttcatatactttaatggaactaaatgaactaccttctgtttttcctcagtttctgctcctgatctctattggttatggaaatttcattaattagttgcttagttcattttctttcctgacgatgtgttcatgaacttcagttatttattacatggttcatccaaaaaaaaaaaagagagaaaaagcaagaggttcttagttgtttgtttacttttgtttcagctctgtcgtgaagaaaggcttgcttgcaaattaca

SEQ ID NO: 67173 - DNA, 713 bp, Cucumis sativus
  Intron number 1 from transcript Cucsa.103610.1 (locus Cucs a.103610) derived from phytozome v7.0 (chr-ID scaffold0092 7; pos 2370467 to 2371179 reverse strand)
ttgctctttcagctctaatccctgaccttaacaaggtattgtgtactaactacactttagttcattacttatttttcattctaactttttatataagttcgtgtattttaattttgaatgttatgatggtcaaattagaaagaaaaagtttaaaggggtctacttgcagtttcttcttattttttcaaaaattgacactcaaaaactgtgaaattgtgtagtagctgatatctgctatatctcacagatttcttattttcaaatgtatattatactaccaagtttaagaatttattagaaaaaaatttgaaatgaaatggtttaggtcatttactcttgtggctttctggtctaaagaaaatgctctattatgctattatgatgtttcttctgtttctttaaattggtttaactctttttgtattttattggcaatatattaatttggtctggggttggggtatgataaaaatgctaagaatgtgtaacctaaatgagatttttttagggtttttttaataatctgaccaagaattttatttatttattttcttcataaaaaaaaaaaggttagaatttagaagaaaatatgcatataaatttgaaaaacataaaactaattaaagataaaatggtcatcaaagagacctaaaatttatttgatttgtgtgttggcaggcagacaaagcttcgatattgggaggagccataag

SEQ ID NO: 67174 - DNA, 835 bp, Cucumis sativus
  Intron number 2 from transcript Cucsa.092560.1 (locus Cucs a.092560) derived from phytozome v7.0 (chr-ID scaffold0090 5; pos 401265 to 402099)
gttctggaaagagcacatttgcaaaggtcagtattgtttgtgttcatttctctaattctcatcaagaaaaaaaggatttctggcgttctttatagtaatgagctttgagcttagaagttcattagtttcttttgcttcaatttgtacttggaaatggaatttttttcatctttgttttaacttttagtatagtccataaagctcaattactatggtcaaatgtgttaaagctttgttatcatatattattatcatccaaagccgaagtactatggtgtcaaatacaatttaagctttgatataaaaaatttggttggagcataaccagagagttttccttgacaagtctattgactggtttcatcgttttggttcagctcgtcttctagcttcttcatggtgttcacaatccaagttttttgctgattattccatagaggatatttgtctaaactagagtccttttatttctgcggtttaattatgccaatttgtattttaattttattaatcgtgtcttggatcgtgagctcagtctctcttcattatgccaaggaaaaatatcgtttcctaataaaaaaaaagaaagtacagtgggtgaagctcctccaatttcgctggaaacgactacttttaaaatctacatctgtcctggattgaatttttcctttcgtagacaaaggaaagaacacatatatagttatcttagtcattgaaatgcgttataatagcctccctgttattgttaatctgattggagattggattcttctgttttgtccactaaatttaaatgacgatttgtggattaaggtacttgttgggcacccagatt

SEQ ID NO: 67175 - DNA, 978 bp, Cucumis sativus
  Intron number 2 from transcript Cucsa.051160.1 (locus Cucs a.051160) derived from phytozome v7.0 (chr-ID scaffold0055 7; pos 344904 to 345881 reverse strand)
ttatatccgtggtatgtctcccctgtttcttatgatgtatcatatatgtagaagttctgttgttttgctgtactacttatttggtcatatgtgtgtctgtgtatatatttgaactttttctcagtgcatatatggaagtgcaaagctttgtcttgcgtgaaccttttttttcgatgaatcaagaatgtaatgtaaaaaagaggaatagaagtcttccaattgatttgaaagtgaaattgatataatttgtctaaccttgctcttcatgttctaaaattaattgttagataatgtaatatttcatttgccttcacccatcaagcaccaactgaagtttttaggtaaatcagtgatttaacatggcatagcaggtggtctaggaggtgttgtgatcaaacctttgcagtgttattctctccaattaatatttatttctacttgctaggtccactacatatttcaagctcacaagtaagggggagtgttagatgatacaacattaaatttacttcacccatttgtttaagcttttaggtcaattgtgatttatcattaactttcttatttgtgctgaacaagtatttttgtgttagcggtgataatattgagatttactttgaagtaatggattctggcactttctttcttgcttttaaatgattttgtcttttctttgagcattagtctcttttctttttagcaatgaaaagttttgtttcctttccaaaaagaaaaaaaaaaagaagaaaaaattgattttgcctaaatattcaaccaatgtttattttttgtccaaccttcctagttcctcataagaaagttatccaatgcagagtttatcatgaagacatttttttgtcataccatattggagttatttcggttcatcttcattctatttatttatattctacatttttaatgtcacctagtacaaatgcaggcacattgaaagcaactaagaagtttcgattcctt

SEQ ID NO: 67176 - DNA, 589 bp, Cucumis sativus
  Intron number 1 from transcript Cucsa.119180.1 (locus Cucs a.119180) derived from phytozome v7.0 (chr-ID scaffold0099 8; pos 1075325 to 1075913)
aagcgaagtttggtaggcagccgaatttacgggatgtaagcggtgaaatccttagttgtattctgtattcaattcttttgcggcaggtttcatattccttttagattacaagatttcgctcattcatgttaccgacttgttattttctattcgtttactgggtatcgattctagaattaagattgcgctgtcttgttatttcagagaattcttttcttttcttttcttttttgcccatcggaaactttttggtcattgattaaaggaaactcaattatttctgtcgtcagaaaatattaggttttactcgtggaatcttgtaagcaaagcagtaggtatccataatacttttgtggtaaatgctgatcaaatagttatttgatcctaaacatcattgcttatggttttagtttttggcaacttttaagttcatcaattttgagttcacttagggattgtggaagacgataaatataaagatattaagacttataaggaaattactgggactgattgcaatctcatctcctcctgctgtcatacatacactgcaggatcaactaagcgattgtcggagttttggtagcaa

SEQ ID NO: 67177 - DNA, 382 bp, Cucumis sativus
  Intron number 2 from transcript Cucsa.166480.3 (locus Cucs a.166480) derived from phytozome v7.0 (chr-ID scaffold0115 3; pos 1669209 to 1669590)
tgaattccaggaattactgtggccaggtatgtgactttgatgctcttttccttttctggggtttttttttctaaaaaaattgaattgggagcctgatcatcacaactgagaggattttagttttatcactttttctccaaattctatgaatggaaatttggtacctctgtttttgttcttgatgaggtttaattggattattaacaacttggggactgttacaattactccattatgatgagccgaatttgtaggacactctgccgtttgtttttcaattttctaagttcactaaacctgacattttcttttatttaattagtaatcaccctaaaatgaatgtcttttacttgttttgttcatgtctatgaagacagcagtg

SEQ ID NO: 67178 - DNA, 675 bp, Cucumis sativus
  Intron number 2 from transcript Cucsa.179900.1 (locus Cucs a.179900) derived from phytozome v7.0 (chr-ID scaffold0123 3; pos 270753 to 271427 reverse strand)
aagactttggctcccctgaagaattcctttccaaggtagcactcttcctcacatttcaactctcaactctattttcacctgttacatagttctttataatatttttcgcgcacgcattgtttcaaatcaattatatctcgataggaattttaaaatagttagaacttaatatcatttctttcatgtttaaaattactttctatcactttcataattcaacatgtttagagtgatttttcactgtgataaaagtaattttattcttctcaaatatgttcttacctatttagttgatggtgcggatttggtgggacttcaaaattgaagcacagtggagggcgttataaaagttaatttcactgtctacttgaaatcattaattgcaggcctatgcttcttgtagtgagaattcctttagttactgttaattaaatagccccaatcagataaacgaacttttaagaaacagctactcaaattaactgaactattttcttaggaaaagcaaaaaacaactccctacagccactataattcttgatgtttgataactatgtggctgttagactatttcatgtcagatttggtctgaaactagacaagaacatttaattcatatggcttaaattggcctttgcaggttgactatttgctgggaaagcaagcttactttgg

SEQ ID NO: 67179 - DNA, 873 bp, Cucumis sativus
  Intron number 1 from transcript Cucsa.043490.1 (locus Cucs a.043490) derived from phytozome v7.0 (chr-ID scaffold0054 2; pos 276283 to 277155)
gcttcctcgaatcggtgattggatctgcacgggttagcttcctatattaactgtacttgttttttccccgtttctttatgcaacctgcaaactgtgttgtattcccgacttcgttttgttggttttcatagctgaacttagaattaaacgtttagttcagaattttagagtagcataattcgattctgtgtctgacacttggtgtgggtattttgtttgaagaatgttcacgtgatggagttttgttggaacgtttctcttttctaacatctgagtaggagtggagttatcgagttaggcttatggctcttactccagtgaggtttcttgctttgatagttttccacctaaatacaatgagctaataattattgaacatttccaatttaaatcgactaaaactgtagggtgtggtgaaggaaaatccccattgatgtgatcagtaaataaaatactaatcaagatagccttaaacatcctgtggaataaaatactcatttactgccaattcagaaaatctgtagttggagttggtatactttacacagccatgtgttatactatgaagagtgaaattgttttgatctttggtttgcctgtcactggacttaaatcaaaggaatcttcattgcatatctacctccagttcaaaattttctttgaggattgttttctgcttgctctttccattaatgtttatattccagcgaactcatgcttttagaaaaattctaaactaggttgagtcatgagtcgtttgtgttttttgtatgtgtatatggtgtggatggactgcttggtgtgcgtatacctggttttcttgtgggttgggtttgtctggctgtggtgcaataggttgcactaacaacaatt

SEQ ID NO: 67180 - DNA, 905 bp, Cucumis sativus
  Intron number 2 from transcript Cucsa.096770.1 (locus Cucs a.096770) derived from phytozome v7.0 (chr-ID scaffold0091 9; pos 2264822 to 2265726)
ccaaggtacccaattttctctaattcaagcttattgtatttccatttcgtttgatttctttgcttttgtggtgagttttttttttgggcattaagctctttgaagaccagtttcctatgaactacctctcaatgcttgtactctttatcgattgtcatatgttcttagtctgagattgttttgtaaaatattctggacttgggtttccatctaacttgcacacttatataattatgatttatatgcatcttccccctccattgatgaaagaagaatgacaccggttcctttattttacttatgttgtaagaaaaacccgagtccttcagctgcttattacttgcttagtgttttggatctcttgcacctgttgtttatctaacttattgttgtgtggtactcatgtaatcagttatttgtgtcagtcttttgctatcataatatgctcatctgccattgacttgtaaagaatacacatctaatagcagttgctttaatttgcgggggagtgatatttcctacagtttagtgtaatttgaaagaaatttacccaactcttgtgccaaatggagtttaacaatttatcttagccctgaacctttgcaagaaagttaactaagttcttaaagctatggtccaccttgttgattatctgtttttatttatcttttaaagcgagaaagcattttttcaatgtctgttttgttgcctggtgtcatgtttgacaatctccagtttgtagtatttcatttcgaaggatcttggtcatccttatagttttaggcaattacattgtgtgaagtgctatgtggtggatagttttgcatatatttttcagcttctccaaatactatggtccttagacatgagttctaatttgaaatgaaaaatgatattacaggtag

SEQ ID NO: 67181 - DNA, 150 bp, Cucumis sativus
  Intron number 1 from transcript Cucsa.146570.2 (locus Cucs a.146570) derived from phytozome v7.0 (chr-ID scaffold0110 0; pos 27511 to 27660)
ggcttggtttttgaatctttgagcattttttaattgttagttcgtgtttgttttttcttcttgagatattcttatgtaggttaatgaagcttacttttgattcttctttttgcaggttttttcgtattgatttatatatattggataggt

SEQ ID NO: 67182 - DNA, 404 bp, Cucumis sativus
  Intron number 2 from transcript Cucsa.149430.2 (locus Cucs a.149430) derived from phytozome v7.0 (chr-ID scaffold0111 0; pos 258328 to 258731)
tcaggtgtgagtttcctgctgatcagctttgagtttagtagaactgcattgtgataacttctagtttttttttttttcttaagattttcagttaatgagaacttcctagtgagtgttatatttagatataaacattatatgaagatttgaactgcttctgcatttgcttaacgattattattattacggtttcccaaataaaaatatgatctggggactctcctaagtgtggaaatttcaagagttagaattgcactggaaacatgtaaggggagttatattagggtttgattccatttcactgtgtcatatttattagaattttttggccaatggtatatggtgttgatttttgttgataaatctttctttggcagggaaatattgagacaagatttccagtt

SEQ ID NO: 67183 - DNA, 797 bp, Cucumis sativus
  Intron number 3 from transcript Cucsa.106140.1 (locus Cucs a.106140) derived from phytozome v7.0 (chr-ID scaffold0092 9; pos 554941 to 555737 reverse strand)
cctttgtttttttttcttttgacaggataaagttggtaagttccttgaaacttggtgttgatatacggcatgtgatgaattacattcgaagaagtaattgagttgctacaaggtgtaagatcatatttaagccaaacagattatttagataaaactattcaaactggcattttcattttcaaaggatttatgcattcactgtctgttcaccgaccatctttttgtgtagttcatatcattgataaaactcatgggtgtgttttggttctttagattcttgtcaacgtgtttatatatgcttccttgatagtgtgttcaccaaagtctgcagtccttaacacttctatatacaccattactattactattagtctttgatgctgtataatctgtgtgacctaaagaacaacagttgagccaatgatgatcagttgatgaatccaaatcttaatttctgtgcgtgagttttctcaaataagtagttccttttaagaacttatgatcaactacattttctttgacaatttaattggctttggtcaacaaaaatcctaattgttttttcatattatgattggtcgttttacatattgtttgctacaaatttgtgtgattgacgttcttttctcattgggaagagaaatgcagcaataagatatgatggtagtgcttttctctttagaaatttaaaacgaaagagttttgcaggaagacagccttctttcatgaaatgagttcatacgagtagcaggcttgaacttagcacatgctaacatggtctctgttattgatgcagt

SEQ ID NO: 67184 - DNA, 663 bp, Cucumis sativus
  Intron number 2 from transcript Cucsa.146910.1 (locus Cucs a.146910) derived from phytozome v7.0 (chr-ID scaffold0110 0; pos 256828 to 257490 reverse strand)
aacaaagtctcctcatcacaggttcggtacagaaataacaaaattttctgttttaactttctaatttttagttgtatgttatctaaactttgcttattttacctctcatttggtagaaaatcaaactattaaaactatatctgaaagttgatggacgaacgaagaaaaacaaaaccaaataaacgtgacaccagaaataggaaatgcaagtatggatttgaacctttaacccaaagggaaggttgcaaatgcaaatgctgttggtttagctacactcatgctgatgaatatgacattttttttcattatagctcaagatgaaaattatctttcggaagaaacatccatgatgcactttttcctaaaagtcctaaagacactctcaagtgtttttagaattttcaaaatcacttttgaaaaattttagaacgtttatagtcagcttgtacttttcaccctcctaaatgtcattttaaactttccattaaccactccaaactcaccctcactcaacaaagtcacttacattgttgtttatatctttctttttcaagtgcatattcaaggtacaatgggaatgtgattgttattttgactcctatatcttaatttttaattcatttaacaggattccattgtggagaatagcccaaaaaccaagga

SEQ ID NO: 67185 - DNA, 641 bp, Cucumis sativus
  Intron number 2 from transcript Cucsa.116800.1 (locus Cucs a.116800) derived from phytozome v7.0 (chr-ID scaffold0099 5; pos 625395 to 626035 reverse strand)
tgggatttgttatactcatcctgaaaagcttcctggtaaattattttttcttttctttaaaaaataaataaaattagaacactttctttttcccatactagagagaatgataaatgtggataaagaagaatatttttattcaaattttagaaaaaaaagattgggaaatcattctttggattggataatatatttatgtttagtttaatttgcttttatatgtatccagtgcacaatttgttttctttcaagttggatatgactttgagggaaaaccccttatggttgcacctaagccaactaacttggaattttgcataaacttttttttatcattaactttctttttataaatgaatttccactctatacttttgaagaaaagtattttgacgtgatcgatgatcttaataacagttggatgcaagttcaaaatttatctaactctaaaccacatattgctcaatttttagtgtatatatgtacgtatgtttgtatatacattagtgtacttcaacaagatcaaaatacttctttttagtttttctctcgtatatatcatcctatagagtcgttagctacaatgttccaacttctcaattcatttttcctttttttttttaatgtaggagttacaagag

SEQ ID NO: 67186 - DNA, 525 bp, Cucumis sativus; identical to SEQ ID NO: 66789
  Intron number 1 from transcript Cucsa.005460.2 (locus Cucs a.005460) derived from phytozome v7.0 (chr-ID scaffold0005 5; pos 548006 to 548530)

SEQ ID NO: 67187 - DNA, 940 bp, Cucumis sativus
  Intron number 1 from transcript Cucsa.084550.1 (locus Cucs a.084550) derived from phytozome v7.0 (chr-ID scaffold0086 2; pos 275730 to 276669)
ttcgcaagctcaagcgctacaagcacgcacttgaggtattcaattctttattattatttttttccttgttgcgtgaaaactcatgtaatgtcattaatgctcgagatcatgtattgtaccattttgtgatctgaatgaactcatcgtctacttgtgctgtgagtctgcacccttcactcgatcaacacttgaagagttagtgtcaattcagctgatgttcttgtggttcattatttctataatctgtttaatttagtctcaatcaagtggacagtggactagctttgaaaagggtattgtggttatactatgatggattttagattgttacgatgcccagaagctgatcatttataaatatggcaaatttaatgacacgttatttaacacttggagagttagaaattagctctacatattgtacatattcattaggtaacatgtgttacataccataattaaattgacagttagaggaataacccacaaagactgtgagatcccttcataacttttttcaatgtgatgatgcctcttttgtgatcaccatacattaattgaatctcaactttttttttttgaccgaatagacgttttgtctcaaaactaattgaaaataaaaggagctaacattgtgaggttttaatttttcctgagggatcttcaacaatatgaaaccaaatgatattgcagtgacttgctagagtcactactctagtactagattaaatcaagactatccaaaaggttagataggttagggtgaacccagatatgctgaaatacaatttcattgaatattttgctttatttcctgtaaaaataagtagacgaataaaatgctttggtacggccttgaaccttgtagcttgtatgatctgaagatggccttgagcctcgagtaatctttcttgagattttccaccgtgcaggtgtgtga

SEQ ID NO: 67188 - DNA, 785 bp, Cucumis sativus
  Intron number 1 from transcript Cucsa.085670.3 (locus Cucs a.085670) derived from phytozome v7.0 (chr-ID scaffold0087 0; pos 123716 to 124500)
tctgattaccgtttcgacgatcgtggtttgttgggttcctgatcatgttcttgggttttgattttgaagctatttttttcttttgcatgtgtttgtgcttagtatgctatttgaccgtacatccagggttctttcttatctctctgttctgcaatttggtattgttcataattttcatttctcctgggttccctggattttgttggattgattacttgttaggtgggcgtaggacgtaggagtgcaatgacacacgatggttctgccaaacaattttatcgtcaaaagttttgtcgttaattttgtgtagaagacttgattcgattgatctggtctactttttgtggatatgttttgtctttttattctttaacctcaatccagaacaatttggatgttccatcttctgaaacttgattttgaaacgttgtttttattgtaaaaagtccataattttgggctcgtttgattaggatttttcatttaatcatttgtttctttgttttttatgttaaaagttgttaggacaaggcttgtccaactttatttgtagcaggttttggtgatacgttttaatttattttacatcttgaaagctctaggtaggaatccattgagtctgatcttatcgttttctttcccgccttatgagttttgacttttaagtgacagaaaatcccattgttctatggttttgtttcctgtcttatattcttattactaatcatcaatggactgttgagtttcatgttttctcaacctcactttgtccttgtaggtcacca

SEQ ID NO: 67189 - DNA, 769 bp, Cucumis sativus
  Intron number 3 from transcript Cucsa.162590.2 (locus Cucs a.162590) derived from phytozome v7.0 (chr-ID scaffold0114 4; pos 2171975 to 2172743)
caattgaaggtcatattctcttcactttcagatccgtgctttatctttacttattctggagtttgttcttccatagagaccagtatgctgaagtatttctgcaatttgtcatgtctctctatgaactttcccagctacttataatagtagccgagaagatggttcttctttgcctgaattggtgtgtatacacactcagtttttacttcaatttcactggtcgttaatcagcaattcgcatgctcttgggcctgtaactagttcttgtttaattggttcaaactagggattcgtgtgtgtgtattagattgcaatttctgataggggacttgaaaatgtcaagttatttgttactctttcttaattagacttcattttatcattggcttcagcttctttttagcttcaaatattgcactttgcaatcgaatggctagtgaacgttatctgctcaatttttacatttgaaaccgtgagcatatgttatttattgagttctatgaaacaatgcgggtctgtccttggcatcatttgatctggccaatggagaagtttgattttcatttatcctatgacaacattcaaactaacattttcatttaaaatttggtgtttatgtcgcaagtgaagtttactaattggtaggtggtgtggagtgttattttagattttcattctcagcgctgcccttgcatcttaattttaccaaaggctgaagagtttttttgctgcaggaacctacattgataagaagtgtccattcactggc

SEQ ID NO: 67190 - DNA, 810 bp, Cucumis sativus
  Intron number 1 from transcript Cucsa.012910.1 (locus Cucs a.012910) derived from phytozome v7.0 (chr-ID scaffold0016 4; pos 699154 to 699963 reverse strand)
agaaggttgctcctctttcacttttctttatttattgttatcatcatttagttcttgttttcaaatatctcaaacttaatactttcatcacgaagaccaagtttaactttatttccactacttctagttcgttcttttgaaatcattcttgacaagaatcttatcaattgagaagaagttttaaatgtattgatttatttggggtatctgctatcaagtttcaacctttccttttaatgttttcagccgactgcactacgagaacatttttaaaatctaatgttcatagctatggtatatcacttccatagtcttctacattttcaggggaaagtatgtcgagcattgtaaagatactagaagtattggtcatcccaaatcatacttatcatttatattgataaattgaaattttaaaacatactattggtaaaattgaactactgtgaagtttgttgaatctttctacattcacgattcaaatgttttcatctagttaattaaggtattgtatccaacatttacttaatctgatttttttcgaattatagttattgctttgcaagaatgtagtttatttttgtagtttcttgatttgattgttacgttagtaatgcatttcttctcttattttatttttgtgaatttcacattttatggtacttatccatctcaaatgatacctatgagtataaagggttattcaatagccccttatacaacttctattcgttgttattagattaactactttgttaatacaacttctattcgttgttattagattaaagctcgatagttgtcatcagt

SEQ ID NO: 67191 - DNA, 1020 bp, Cucumis sativus
  Intron number 1 from transcript Cucsa.143320.1 (locus Cucs a.143320) derived from phytozome v7.0 (chr-ID scaffold0107 9; pos 1662324 to 1663343 reverse strand)
gctagccgaatcgtcagtagcctcgttcttttccggtaaaatttatttgttttagttggatttctggaagattttcgactacccattaagtttcggattttattttccaatatccattacattttgatgttacatttgggttcttgggagattttagctgctgtccagccgttaggaaatgcgaaattgagtgttttggcacacgttgggtaagattctaagccgggtgacgagcacccatctaagtttggtactaatgtagaataatctatggtattggatgctagatttcgaacttagaaggttgttcgagtgctgtgcattggaattaaggctactttgataagtgtttgataagattttgggtaagtttcgtgaatatccatttagttttgacatgacattaccacaagattggagacttggagaattctaaagcattgttcaccatacttaaagatcgatagcttgagttgtcataatgaagtgttttggagattgttgtgtcatcttgccatgtaatgtttacttagtaaccccaatcattgttttcaagtcaaactgaagttggaaaagtttattatcccggggattgcgttattgatggccagtagttcattttcaagctttctatgtagaatctatatatgtgttattttatgatatggctttgaaactacctttgcttaaacttctttattcgtgttttaattaatacttaaatgatgtgttcactcttcatcattttaagaatttgtatggcttgaattttataaaaaatgtgttttcagtttttgattggtactttcatgcctcaatctaggttagtgtggaaaaaccagaacgaggtgtgacagacaattttgtcataaaaacactaaaccctttatttgaagtctctccaattaatatgattttcttcttgcgcaaacctttgatttaccaagaaattttctttccttttttgttgattttgattttgaaggttgagatcttgacccattggaactgccttctcct

SEQ ID NO: 67192 - DNA, 386 bp, Cucumis sativus
  Intron number 2 from transcript Cucsa.097230.1 (locus Cucs a.097230) derived from phytozome v7.0 (chr-ID scaffold0091 9; pos 2559450 to 2559835)
gaagcctctcaaaatcaggtaccttcagttctgatcttgattagcttacaaggtgatctaatattaaacttactttcacccatcagctcaagtttttaggtcagcctgtgttatccgagtagatgatcttgtgttcaatgttatttcctttccgattaatattaattttaacttggggttttaatatattcaagttcactttgtttttgggtcaattggtggtttaagagctatttattagatctattgttatgcctagatttcaattcttggctgtcagcaagcaagcactgaggattttgaatcctgtattgttgttggattttgttcttgaagtttagacttgaataatattcctaactaccgttactttttctcttcaggcc

SEQ ID NO: 67193 - DNA, 526 bp, Cucumis sativus
  Intron number 1 from transcript Cucsa.045730.1 (locus Cucs a.045730) derived from phytozome v7.0 (chr-ID scaffold0054 2; pos 1473012 to 1473537)
accgccgtatcgctatcgaatcggcgttagactttcttaatccaccttttcttctctctgttcacctttttttagggtttttcttttcttttatatgctccttccaccaaagggttcttctcccttccttttgttttcccttttagggaggggagagggaagaagcgatttcttcttaggttcagttttctctgcaaaataaaaaggttttgaccacgatattttccttttttagttcgaatatgtctctcagatttcaactagtgagtctaggaaagtcaaatcggtactttctgtacacaaattttcctcatggtttcggagtatatgtaattggttgtgctcgtcttacgggggatgtatgttatgttttgcccaagtttgaaattgataattttctatgaacggattgtttgctatatttaatcttcttttcacatcaaattaattatgtttttgatcttcatgtggtaacagtagcctttattaatgctgcagctgtccgtgtcacagatttgggaagaat

SEQ ID NO: 67194 - DNA, 747 bp, Cucumis sativus
  Intron number 1 from transcript Cucsa.141550.1 (locus Cucs a.141550) derived from phytozome v7.0 (chr-ID scaffold0107 9; pos 12573 to 13319)
gagttttctcttcggcaagcgcaagactcccgccggtaattgctctccgatcactatttttctctcttcccatcaattttcagtttcatttagtagttgtggttatttgtttcgattcctggagttcatggtttaatttgtagttaatcatagcctctgcgatattggagttcttaattttacctactattggaagttcattttctagtctgtttattgccttcagatgctgattcaatgtgaactgttaatacgatccgctgattcttcttatttttgtggtttgatttctagatattgaaccctacttgatttcgaattgttgattgtcttttaagaaatggtttttaatgcacgtgttgtaagccaactgcattatttaattgcagatttggtacatttacctacggtttatagttagaatttagttctgcaatttgattagatttttcaatccgaaagtaataaatcattttagcgtttgaactctttgagttagcgataaattaatctgatttataaagcttgacatttctttttaccctcgttaacttaaatatgaaatcgagctcgcgtgttaggagttctaagaattaatatggaaacacaaacatcatagtttaatagttaaagactctctagcttagatttgccatcattaaactattaattgtagtagtcaatctcataacatctgacgttgtatacattattgtcaatccagaactcctccgggaaaataagagg

SEQ ID NO: 67195 - DNA, 576 bp, Cucumis sativus
  Intron number 1 from transcript Cucsa.112380.1 (locus Cucs a.112380) derived from phytozome v7.0 (chr-ID scaffold0095 3; pos 997257 to 997832 reverse strand)
tgaggagatcctcctggaacgccctcgtgctcctggtttgttttcgattaatctacttattttatttattggttgttagatgttggaattgattgtatacgaggtcagttctgctacgacgtatgcttgcttttaatttttgtgtctaaatatgccttttgctccaatgtgggattgcatcgaaattgtcctacaaccacgttgagaaaaatgggtgcttgattattgaagcgtttgaatgtatatttggtctggatttgaaaacaaggggaagataattacttttcgatgcctggaggatagtagcctagaatttgcagaactgtgcttttaggaatttacagtctggtgctttgaagttacactgaacaattcaaataatcgattattgttttcaccagacaattataaaaaatgtcttctttataaagcagaaacgacatgattgaaatcattctgaatttgccttggcattctcataggtattgtgtgcatgtatgtaccctattaacatccttctgaggaatgaaaatggttacaggtagcaaaccagaagagccaaaggttgcaggagac

SEQ ID NO: 67196 - DNA, 527 bp, Cucumis sativus
  Intron number 1 from transcript Cucsa.144150.1 (locus Cucs a.144150) derived from phytozome v7.0 (chr-ID scaffold0108 0; pos 581085 to 581611 reverse strand)
aggttgtctcaattcgtggttccaatctaattgaggtatccttctatttcatcgatcatgctcgctctctctaattttgtcaactttttactccacaatcttgtgcttttcctattgcctattgtgttaattgcgttaatcaacctgaatgaacaactcctttaattgcagttaatcatccactaatgttttgttttcgaaagtaaaaatagtaggtttcaattcttgctgtttgattgtgtggttacattgtgtatttgagatatttgctaacgatttaaataaatgattctgatatgcttgttgtattgcaatttctttgtacaagtcatccttttagttaagcgttcatatgggggaaaccataacctctgcagtttctctatttcgggtgcaataatttgtttgtttctttattttttaggaaaccaagatgtgtattatttgtcaattatattcagtgggctgctttgctttattttgtattttggacaatctttaaaatttttcttcatcctctctaggta

SEQ ID NO: 67197 - DNA, 694 bp, Cucumis sativus
  Intron number 1 from transcript Cucsa.120400.1 (locus Cucs a.120400) derived from phytozome v7.0 (chr-ID scaffold0099 8; pos 2507005 to 2507698)
ttcggagattttccctctccggcatcaaccccaaggtattctctcctcctcttcttcttcttcttcttcttcttcttcaaattatactgcttctcatgttaatggatgtttgatgtttgatgtttcttcgacaccctccttaattaattgctcccctctttaattaataggtttcttctttttctttgttcgctttatatgatttgcgatttcatcaaccgggaaaacctttgatctcccctttcaactcttttgaaatggttgttacccaattatctgtctttaatttgaactgctgatttatgttcatagtaattaatttgagtattttgttgtcgttgtcatttttttaattctaattttaaaatattaataacataacctacagaaagatcggcaatagtaaattagtaatggtaagtttctgtgcctttaatatttgtttgaagctggggttagctgtatcgacaatcaaggttatgcatgtgacgactagagtatacttgttgcatttcttttgggattcaaccgccagctctaaatttatatgcttggtttcatatgtttttatcttttgttttttgaactatacctcttgaattttgatctaggtcaagtcaagtagactgcatcactgctgtagttttatttatcttatttgctcaatttacttaaaatttgaaattctttacag

SEQ ID NO: 67198 - DNA, 700 bp, Cucumis sativus
  Intron number 3 from transcript Cucsa.012990.2 (locus Cucs a.012990) derived from phytozome v7.0 (chr-ID scaffold0016 4; pos 769786 to 770485 reverse strand)
tggtcaaactgtctgcctttttggcatctttggttagattctcccaccattctagcagtgacatatgtaggtgttaattattagtaaattttaatctatccaatttctaggtgatatgttgttaactgttaagtttcatttaggtcccatttgttaacattcttttttctattttttaaaatgatggttgttttctcaccaatttgtggtgtgcttttcagctccctttaaaagacatttgaattctcaaccaaatttcaaagaccacatcaagtttttgaaaactacattttctttgttttgaaattttggtttagtttaagaaaacgtttttaaaaagtagcaaagctagaaaaatgcaatgtataagtattgtttataagcttaattttaaaagcaaaacataaaaaaatgaaatggttgtcaaacagccccttagatgattgaagattttaaaaaaaaactttgagattcatcactctgccaaacgactctaagtttcaactttatcacccaagccatacatcttaattaattttgacgcttgaattcaatcattatcagagagagcatagttgatgctaatctttcaaattaatccaccatgcatatcttacagatattataactagtagagatatttacttctttccatttgggtgcaggtcacggtgggtcccgagctgcagagtttttgaag

SEQ ID NO: 67199 - DNA, 1048 bp, Cucumis sativus
  Intron number 1 from transcript Cucsa.048990.1 (locus Cucs a.048990) derived from phytozome v7.0 (chr-ID scaffold0054 2; pos 3551858 to 3552905)
cccctcatcataaaccaccttctgactccactccggtgagtactaccctacctctgtatcctgccaatttcaaatttttcgggttaggattgacgcttttctatgcgcaatctgctccccacaaaatctccctacttagtttttttttttttttttgttgctattaaacggggctaaatcccatttatataaacatgctatctgacttctctatcacacgaggtacctaaaaaattttgcggtttcttactagtcctgaacgttccctcgattatcaaaagcttttgcgagagagtcttcaataggaagatcatctaactaagtatgaactaattgctcttcgactaacccgaaatgcaaaattagaaaccccatcatgaatatatggagtggagatagatgccttattagtggaagatgacaaaacacctttggtgattacaacatttgatctggaggagtcaattatctataagcatacgaatttgaaggaagtggggaagactcagaaaagtttccaattaggtcttttttttcttctaagaatgaattccccttcatataattagtttgttgccgcctttcatttgagcttgcttgtggtagattttaaagttgaagtagtatcatcgagaaaataattaatacagataactgtgcaaatagtgaaagaattaaaattgttaaaatatgtattcgatagtaaaattagaataaaatattaaagtaaggaaaaacaggaaattacaacgttcttatcctttggtcaatttttggtatgctatggatttatgaaaattttatggattgtaatcagtatgctattgttttcacttccttaaggtatatcatatatgctctcatgtccactgcattttccatggtaggtaagctgacatgtcgtgggagttggcggtgctgtcattgacagttttgccctcactatagaaattaattttatcatatttaggtacttgagattgatactttgaagattttttttttctctacagactgtcaattcatatttgaaggccgacttaagaac

SEQ ID NO: 67200 - DNA, 564 bp, Cucumis sativus
  Intron number 1 from transcript Cucsa.138830.1 (locus Cucs a.138830) derived from phytozome v7.0 (chr-ID scaffold0106 6; pos 120712 to 121275)
gaaccaaacagaagagtctagctgaaatctttcaggtaaattgctttcattttatttgattctgtcatttctattgctgcttgacgttggtagtaagtttgagcattgatgtatattgcattgggttcacaaatgtttcagtcaaatagaagtcttgagtttatattttacaattttgtaagttgttaatgtttgggtgtttgttgatggtttgttctttgagtgattgattttaatcggtctgatcggttcaatttgattttccaagtgttattactgttattgttgctactcatgattgttttggcctactgaattttgttttgaagtgatcacatgcttttgtataaaattgtatcttcatttgctttctaatatcgtgcaactcccctgcttgttagtttatcccattttgcttgtgtttcttgagtttggcattaattgtatatttgttgcatgtcactttgatgtgaaattgattcttacaaaataattgacctttaagatgtccccatttcggattagtctttttccaagtgttttagcgtctaacgtgtatgcagg

SEQ ID NO: 67201 - DNA, 968 bp, Cucumis sativus
  Intron number 2 from transcript Cucsa.134780.1 (locus Cucs a.134780) derived from phytozome v7.0 (chr-ID scaffold0104 3; pos 345082 to 346049)
ctgccggtcaaggagtcaagttcacggagcctcaggtatctgttccggttaatccagattgtttctaatattggttgaacccgttcatttcgttgtgttttgaatatgaatttcggtgttgtttattgtaattgatatttttccggcgaaattttcttaggttttgagttgatgttctggcctgctctgtttggcttttgttttccttttcgcacttattgctctgtgtttcaatattactgcaagggcatgagatacttggattttttttggcatttttcttccttttgtcttcttcctcttaaaagcaaatttagcaggtttcttgcgaaatttcatgtttttgacttcattaagctacaagaagatcggagagatatataaagtaaattctaaattagttaatattgtcctgtagttaatttggtttcggttggattagataaaaaagtgttcttagtttcttcgacatctctgtgcatttggattcacatatttgttccggattctctgtacatagagaagaagagactcaaacagaaatttccacgttatactaatctttggctgaatttcaattttcagtgaacaagcatactgctcacttagacatgattttatactttcagaattgcgaattttgtagttaaaaagaaaataagaaacaagattgcttgtgtccctttagtttccgttgtttatcatctccttatgtctcaagaaatagctacgtttcaaatttgatgattggttaagtgaagtgatctaagataattggagacagaaaaactctagtttaacttcaagtaggcctcttcaaacttttccaagtagtagattgtatgctaatgcattctcagaggtttcttgcatactacagagggtagctacctgtgacatttgccacattgattatgtcaaaaacattaaaagattggctgtaacttttctaccaggtcaagtgctat

SEQ ID NO: 67202 - DNA, 453 bp, Cucumis sativus
  Intron number 1 from transcript Cucsa.053290.1 (locus Cucs a.053290) derived from phytozome v7.0 (chr-ID scaffold0058 1; pos 53102 to 53554)
ataggtaatcctctcactctcatattaattttttagtttcttttagttcaacaaaggttgagtgagaaatgaaacagcaacttttaacatggcatttagtatcttgtgtactaaactatatattcaaattgtctcagtatcatatttataaagatagtgattttgaattttttttcatttctttcttttaaaaaaaaaaattcaatgtcacttcaaaacatcacttcatcaaatactaactagttttgaaatgattaatgatatattttagagggactttatacctgacaaaaaaaattaataaattttctcactcctaaacatgttttaattttttttcttatttccatttaataatgattttaaaaaaagttattttgaaatccctatgacttagttattcttcatatatcatcaggatctgctttgttcggctacctctcaaactctgcc

SEQ ID NO: 67203 - DNA, 605 bp, Cucumis sativus
  Intron number 2 from transcript Cucsa.143940.1 (locus Cucs a.143940) derived from phytozome v7.0 (chr-ID scaffold0108 0; pos 313416 to 314020)
cgttaaggccaagccgttatctctgttgggtcgtgagttgagttcatcctcctttcatttcacttttttttctctcctttctctaaattacaatatgtaatatatatgtcactttttgtaaaaaaaaaaaatctttcttataatgaaccatttaatgaataaaatttggtttgtattttgatttagttactctaatttcaaattttgtaacaatttaaatccaaatgactaaatcattacaaaattgaagaaattgaaagtatatgatcaactaaatcatcacaaaatcaaaatcttaggaactaaattgttactttcgtataactttagaaactaacatactttctatattatcatatattataagttaagatatcgtgttatgcaaaacaatgaatattcaaaaagttttaacacaaacttgttcataaatttatttaattaataataatttatatttaacttaatacagtgagtaactaacattagttgaaatgtgatagttttaattttgattgatgtgtatgggatatacatatatatatatatgtgtgtgtgtgtatgtaacaggaagtacagagatagagattcactttctagaaata

SEQ ID NO: 67204 - DNA, 291 bp, Cucumis sativus
  Intron number 6 from transcript Cucsa.163720.1 (locus Cucs a.163720) derived from phytozome v7.0 (chr-ID scaffold0114 6; pos 157027 to 157317 reverse strand)
tttgttcaagctgcttgcctttacattgcttgtcggtatgagatttctccttccctgaattacaacaactattcctgacatttattcttactgatcgtatattttctaaagagtttcttctcttcctctaatgcgagttggagagggttgccttctttgggtgaaaatccaaagggaaagatttgtgtttaaaattttcgtttaatgatgtatgatgtatgatgtattaatatcaaacttgtgttttgttttgtagggaaaagaataaaccatatcttttaattgactttt

SEQ ID NO: 67205 - DNA, 832 bp, Cucumis sativus
  Intron number 1 from transcript Cucsa.026600.1 (locus Cucs a.026600) derived from phytozome v7.0 (chr-ID scaffold0036 8; pos 182963 to 183794)
ggcaaaaccctaaagagccgtttacacccacccaagtaagtcctctctctcttaccccttctttctctttctctctcttcttccctttctctctccctttctctctctcgagtttgaatatatgggtccttcttgtactatctgcatccccatataaatatgcatttccttctttcttttgtttttccgattctccgattttttatcttcaattttgcttagatctgtggtttttcagatttggatgttgtggaaaccctaatcttttgcactttctgcatgatgggtgtcggagatctgatgttttgaggggtttttgacttttggggatttctgtttagggcttctgttttcatttcgatgttgccaatgtgaacatgtttttattttgatgatttcttttctttctttctttctttctttcttttttttttttttgcgtattatttgaatatgtcaagttgtgaactgcggaaacgagatctgtaccctaatttatttgattgattgaattaaatgttggatctggaatcttgtttttatcgttaaaattaatatctagaaagaacgtcgatctacagaattagcgtctagttgcaaaattttgttgttgattgtgttccccatctcttgtaaggtttgtgttgcgctttgattgttctgttgttgttttttttccatttcgtttctcgtcttgggatattttgttgttttcatttccaagccattatgatgatgtggttgaacaatcgccatccaagtactgttattgggaagattcaaaacctgagaatctttctcttattgttgttatgtttggtatgtagttctg

SEQ ID NO: 67206 - DNA, 508 bp, Cucumis sativus
  Intron number 1 from transcript Cucsa.075530.1 (locus Cucs a.075530) derived from phytozome v7.0 (chr-ID scaffold0078 9; pos 198401 to 198908 reverse strand)
attacactgaagctgtagcacttattgccacacaggttagttggtgatttattctgctttagtagaactctgtattttgtttcttcttaactgttatctagactccagatgtaagatggagttgacgccgaacagtaaaagttcctttttagcttactgaaattgcccatccttcaaccttgtaagcgcttaagagtcagtcctgttatgatatggttttcaaatccatcattttggacttgtacgtgcacgtttgggagtgatcttaaatttgttaagatcggcttgaagaaactaactcttaattactaaagatcaattcaatgttcatttcacacatttaaatgcaattttcatgctattgatattgattttgaatgatcaaaaggttgataaaagagattttatgttacttttccttttagcaagttcacgggttcaggttgattctaatgagattattattattcttccccccctcccgcgtagattctggagtttgcgcgca

SEQ ID NO: 67207 - DNA, 530 bp, Cucumis sativus
  Intron number 3 from transcript Cucsa.167810.1 (locus Cucs a.167810) derived from phytozome v7.0 (chr-ID scaffold0115 6; pos 9648 to 10177)
atgtaagctcaacattcaaaacatttccaaactataatttaagacgaaaatcttcttctataaacatttaacttttgaaaaaccaagttttaaaagctaacacataatgcttctttgataaccatttgtgtttttatgactaagctcatagacacgtgatttccacacataaatttatttattttaatatttactttccatctacaggacttttgtatttgttttccaattttcaaatctgaaaatcattataaaaatatatatatgtgtgtgtgtttgtttcatgattttcattttttttacgtaaatatatagaaaattaaacaatttctcatagtcatattctaaaaacaaaaatgagttgttagattattattttttaaaaaacttgtcttagatatttaagaatgcgtaacaagatgaataatgataaaagtgatatttatggaaataaaattatagataagaaagtgatattgttgatttaattggcagggcaattaaaaggtcaaattgctttcatagtagtg

SEQ ID NO: 67208 - DNA, 475 bp, Cucumis sativus
  Intron number 1 from transcript Cucsa.164640.3 (locus Cucs a.164640) derived from phytozome v7.0 (chr-ID scaffold0115 3; pos 38913 to 39387)
gagtaaagtttaagcaagcaacgtgtgtctttccggcaaagatatttcctcagatcctttttttcactttatctctttcttcctctataaagaaaatcgacgctgtgaataatctatcattaattatttgtttctgcctttcgctttatctttcatttcattatctttttcttctctgctccacttgctataacctgcaaatacgtttgctgcatttcgttactttcatgatttgagagctacccatcttcgatttcgattgcttttcagctctaatcaagatcttgttccttcagcattttgatctgggtttgatccttttagctcatcggttttattttctgtgattcctaactcattggttgcagtttctttcttcgtcttctgaaattttgattctgggtttttgtgttttgttttgtttgatgaaatgacaatagaagaagggagttcgtttcatcgggatagcttggtg

SEQ ID NO: 67209 - DNA, 415 bp, Cucumis sativus
  Intron number 1 from transcript Cucsa.120580.2 (locus Cucs a.120580) derived from phytozome v7.0 (chr-ID scaffold0099 8; pos 2643990 to 2644404)
gatctcctctttccccgccgtcgactctctggtttgtatttccttacccatgatcctaatttttctttgatctcagttgttttcacgtttcttttcttcttatccaaccggcgattagctaattgactaaattcgtggattattgccttgatcgattactttttggagatattgtgtgttctttttctttgtttttatttatgttctatgcttgagttgccaaattagtggtctgtcgtgttgattattgtcttaaaatttatgatttttgtttcggttattgatagggatggtagattttgaccgggtttactttgattgagctgaatcgtcttttattggttttgtgacgaatgttatatcgattacgactgattgttggttcaatcactttttctcagtttttttgtgagta

SEQ ID NO: 67210 - DNA, 1002 bp, Cucumis sativus
  Intron number 2 from transcript Cucsa.065250.1 (locus Cucs a.065250) derived from phytozome v7.0 (chr-ID scaffold0069 6; pos 26244 to 27245)
agagcaaagatagaagaatcttcttcaccactaaggtcatttaatttctataatacattattattattcttttatctctttcccatttatcctcgctgtgatcttaacccaactaattatctatatttgaaataacatgagcatgttgtttaaatttgtttacattatatctttaaccacctaaaagatctccagtaaacaaaataaaagaaaaaaaattatgtaagttctgatttttccctttgaggaagttttgattttttttctgcatttttttaataataatagatgggaaataaatgataaaagctcactattctttcatctttttgggttacgttcttcaattatactgagttatttgttgtttgaagcgggaacattacaattagtatttgtagaaaatataaaaaactaatcactaatattgcacttaacttctaataagccattagatcacatccctttaatttagttattttgatttgtttttgaacagttcacaagagggaaataattggtcggtaagaagcactcagatatctaaaatctaactagagggttcacttatttttaccaaccaattattaatggcccaagtgatcaagaaggtaattcgtggccacaagaaaataattacaaatactgaatacaattacgtactgagcagaagacaattattgatgacccacaagaaatagtacaaggtgttgaatacacaatggttaattcattgcacaatatagcaaagctcacaccctgcaaaatttggctctcacatttttttcctattcatgttgtacacttttgtccaatgtggttttgaataattaggtattaattctaaaaaccaaactctatacttaaatgttttttctaaaaatcactactccaatcctaacttttaaacaagaaaaaacttgaagcaattatatacgtgcttaacgatacgatttggtaatgtgatggatgttcagtcatatttgccgtcaaatacaccgg

SEQ ID NO: 67211 - DNA, 961 bp, Cucumis sativus
  Intron number 1 from transcript Cucsa.123040.1 (locus Cucs a.123040) derived from phytozome v7.0 (chr-ID scaffold0100 0; pos 339841 to 340801)
aaggtatattatgtttttttctcaaatgggtctcttacttttcgctcgattctttgctgtatgaccattttgagaattgggtttcattttcttttttggtttaacgatggttccttccaattcttgttgtttttactcttgaaacctccttagaatttgagatcctggtctttacattgttttgtgcattaactagaatgaattattggactatctctgactttactattcttgggttggatttttcacctttcccctgtatttttacaaagttaatttagtttaaatgcttccaccttgattagtatatgtagatttcccctcctccatggcttcaggtttctgaacatccaagtttgtttcttccttgtaggtttaccattgattatatagttttgcttgcttttgaaatgagattttattgggatataaaaattcagtttgtagtgatgggatttcctttctttttttactgggccatggctcattgtttctgtaggattgaaatctttggcattgaaaacttattttcatttgaaattttgacgatggtaacaatggacattgaccatttttaaatcactttctccaactcaatatttggggagaggaatgattgatgtttagaggtaggaaaaggggccctactgaggtttgttcctagctagatttcatgtgtccctctggacttcgatttggaataccttttataactattttcttggtaacactttacttagttggaacccttcttttaacggagtgttttggtgggtttgttttttcacgccctttgtattctttcatattttctcaatgaaagttgttgcttttattaaaaaaaaatcacggtctcattgagtattagacaattgttagtgtttgagctttgtataatggtcagaatgtaattttgtttgtttcaggaaaaagttgggctgtgttcgtccgatccagactc

SEQ ID NO: 67212 - DNA, 743 bp, Cucumis sativus
  Intron number 1 from transcript Cucsa.090920.1 (locus Cucs a.090920) derived from phytozome v7.0 (chr-ID scaffold0089 4; pos 2045749 to 2046491 reverse strand)
gggcttcgcttagagttactggaaagtaaaatttatctaaatgaaaaaacttcttatgctttctacgacttttcatacgggccaaaaaatttgggcttaaacttgtttggtgaattgattctctttggtagattttgcttgaatttgttttccataactgtctgtttgaaatttgggctgcctttattttcttagcattggatgttcactattttcttaaaactaaaagccaccagtaaactatttcactgcagcctattaagtagtttgttgcagatttgtatgtagtttttatctaaatttatgattcactttgggtggcataattatatccttcacatttgttcttttagtagcagtattcaatgtagaatttttttggatgtagcaatcttatcgtgatagatttccttggctattgtgagtgttcattgtcttatatgcatcaaatagaaaccagatatttaaaatccgtagctaaggcacggacctaccatttaattgaatcttgaaaaactttgaaacataatctaatggtgtcatcacataattctcctcttacttgatgtgacagtctttatgtatgtgcaactgttctcttgatttattgctatgacatagatgactgaaatacttttgaatctatgaactgtttccgtaactctttttgtgacaatgaaaataattaacatctgttcttcaagacagattagtggagtattctgtagagacggccattgcca

SEQ ID NO: 67213 - DNA, 758 bp, Cucumis sativus
  Intron number 1 from transcript Cucsa.087710.1 (locus Cucs a.087710) derived from phytozome v7.0 (chr-ID scaffold0088 8; pos 288103 to 288860)
ccggaatccgatcggtttgaattttaagagcacatacgttatttcttcttttaccttctacttgcagaaatgctattgagcgctaggaaatgagtgcgaactgtcgctttagcattggatagttattatttagtacttagaagtgtaattgatttggtacttagctgagtagccagtttaactgtgaaaattgtggttttagttggagtagagctaggtgagacaatcagaagcaaaattcagtcacggtgaaggaaaaaatagatgaattttctggtccttagctcaggtcgtgtagataatggggagtgaaatagcaggattcaaggttggaaaagagctgttgaaactaccgtaaacactagcagacggttgatgtcatgattaattggatgacggatggtggttttgaattttcatatggtgtacaataaacataagcaattcaagtgcaaaatgtacttgtgtagtttacacattgatttcattgggtagctagcgctagatattagcatttgcaattactgtaaggcgtctcattaaatgtactgataagtgatctttggagactttaaacgttacactatcctttattagtttcattttagttatatctccttaaatattattatattttgatctttgagactgaaagcatctaactgtaaagtactatcctttattaattccaatttggttgttgcaccatctgtacgctctcagacaagtgttcgaacaagcaaggactgccccaggat

SEQ ID NO: 67214 - DNA, 388 bp, Cucumis sativus
  Intron number 1 from transcript Cucsa.160520.2 (locus Cucs a.160520) derived from phytozome v7.0 (chr-ID scaffold0114 4; pos 702465 to 702852 reverse strand)
cgtcgtagagaacgaaaacctcaagtatttatgttataaacttgaaaaatctccgtcgccgtcattatttttcgttatttattagtatttttattttttttaaagaaaaagaaataaaagactgagaatttgaaaattacccgtttgagtctctccaaggaaacacaagggcacatcttgcaaatcctttaaccatttctggtagcctttttttcttcttttctaattttaattatctatcttcttggtttctgaagctttgttggagctcaaattttcaattgagtatggattttcgaaatttcatggaattctccatctttgtgtcatgaagctggttgacggttagggcttggtttctgttgcagttagggcttcccacaaattc

SEQ ID NO: 67215 - DNA, 479 bp, Cucumis sativus
  Intron number 1 from transcript Cucsa.092480.5 (locus Cucs a.092480) derived from phytozome v7.0 (chr-ID scaffold0090 5; pos 330920 to 331398)
tccgccgctgaggaggtgcaagaatcggctgacatgtgagtttcgttttagcttctagggtttgggcgatttgagcatgaatttctctgtttgtatttttgattgatcttatttgcttttcaatgcgtgaaattctccgtttttttttccttctatcacgtgggtatgattcctgattccggattttgggattttccctttcaacgatgtgaagaatttattagtggtcttgacgtataaaagacgctggttttatggcttttgtaccaataagtttgccaacggtgtcctcgttctcgcattttctttcctatgtgtccttgttttgattttattggtttagggttataccttgaaatctgtttgttatgttgttgagagagggaagacaggaagtggaaaggggaaataggatgtgagatagttttagtgattttggtaaaactgatgatttgattatgatatttcatcagcacaaa

SEQ ID NO: 67216 - DNA, 802 bp, Cucumis sativus
  Intron number 2 from transcript Cucsa.036090.1 (locus Cucs a.036090) derived from phytozome v7.0 (chr-ID scaffold0046 4; pos 35572 to 36373)
gaatttacagtgagtaaaagggatgttaatatttaagaaagcattgattttctgttcatttatgtttaggatttggatcgttggactttagttcgatcaagaagattaggtaaccttaaggtaagagattcccactaatggactttataatgaatttggaacgtattgattgtatgggttttactgaactaagatgggttgaaatgggttgactgatttgtaaatttagatatgatggctgattgactgtatggattttactaaactgagaaggagttgactgatatgtagatttaaatatgacgattgatgtctagtatggttgattgaactataatgtgcactagtgtttgttttgaccgatgatatgtagaaaatgaggtgtttgttagaattgttagattggactgaggaaaaatagttatatatggggtagtgtgccttgcaggtgtcccacgagatcaatacatgttgtacgtccttcagaagcactagactgataagtgcattcttcgggagcattagactgataggtgcatcctttgggagcactagactaatatgtacatcattcgggggcatttgattgattatgtgcatccttcggggacattagattgattatatgcatcctagaggaccacttggctgttaagatggagtgtacctctcaataggaagttaatagtttttacccctaacatgaccaataatggatcttttacttggtatattaatactcacccttttatgtttaactttttcaggcaaaggtaatacaagaggtagaccgacgagggac

SEQ ID NO: 67217 - DNA, 800 bp, Cucumis sativus
  Intron number 1 from transcript Cucsa.133520.1 (locus Cucs a.133520) derived from phytozome v7.0 (chr-ID scaffold0103 7; pos 1201947 to 1202746)
aatcgttgaatacagcttccaattcaattctgaaggttaggctttcatttcatctaccgtaatttttgtgctttgaagtctgattttgttcttatttatttattacttttttttttttggtgggtgtttgtcgatatcatcatacgtacatttgtttttggtctgatttttgttttctcaatttcttgtggtggagttagtctgaatttagttgctcatgggcctcaagtttcacttccttgatctgattgctgtgttttgcgaagatcaattttgtgggctatgtgtgttcttttgtttgctattttagtttttttcccttttggcttatttgggtgtttgagaactctaatgggtttgggttagtttttggtgatttggtctgtagcctttgatatggtattgaatttgaaatagttctcggttagttcgggatgtttggttggaaaatctattagagatggctgctgtcgtgtaatctttggcaacggaaggggaattatgttgtggctcaattaagttcagagtgaggttttcttcttgagaccacctacattatttttcttcgtgaattcaagattaactttctgtaggtgattggggtgttcattttaatgctttaaatgatatttgtaatggtaggtatattagttggcggagtacatgttattgctattaagtgatgagaaaatagtttcctattgcacattttaagttttggtttgctgcgttaagatgtttatcccatagtaccttgccagtgaaattgtttgttttatgtgtttctagtgagctctgca

SEQ ID NO: 67218 - DNA, 910 bp, Cucumis sativus
  Intron number 2 from transcript Cucsa.163540.1 (locus Cucs a.163540) derived from phytozome v7.0 (chr-ID scaffold0114 6; pos 3577 to 4486)
gaggttaataacttttccttcattcttctttctctgtctctctcaacaatgtcattactagctttcaagttcttgaaatatgagcctagtttttggagttggtgttgccatttacatcatccttctaaatctttttattaaggacgaactaaatttcggtgtgttagtgtcaaatagcatcgattttgaaaacaattaaaactaaccttttccttatgtcacaaagcactgcccaacgctaaattatacattttcaattggaggtttggcgtattgacagttaatgagagtcggaatgtgaatttaagctaattcaaattctcacccattattaaaattttgttatcttatgacttttctcgatggtctcatcaattcttgatgattgagatccgcaattgtgaagggaaaatataaggttggcctgtgctttctgacatatgcaaaatgtcagtttttgttgtttatagaatttatgtcatttgacgttagtgaaaccaagttcgagttatttgtaaaaaaatctcttacttctaattatattactattaatttgtttctaataagacaaaagtgaaaagtttgatttttactgctaaatttcagcgttaaagtttcagtttcgatgattttttgaactatgaagttgaataagtgttgcaatttaaaccctatacttggacaattaatacatataggtcaaatctgtgatgagactacttttataggcattggttcttgtggttgtgttggatgcttttatttgattggttttccgactatgtttggattgtaggcattttcttgataggatttgttctttatttcgagttgaaatagatgaaattgaaagttttaagatgactcattcacaggtggatctcctaagccgcttgcactctccttgttt

SEQ ID NO: 67219 - DNA, 815 bp, Cucumis sativus
  Intron number 2 from transcript Cucsa.111790.1 (locus Cucs a.111790) derived from phytozome v7.0 (chr-ID scaffold0095 3; pos 497446 to 498260)
gaaggttttctcttagctcattgcttggaactgaggcgagtctctaatatcttcgttatctttaaattggttcctctttctctataattattccgtttcttgaaataatagcaacgaaatcgtgagctaggactccgtttccctcccttgccagtttatgaatccttctcttttgtcataatgttctagttggacaattttttttttttttgctacctctcgatattgatatctatggttaattttcatgcaatggaagtcctaactcttaaaggaatgttatttcttccgttcagattatttgatttttaaagtaatggctaccatctaagattatcaattaaccatcatataaatggctaaaaggccaaaggtttaatctatggcaggcaactacctaggaatcaattttagtttctttgacatacaaatgttgtacggtcagacaagttgttccatgagattcttcaaggtggtataagttggtccgaacattacaatatcaaaacaataatgataataaataataatctaaaactgtcaattgcttggacattgtattgtgaatgttctaaatttagtttggattataagttctggagatgattttaaatgaaatccttgctattggttattacacttgatttaccaatcatgtttatgtctttttaatttttttttttataaattccattggtcgattcaaattaggagaaatgaagatgaaaattttgttctttaattatcttgtacaaaacaagaagatatcatttattttttatttatttattgtatacagtattttatcaacagat

SEQ ID NO: 67220 - DNA, 572 bp, Cucumis sativus
  Intron number 3 from transcript Cucsa.117750.2 (locus Cucs a.117750) derived from phytozome v7.0 (chr-ID scaffold0099 7; pos 86861 to 87432)
gctggtcttaaggtcaaatctttgaaccttttctttcttttttgcaaattttacatgaaacccatttgaaattggtgttaaagtttcaaactttttggctttatgtgtaggctattggttatgaatttgataatgatcactatcacaggtattgccactgtctctctctcttctccttttatatcaaattggttcaaatcaattttgttaattttaattaaaatcacttttgggacgtgtgttttaagatgtaagagattttgaaacgatgttttgaagtgatcatgaacatgtaaatagttaaaataacttttgttactatttttaaaagagtcttttaaatatgtttctaatggttcaaaatcaaattttgataatataaaaattgcatttaaaagtgtaaacctacgttttataataattttgagtgattaaatatgtttcaaagagtcttttaaatatgtttgagtatgacaaaaacgattttgtataatttcaaaataactttcaaacatactcgatataatctttcaccaaattaatctcagtttatttgtttttcagcttggttc

SEQ ID NO: 67221 - DNA, 814 bp, Cucumis sativus
  Intron number 1 from transcript Cucsa.175540.1 (locus Cucs a.175540) derived from phytozome v7.0 (chr-ID scaffold0122 5; pos 195837 to 196650 reverse strand)
gaggagaaggagcagaacccagctgagatcaacaggttttccatctgggttttcaagattcttctactgtctttcagttttcgaatctgtttcttctactgttttaactagactttactcttccttttttcttttttctttcttttttttgtttgattgagtgatgtttctagtaggttttgttcttttgttggtttaattactgaaatcgtggatgtggatgaagatggggtacttttctagtaaagaacaatcttgatccgcgtcatactaaattaaggaagtttgatttctttccttttttaaagtttcaatctcttggtgggatctgcgattttgcctttactggtatggataaacttattagctattttaattatctagaatacaaattgggaaactagaagactggaaacgcatcctaacaattggatttccatgaattacaaaccccttttgggaagagattgcatccagccaaactgttgatcaaactcatgtttaaaattttattagaccttgttttcatgttttcgttgcaggaaccctttggattatcaaactctgacccgaatatgtattgttttcggtttttactgttattatgatttgtgtttgtcattttattggatttcatatgttcccagttcttgaatttctcacaaggtattatcgtgaagtaattttgtgagagttcgaagatttatctattgtagttcttgtctttcatttgaactaatggaagattgccgctttttttttttccgtctcttaactgatgaatcatgtcgttttctaattttttgcagcttct

SEQ ID NO: 67222 - DNA, 555 bp, Cucumis sativus
  Intron number 1 from transcript Cucsa.038070.1 (locus Cucs a.038070) derived from phytozome v7.0 (chr-ID scaffold0049 3; pos 119729 to 120283 reverse strand)
tcccccgggagcaagggtatgcgtgttaattactcaatactttattgaattccaaaactgcacatcgactatcttcattagaaagcagaaaaaaaacaccaaaaatattactttttacccaaaaattgaccaacatactaactttacaattgagagcttgtttagatattaatttgagaaaaaaagtgctttccaaacgtcttatttttatttaaacgaaaggggtttaaatgcattttaaaagttattttgtagtagacatgggacattttgatctttttaaaatttcattttttaaattaaaacttgaaaatgtattattccaaacaacacaccctgagtaagctactatatatccaaaagcatccaagtgtattttttaaaatttattgtgacatgtttatttatatatatatgtatagtaacacatgttttcttttgttttaacaaatgaaatacaatcaataacattcaattcggcaagcaacgtcataattagtggactaagatcaatcaacactcgacaaactcatattgtgatcaatagttgcaaca

SEQ ID NO: 67223 - DNA, 298 bp, Cucumis sativus
  Intron number 1 from transcript Cucsa.175390.1 (locus Cucs a.175390) derived from phytozome v7.0 (chr-ID scaffold0122 5; pos 100675 to 100972 reverse strand)
ttcctccttatcttgatccttccaactggcaacaggtaataagggtttcctccattttctttttctttttcttttggattaattttctttttcttcctttgcaactaaagctaaagaaaaaaaaaatggaaccccccttgagaaaaagataaatattcccctattttgctttctattgttgttgttgttgttttttttcttttgaatatacttgagatatttgatttcattcccccttattccaataattttactcatctcagcaagtcacccatcaggtgggaaccagtagtagcac

SEQ ID NO: 67224 - DNA, 1010 bp, Cucumis sativus
  Intron number 2 from transcript Cucsa.152970.1 (locus Cucs a.152970) derived from phytozome v7.0 (chr-ID scaffold0112 4; pos 237170 to 238179)
ggtctgctatttgtgcctatacccttttccgccttattttatttatccgctgcggtagtcatttcttgttgggatttggaaatctttattggctcttactttctagtttcttgttatgtcatacctcattgatcgcttctttttctttttctttttattctctctctctctccctcttttgtatatatgtatttactgatatattcctccatgctcttacgtggttgggaaacaattcttgtgtaccagaatttgagttatgaaatgaaaatcgaatcgaacacaagcttgtcgcatttttttcgtgtgtctcatatcaaattgtcggtttccaacgtatttgtataattttgaaatgcgttttcattgaattaatgcttctggtcgaagaaaatgataagaatgcaatctggaaaagacgccgtttcagatctgaactaatactgtaacatgataacatctttctgtctacacattatggtgtcttattgacctctatttcttagattgaaaaccataacatgttgaaacacatacacatagatagataatggcaatgggctaagaatattaaagatctttcaacaaacaccaaactgctttgcaccattatcaatcactgaaagtgtggtcagactaactaaaaagaagttttcttccatcaaaccaaactctcctggacttaacagctaaaggtaataatgttctttatagttccttaactgcgtcagttctactttactttagacatagtcatgttctaggtgtgcaataaataataatttccttgaaggtggtttcctcactttgatatgaattatatgcatgcttctgactacagtgttcatggcaatctgagaacttccccttgtccaattaaacattttaatagcttttctgtgcaaagtcagtgatcgtttattttttgttggtagttatagcagttgtttattaaaaaatgtttggagtaatttgtgctactattcttctgtggttgcagtcaagtttac

SEQ ID NO: 67225 - DNA, 638 bp, Cucumis sativus
  Intron number 2 from transcript Cucsa.083110.2 (locus Cucs a.083110) derived from phytozome v7.0 (chr-ID scaffold0085 8; pos 52392 to 53029)
aatcatccttcggtttgattatttcagcttcggtaagttgcatcactatctgagtgattttgaatccttaaaccaataacattgaatttgatagctgaaaatgcagttgaaattgagcttaccctaattcataggtatttttagtgggtgaaatggctttgggcttatcgtctgtacataaatatagcagaaatgtttgtttaaggatcattagttacgtggcaatatttctttcatcaatctgctgctgaagtagatttgtgttgctattttgatgttttcagggaatctaattatattgtttcattaatgattacagaagcgaaaatgaacaagaaacggatgacccttttcttatatatgtttttgattcattggaaacatactttttcctttttagatgtccgtaatattttttttgacattctttctggaccatgaaatcatatcaggtgaactttctagcaagactatcccccattttgtacccccaacaccagataagaggacaaatgtggtgctcaaacaggtagttgatgttcaaagcacactagcagcagaaactagagatatggagggccaagaacaaaattgtaaaactgtcagtagaagaacagatgaggatggcctccagcagg

SEQ ID NO: 67226 - DNA, 523 bp, Cucumis sativus
  Intron number 1 from transcript Cucsa.091710.1 (locus Cucs a.091710) derived from phytozome v7.0 (chr-ID scaffold0089 4; pos 2641351 to 2641873)
gcattaaggtaagaaatttttgctcaatcttttgattatgcttattaattattatgagagcaacttttatcattttgaaaacaagttgaaatgtatgtttttgtataatttgtaggatgcaagagcagttaaagccataaagttagaatttcctaaaccgacaaagttggacattattgattcaacggcttttagaaaagtaaagaaccttgtagtactcaaagtgaagaatgtcatatctccaaaaattagtactcttgattttctacctaatagcttaaggtggatgagttggtctgaatttcctttttcatcatttccttcaagctactcaatggagaaccttattcaactcaaattgccacatagcgccatccaacattttggaagagcatttatggtatttctatggatacttagacttctattaatttcattgtttggtttatttgaaatttgattatattttttctgtatattcataacagcattgtgaaaggttgaagcaacttgatcttagcaa

SEQ ID NO: 67227 - DNA, 396 bp, Cucumis sativus
  Intron number 1 from transcript Cucsa.159040.1 (locus Cucs a.159040) derived from phytozome v7.0 (chr-ID scaffold0114 2; pos 1054529 to 1054924)
gagctttgaaagcttttaactacttccctccggtcagctctctctctctttttttcatttcatttttacttgggtatcattcttttgatctgaacttttctgggtctgtttttttattttgcatatatgaaatgaaatcatctgtttattactatttgtcaatttcttaacaacattttcaagaatttggacaaatctaaaacaggaatgttagttacaggagttcatggtgggtgattaactatttcacagatgcaaaatcagggtggctttttgagatgattttgtttgtgtaattgcaaataatctcatgtggttgggggaagattggcttcctgatactgatttttctgtttctttctttacttgatttgttcttacagtcaatacctggct

SEQ ID NO: 67228 - DNA, 387 bp, Cucumis sativus
  Intron number 3 from transcript Cucsa.135530.1 (locus Cucs a.135530) derived from phytozome v7.0 (chr-ID scaffold0104 4; pos 371481 to 371867)
gaacatcactggaggtgaattaattttctctttctttttcatttttgaactttataattttgaaataaagtataaagtataattgtatgttataaaatctaagcatgtttttaatatttaaggcaattagggtgggggcaccattctgtacaaagtagaatgcattgattacttcaaagactttttgaacatattcttagagaacaaatgcatgtatcctaaatgactcgaagagtaaacagaaactatttcgaagcagttttggttttttgtactcattactactactgctactattattttgtgaatgaatcttaagaagatatgaaatgatgatatatatgagtgtgtgttttaggtgttgaacagcaggcaaaggtcagatat

SEQ ID NO: 67229 - DNA, 886 bp, Cucumis sativus
  Intron number 2 from transcript Cucsa.083570.1 (locus Cucs a.083570) derived from phytozome v7.0 (chr-ID scaffold0085 8; pos 368599 to 369484)
ctggtcctcgcgttctcttgttgattctagactcggtatgtattagtttaatttttatcataaattttaaattgatacttttgaatatagcgagtatattgataattagtgtccatttttatagaatatatgcaaaatatttttaacagttttactatttataataatattttaattttaaaattaaaatcataggtttaactttaaacttcaaaaaatacaccatattgttaaaaatcaaattggtttacaacttaatatctactataagtttatgcaaaactgtccaatcagaatttgtctcttcctacatcttttgcaaatgtttttgtagatgatgtacctaaaaataagagacattaggatgcacctaaggtattggtcttattaaaatttagtgattttacaaagatttggtaagttaaaggtgaattaaccaaatataataattagacataaatgactacatctcatgtataatcgcttaagaggagaacaaatttgttaatgtaatttcaactttagctttcatttatatgattgttgtttgatatgaaaatgtctttttggatagcatccttcacaaagaggtgaggagtagtttagcttcatttctttatttgcctaaaaaaaactaccattcggccaaattaacagtttagtggtcaaaattaactcaaaaaaatggtttcttttatgaaaaaaggagtgaaataaagagtactaaatgccccttcttttgattaaacaagcaacaatcacctctaaatacatgaaagaaaaaacatttttgtttagaatcaaaacccaaagtagatattgaagaaaaaagagttggtattattttgtaggtggctttgactttgaacacagcagcagcaggggc

SEQ ID NO: 67230 - DNA, 869 bp, Cucumis sativus
  Intron number 1 from transcript Cucsa.174620.1 (locus Cucs a.174620) derived from phytozome v7.0 (chr-ID scaffold0122 1; pos 289651 to 290519)
ctattgagattcgtaactttcttggtgaaaagaaggtgcccttttttttttctgcttataatgttcatcgttcattccattttttaattcctattatttacattacttcttatactcgtgtgggcctgtgctgttacttgtttctaaactcgcgctgttgtttgatacctgcatattttatttgttgtagtcttcttcctgttacgacttttacatgataaaacgaaccttatggtgccttagtttttttttatcaggttttgatatatttctacctgtattgtttttagtgctcgtgtttgatgtttgaattactagttttacaaataggtactcccttgttacatgatttcttattggagatctatggagcaatacatataagttgcagtttattctgggcaacacccgttcgaatctcattaccagttctgttagaaattcaaatttcggtttagtactaaaatcatcatatcaagagaatccttggcattgattaatgagaccatctttcaaagatgacgagttaacttggatgctcatgaatatagtaaaaaaagaaagtgatatgtcgttcatactataactctccgtggcagtgttttgtatgtgttagataatctggacgttgcttcaattctctgattctcgcttactttcttcttattattgaaaagattatttctgggataaaaacaagttggaattactattgtttttaattcatttttctagcggcatgcatagattttgtccttggctcaaatttcattgcgtaggtttgcactagataggatattgcccatgcggtgttgtaaatttgttatgaaccatgctcataattgttgcatcaggtgagaaaggtggat

SEQ ID NO: 67231 - DNA, 759 bp, Cucumis sativus
  Intron number 1 from transcript Cucsa.044830.1 (locus Cucs a.044830) derived from phytozome v7.0 (chr-ID scaffold0054 2; pos 997090 to 997848)
cccctctgctcctaacaaccctgtcacctgtaattgtaagtttttatgatttcatttttagggttttttctctgtccgtaaatggccgtgatgcgaattcatattatacttgacttggatgaaattgcttgcgttaggttttatttgatctgtatgttctttgggttattgcgtgaaattgtcttcccatgttacgggagtgtagttttatgggtttgatacccctgtgttaaatgaccctattccttgttctaattaaagaacttatatgcttcgtgtgttgaacttgaatatcactattggtcttcatccgtggacagaccttatgcttaaatgctttagaatggtatcggataaaagggtgatgcctgaccctgagcttggtgtggtgagtgaattggtatacaggtgagaacaattacctttgctggtttttgggtgatttcaaaaacaaagtcacgtgggccatatcataccattatagagtaatgtgggaggttcgttgctattatcaatactaaccattgtagtaaattttaccttaagagatgactgtgtgtcagttttttctgttacgaatgacttggacagccaagggtgattatataacatttaaactaaagagaaataggtgacaaataacaaaatgataggcctttgattagaacccctactgccacttgccttcagcatcttcccttttaaacaagtcttttaatcttcttattcttcaatttgcttttttctttcaacttgcag

SEQ ID NO: 67232 - DNA, 774 bp, Cucumis sativus
  Intron number 2 from transcript Cucsa.123260.1 (locus Cucs a.123260) derived from phytozome v7.0 (chr-ID scaffold0100 0; pos 520517 to 521290)
aatcttccaacatcgttgagacctcagaaggcaatgtattatttcttctagaattatattgcttttcttttagttgagcgagtgtgcttgcattttgcatatttgcatgaaggaatcatttactatcttctgcatcaaaatacattattctggacaattccgttctcaatatccagatatttattgggctttgaaatttatttggatgaaaattggacttagaaattaaattagtacatatttgagaaatatagtttaggctagcttctgcagtttcacaaaaagatgacgtgactagtttattgtttgcagtcattccttctgtcaccaatattttcacttatactgattattcactgtagctacattgatgcctttcaatcaagatcataaaacaataaatatcgcaaaggcttttcctgctaaattaaaattttcaaattgtcctatttgtccatttttattttacaaaatggagaattttattgatgagaccttactaagtagtacaattagagttcagattgttgtattgaatgagtatagtaaccaaaaatatcttttatagtcagaggcaatgattgtcttttcaacttttaagatgtgtaaaaattgatctgtcatgttgtagacgattttacttggaataggatctattctataggttgtacatttgtgtcattgagttctaagattacgtttgctgaggttctgttttaaacctatgatttgcgaaagataatttgaagttttttcctatttattttataccag

SEQ ID NO: 67233 - DNA, 980 bp, Cucumis sativus
  Intron number 3 from transcript Cucsa.153400.1 (locus Cucs a.153400) derived from phytozome v7.0 (chr-ID scaffold0112 4; pos 519487 to 520466 reverse strand)
agatcttgattctactgatcttgttgccttatctggtaagtatatatacataattaaaccctatcgttttaaaccaaataataataaatatcatattataaatatattctcaaaaaagacacatcgggtacactagtttatgtagcccacgaccacgtgcatggctgcttctaattattcttctctcatgcatcatctacatatatactcattattgagtgtattgtaaagtatagtatttagatcacaacaattcaggacattttccttttttattttataatatttaattttatattcttactaatttgtttttagtaagtattttttttaaagaatcagaaattgaaagtgactcatgtttttgtattcaacacatcaggtcaagcaaagggattgaaattattttgattattccattccatcgtcctgcgtactagctgtcaatctctagatttttgtatgcatgcgttttcttttttattaattcactttgttttatttgaactatgtcttaatcatactttttcttatcaaaattatgatgatttcttttttgtttagggattttttactgtctcaattatttgaataatgtataagatcgattaagatgtattcaaaatttcctgaatcaaattactgtgatataactcaaataattgacctctgcatgcgcggcctcctgtctttgggatgggaaccttagctttggtttcacccaaaaaaatgagatattatgaacattgatacgtttttagttcctttcccttgttggccacagtgtcatgagagtacgtgtacgtagggagctaatttgtacaaaaacaatggtaaattgtttgaacatagcaaaatctatatgatagactttaatcagtggcaaattatcccttttgtcttttaccaatgatatgatctatcttaacgtaaatgtaaaaatgtgatgtgataggtgcacacacattcgggaaatcgag

SEQ ID NO: 67234 - DNA, 905 bp, Cucumis sativus
  Intron number 3 from transcript Cucsa.084960.1 (locus Cucs a.084960) derived from phytozome v7.0 (chr-ID scaffold0086 2; pos 637722 to 638626)
gttgactgacctttacaatcgatacaaggatcaaggttttatttcttccttttttttgtcaatcttttcatagcttttcctgctgcttgatgaattgaatttaatccccatgtgatacggaattatgaatatttttgtaacggcgtacgcatatagataaaccttcttatgcatattggttgaagaaaatatctaaggggttttgtgaaccacacttaacaactaaaaaggaaacaatgaaagggaaatacaggaaagacaggcattattcctttgattgtggtacgtgtctgagccctgtcttgagaaaagacaggccttatttctttgtcactcttctagcaagaaacaatttcacgtgcagttaagctttctcacgaatggtgtggtcaattgaaagaaatgcaaaagaataacttttctgaacgggagagaaggaaacgaaatttctcatttttggagacaagaacttcctacaaaatccactctctttttctctttagtttttcaaaaaggtgttctgtgtgggggtgccttttgtttgtccattctgctcggtatcgctgttgtgaattctaaactaaaagaccttgaaccaccatgggttaccaaatggttgataagaataatttaccggcctaggatctcatgttggacacctacttaggatttaatattttatgagatgttttgtagtgttggcaattgtctgacactgttggaagaaagtgggttttgacttgtcactgaattgtaaaagtaaaaataaaaatctcaaattgtatgatatatggatatatccctgggttacccctcttttttggaacctagattatggtgttaaattttaccttatcttcttttggtttttatttgctgtcagattttgaaatactggcatttcc

SEQ ID NO: 67235 - DNA, 878 bp, Cucumis sativus
  Intron number 3 from transcript Cucsa.017340.1 (locus Cucs a.017340) derived from phytozome v7.0 (chr-ID scaffold0024 5; pos 51492 to 52369 reverse strand)
atcctaaagctcttgaaattgccttgttgttatcggtatgtcattatctatctcggttctctttcatatccatgaagtcagttatcctgatgcgtttgttgaatttgtggtttttacaatgaattcaaagagcgttattttgaagtttggttgaacatttagcaatgtttaccttcttatttaagccatgttgattgttagtgtgtagttagttctatagcctctttgcttttatttccttcattttcttgccattagttttgattgagttgaaaagtgatggatgagtagaatctcggtttattgcttttcttcagaagaagaattttttacacgtaacctcaaacataaagagggaaatttctttagagctgtaatatacaatcttttggttgaagctaccctgcttttgcattttgtttttctggtcaacactctgctctttctaataaaataatactaatattaaaaccatacataagttatttagcattggttttaagtccataattttggagtggaaaacaactcaaggaaagcaaggatgaaaaagaaatgagagtaacagttgaaagtgaatctattaaactgaactttatgaacaaacatctgccttgctttactttttgttacaaataaaagcataagtgagaagtagtaccaaatagacatgtttattgaaaaagaagtaagctaataccttttctttgcataatcatttttttacacaataatggaattattttatatttttatccggaaatatacctttccttcttcatatctggttgatgccataagctactatatacattttttactatttatttgtttgttatttagggagcaacaattgtggataagatcgtgagcataac

SEQ ID NO: 67236 - DNA, 359 bp, Cucumis sativus
  Intron number 2 from transcript Cucsa.017340.1 (locus Cucs a.017340) derived from phytozome v7.0 (chr-ID scaffold0024 5; pos 52376 to 52734 reverse strand)
ttctctggagaaattgagcacatagagattcagtaactaattattaactctgtgttactactctctacaattgcaaaaagtggtaaactaaacaaatcacgtgcttgcttcattcattagttcatttattcattcattttgaatatttagttttaggtttcctactgtttaagcatgtgggttttgtggctttctctttgatttttcttttttattcttgttttttaattgtgaggcttgtaattgttatagctgacaagtaattaattaaggaagcacacccgccctgagattgttttgtctaatttattcttcttgttgcagtgaacaaggggaatccaagactgcgtttgttacat

SEQ ID NO: 67237 - DNA, 940 bp, Cucumis sativus
  Intron number 1 from transcript Cucsa.036140.1 (locus Cucs a.036140) derived from phytozome v7.0 (chr-ID scaffold0046 4; pos 104520 to 105459 reverse strand)
cctttgaggtgggccgaatgttttttcctccaaatattgacccgatttctatagtgggccctggctaagcccattgttcgtgtttggggtttgtttctggtttttctcttttcttctttacagggtctcgtagatttagaatcagaaaccttgtttaaagcgcctctatcaaagcgaaaacctatatatctttaaaattgacccgccggttgggctttcggggttttgcacaaatctgatacaaaaaaaatgcggatggagacagatcttattcggttcccttttcttcctgggtttggaaaaatggtattttgcctttactttgtttcgtgggttcgagtccgacttattataattgtagcaatttgattcgcttttctgcctacgttataccaactttctaatatgacaaatgggcagatgggttttctttttttgtttaaaaaaaaacaaattttgcaatcctaattatttgtattcatctagtttgcgagctgggatggcgttttccttcttcttcttcttcttcttctttttcttcgattgtttttatgtgcttcgtctatgcaaatcatatattggttcttccttgcgcagatttcagagtgaaattttgttgatcgtgtccttgatgattccttggctgggttttagcttatattgttcttagcagcacgtttaatttgtttgatatagaaagtatcctttgttaggagtattactggcagcctgctgatccatgaatcaggacaatcatttatgctatcgttttaacttgttcgatattttttgctttattgaaagaatatcacaaaatttgttataattcgattccaaaaatatatatattttgctttattcggagtttgaggaatggtaggactttaaggatgtttaattttattactttgctgcacagggaattatcttcccagacgaa

SEQ ID NO: 67238 - DNA, 222 bp, Cucumis sativus
  Intron number 1 from transcript Cucsa.197300.1 (locus Cucs a.197300) derived from phytozome v7.0 (chr-ID scaffold0135 7; pos 729438 to 729659 reverse strand)
gctttctcgaggtataaccattaattatgtttgaatttgttgtttgattgaagatgtttatgaaacgggattgatgcatgtgggaatttgtttttaatcgatttgggttcacgagtgataggtgctgtaaagaacaaaaaatggaacgaggaagacaatcggctggattcagtggttattaaaacgaggaaagatgatgacctttcctctgaaaaaataaat

SEQ ID NO: 67239 - DNA, 707 bp, Cucumis sativus
  Intron number 2 from transcript Cucsa.107890.1 (locus Cucs a.107890) derived from phytozome v7.0 (chr-ID scaffold0093 1; pos 153873 to 154579)
gtttcggagaaattaatatttgaagccttacgacggttggtagatgatatgaccatggataattttttggtttttggggtaattctcattttgcattttgtctaatgatttagtggtgagctgtatgggaaccgactggattgattgtcagagctattcgtttgaaatgaaaagctatggatgacaatctttctagaaagtgattgtattttgattattttagaattttcttaacatttgtttattgcatatcccattatgccagtactcttgtcactgaggccttaaagagtggatcactgaaagggagcatttaaacggttcttcatatttgagtcatgtttcaagagatttttgagttaaggggaaatctcttgatgtatttgaatggaacaatttgatctgccttcttacggaaattctgttatcctattcacactttatctacaatcatcatcacttgacttgtaaataatcattttcacaaacgatttatcctaaggttcttcaacaacccggttcagcatattatttggacatttccacttatcctctagtatcaaatcaaatggtcgtgcaggcaggacctttctttctttttcatgtttgttttgaagataactcttgcttttgtttaagtgtatatttatctgtgtgtgtgtgttctatttatttagttaacaactgccttttgtcttgcaggttgc

SEQ ID NO: 67240 - DNA, 577 bp, Cucumis sativus
  Intron number 2 from transcript Cucsa.180510.1 (locus Cucs a.180510) derived from phytozome v7.0 (chr-ID scaffold0123 6; pos 103468 to 104044 reverse strand)
ttttgaatatagtttgttgttggaacgcaagatatgtaagtttatggttgaataaaaagtacttcaatatattgaaaattaaacgagtgtgtttaaaaatacctcatttttgtattaatatttctatgtatatgcatggttcccacttaatatagatatactttgtttttcaaacttattattattgattgctgaaatcatttttttcctaatcatattgtttctaaaatttaactttcgacttcttctcagtcaaactcatccgtcaagctcatgctttttaaacttttttctaaacttgaaactcacacatgctttggaaatcaactctataaatcaagtgtagttttcaaatatgaaagcatgcttttaacgtaaacttagtaaatcatgtttagaaatcatttttaaattcatttttgtcacttgtagatgatagctaaattccttcgtctataaatttttcaaatcctctcttgccttgaaattagagaatttaaattcattttaaacctctaaaatccaaaaacatcaaaactcagcccaaaaatctcaagaacaccaaaactgctcaaaa

SEQ ID NO: 67241 - DNA, 384 bp, Cucumis sativus
  Intron number 1 from transcript Cucsa.013870.1 (locus Cucs a.013870) derived from phytozome v7.0 (chr-ID scaffold0017 8; pos 7534 to 7917)
tttggctttggtaattgagttttttgttttgttatgtatcagaagactcctcttttactctttttttcccctcttattatccttcgtgaacttctgggttgttacctctatgtttgttagtctccaatgtccctttcaaatttcgcaattcaaagctttaattaccactttgtttatatcatgactgcattaatttccattgcctcacagaaaactgacaatatattttattattaatattattattgttatatttactattactattattattattttttgatattatggcattcagatatttcttatggtccaactgaactctgttgccttttcgttctttcaataggtcagctgctcacaagagtcgagttcttgtgctgt

SEQ ID NO: 67242 - DNA, 809 bp, Cucumis sativus
  Intron number 4 from transcript Cucsa.100370.1 (locus Cucs a.100370) derived from phytozome v7.0 (chr-ID scaffold0092 6; pos 876354 to 877162)
ttcttgctgccccgtcgaccaagaaccctaacattgtaagtttgtagcaccatcgtttttgtatataaattttttctgatcattttgggcaaagtttattgataatccaaacttttaacaaacgattattcagctagtcttacctgaaagtaagccccaattttaaagttttgggtatggtggaattcaaagcacgagatgatgttaggtttcttggaatgttcaaacccacaaatagaactacttgtatgtctaaccctaactttttttttttggtttttttgttggaaaggattactttctcacaatttttttataatctacaattgcgaaaacataaatgaggtcttgaaaacggttttgtttgtcgttttggttgattatcaaatagttatcaaatgagacgttacatcaaatgaaacgttacatcaaatgagacgttacatcaaatgagacgttgcatcaaatgagacgttacattgtagtttaggttggcagatattaatattgaggcttaacttacaagtctaggttctctttagaaggacaaaggaaataaaaaggtcttagcatatgttaggtaaaatattacacaaatagaaatacagaaaaattagtacaaacacaattatgcataggtcaatgtaaatggtactcattcacatcacatgtttacaaatattttataagataaagttactcatccaaaattctcctactatttactttgattggtcctttgattcttttccctccttttttcttttgtgacagtttggaggccttttgacggctggaatccttgcatt

SEQ ID NO: 67243 - DNA, 933 bp, Cucumis sativus
  Intron number 1 from transcript Cucsa.178110.1 (locus Cucs a.178110) derived from phytozome v7.0 (chr-ID scaffold0122 7; pos 75302 to 76234)
gaaagtttctattacgcacttaaggaagccgattggtaagtgaatcgctccttagcacaaatggctcagcttaaaaagtatacgtaggtgagtgtaatacccgaaatggcaatgtcaagctagaggattaaagatctaagtgagaaaaaaagtaaccccaaacacggatcggtaagagaggcagttaggcgattgaggtgaagaactaaggtgtgttaagaaagcctgccattaagccaatgagagtaaaagttgttgtactccgttgcgttgtgttaagaaaacctgtcattaagccttccgtttaagtattcgttgaaaagttgtttcgcttactaagcagtcagcgttatcaggaggtgtgatatacattttgggcttaagcgacatgcctccccttagtcacaaagagcgactttgcggtggggcatgattattttttttcgaaatatagtacataatacaaaactcttgtgctaatgtaaaatgcacatcattttaatctagagacataaatagttagtacaagagacctaaataaattatcaagtgtagtctttgttggaaagaaacttttgatgttggaggaaatttaaaagagagaattgagaaaagtggctacttgtgttattagatacgtttaatttttggcttgatacaagtgctataacatccctcctatttgtactagttgatactactaaatatatggctataattttgtataaacacatttttaatctaatgggtacacatttctctctagaatattatttataatttctagatatttcttcaattttctctacatgtctcctacaattcatttttctagaaatattatattaatacttctagaaatttgattttgattggaaaatcaagtttatttttctaacggtttaaaattattattaacttagggctgtaccg

SEQ ID NO: 67244 - DNA, 596 bp, Cucumis sativus
  Intron number 1 from transcript Cucsa.140440.1 (locus Cucs a.140440) derived from phytozome v7.0 (chr-ID scaffold0107 1; pos 347196 to 347791)
cttgaattgaacgcctttaagcttccagccccttggtgagatttgtttgaatttgtagattgggaatttctgtgagcttcccgacttcttgtgtttcttgtaagtttttaattagggagattccatgtagcgcatttatgaatgggaaagttttcgcaatctatgatctcttggctgcggatttaaatcgttagggttttgattttatactctaaattaattcaacttgccttgtcttttctttcttttcttttcttcatttcctaacaatcatttgtactgtttgaaatttatttccatttgacttcagtggcatcaattttatgttgacgacatgttatgtttatgattgatcatgggattcttctttgagaagtgacctaaacatgaatcttgctaaagttttcttcctgttgattctctttctgtattaattggtactttaagatataaatctcccaattttggagttattattgtgatcattgctccatatttggtaataatgtcgagtgtcgagttcaataggctagtaagattgttaagttgatgttttgtttgtctttgttggtggtggcaggttcatctactccttc

SEQ ID NO: 67245 - DNA, 797 bp, Cucumis sativus
  Intron number 3 from transcript Cucsa.010670.1 (locus Cucs a.010670) derived from phytozome v7.0 (chr-ID scaffold0015 4; pos 80455 to 81251)
atatttgggttcctgagaaagattttcacaacgtggtatgcttcttcgtcttcttcacaaatttactccttttctctttcccgttgtctgatattcagaataaggaagggaaataagaaccatatatttttttaacttacttcttcgaagcctcccattactctaagattcaggtttaactgacttcaattgatttcctgactttgatttagattgacttatcatatctagcgttgttatatgtcaaattcctattggatattttgatgttggtattggttagttgagtgacacagcaattttttgccaatgtgattactttgatcgatgagaagctgagagttcgattgaataacaatacgctgatcattctatagagttcgagtagcttatgcacttggaacattggaggatgtcttacattttttctcaactcccctgttgcctctacttctttgcatttaacctgcagtatatgtttaactaaccctattttgttatgatttagttttggacattattcttataaaatctacttatacacatgtttgttcatttttagtatttcacttttgggtgacattttctggaactaaagttttattttcaaaattggctgggattttataaatgtttttggtactagattatgatagagtggagattaattcattgaattgaaaatcagaaaaacaaagaacaagacatagtcaaatagaccctaattaactcgagtttttttgtacttagcactggtaagtggtaacacatggtttttctacagaacacaataattg

SEQ ID NO: 67246 - DNA, 869 bp, Cucumis sativus
  Intron number 2 from transcript Cucsa.127130.1 (locus Cucs a.127130) derived from phytozome v7.0 (chr-ID scaffold0101 7; pos 938275 to 939143 reverse strand)
gagtgccactcacaagagaacctggatttcatcaggtatatatattacattaattgacactttttaatggatgatttaggtgttcatctttgcttttgctttttatccctatatgtttgttatagtttgttactcaatgaggggaaaatatgggtaaatgaaatatatgttcgagtatttgacgatgctttggctcttttaactctttgcaaactagttcttttaaaacaaaagatttcaatttactcgacctttgcattttaggtaatatgacaccaacaatgtaagcaacatgagcttacattatatgatattttacaagaaaatatttcttaatatttaaacacagttttcttaaattcagacaacttgaacctgcacttcaaacatagttttctttaaatccaagctacctaaacctctcagtctaaccctcaagcttacaagattctaaacatgcgcaccagaccctttctaatgggttgatagtaatttagataagaaactatattgctatttttttagttgaagatttggagtaatactttcttaatcaaaacttctttttttttcataattgttaaaacttggtgatgataagtgtatttggtattatgtctagtgaattgaaagttatacttaattcagaaagctaataaatataaacttctcaagataagtatcccaattaattatctcccaacttttccatcatccaatcatatatatatcatgttaagtatgtaaatatattcacatgaaaaaccttgattaagggaacaatgttgttttaattagcaactttgtattgattagatgaattaatttagctaatttgttgtactgttgcatggcatatatggtgtagt

SEQ ID NO: 67247 - DNA, 615 bp, Cucumis sativus
  Intron number 2 from transcript Cucsa.196330.1 (locus Cucs a.196330) derived from phytozome v7.0 (chr-ID scaffold0135 7; pos 66926 to 67540 reverse strand)
aagccgagaaagctgtggataccttcaaccgttatgtaagcttctgtagacaagattcagccatatttgagtatcatgaatgaaaccttatcttcattcttgcttcacaatggaagcatttactgccagtatatctttgcatttaaccatttcattttattctgaagagtttaaatggtctggttttcatgaatctgaggacttgttagtgtaggacttagccattaggacgaaaggtgaatttgttcaattttctttccgtgtgtacttttgaaataagttattttttagtgtgtggctaccagcttttaaagcttattttctctagtcaatccttacatatccatagctgtaatgatttgtttgtttgaatgtttgatgatgagattgatttttctatctggataagctctagaggccatgtccttgtgtagaatagagtatttctaacatatgtaattgtttgttttctttgtttgagatatcccttcacttttacttggtactttgtttaaacttttccattctcagttctaccgaaaaatttatgggaataaaatgtgcttttctgggtttataggatttatccgggaggctattgactgttaataaggc

SEQ ID NO: 67248 - DNA, 1056 bp, Cucumis sativus
  Intron number 1 from transcript Cucsa.109130.1 (locus Cucs a.109130) derived from phytozome v7.0 (chr-ID scaffold0093 4; pos 77219 to 78274 reverse strand)
aaacggtgtcggagcctaatcggatttttgttcaggtaatgaaaatttcttgcagtatcggagtcttagtgcggttagtggcagtttggtaaattgggagatatttatgggtatttctgttttcgttatgggattactcagccgaatgtgaccacgtggagtctttccgtctttcttattggtcggcgttttctttactgggccccgctacgtcccacctaaattttcctttttctttccttttcactatttattgggaaaacttaatctaattaccaatactaaaatataatttttctgtttgctacaaataccattttgccctttctactatatttcctcctcttattttgtgctttacctcttgccttcaattttcacactcctttttagtaagatttaaacgacaatttattttcatttttcttcccattttataattttctcttcacttaattcaatcgacatgcataaactaaccataccttctaaacatcgattttaaaataacttacatatcttaactttcaaatccaatatcttttttcataataataactttttttgtttgcattaaaatcaaatatgtctttttgtcctagaggtaacgattgatcttccattcttaccactgagtataaagtactccacacatctagatgtttaattacacgatgtcagtgacaatttttttttctttatgtaatttgaatgtgatgcatgcagatggggtataatatgaatgtaccgaaatatgttaatcttaaaaatatatgttgagaagaacaaaaaaatgagtggcctggaagtaaagtgaaaggaccccagttgaattccgtgaatgatgaaggagttaggacccaaagaaagagactgtcctaaccgtacatcatgttccctactatttaagggcatatgacccccaaccaacccatctctcatcaatgcctctctcttccgcatttttttagttttactttttacgttctaattaccactaattttgtgatttaacttaaaggtgggtgatccgagtgcggaccattcttgttggga

SEQ ID NO: 67249 - DNA, 224 bp, Cucumis sativus
  Intron number 1 from transcript Cucsa.185210.2 (locus Cucs a.185210) derived from phytozome v7.0 (chr-ID scaffold0127 4; pos 777864 to 778087)
gccaccttctccctgcggtactcctctgtttatcgaacccttttcttttctgggtgtaaactgtagatcgtatgatattattactgaaatttcctgatacacgtttgatcgatgtttctgggtacccattttttctgtttgtggaattggggttgtttgattgcttaacatgttttgtgtttttttttctttctttcttgggggtgattagaattgctgtagct

SEQ ID NO: 67250 - DNA, 720 bp, Cucumis sativus
  Intron number 2 from transcript Cucsa.089850.1 (locus Cucs a.089850) derived from phytozome v7.0 (chr-ID scaffold0089 4; pos 1270918 to 1271637 reverse strand)
agcttttctcttatcttccttgcttctcttgtcgggtacaattccaaagactcggaaaactcgttgttttttcttattagggtaaatatatcgaaatggtccttgaattagataattctcaatttcattcatacttttaaaaattctttttttagttttttttattattaaaatattattttgattactataatttgaagtttatttaattttggtctaaatatactttcaattctctaattttcgtacacatactttcgataaatctctaaaatttagtttatatgcatgtttacagttgaaagaatttttttactaattatttttgaaaacatattcacgtataagttaattttgatagactaaaattaagatttattaaaattgaataaacaccaaaagtcttgcgagcaaaatggtaatttaactttttttttccagaaaaggaaactacttaattttttatagccgtacatttcatttttcaaagaagaaaatttgaacgacacattaacaaactcaatttcttccacacacaattcaatgatacataatttttctctctctcacacacaatttttagtgtaaggaataaattgagaattatgtaaaagatgagcaagaaccattttatatatttagccttcttggcttatttatttttgggaaaaaatagaattaattcttctcctaatattggagggtttcggcagtgtaacg

SEQ ID NO: 67251 - DNA, 865 bp, Cucumis sativus
  Intron number 3 from transcript Cucsa.047790.1 (locus Cucs a.047790) derived from phytozome v7.0 (chr-ID scaffold0054 2; pos 2693165 to 2694029)
tcagtccttttgtaagtcttgccaatagtagctaatagttattgtctttgatggatgttattttcgatttgattacacgtgaaattagctttttagattccttattttcttatttcttgatgtaaatcctagcagccaatggtttgattttcctagttggtcttaacacagctgctattgattaagagctgctattaataattagattgaagtctggagtggatcctttccagttagaaacatctctctaggtaatgaaaagttatatctgatttattattgaaaggatctatttcgtttcaacaattaaagagaaataggaggttattacaggatgaataaacaatactgaaacgttaggagtggatgctcgatcataagtaccctgtgctgctatcagaacgcagtttaagtgctaacaaaataatgacatttttcatctacccggtacatcatatttatatcaatatgcaccctagaagaattgaccattcttcgtatcatggtttttcagtcttgaagtgaagagagaattttaaatacattctttattttataagggtggatgggtgaagattctttaggatatggagcaaatcttagttttctgaattggtgattctgcgcctaattctatgtttggtattgtgtctcatttaaagattctatgctcgggagaattattgaaattatcgctatttttgtttttgataaatttgatgttcaaatggaaccataggcattttcttctacatgctattgtcctaatcttcattctccatcactgccattgaattagtttgctgtaacctttcttattatcacatgtttatattgttaaccattttcgtaacaatttcaggac

SEQ ID NO: 67252 - DNA, 951 bp, Cucumis sativus
  Intron number 1 from transcript Cucsa.195070.1 (locus Cucs a.195070) derived from phytozome v7.0 (chr-ID scaffold0134 9; pos 58176 to 59126 reverse strand)
ggatactgctggacaggagaggtacaaaaaccgccttctttttagggttttcccttttctttctttctttttttttctttctttaattatattggatttatttcgacgatgtgttaattctttgtaaatcttgaacttactaatgggtcttgccaactttctttttatgtggtcgaaatgcacctaattttctgaagatcttccttcatattattggtttcagattgttcatgttgatgatttatccgcatatttaattttacttcaacttgtgaagtacttcctaataatacagaaagaaactgcactaaaacattgtacaactctatcttatgtcccgtgtaataagtagaattgatgataatcttttaactgtggcaacaatctttttgtaacttctcaacttcttgtttctgtctcttgttgattcggtttacttttctgttttttccctcccccgcccctgctacatcttggaacagtgggttttacaatttctttatcaccaatattcaatcccttggttggggctcatattgttgatgtttgacttaattatgttagttttccatagccttacatggtagattgtacaacagtgtcccttgagtcctaaggaggtcttggtttgctttcgtgttgtgacaaagactatagttcgaaaaattacctgtctaacatgatgtttgccattagcatagccgtgatattgcctatggtttgcatgaatatttgcttagagcaatcaagccgtgatattgttttataaccttcatatagttgctgtggacaatatgggaaaattttatacgttggtggattgttcaaactttcgttccacagttgatgaaactacttcttaaaagctgcagatttttcttcttttctctgattagtgattagtgatggttttcaggtatcgtgcagtgacaagtgcatattacagaggtg

SEQ ID NO: 67253 - DNA, 718 bp, Cucumis sativus
  Intron number 2 from transcript Cucsa.032320.1 (locus Cucs a.032320) derived from phytozome v7.0 (chr-ID scaffold0042 9; pos 1662455 to 1663172)
tctgcagtgaagtattgggattctctctctcgaaggtttggccatttcacttctacatttaactagtttgacgttcttcaacatatttgaaaatattggatgatataatattaaatttatcttcattcattagcttaaacttttgcgtaatgagtgatttaagagatggtatcagggaaggtagtccagaaggtcttgcatcccttaagctttgaagccaattattgatttaagatagattacccttttttattttatttatatatacatacatatatatgatgtagcctaaagaataaaaggagagaaatcttcaataataaaatcaaaatctttattatgaatcaaaagttatgaatacaagaagacaattactctttttagagagaattgtaaagtggtctaattctaatcctaaattcctaattaatcaaagaaactaatcctaatcctaattaattaaggatttaaccaagatgtcctaacttactgtaatcctactaaatcaatatcttttacactttctatatgtagtcttgtttggcaattcagtggttgtcatataaccaaatcacccaattacagccgttttttctgtggtctttttgagctttctcttgaatctttccgacgagcaaaggctcttcctcaactccatatggaaaagtacttttgtactaattgttaatcttgatttatatctcttttaggaacttca

SEQ ID NO: 67254 - DNA, 747 bp, Cucumis sativus
  Intron number 3 from transcript Cucsa.126210.1 (locus Cucs a.126210) derived from phytozome v7.0 (chr-ID scaffold0101 7; pos 161514 to 162260 reverse strand)
ctaataaaggtatgtttttgttcatgtaataataatttatcttatgatgatcagtaagaagaaaaataatgaatgaatgaagaataaaatctttgttttctcttctttcttggattcctttttgcattcatatatgtcctagtagaggcgagttcgcaaatatttatctcccattggatatttctctgatttttttttatttttaatttacttcaatttttgtttagttttttggttcttaagaaattaaacatgtaaatactacattcatctcttagttttatcttctttggtttttgtcatccattttaaaattgtagccccacctgttttgaaaattaagactttttatgatgcttgaaaatataacaatcactcgatgaaaaataacttgacgaaagagaatttacatatataataaaatttagatttgatcctcaaagtttcgaggttgggtatcgatatacttcttcacaggtacaaataattatttctatatatacagtttttttttaaaaaaataggagttatacactgtagtatttaattaaaatagctacccagtgaaaaagtatagaacctgagcatcaaaattttcctaatgaaaaggtgtttataggctaagcttaataaactaaaaacaaaaaactcaatacatttctgaaaataataagaatgtataagttatactctgtttttgttcatttcttgtatgcgatgaaaacagggaaagaggtggtgcagtac

SEQ ID NO: 67255 - DNA, 835 bp, Cucumis sativus
  Intron number 3 from transcript Cucsa.174370.1 (locus Cucs a.174370) derived from phytozome v7.0 (chr-ID scaffold0122 1; pos 16132 to 16966)
gatgttccaatacgatggaattctacttttactatgttggattgagcaattaagtgtcaaaagacgtttgaaagattagagtagcacgaacctagttatttgccaaatgatgatattcctattgttgaagattgggataatgcaaaagtgtttgtaaagttcctaaaaaaattttcagaggtaacaatgaagttttccgtatctatgtctatgactacttcaaatatattttttcacgaactttttttgatccaagaaataattcgtgaatactcgttgtatgagaatgcgttattgagttagatgacattaagcatgcagataaaattcaacaagtattggagtataactacaagtgagaagaccaatttattattatttgtttatgtacttcttgacactaggtactagctggtttatgtgaattattgttttaatgaatttttggaggaagattttgcaaaaaaaatggatgaataaggctggagaagcatttcgatgattgtgtgatgattattatatgagaatgtcaatgtcattattgtatgagaatgtcaatgtgaaaagaaaaatattcacaaacacaatcatgtactcctatcgaaggattgagctttcagagtcaaagtgaaatgctttctatctcatctagtggatcttataaggcacatgcttctgttcatgatagatttaaacgaagcaaaaaaacatgtctacatgatgctaaaagagagatggcttgttatctagatgaggctcgtatagaagatgaatatttagacttgctaaattgatggaaggtgaattcttctcgatttaagatcattagccaagt

SEQ ID NO: 67256 - DNA, 703 bp, Cucumis sativus
  Intron number 1 from transcript Cucsa.151240.1 (locus Cucs a.151240) derived from phytozome v7.0 (chr-ID scaffold0111 6; pos 110660 to 111362)
attcatctacgctcttcctctctgacatacaacaggcaatgtttgattatcttgcttcactttttattattactttattttacatttttgatgaatttcttgtggaactttttatcaatcacaattgcttataaaatgaataaatattattttctaatgcgaatcaacttaatgtttttcttctctcattttcccattttttcatgtgtaatgcctgctttttttccctattcctgtcagtccctaatatctacttcagcagacaatcaagcatactgtttccttcttcctgtattttatttgttcatattgaaaaagcttgcgtaaagtttctttttggagatgatggtggtgctatggggtgtcacatagttgagatgtctggatgcacctcttgatctatagctttatgcttgttgttttcaattgtactttgagcattagtttcatttcattatcttaatgaagaggcttatataaaattgtttgttttccttattgcacttttctttcttcagtattctcttagattgtgtctggattgtttgttcaaaatatgctattcccatttcccaatttctaaacttacggaagtttgtatagtatttgttggtgttggaattgtattttcaactatagctgtactccattacttgtcttgatttggcattatataacggttaatgtttaattttctgtagat

SEQ ID NO: 67257 - DNA, 582 bp, Cucumis sativus
  Intron number 1 from transcript Cucsa.051240.1 (locus Cucs a.051240) derived from phytozome v7.0 (chr-ID scaffold0055 7; pos 419859 to 420440)
aaggaatcaatcaggactgctgcattgtgtgggaggtatgcaaatatagctgatgtacaataactttttcttcatgatttttgcctgaaataaaagttctaaaatgaaaaagtacaaaaagatcatgttaaatatagtggctgtcatgaaattgataatcatagaaggtgagatttacatagtccactggatcacgtgttacctacctctacggatacagaggatgaactttgttattagatttcatattacaaaggcgtctcaaagttagacagtttaaatattattgtgtgtagactactctaaacattagagtaaaagttttaaataacataaatatggatacaacgagtcaacaaaaacttgtgtggtcattcaaagcgcttgttaacagatttgagacatttcaacaatagttttatagctcatcaaatgaacacaataagaaagagatcgtatattcaaatttgcattaaaaatttcacataaaaaatgatgatgtttttgtttttgggttctttgtttgagcttgaaatggagaaaaacttgttttgataataggaatttgggtgtcaaaaagat

SEQ ID NO: 67258 - DNA, 474 bp, Cucumis sativus
  Intron number 1 from transcript Cucsa.088180.1 (locus Cucs a.088180) derived from phytozome v7.0 (chr-ID scaffold0088 8; pos 588644 to 589117 reverse strand)
ttacactcttctcaattctcctcctcatcaatcctgtatgctttttcctcttcttctttctctttccattctgttcatccctctttgatgatattaaatcatcgacgactttttgtgtgtgtgtttttatttgtatcatgtttaaggtttttggaaatggaagtggaggagtttgatatttagtcatgtgtgtcgtgtgtgagtgatgattctagtgagagaaattcactttgactaaccctcgtttttatgccgaggcgttgatggtgctgttgtttatgacgttgagaagttttgtttctgtactctgcttggagctaatctaattggagtggtttttgttgaacttgctaagatttctttccccatagatatggttggattacttctttgttttattttgcatccaactctttcaattgtggcgatcgttttgcaggctcttgagtgctaaatttgagaggtgctgaggga

SEQ ID NO: 67259 - DNA, 702 bp, Cucumis sativus
  Intron number 1 from transcript Cucsa.102000.2 (locus Cucs a.102000) derived from phytozome v7.0 (chr-ID scaffold0092 7; pos 1133632 to 1134333 reverse strand)
aaaagaaaatagtggatatacataaacttccccgagtaagatattctcaatttctcacaaatctaattatcttccttcgatatttctgtccaaaattaggccacaaacggacagattcaccaaaagcaaacatcaatacgtataaaaatacaattagattatatataattttgtggatagatgaaaaagacatacttgaaagacttttagtataaaaatagagtaacctggagaaagaaataagtggaagaattttctgaatatattcatgtaagaaaaaatatggaggaatttatatgatttttattgcttgtaagaataaaaatcttcaaattcatatgttacttgattgagtttcctttcacttgccacgtttctaaagctttcaaacaagtgtatctcatgcaatattttgttgctctgcattattaaaaaagagttatagccaacagttttcatgtattgataggcttttgaccgaaatggttgataatgggagttcaaatgatgtatcatttacatattcggttaaagattttagaggcagaaatgtgttggatggtgaattattccttggttggtcataatcgtaaatgtgtttctctatccattgtttttgtctcaccataacatgatgtttcatgaattttgaattctatggtctattaatctgttcttatttatttttgtagaaatcagaga

SEQ ID NO: 67260 - DNA, 256 bp, Cucumis sativus
  Intron number 1 from transcript Cucsa.161710.2 (locus Cucs a.161710) derived from phytozome v7.0 (chr-ID scaffold0114 4; pos 1542044 to 1542299)
tctcttcgatcgttggaggactctcttccgattaagtaagttggtttttttttttctctctctctctttttctttttctgtgttctgtgtgttgttttatcgattaattgattgagatcaagaaacgtttagagaaatataattgtgttatatatatcttcttcaaacaatcttgtggtccaattaatttgaaatttggtgaaattttgaatgatcaggagagggttatcgagtcatttctctggaaaatcgaaat

SEQ ID NO: 67261 - DNA, 213 bp, Cucumis sativus
  Intron number 1 from transcript Cucsa.139620.1 (locus Cucs a.139620) derived from phytozome v7.0 (chr-ID scaffold0106 6; pos 837383 to 837595 reverse strand)
ctttttttttcttcttttacttcatctcaccaaaggtttgttaatttttcttcataccccatcttcaaagtttgaaactttacatcagtttttttatagatctactgataaaaatcaaaaccaatcttttagtatttttttttttaatttattttttgttgggggattattaatttagatttcaaccacggagttcccaaatcaaagtggaga

SEQ ID NO: 67262 - DNA, 924 bp, Cucumis sativus
  Intron number 1 from transcript Cucsa.072690.1 (locus Cucs a.072690) derived from phytozome v7.0 (chr-ID scaffold0076 5; pos 159208 to 160131 reverse strand)
ctcttcaccaacaggtttgaaactccgatttttacttcctttttctgtttctgggtaatcttttttgttttttgttttcgcctctatgaaatgggtttattcttttattcttgatttcgtgcttagttttcaattttggggttcttgttgatcgccttatgcctttctggagtaaaattgtgctgatatttacattgtttggactccgaagtttgttatctccctgatttaagaaaaggacacgatgttttggaatatttatcttcttttaacgacgtaccttgctttacccagttgatccaaaaggacgcgtgtattatgattttgttttcttcttcttcatttggtctctctctctctctctctctcttaataatgaatgtgtatttggtgggtctcatgttttcttcttttttctctttttgtgattcaatggcctaggaattagtagtatcagtaattgcatactcaacttatagttactggaagtttaactattctgtctctctgtctcttcccatgtttgaacaaattgctagactgtggttgatattgctgccggatttgtagtgtttctaattttgcggtgaattctcttttatattcacttttcaaattgcagttcggaatgaaagaatgatatagaattggtagttaagtgcgttggagcaaattaattctctcaataaattgattttgaagtttgaagtataattgaaagagagggtcattttataaaattttgtttgaagctcatgttcttttttcttatatccttctaaaatttcctgtgtttatgtatcctctatggtcaatgttcatagagtaccaagaactctttttatttgttttttgtttttttttccttttctttttgggaggatgactcctgactaatgatgaaacaatggaatttcttgcagg

SEQ ID NO: 67263 - DNA, 921 bp, Cucumis sativus
  Intron number 2 from transcript Cucsa.120030.1 (locus Cucs a.120030) derived from phytozome v7.0 (chr-ID scaffold0099 8; pos 1997624 to 1998544 reverse strand)
cttcagaggaggtcattggaaggaactggtaagatgaattcgcttaaaagaagagaataaaataaaagaaaggatctttttggagtaaaagctgtctgatatttaaaggcaaaccaagagacatagaattctgggtcaaacagtagaaggcaaaaaagatacccaataaagatgttcatttataattatttacttattttcggaaaacgttaacccatgttgcctgctctcttaacagcaaaatgcagagagtggtagtatcacttggtatttctttttaaaacctttttttctaattaatacaaaaaaacaaaattttgcttttttgttaagtgggtgataaatttcttattatctgggaattattcaaagtcaacatgagtttcatgtgtagttcccattgaattaataataaacttttataaacaagaacagaaaaagaaaaaaaaaaaaagaaagaataataaacagatgcccaaaagtaggcctcctgataagaagtttaaaattttgacaagctagtcatggaatcattcgaaagaagcacagaaatagctttagattttccaaacaaacactaaaaagttcaattgcagacgtaatgtggaatacccagatgcatcttgcttgaattttctacgttgctattcctagtttttttatggagcatgagctgggtgtgggtactggtcgaataaccagttttccaaatattgggtgtaatgctaaatgcattgcatattcaagatgtctggaagcctggatttcaaatggggcacagtaaaatgaaagttatctggaagcgaagctctaaatttcatacttgggtgctgacggactgttggtgttttcttattcttcttctgttttctgtattggatggcagccgttttcttcagggatcagagacagaccagaaag

SEQ ID NO: 67264 - DNA, 383 bp, Cucumis sativus
  Intron number 1 from transcript Cucsa.101790.2 (locus Cucs a.101790) derived from phytozome v7.0 (chr-ID scaffold0092 7; pos 977965 to 978347 reverse strand)
tcgcgccgccttcgtttattgttcagatccccaaggttttagattttttttttgtttattggttggttatcttcacccacagagaagaaaataaaaaaaaattgtttataatttttttttcaacccccagtctaaatgataacataaaattgagaatgtgtaatcacaggctagagggatgacaaggagcatattaatcttatataaatcaataataataataataataataacttgttggaactaaaaagttgctctgtgggtgaagaaatttgtatttgaaaatattggaaaaattgttttgatgttaattgttattagttgagggtactgataaatgtcttgttgtgatgcggaacagtgaaaaggtaggacattgagaa

SEQ ID NO: 67265 - DNA, 484 bp, Cucumis sativus
  Intron number 1 from transcript Cucsa.011410.1 (locus Cucs a.011410) derived from phytozome v7.0 (chr-ID scaffold0015 4; pos 674713 to 675196 reverse strand)
ataattaagggacagtggactcctcaagaagacaggtacacaaataatttaacctaaatttatatttaccctttgatattttcatcgttttgttttcggtgtgatgaacgtgctaagaatgtgtaacttagttgaggtatgttcagggacatctcctaattcgttttgtccaattttaagaaaatatatattttgtgtgttttggcttttgagtatgatgaagatgctaagaatatgtgacttagttgaaatgttcgggtgtacctcctaattttttttgtctaattgttttttctaaaatgtttttgtgattttttttttcaatttagggttttaaaaactaaatcgtggtgattaaagttatgtgttttatttaattttttttagattgttggtccaattggttgatgaatatggtataaaaaaaatggtcacaaattgcaaaaatgctggaaggaagagttgggaagcagtgtagagagag

SEQ ID NO: 67266 - DNA, 271 bp, Cucumis sativus
  Intron number 5 from transcript Cucsa.117010.1 (locus Cucs a.117010) derived from phytozome v7.0 (chr-ID scaffold0099 5; pos 742943 to 743213 reverse strand)
accgcagtcgaattcgagtactcttttcgaaccttatttttctcttcaacaatgtcacttttttttttttttactgaattcaagttggtttgttgatagtcatccctatcgtttgagttgttttattgtaattactaattttcgtttcactcactttggatctttttgtttggcattttgagttcttgcgataataacttcaatctcatttctacttttttttattattattgtagagagagaccgctttgagaagaaaacaagttgagcg

SEQ ID NO: 67267 - DNA, 851 bp, Cucumis sativus; identical to SEQ ID NO: 62256
  Intron number 1 from transcript Cucsa.059960.5 (locus Cucs a.059960) derived from phytozome v7.0 (chr-ID scaffold0062 1; pos 522587 to 523437 reverse strand)

SEQ ID NO: 67268 - DNA, 883 bp, Cucumis sativus
  Intron number 1 from transcript Cucsa.116200.1 (locus Cucs a.116200) derived from phytozome v7.0 (chr-ID scaffold0099 5; pos 117350 to 118232 reverse strand)
gtggtgtcaaaatcaagttgagttttgaagattcttttgattaataattttgatcttctttgatttgtttttttctcgtttttttggtgctctttaggtgtttgatgaatttcccacttcagggtttctctgtttttaatatgttgttcattcagctgctgctatcctgctgatgatgctgctttcattttctttgtttacttattcgaaaagccgttatcacaacgtagctaagaggatatttgtgagaaagggtcataatcactctcatatatgtcttaaatgatttagaatcaatttataccatccaaattgattttgaatgatttaatgcatgcttcgttatgattttgaacatgataaaaagttaaaattacttataaaaaatgttctaaacactgtttttagttcgctaaaaggaaaatttcagttttctaaaaagcatgtcggttaatcttagtgttactaatttcaagttagatcatttggtcatgttcttttatggattgtagttactagtttaaatgattaaatataagctaaacatgatattgaaaggattaaaattagctaaataacttttgagtactcttcaaaaagtcatgttgggtaatcacacagtacagtgtcactatgtcactaaacatgatattatcagctgggttgaactaattagtttcattgatcacttcacaaggaagtactatttgagttataaaactattgaaaagtaatcaaatgcccctcttaaataagggtcatttcttggagaaccattcttttggctgaaaaagtagagatttatgaagttaaaattagctaaaaaatcatatcggttctttgtctttcccataaaattccattggaaactgatcttgcaggt

SEQ ID NO: 67269 - DNA, 1031 bp, Cucumis sativus
  Intron number 2 from transcript Cucsa.066610.1 (locus Cucs a.066610) derived from phytozome v7.0 (chr-ID scaffold0069 6; pos 1076222 to 1077252 reverse strand)
tgttggccaaccagactggactctcgagaagtcaggtgtgtctagtgtaagataaaattttcgatatatatctaaatttccattgtggttattgagattagtagttgaaatttaatataatcttaagtaaataataaatacttatccacttgaaatttaaatttatttaaagagtgagatttttacttcgttttcattagaaaatttaatcgacggcaatatcaattcagggtgtacagtgcatgctatggtgtggatgtttgtgggttgatcgagaccataattggaagtgattttaaaattactaagttcatgtttgataacaaattcattttttgttctgaaccaattttgttgtctttcatatttcatttgaattctaattaattaataaaaacaaatattataagttttttagaagtacatttttagattttaggtttcctttgagtctattttctccccagtatttataataattttgctcaagtaaaaaagtagttgatttcataaccaaattctaaaaaataaaaagtttcaatactactattttgagtattcaaaacttggtttgatttttaaaataatagtaaaagttagatgaatggaaagaaagttggaggtgtaagggtatcattatcggcttcaaaaactaaaaataaaaaaccaaatatttacaaaattagggtttaattttcaaaatttgacttgaattttgaaaacattgttatgaatgaaaatagataacaaaacaaagaaactaaatctaaatggcaacaaaagaaggcctaaaacacccatactttttatcacgttttgttttttcatcatcatagagtagtgattttaatcgtttcaaaatcatatgttctaaattctgaaaaagaaacccaagatcacggacggattgaagaaaaaaccagccagctttcttcggtttccgctggtttcaattgtttggatgggttgtttgacttctgctcacccctaggagttgtatgtatatgttcaggtatcaaactggttcatca

SEQ ID NO: 67270 - DNA, 977 bp, Cucumis sativus
  Intron number 1 from transcript Cucsa.050870.1 (locus Cucs a.050870) derived from phytozome v7.0 (chr-ID scaffold0055 7; pos 85602 to 86578)
tcgctaatatcgacctccagatctgctctgctcaggttaataattcataatggatattcctatgtgtccttatgtaatgcccatctgatttgtcttcggtcttcatcgctgtgtatcgggaatttcgattgattgttatctgggttcaatttccttggtctttttttatggtgggttggtgccaatttgtccaatttgcgcaatcgtgtgttgattgttatgtgggtgtgatttagtagttagaacttcgattgccttgccggtctcttgatcgagttttctttctagtttgggtcggttttatgtcgttggatgggtggaatcgtatttctaaatggggttttgtgtatgtagagaactttgttttcgatatggggttatcttccaaaaagcaatccattggtttaggaagcattttcccgttcagaaatgaaatttgaaatttagatgtttaaaacgaagtttggaatttatcttgttcatttgattttttgttacatacttcatttgaatatgtaccaaggagaaccagatttgatattccttttatcttgttttttgttgttgttgttgtttgtttttttttttttattattttattaatttttattttttattaatgaaggattgtttctctctcaattaatcttgtagcgatacgtttttccttcttcccatgctaagagcaatactcatgcgtgatttttttgggttaatattaccaatcttctgtgtttggaaggcatagaaacaacatatttcccatttccttttactaagctctgttgtccatttctggaataaatgtccttttgtttgactttgtaaatcaatcaaccaagcgtttgacttatcaatcattttgtttcacttgctgtcagtttttttggactaattgtctagtatatttatatatacctaatgaaatttgctggggcataggtaaatcaatcaaccgacttcgctgagctgacaaa

SEQ ID NO: 67271 - DNA, 789 bp, Cucumis sativus
  Intron number 6 from transcript Cucsa.079870.1 (locus Cucs a.079870) derived from phytozome v7.0 (chr-ID scaffold0079 3; pos 2736068 to 2736856)
agccatcaaacgactttgctgaagacaggtttgaacacaatttgcatctttatctaccttcccaaatggaaacaaatcaaataattgttctgaattaaagagatgaaatcatttacaaccacctattattattttgttttcaaacaagaacctcgggatttgggaatgttcagcatgagattttttatttatttattttatattatctcaacttgactagccccatcggaaataagccttgccaaggagacacctaagatatgatatactaggttgatgaccactgtagaattaacccattcctacttagaccattagggggtgtttgggggcaagaggtgaatcattagtccttggttattttagttgggtgggttacaatgatttatgtctgggatgtagactattttagtttggtttataatagtatgtgtttttgagttatgaactattttagtttgaaaagaaaatagtaaacatcgtagcaaaaaaataaaaaaatggagtgtataatagtaaaatttgtagcaaatagtaaatattagagctaatttggactcttaaatagtatttactgtagcaaataggtgtttattataattttatatgaccttggcccaaaacacccccttaatattctcattgtcctgactgacccaacaggccaacccatttttattgaaatagattcattcctatatgccgaaagtttggtgaaccactcaatttctttctgctcactctaatgttgtgcagttattcatttgaaatcattatcgtttttcagag

SEQ ID NO: 67272 - DNA, 584 bp, Cucumis sativus
  Intron number 3 from transcript Cucsa.011640.1 (locus Cucs a.011640) derived from phytozome v7.0 (chr-ID scaffold0015 4; pos 934059 to 934642 reverse strand)
agcgaggggtgtttgattatctggtttgtattgtcgtgtcatttggagatttgcccttggttttacgaggcatgttacatgttagactgaagaatgttagcatattaccaattttacttttgctgcaagcatcaatagtttctccacatatgtccttttattcttgaacgtaatgtgagttttgagacctcatagtataaatccataaacttcatctattgtcgaatttaaccaattggatcttgggcttttacgtccaaacatttgttgttttcttatttaattttatttttattttcaacagctaattagtttctttgggaataaatatggttgtctttgaaattcagttttctgcccgagtttctacttctaatgcatataaggaatccttttagaggacaatggtttgctttgtaattatggctgttttattgagaataacgatattttgaactttgaagttgtagagggtgtcatgatgttttcattttttgtcttgttgatcatgattacatgagatggttaacttttcactatgttatgcagtcagtttctttttggcttgactacttaaatttcat

SEQ ID NO: 67273 - DNA, 629 bp, Cucumis sativus
  Intron number 2 from transcript Cucsa.184300.1 (locus Cucs a.184300) derived from phytozome v7.0 (chr-ID scaffold0127 4; pos 39871 to 40499 reverse strand)
gggaaaagtcttttacctctgggatatctccacttgtcactcccttgctcacaaaacattgacaatgatttgggaagtaatgattttgatatattttttacttctctattaataagaactcagagtacaagagagtgataaaaaagtctaaattagggaacctggggatcaagaagcgcactcgggcatctcaactaggttgataccccttaaacgccaatcactatttcccaagcatacaaaaacagaactttctaaaattaattaggggccagaagataataaaaaaccataagaaaatctaacacctgagaatgccaaaaacataaaaacataaaagttccaaggctaaaaatgaagcaatccaccaagacttcaaaacacagaaagaggcctgctgtaagaatccttcaaactgaatattctgcaaactgaaacctcaactgcaatgctggttgagagagaaaaacagtccagttggggcaaatgtcttgaatggaataattttcaaactccttatttaaggagcaccaagctgctgcattatgttctacggtacacacattttctgcccttggtctttccttgtgatggaaaattcgttgattacgctcgaaccatgcaggaga

SEQ ID NO: 67274 - DNA, 634 bp, Cucumis sativus
  Intron number 1 from transcript Cucsa.192630.1 (locus Cucs a.192630) derived from phytozome v7.0 (chr-ID scaffold0133 3; pos 504357 to 504990 reverse strand)
tccatcatttccttttggaattgtttctgatctaggtatttctcatctcccctggatccatcttcactttcataattcctgctttatacagcatttcttgtttactacccatttctccttttcatttgcatcaaggtccatggatggcagatcccacatatcaacctctttaatctctccctagatctcttgttgttttgttcttgtctctatgttgaccgcctttgcttctctaccaatcacacgcaattcattgctttctagatcttcgtcctccatttccttctgtttttccatttgtattcacgcatttccttgtgtatctatgtgccaggagtgatcggagtaggattgactttttttctctttcatttggttgcttaggaagttaccattattcatttggttagtggaacgtataatttagctttgagggttgtctgacatttcattggtttgttaaaattgattatgggagttttctatttggaactatgatagtgcatcttttctctttgggaaaattttagttgttctcatgccaactgttcatccttgagctcattcaataaatttgtttttcttctccatgtaagcagtgattgtgcactttagctaggtttctgctcaatct

SEQ ID NO: 67275 - DNA, 626 bp, Cucumis sativus
  Intron number 1 from transcript Cucsa.119590.1 (locus Cucs a.119590) derived from phytozome v7.0 (chr-ID scaffold0099 8; pos 1498463 to 1499088)
tccatctctaagcttctcattgttttcactctcaggtataactacttttattcactcttctctttccggtcttctgcactattcttgtatcttctttcctctttttttcttttcattgttgaagggtgaatatatatgaatagtttgtgtttgaaagaaccgactctccaacaatcttcacaatggtttgaggctttgttttttgtttctcccaaaaagcctcttatcggtagaagatggttgtccacagattatgttcaaagtggacatatcataatgcatctttttgaacttgtttctatgaataaggaattagcaattatgagcttgtacttgggattcaatagattaaatgttcaaaagggaaaaaaatatctagccattctcccaagtattctcaattgtattgttggttgaaattccttgtccaaaattccttttttgaattccaataatattgcattactgatcagttgaacaaatgatcatatgtctgacaagaaaaattgaacatggttttttagattgtatatactcagtctatggacctaattctacttataatggaaaatatggatataacattgagctcttctgcagtggaggtggactggtagcaactacta

SEQ ID NO: 67276 - DNA, 178 bp, Cucumis sativus
  Intron number 3 from transcript Cucsa.044420.1 (locus Cucs a.044420) derived from phytozome v7.0 (chr-ID scaffold0054 2; pos 788141 to 788318 reverse strand)
gggtggggtattttgtttatcaatttctcgtgatctttttaaattctatttttggattattactttgttttgttattctttttgcatatttgagttactaagttttctgatgtttcttctttgattcatcgtttgggctatagaaatcttcatcaagcgtaaaagagcccgttgcgat

SEQ ID NO: 67277 - DNA, 1005 bp, Cucumis sativus
  Intron number 1 from transcript Cucsa.074320.1 (locus Cucs a.074320) derived from phytozome v7.0 (chr-ID scaffold0078 5; pos 201384 to 202388)
aggaccgccggtcaccatctcactacttctgaattgtaatgtttctttttcacattttcttcaattcttccaaaaaatggagttctaactacagattttattcgctgcactttcattccctttttcttttctctctctcccttccattttctcattcttcatcttctttgcactttccgttttttgttacccaaccacgcgcagtcgttcccatattgtttttcttcatcgtcgtttccctaggtacatttcaaccacaatcatgtttcttcttctctttcgttcgttttcgtttcgttttcctgttgtttattcctcaactgccgtctgttttgtgtttgttttttctttttgttttctaatctgatgtttatggacttttctttgtcttcgttttcattttgttgtcgggttttggatgaattgagtaaaattgttagggagaaggggaaggagaaggagaattcaatgaagtttactcttcgtttctttatgagtctgttagtcgtagtgtttacgagaatacgccacagtaatttttgtttaatgaattactggattttggttttgttattctatttatctttgatctgtaaaggcgatttgtcgcatcaaagtatggagtttgctaatgtctactggtagagaatagggattgattgtttgttcagcgcctttttccattttagttaattttatttgtaatcgcgatgtttctgaatttatttctcacttctcacgaaagattatttgtggcgattgaattattataagtaattgggatcaagatgtcatgattagctaatgttgatgggtactcgacggctcttgtgagaagatttttaatacatttttctttagaataatacttgtctgctggaattttatcgctttcttgcgtattttttaatcatcttgttgactttattaatggctgtcgtgagggaagaacagagaatgggccttttgattttaacatcatttgttatttattatttcagtaat

SEQ ID NO: 67278 - DNA, 597 bp, Cucumis sativus
  Intron number 3 from transcript Cucsa.181090.1 (locus Cucs a.181090) derived from phytozome v7.0 (chr-ID scaffold0123 9; pos 122030 to 122626 reverse strand)
tagaggtaagtacaatgctagagcaaatggcttctgtgcgtgttttaaatctgcatgcctttgatggtagtttttctatcatctttatatgcaaatattcttttatttcttatatcttgatttaggacttggagtgatgtaatagtctgtccttgtcaattctgacaagtgatgcactatgtaaaccataagtttccttatataagcgatctgggttgggattagtatgatctctttttgttgataatgtcctgtctttagtgcctattgacgtcaactatcataatgtttgacttgaaatatccctgcattagtgaccactcctagaaaacaatcaacaaaaggaaaactttggtgtgtttgatttacaagataagaaaggcgtttattcttgattttttggtataacttaaacgcttccataatataaaaatatcttgtaaagttgatgtgttatattcatcagatataaaggatgcatgatttttgtgcgttttatcttgaagatcctgctggagcaattcaacataccctatgtttcttttatcagtttctaataatgattcactctcctttctgatgttaatgtggcagcca

SEQ ID NO: 67279 - DNA, 813 bp, Cucumis sativus
  Intron number 1 from transcript Cucsa.150010.1 (locus Cucs a.150010) derived from phytozome v7.0 (chr-ID scaffold0111 0; pos 976993 to 977805)
ggaacatccggtaattataaattcaaatgttattattattattggattattgaaaattataaacaaatcacttcccaatcacatgttttaatattaaactaaaaacattcattaattacatgaattcattatatggaaatttaaattgttttctttttaaaactttttattagcatatagaataaagtaatacatagaataaaattaagatttcttattaataacatttgctacaatctatctttagtaggtttaatgttgaaacatcttttctcgttttctcgtttcacattagctcaacatctttcatcccataatgatgatgtattttcttattaaacatcgtttcaggcaattttcttttatcaatcaaacgtgagattggaggtttgatctttaattcttttaacaatcataccacgatcattttaatatttatattctttttcattaattaagcatcaataccatttgagtgttttgaagttttctcaagataattattaaactaatgaactcagggagaaaaaattaaaagaagaagtactaattaacacatataaacaaaatatttaaataaacattattctaaaaaaaagtttcatatatagattgatgagagtataatttcataaataagacagcaatcacgttatttctttcaaattaaaggtggatggttttattatgaacccatattttgttgaattcaactttagtttaacctaaagcgttcttttaagttggtgattttgattgaatttgtttctcttacaaggtacttgatcgacacaaactttcgaggacaattcg

SEQ ID NO: 67280 - DNA, 690 bp, Cucumis sativus
  Intron number 1 from transcript Cucsa.180610.1 (locus Cucs a.180610) derived from phytozome v7.0 (chr-ID scaffold0123 6; pos 189768 to 190457)
cttctaaatttgggtttataatgggattggattaggtgttgttcttagtgactcacaagaaagagtgatgaaggtcgtaactttctttcgtgatgacaacatggatattttggctgaggaagctttagcattgctttgtggctttcaaatgactttggatttgggcttgaataatattttgttcggatttgattcccaaaattttaaattaatggcatctattttaggattttagtaactttctaatcgagaggattttaattagatgagattcatgttatgttggggaatttgttcatcaaaggctgtccttttagtctgcgagtttgtaatgagatacctattcatgggcaagatggtgttggtgcaaatgtttttagtgttcaatgagttttccgtttttccaagtagtttagattgaaagtcgaacttgatttgatgggttacaattcacattggttggttagaccatcatggtaataacatttgtctttcattaatgacctattagctaagttggttagagcgtcgtgctaataacgtgtaggtaacaggtttgaaatctagtgggccatttttccttaaccttctgggtccattctaacaatctcaatctgcatcaaaagaagaagcagtggccgttcaagaatcgagtgcctgaaaacaatgccacgcctcagttcgaaaaca

SEQ ID NO: 67281 - DNA, 396 bp, Cucumis sativus
  Intron number 1 from transcript Cucsa.138380.1 (locus Cucs a.138380) derived from phytozome v7.0 (chr-ID scaffold0106 3; pos 33237 to 33632 reverse strand)
cagaaaatatcaagaaggcttgcttaggtactttcgcttctcttcttttatatatatcgaaccatcgacttcgaaaatggtaaatgagtaggttatttgtggtctaatcctaataaaaacacttgatatgaaattactaaaatgaaaaacgatgtacttcacgtcaatagtactgtttttattttggaaaaaacaaaagtttgacacatcacaaatatttgaaaatatttgattgaatatgtagtggatggactaaagtaattgatgttttgccaaattgagtactctttttcttgaggttggaggttgaaatctctatactcctattgtaccaaaaaatgggttatggatgatttagagatttgtttttgtttatgtttgaaggtttggggacag

SEQ ID NO: 67282 - DNA, 708 bp, Cucumis sativus
  Intron number 2 from transcript Cucsa.091070.1 (locus Cucs a.091070) derived from phytozome v7.0 (chr-ID scaffold0089 4; pos 2149215 to 2149922 reverse strand)
cctgtaagttcttgaattagagtttttctagtgttgtacgatttaacttgatactcgaggaactattcaactaatagcatgggagaatttacaacgattttttcaatttcgtttcgtcgagtagtttcattaaaggaaaaaaaaaaacgaactatgctatacggaattatacaaaattagagcgtttttaactaactagtgcacgccggaaaggtgcttctcatgattatcgcatatctttgacatcactgattctagttgattaatgagtgatgtcgaggtgtctcaggagccttgttggttgaactgaaagtgttcgttaagttctcttttggtgcttcggtaccaaaatcatattagaacagaatttgtgattatattcagctactgattttgaagtttggcaagttctttttccaagttctcttttcttgtatgctgattttcatttctttcctctcaagttgcattaacctgactgaaatagccattcacaatataagtgtaacgtggtcttttcatctcaaggcataattgattcggaatgattgagaaacttttatgtcaacgctatgagtagtttttgactccgttttttttaatttaaagaggttttcagcttcttgtgtatctgatcactgatcgctcttcattcaattatttctactctcagttggttccagctgttacagagctagttattgctca

SEQ ID NO: 67283 - DNA, 746 bp, Cucumis sativus
  Intron number 2 from transcript Cucsa.044190.1 (locus Cucs a.044190) derived from phytozome v7.0 (chr-ID scaffold0054 2; pos 655299 to 656044)
caaatctcttagtaattcttatatttcatattccttccttttttaaaaaaaagtattttcaatagtcttcatttggttgatggtacaataaactaaactatactttatttgcttcatgtctgtatagataggttttagcttaatgggttcattttcttggtgtaggttgggtagagtcattattaatccaaccttatgtgaaacagggtagcttttttttatagaacatagctcattgagtcattgtaattttaaagttttagtgatatgaaaataattttgaattgtgaaattgaaatttctaaaacctcgatatgacttttaaaaatattggtaggaagtgtataacggtatttagagacggaacggttttcataggtttaattttcaaaaatcaaaatcatttttgttttttttgtttttttgtttttaattttggtggttttttatttttcaaaaaataaaatttttcatttttcatcaaacttcaaatagaaaatgaagttgatattttgtttttctattattttttaaaaaaaacagtaatgatgaaaaatattaatcaattttttactcataatacagtttagtttttaaatatattggtaaggaagtggattaggataaaacaaaagaaactcataggttgaaataattgataactatagttagattattaatatctttatgttgctttgatttaattattagcaattacaactacggacaagctggtcgagctttgg

SEQ ID NO: 67284 - DNA, 752 bp, Cucumis sativus
  Intron number 1 from transcript Cucsa.118870.1 (locus Cucs a.118870) derived from phytozome v7.0 (chr-ID scaffold0099 8; pos 742607 to 743358 reverse strand)
ttagccagtcggagaagcctgacgtgacctataatgtgagttttatatcattttgttttcctatgttgttcgaattttagtaatgatgctaattccgtcgttcttgggtgtatccttttgctaattggaattagggtttaagtgtaatcgagtcttcttgttttggtttaatccttgttaagttaggttagcgtcttgttcttaatctcgaattgaaaggggcttagattgtttttcaaagcagttggtgaccattcgacgaaattttgtttttttctttatcaattctcataatacttcttggttcgttcgtttcagtcgataattttcctttcctagaaagattaatgtcattcatgaatttgtgaaggttttgaaacattcgtttagcattgtttcccttggatttaaatgtgtattttagattgaatatttaagattttttgcttatcaaatagagaaaattcttctaggtagttttataatttcttgatgaatgcattttccccatataatagagctagatagtttcgaccttatggcaaaattcacattattagtttcctatttcttaacgtgagtttgtggttgatgactttgatgtagcctgattgaacttcatttcttccgacttgatgctaatactttctcatagcatgtttcctcgtggagcctttatacaaagaaggctggagatttgctcactgttattttcttcatttcttttaaaatcatttctaggatattggtgg

SEQ ID NO: 67285 - DNA, 346 bp, Cucumis sativus
  Intron number 1 from transcript Cucsa.074820.1 (locus Cucs a.074820) derived from phytozome v7.0 (chr-ID scaffold0078 5; pos 684107 to 684452 reverse strand)
cagaggccactttctgtgagttttttttttatataaaaaagaaaattatctcttgaaatgctattcttcgatttaacagactctgatatcatataagatatcaagttgtatgtgaaagtcaatataaattatgaagctttctcttagatagatacacccatttcttcatcccaagctgcgggctagctccaatgatagactgtgaggtagcaatttgatttttttaaaaagtagggtgcatggtgatttggaataacatttttcgacatagattattctccattgtgaaaatgattatgagttcgttgatcgttttgttttctttgggtggtcagatattatattt

SEQ ID NO: 67286 - DNA, 1010 bp, Cucumis sativus
  Intron number 1 from transcript Cucsa.128300.1 (locus Cucs a.128300) derived from phytozome v7.0 (chr-ID scaffold0102 4; pos 330494 to 331503 reverse strand)
ctcttgccggaattgctatcaagtacggcgtcgaggtacttatgcattcttaattgctttactgttcatttgatttttttatttcttgcttgattcaaaaggtttataggcccacctttaaatctgttttcttatatatattgcttgcaacctttatgggagggattttgatcatattctgtggactttaattcaggaagcagtaactaaaattaacagtacttgaaaattgaaatggattgtggcggatttatttgatatatatataaggattaaattaaactttcaaaaagtgtataatagatttataatttgtgtttgataggttttagacaattttaaaaagttttaacaattagttggagtttgaattttatattaaatggaacttgtaattaatataatgttagaaatactttagttggaagggcaaatttgattatacatactcactaagttataaacaaaatgcctttaaacattgtttttgttgaaaatactacattctaacttgcaatgttaatcttttgaatttcaaatcttcccatggaaattatttgaaggaaatgtaatggtaaaaaaatagacctttttttaaaagtcgctttaatttatgccttgaatttgaataaatactccgatttcttatcttctaccaagaattatatattacaaccttatatggaattgttaagaacgaagattaaattggaattttagggagagaaggattgattgaccttgtctaccttggtaaaatttgaaaatttcctttctttttctttaacaagctacaaataaagtaagaatgtttatatcgtgaataaaaacttcaaaaacttggaatttttttcatgtcccatgtgccatagaacaaaggatctagatgagagaagtttattttctgcttctcagtgtaatgttctttacaatctatcatttatgttcgatgcattcattgccactatataattatgtaaatgaattgcaaggtctcggacatcaagaaa

SEQ ID NO: 67287 - DNA, 823 bp, Cucumis sativus
  Intron number 1 from transcript Cucsa.043730.1 (locus Cucs a.043730) derived from phytozome v7.0 (chr-ID scaffold0054 2; pos 442557 to 443379)
gagaagaaggctacgcctaagcttcaagactccaggtacttctatttccctctctgtttctttctgtgagcggatcgatcttaaataaggaaatggagtgtgaaggtctgagatttactgaggtcattactgcttctctattgtctatttattgattcaataacttcgtttgtcttgcaaaatttaactgattgggcatgatccatcagtgaaactgggtttagtattccttgccaaatgactgatggtttttgagttaggaacgcgtataattgtagtttggcgctaaatgattttgattttgttgttctttatgttccaattgttgtaactgggggatagtagttcgtgttatcccgctaatttcatgtcattctgttctgagaactaacaatgcttctgggttttttttttttctggcggttgtatgttaaaaaaaatattggattatccaattaatgtctacctgggggcgctttgaaatttaatactaaaagtaggagagcagccttcatttggataggaaaaactatgtccaatctggtgatttttattctaacaccatgttcatttgcatcaacattactggtttgctcaaattcgttggaatgcatacttgttatactaagatggtaagatgaccatattttatggcaataatggcggtatcatgaatgatcgtcttagcagaacacgcagtatgttatatgcccttaccataatttgtatatagagtattttcctacatcttctattgagtgaaatggccattactgatgttctccttttgttttcaggtctgtgagaaagattgtgaatcttg

SEQ ID NO: 67288 - DNA, 738 bp, Cucumis sativus
  Intron number 2 from transcript Cucsa.104280.1 (locus Cucs a.104280) derived from phytozome v7.0 (chr-ID scaffold0092 7; pos 2862196 to 2862933)
ttactcgaaaggctctgaagaagcccgttgaggaggtaattgtctcagaaatttgaggctgtttctttattacttaatcttaagatgatatttaacaatgtaaatgatggtcccctgcagacactaacatggcactgaaaaagaaattgagtcaccatggacggtcaaatattttgaaacttgcaaatcaaagaaaatttgtttttctaaatagcttaaataatatagaatttagcaaaaaatgcctcgaagaaagacgatatctgtatatagtaatttcggttgtaattattgatgaactccaatttcttggagatttggacagactttgaaaagtgaatgttcttaatatggaaaaaatacaatgagaggatctagtactgaaaactggcattgaactccaacaaaacccaaaaagatttttagtcttgggaagcttaaaatcctgaaacacataaatgggctctgagtgattgaattgtattggaatcacatggatgtgtggtggtgaagaaaatttacgtgctgcaggaaatttggttacagtgtgaaaaaacatgttaagaaggtgaaaatgaaccttaggatgtgatcaaagcaaacttttatcctttataacaaggtttaataactttatggctttcattttgctaagatgagatgctatttcccatagcctctaagtatttatgactttatgaagactgcagctttagctcaaaagacttccgaggccac

SEQ ID NO: 67289 - DNA, 816 bp, Cucumis sativus
  Intron number 2 from transcript Cucsa.135700.1 (locus Cucs a.135700) derived from phytozome v7.0 (chr-ID scaffold0104 4; pos 517328 to 518143)
tgtggagtcctgataccaaattaattgccattcttgtaagtcatatttccttttgtattctaaattcattctggttgaatatttcttgcgtaaactgtaatgccactgctagttaacttaggttctgtatttttgttatttgtaattaggaacttggcaacctttctatagatgtccaacctatacctgttaatttaatgtttaccttagtgtcaagttctaatattttaaaatgaaagcatttgtggagctcatgttaatagcatatgtagacacttaatagcttatgtgtcttgaatggaatttggttgaggttatatccatccaatctgtaattagataccctcctatactatggcattggtttagttgtgacaccgagatctaattctcgatattggtggcatgattaaggtttggagaagctaaatacttctggccttataaaattcgtctttctagatttttctttgcctgtctttgaattttcttgtagaaacagcaaatttatctttgtaattatcagttaagacttattagtttggataggggtctgattctttgttagtattaagattcctttttgtgagctggtttcaagcatgatcttgtatattcgttcctttttctcaatcaattcatagcttctcaatgaaagacatggagaaaaaattgtgtcatttattattgtttttagaataagcttcaacaatgcaggtgttgaattattttacttaaatatttccctttaataaatctcatgtttgaatttttcttgcagacatcatctttctttctccacatctttaaggtcca

SEQ ID NO: 67290 - DNA, 857 bp, Cucumis sativus
  Intron number 1 from transcript Cucsa.048260.2 (locus Cucs a.048260) derived from phytozome v7.0 (chr-ID scaffold0054 2; pos 3094405 to 3095261)
gagttctgcaaatttcaatcatccacatcaacggggtattgaagattcagatttttcctgcccaatcccctttttttctttttccatttctcatcatcggttttcttcaatcatcgatctcactgggtatttatcattttctactttaatcatttcttattgactttattcttcaatcattgggaataatctctcataattttcgtttccatttcccgttttctttctgggttttttttttttttcgaattttgttgatcgtatagatgttgattgagcgtattttctgattatggattccttatatataggggccttcttcctgttagcgattcattgttattgtaaacttttgagctgatttggatgtatcgaccacatttaatgttttgaatgttgagaggatataattttctggggcttttcccatcttgtgaattctgtttccatttcgcccgatggaagagtcccaaagttttgcttctattagagctggaggaaacaggaaaaaaaaaaaagataaataaatctcaggttaattttggttgctaatttttctcgtttttggaattattgcatctgaggttttggtaaagaaaaaactcttccaatttcatttttcttggactcagtcgtttttggcatgtaatcctcgagatgaagaatttgggtgtccttttgctgctgatgccattatttaactttattctactattgttatttgttcattataagcgttagtgtgaatttatatctatgctgattcagagtataaaggggtctttttagaattgtgtgtgtttgtttgttgggttgagttattcaagctgcttttgtcgaaacataggatttgttgg

SEQ ID NO: 67291 - DNA, 734 bp, Cucumis sativus
  Intron number 1 from transcript Cucsa.181480.6 (locus Cucs a.181480) derived from phytozome v7.0 (chr-ID scaffold0124 1; pos 55811 to 56544)
tcatttgtggaagcttaatcgcttagaatgtgagtccaaatagaccattagccatggttgttccttttgtttaggacttcttgtgctcaaggttttcgtgactaagactaatgactatcctagaaatccatctctcattacctacaatttttcttttagaatttttttttaaaaaatctgaactttacgtcttttctttgaattatggggtctgtatttgatttacaaggatgtatcttttcaaactcttctcgttagttttttagtttgtttgtgaatgcttgatttcttggaatttttattttttttgcttcagtcgttttatgatattttttattctttcctactttggcagttatttaatcatctggatgcatcatacataggagtgttgtcattgaaacttgattctactttaatgcgaaatatcaaattaaactttgtgggcttgtatttttcaattaaaagttttatctattaaataagatcaaatttaaactgaagcatatgctgtctgctatctagtgtaccatagaactttcttttttgtatattgctgggataagtctttactctttgttagttttaatgtatttgtttgtggttcctctacagttcaatcacttcgtatgtgtatatatattttgttggaaaacaaaacatcactttgtgtattttattcttcaaatttgatactttctaactgtatctgttgactgtgcatttttcagcag

SEQ ID NO: 67292 - DNA, 430 bp, Cucumis sativus
  Intron number 1 from transcript Cucsa.095360.1 (locus Cucs a.095360) derived from phytozome v7.0 (chr-ID scaffold0091 9; pos 1257833 to 1258262 reverse strand)
tgaacttcgtgtctgcttggtctgggtgtttttgggtaatgttctttatactgattttgggtttttcttaatttttgttttcttcttcggtactttgaattctgttttttttttttaatttattgtgtgaactttgaaggtattcatttgatattggatttttatattgaaatgggattaagaaggaaaagtgcagctctttgcatattggtagtgaaagaattggtggttagggacaatttgtgggttagaatgttttaataggctctattgttagcagtttttgtttagagcctattttccttggctgctaggcgtgagtaatttctagcttgatttatgaagaagtggaacaatttcattagttctgttgtttgattccattaaaaaaaattaccaccacttctctctcattttgaagggttggtag

SEQ ID NO: 67293 - DNA, 931 bp, Cucumis sativus
  Intron number 1 from transcript Cucsa.041710.5 (locus Cucs a.041710) derived from phytozome v7.0 (chr-ID scaffold0054 0; pos 284682 to 285612 reverse strand)
gttgaagtagtaatttaaacaaaaaagaggtttaggtaacattcattctctaaatttggtttctataccttcgtattgtttggtttcaaactctaaaaagtgactttgaattattatgtttggttgattttatagttatcaaattacttaacggaggaaaaaagattcttaattataggggcaaagttagtatttcgaaggaaagtgattttgacctgggaaaaagtgatttaaaatcatgtccaaacatatcattataaagtctggacttttgatatgaaaccaactgagtttcttatctcttgttgataccaataccatatcacaacactatcaaacaactccaacttttgagtcattaagagaccaactttagtttattaaatagattaaatcttagtttgagtcatcaacttccacagttattttccgttgatccattaattttcagatatcatatatattagtacctcaactttaaaatgttttgtttagtctctaaactaggtgagagtaatttagtctattaacccatttggattaactttctaagtatttataaacatcttttttttttgcactttgaaagacttgtttaaacgcattagaaagtcaatcaaaatggaacacatatcattaaatttttatgtactagtcaacaaatgttagatttacatgtaaactcgcctagtttatatagtaataaacgtaaaacaacacgtttgatggttcaaaaccaaaatagaatgaagtgtattatgatttaaaacatttgaaaattcattcttctaacaacaatgactattctcgtctccaatcttcttttgtttggagaaggaaatataacatttacatttttctgatctttctgtgaaagttacttcaaaactatatcttaactgatgacatatccttgccagcagtggaaggc

SEQ ID NO: 67294 - DNA, 740 bp, Cucumis sativus
  Intron number 1 from transcript Cucsa.049510.1 (locus Cucs a.049510) derived from phytozome v7.0 (chr-ID scaffold0055 0; pos 8019 to 8758)
taagggaaagattttccgtgctggtgatattatcggtaaatttctcctccccaactcttacctctttattttacgttctaattatagtttttgtttgataaccgttatcgttttcaaatattataaaattaaccaaaatatttacaaaatatcctaggatgaactactataaactaagatatacactatttgtctatttgtatcatgataaacataaatagttgtctatcttggtctaattcagataaattatggtattttgttatatttgtaaatatttttatgagttttttttattttaaataataattttctttttttcttcttaaaaataaacaggtttaattttataattttttccaccgaattaaaattagcatgaccattctaacgttgaaagagaggagattacattgagtaacttctaatgaatcataaattaaaattgacaataaaacttaacctttacatttatttgccttaaagataaaaggacaaaaatgaattagcgattttatataccaaaaagttttataattaagcaaaaacggatcatttaacctctcatatttcataccctattaaatcttagtattttgaacaaatatgaacatatattgaaaggtaatttttctacatgagatatcaaaagtcacattatttctgatatagtatagccattgtattctgatctaaaaaaaaagggttatatgattgaaacagtattcaagtatcctcga

SEQ ID NO: 67295 - DNA, 551 bp, Cucumis sativus
  Intron number 1 from transcript Cucsa.133400.2 (locus Cucs a.133400) derived from phytozome v7.0 (chr-ID scaffold0103 7; pos 1089752 to 1090302 reverse strand)
atctcttggatccacatttctacttctactttcaggttcttctctttctttttactttatttttctcgtggtgcattggatcttttttggggtttaatattaaaatggaaaatggggtttcataattttggggggttttctgttttttttactagaagatttgtgcttgagatggaatgaagattgtttctctctttctcactacatctttactgatttttttccttttcctttttggctgaatcttgtaaatttggttgatttgggttagtgataatgtgttgtttcagctcagataagtagtagttgttatggaaggtaaatttgagtgaaatccttgtgattcaatgtggtctttggataataattaatatctctgtttcttacttagcattttaaaagattctagctttttccctttgaaatattgtttatactttcaaaaagcataaaacagattgagtagcttcttaaagtagattttgatactgtggtgaaattatgccctttttcttgtgtactcagagaaagtgaattattaatctgtgcaa

SEQ ID NO: 67296 - DNA, 1003 bp, Cucumis sativus
  Intron number 1 from transcript Cucsa.104530.1 (locus Cucs a.104530) derived from phytozome v7.0 (chr-ID scaffold0092 7; pos 3023948 to 3024950 reverse strand)
ggagtcaactcccacaatcaagaaaagtttttcaggtaccatttgaaatatatgaaaataatgtgtgttgtggtttttaagacacgttgcgatgagttaaagacttgagagagattaatgttaatactattttggtagcttaccgaacaatatgattattttgatcagtatgaagaattttgcttccaatcagacagtgttttaattaattattgaaaacgatgttttacatcctttgtggtgtgtgtagggcagaacgattgtctctatataaatgtgagccacattctctccaattcatcctacaatgaacatctgttaccacccaaaacaaaaacaaaaacatttcttatgatattaagatcaaaattaaaaactcttatcagcacattgaactactaactttttggattttcttgggtatctcatccaagatgaggatctgactgagtaacaacggagagaaaaagaagtatatgtttaggtcaatttttctctgaaataattgattcgtttcatcacttatcttatattccctagttttaaatttgagaaggaaaggaaacaatcaaattttaaaaatttatatttcataagccaaatttagtcctcatccgtattgtttggatcgatacaacactttataattagctaaaaagagtgccatttgtgaaagatggaaactcatcgaataccatttttaactactgctcttgaactttctagagtgttactcttgttcataattaaacatgtttgatgtaaatgttacttttgtctttttctgaataggagaactaagtgaaagaaatttgtattgcaatgtacttaaatgttatgaagaaaggaaagtctacatcttcacctaacttcaaattaccaaagggtttgatttgattactattaataattttcatggtatgtattaaagagctaaacttttaccacttttgtttattaatcttcagaaagacacacaagttcagatatccaaagcttaaac

SEQ ID NO: 67297 - DNA, 991 bp, Cucumis sativus
  Intron number 2 from transcript Cucsa.097890.1 (locus Cucs a.097890) derived from phytozome v7.0 (chr-ID scaffold0092 3; pos 88765 to 89755 reverse strand)
ctgatcaaaaggatttgagctgcatcaaactgcaggttggcttaatttctcttttgtttcatttcaagtttaattcagcctatataaatcattatgtataaacaaagaacaaagactgggatagttttttttcttcctatttttataagaaaaattgataatattttacataaaagttttctgtaatatatattttcgatttattattattattactacttaattaattaaaacggtcaaatatacatatgagattaaaaaaaaagtaaaaagatctcatctcatctacccctaattattcttacaataatcaccaattgggaatagttaatatttatatctcagactttgagattttaatttcttcttataataaataaacaaagggtaacaaattaaatcaatccacaattaaataattaaatttgtagctatttaatttattaatcacgtggtataagattccatttctttgtagattacaattaatattagtatttaaatgtccaaaaatgaagattaaagcttcgataacaaatttaaaacaacaatcaaccacaatttaccataatccatatatttttttttcaaactaaaaatttggctcttagaattttgatccatttactagatatttatatgtaattgatgataattaaattgaataaagttaaattttaattcttgcaaacatgcttttaataatattttaattaaaaaaattgtcaaaaatataagacaaaataattacctaatagtttgttaatttttttatttttgaaaaaaaaaattattcggatcaaattttgtaaaaaaacaatttaaagtaattttaataatttttttctaaaaaagatcatttcaactccatgaaagatttttttgagtgaaaaattaaaatataatatttagcttttagataaatatataaaagttaatattattttgtttggttgatcaggaagatcaattggaatctgctcgagcagaa

SEQ ID NO: 67298 - DNA, 899 bp, Cucumis sativus
  Intron number 3 from transcript Cucsa.077520.1 (locus Cucs a.077520) derived from phytozome v7.0 (chr-ID scaffold0079 1; pos 676015 to 676913 reverse strand)
acaaggtttgcaactcctgttccattcttctttgtcaatgcgttacatatagtatagtttatccgtttttattagacttgctagcttttggccatttttctacacggtctcctgcttccactcttttgatatgagccatccaaccagattagtaatgctatatctattaattttttcataggtacttgtagagaaaaaggatttagttacagtttttctcataagttattccgaacacaatatttcacatgggagcaatttcggaacctagaactgaattgtactcattttttttctctacattctgctgttgtttccaggttgcaatttggaaagttaaaatttgtgctatgctatgtttttttattggtaggattcgacttaaacattaatttgacagactgtaaggcaatctgtagatgaataagtattgaggagctcctttgttttcttgacagtgtgacaaaacatagtggagctcctaaaaagcaattgttttttgtacttgagaagttgcacttttcaaattgtcacagatgaggctaaaatatgtggtgatgtaaattcgtcagactaactaaaatacgtgtaaaatatattatcgtttggtagcttttattcaagtgcttattgttagttgcacatgagatcataaggggatcttttctgacatttatattacccttttgccttgtcagtcttgaatgccgtctgttgattttctcatgtttgcttttatatcttgcctacttgattttgatgatttgtgttgaacttctgtactgatatcgactaaaattcttctatgtatttcatcccgagcaagcttgaatgattattcttttatggatttatcttttgcagttgatattgaataaggttctcttggttggctcaag

SEQ ID NO: 67299 - DNA, 908 bp, Cucumis sativus
  Intron number 1 from transcript Cucsa.077520.1 (locus Cucs a.077520) derived from phytozome v7.0 (chr-ID scaffold0079 1; pos 677562 to 678469 reverse strand)
cacgcccactgccggtcatttttcagatccccgaggttttgatttttcttctatcttttcattttgtttcgttcattatgttgtttaatatgtccacccacaaagaagtagagcaaaagatgtatggtttttattttactcttttgttgatttcttattcagtcaatgtgtaaccaatccaaatgaaaacataaaaacgacaatgtatgcttcgcatattaggaaaacagtacgaacttacttgaacagaactctagaattctagaggttgcacaactgtcttttgagttctaaagattaagaaaatagtaaattgaatcaataaataatgaatgacaaatgaaaagagcgtattattcttatccgaataactaaataaaatggaacagaaaagttcaataaacttataaagcacaaaagaaaactggccttcataatcaggtacaataaacttgttcaataagctgtcttgaaaatattttttctcttacaaaagaacagcaaaataccatggaaaaacagatagacacacacaaaaaggatccaccagaacaacgaatgggtaaacctggagtttgcttgagtgttgaaataattattgatgcatatgaactggtgtaggttggggcaaatagaaattggggcaaatagaaataaaggatctcctttatggtaaatagaagcattagttttttcaaaatgtgaaatcctccaaatttggacctatttggaatataatttttttttttaatttttaaaaacaggatttcaaatctcaacaaattcaaaattcttctcttccgtttcttttccatccaaacatgtcgatcaaattcaggggttcccaacatgtgtttatgtttttattttctttctgctgattaagaagtttggaatattgtggcagc

SEQ ID NO: 67300 - DNA, 962 bp, Cucumis sativus
  Intron number 1 from transcript Cucsa.117430.2 (locus Cucs a.117430.2) derived from phytozome v7.0 (chr-ID scaffold00 995; pos 1008209 to 1009170)
gtgctttttcgtgaacgggtggtgagtggcctgaagcatatcatgaagttgatttagtttaaagtcttagtttcaactttcttctccaagcacctatacgattgctacctgattaaatcaaattctaatggcatggggaagtcatccatgcaagtgaagacagcttgtttctcgtttttgtaaattgtaacatttatattgtttatattccaatgtagcagctggggtaacaacccttggtaaatatgatgatgaagttcaatttttagctgtcccctaattgtcatccgacactgtaatctgtgtgatggtttagagagaaggaaaagtacattttttgcaactgcgataactacaagaatagttaggatggttgtacatgtttttttacccatgattgtatcaaactcaaaccaagagttgcatcttagttattgtacaatttttggttacgctccaaccctttgtaagaggtacaagtattttcaaaacggaggtgtggagcaagattgaatgactaaagtataaaatgtgtttggtaggtagtatgagaaagaaaatttgagaaagggtttttttcttttttaaatatagacaaaattatttacaagttataatttttttaaatatatttttatgagtcagatagaagtctatcagcacttgtatcaactgtaatatttagctatgtttaatgtttatagatattttgattttgtccaaatttagctgttaaaaataattactatttcaatattgttttaaacaataagttccctaattctttcctcttctctccgataatagtcataagtggctatataaaaaggatgtaagctgatctgctctcatttactcgaaaatctatttgtctgaagctctgtgttgcggtcgtctttcctctctctctgctccctccctttgtagggtttttttttttttttcccttcttctttctttct

SEQ ID NO: 67301 - DNA, 803 bp, Cucumis sativus
  Intron number 1 from transcript Cucsa.043450.1 (locus Cucs a.043450) derived from phytozome v7.0 (chr-ID scaffold0054 2; pos 259925 to 260727 reverse strand)
accgtagcttgggggatcacgccgagtctgttcgggtttgtactcttaccttctcttctcttctcttctccttttcatttcttatttttttgattgcttaattttcacttttcattttgtgaattttctgtactctacatttcggattgtgttgctgatgtcattatttcggtagatcctgtttgtacgtttggtcgtattgtttgtttaccttttttatattgttttgctttcttggtcggatttattgtcttggaaatctccttgtgcgaggcagtgatgaggtttgaatgtcctgacatttggtggtatgtagaatttgtttgtcgcagatctctgatgtgcaaatggactgaatccagttttcttttttgtcgacgacttgtcagtgcttgggataggatttattaataacttcggtataaatcgtcttgtctatttatgcacctacgaccaaccaatcaaacgaggcattcatttacgtgcatttaagaaattgttagattgaagttgcatgttctgtaaaattttgaattcaatggtgccttcacttaatcctagataagtttgttgtattctattgtggtgacgaaattacttgaggaaccgccctccatgataaatgcttcaatctgtagatatcattggtggaccatggagtatttcaagttacaaaatttgaatcattcgttgatatatattggttctgaaaaagtttcgttttgggtttccttacattacatcaatgttttgatgtgattgagttttttatcatatgctttgtaattctttgcaggttgaat

SEQ ID NO: 67302 - DNA, 634 bp, Cucumis sativus
  Intron number 1 from transcript Cucsa.076350.2 (locus Cucs a.076350) derived from phytozome v7.0 (chr-ID scaffold0078 9; pos 726847 to 727480)
gcttctattgcccccttcgttctcttcttcgaacggtaacttttcgaccgtttcgaagcttcgtttttttttacctctgaaaatcgttttgagaaatataagttgaagttttaatcacacagtcatgcgattggttcgcgtattatattcattacttgtaatgactcttttgtccctcttttcacttcaatttttcaggagaggacagccaagaataacattcaaaattttcatacaaatatttatgttggctttgcttgggtgagtcgatttttgtttactccaatatattctcgtagagtttaatttattctcctgagattcttagaatctcgtacaaaataatatattaaaatttacatttcactctcagtcagtaatttaacatgatatcaaaaaccgctacaatattaattcgtcttcaattaatattgattttcacttattctacatactttaacaagtctacaagtaaggagaaagggtcaaataatataaataccaatagatgatttaatagtaaagactaaaatggttatcaaatagatcatgtcgagacaaaaattgtacttataagtaagtttttgtttttttcccgcttttcgcagcccggtggtcgatcagaatttctact

SEQ ID NO: 67303 - DNA, 553 bp, Cucumis sativus
  Intron number 1 from transcript Cucsa.006210.1 (locus Cucs a.006210) derived from phytozome v7.0 (chr-ID scaffold0006 7; pos 80474 to 81026)
ttcttctcactatctctaatctgcatttggctgaggtatatatatgttcttatcattttatttcttttactattttttccttttcaaatgtattttgaatgcataaaattgtaggccttaagttatttttttctattaagtaattctagatatatatataataataatttttttttttttaatttcaacagggtgctttaaacttacgcccttcaggtacttatcataattcttttcttttttcctttgcttttgttgatcaaaaggaataaccttgaataatgtttatatatgataatactattgttgaattagtttttttttttctcgaacaagaatgaaccactttgcatgtcttttggaagtaatactttaaagtgaagcatattcttttgaatagatatattattcatggatatattcttttgaaattattagtcttcacaaggactcaaatttaccaacatatataagtaatgtgaaaccgtttgaatgatgtgtggtgtcaaactcactcttttaagtactttgggagaacagattgcaagccgaa

SEQ ID NO: 67304 - DNA, 805 bp, Cucumis sativus
  Intron number 1 from transcript Cucsa.142250.1 (locus Cucs a.142250) derived from phytozome v7.0 (chr-ID scaffold0107 9; pos 530857 to 531661)
gtgggccttctttattttctctaatcgcctattgggttagttttgattcatcccttttcgttttttcttccctttgtgtttttggagcttttgcgatactgatttttttgatcaagttgtgtttctttaggaccctttttctgattttgatgatcgaaggttatttcggtgtgttttgcgatttttctatgtctatttatttactgcattggttgttttgattgtttcggtacggtgtttttggttgattttgtttttttttatttttttgcttcttgtccttgtgtagaagtttgactgatattcagaaggattttgttcttgtttcttttaatctctatgaatggtctgttttcactgtgattgaagggctctattagtgagatcgtcacaaatttgtgggttaggtgatttggattgtgattgttgggttttgttcaatattttcattgttctttatctgggttgtgggatagcagtgattggttgcttttgtacaatgtaggttggagatttgttcaaattatgatctgatctttgatgctaaaaagtgtgtgtgttttgctgcttggcaggcgaagatagaaacgtttgtgtgtcactgtatcatttattctttaagtgaggggtttgcttttgttaccttttggtacagtgagttttttgtgagttagttacaacaatggaagagatgcctaatgaaaatgaattcgaagacattgcgaaatatattggcaatcagattcctaatgttgcatctggtaatgcagatcctgaaggtttgtcatcaatatctgtgagttcg

SEQ ID NO: 67305 - DNA, 814 bp, Cucumis sativus
  Intron number 1 from transcript Cucsa.108170.2 (locus Cucs a.108170) derived from phytozome v7.0 (chr-ID scaffold0093 1; pos 367222 to 368035)
atcccaaagctcttgaaattgccttgctattatcggtatttcattatcttaattctctttcatatccacgaagtcattatcataatgtgtttgttgaacctgtggttttacaatgaatgtcagaagtttggttcatgtggtctacgtttggctgatttttctgtgtgaactattggaatcaaatcagtttgaataattgggaattaactatttgttcatttgttctgcaagaagtaagtagctcgtgattttttagttcgagtaattgggagattgaacataatttatgtctttttttggaatctgttactcataatgataatctacatcttgatagaagaggtttcaaagatgagagccaaatgtagatcttttcagcctctgggtttgatttctttatgtggttgtaaattaattttgattatagtttttgtggttgttctcaatttgaatttgttgattcttctgtcctccgcaatgcttgctggtcttctttcccaggagagcaaaactccaggacgagcttcggaatattgagaaacaggattttctttgtttccttctcaaattcttaatttttaatttctctacttgctgatttatgaatatgaacttgacatacattgcgtcttttcaatgctttttgtttcgattctatttgggttcttggaccttttttttagcattttttcttcttttactatggaatcttatatcactcaattattattatgatttttttaaactgctgctctgcgtatatctagttgtgaggatcacattggttaacaaggtaattttttttctaaacaga

SEQ ID NO: 67306 - DNA, 576 bp, Cucumis sativus
  Intron number 2 from transcript Cucsa.018060.1 (locus Cucs a.018060) derived from phytozome v7.0 (chr-ID scaffold0025 2; pos 346062 to 346637)
atcaatcgtgcaagtaagatattctgaccaagtttagcatttcatctgctctattttcacttattcatttgtacaacatgatccttaaatatggggattattttctttgtttgtattttcacttacgttgctagctagctgtaaaggagtgaatctctgtctgagtttgagttcttagcaggggaaagaatattatctcacaaagattctataaagactgagatactcgattattgaggaagtttgaattatgaagtatgcatctcattgttagttcagtgggttttgtgtttgtgaaattacaaacataagagttgtactataatactggagttagaaacattttgggctctttctggaatcttttttagtaataatttgttataatcttgcgattcttgaagttaaatgttaccaagttgttaatgatagtaaatattggatgaaacaaaaagatttctacttattatccctttctcttcttcttcctttacatctatctgtacaaccacatcttaactttgacatgtatttttcccagctggagtgcctatagagaatatattgtatcttggt

SEQ ID NO: 67307 - DNA, 810 bp, Cucumis sativus
  Intron number 1 from transcript Cucsa.126020.1 (locus Cucs a.126020) derived from phytozome v7.0 (chr-ID scaffold0101 7; pos 58714 to 59523 reverse strand)
aatgtattgatagttatatatatgtgtcaaaagctgcatttgttgacatacatatataaaacaataatataactaaatgatgaatcaacttttaggtaataagtttttttgacgaatttttttatgaatgatttaactgtgaatttctactgcattgaagaataaatattagaaatttaccaaataaggattaagtgggatattagaatgagcataactcaattgttcatgacaagtgttactgattattaaaagtaagaacttttttcctttaaaaaaaaaggatagcaatgaaatctgcctcttcaccagttgaaattcatactcaataaaatataattgtttagagataggtgactttgcaagaaagctaaacttcaaattatttaaacaaataaactatccatgagctgaaaataaagaaaaacaaacgtttaaaataaaaacaatggagcaacttcttcttctttcttacatttggattactatggaattcccacaatattaagaaaatcggttccacagtagacgtagcaacaatggcactacactatatatttatacattttccttcaattattggttccaaagattcggtatgattcttcgttgacgaaaatataaactcaaagttcaatagttaccaaaaaagtacatggattgatattcaagtcaaaatgaaaaatcacttgctttgatttgaaagaagccatgggagaacggatttgcaggtgcagtaaggtttcagcttttttaacttttttgacaaccatagctctgttttcaagaaaattatcagcaatcgataca

SEQ ID NO: 67308 - DNA, 371 bp, Cucumis sativus; identical to SEQ ID NO: 62654
  Intron number 1 from transcript Cucsa.096920.4 (locus Cucs a.096920) derived from phytozome v7.0 (chr-ID scaffold0091 9; pos 2375486 to 2375856 reverse strand)

SEQ ID NO: 67309 - DNA, 815 bp, Cucumis sativus
  Intron number 1 from transcript Cucsa.176420.1 (locus Cucs a.176420) derived from phytozome v7.0 (chr-ID scaffold0122 5; pos 684774 to 685588 reverse strand)
tatagattttggattatctatattcttcaagccaggttagaattttgattggaatgtagcatttacaatgtagcttgtgagcttgatgtatgataccaattcttgtagagttatgatttcaatttttcaaattggtctgccctcatcgttgtttaggattgcattagaacagtgttgagcagaaagcaatcacttcaagttgaaatacgtttttggcctatttcaagtttccgagggtttagagttgttagtatgtgttcaatttggatttttttggccccacttaatatcaaaagatctaaaaatgtggtctagctgtcctttgttaaaatcctggaatcgtgtttctggtcatggatgaatacaattttggagcttatccttcgacagataaggatattatattctcgaccacaatatggtagaaggttttacatttttggctaagagtgtcattagttccataccatgacatctcaaagttgtagaaatactttatacctgtttttcctgccgtcagatggagtgacgaggttatacattgtacttgctagttagtacttcaatgtaggttgaacttgacgctatgagtagagggaaaacagctctcgttaagaatttgtgaacaattttgatgtattttgaatctttcgtgttatattagatcaatatatcgagataattgtcttaatcaaattatactttcaatactattgccattttcttcgttcttgagacaacagatgtgatctggtctgactaatttttaccaaactataggagaaaagttctctgaaattgttggaagtccatat

SEQ ID NO: 67310 - DNA, 629 bp, Cucumis sativus
  Intron number 1 from transcript Cucsa.153050.1 (locus Cucs a.153050) derived from phytozome v7.0 (chr-ID scaffold0112 4; pos 291310 to 291938 reverse strand)
acgctactgtttcttacccttcaccaacaggttcacttctaacctgatttaacctcttcttcttcttcttcttcttaactctcatgttttacaactacaaggttgaagattatgagaacttcaggaatccgttgatagggattagacccagatagtctctccagctgtattagaatttgaaactattcttgtttgtttgtttgtgcctgcttgcctggttttgatttctacggcttcctggatattcacaaggcagaaaccccatgaatctaggctgccaaactaattgaaacagtgtattggcatataagatagtttctttatgtactatactcttagtttcttcacttaatatttagttattttcttacttggtttttctcattgttggttttgtgataaattaatccttcacagagatgtatattgtaataatccatcttcttttatggataacaccattgacgtttcatgtacagtgagtaggatacattacttagttgttagaatggttgatggtcctgagaatttctttttctatagaagatccactgccttttaatccttgacactgttgtttgactaatggatcaggaaaaagaaagaaggaagttaatatatctggtgat

SEQ ID NO: 67311 - DNA, 1005 bp, Cucumis sativus
  Intron number 2 from transcript Cucsa.143700.2 (locus Cucs a.143700) derived from phytozome v7.0 (chr-ID scaffold0108 0; pos 28418 to 29422)
ctcgtattgcgctacgagaacatttggcaggttgagttacacaagccacatggtcaatctgtagattatcttctgattcaggttcatccattaactttgaacaatgtcatgtcattagtgtactgttgtattttctcctcactattgagaaatatcattgattcatcccaagcaagtttcacctaaatttttcactttattcatggtattgttctctaattacggggattcaactactgactcatgtacgtgctcataggcctgatttccatcacagaacagtggacggatataaaatgataactgaaaataaaaatttagtgaaccactaaaatcatcatttatacctaagttcctgagagaaatatatagactgaacactttatgggacaaaggaattaagtgaatttattgataacttcgatgcaaaaaagaactgagaaacgatcaaggttttatcaaaagattgtaaaagggatagtggaagatagctgtagataaattccagtgcttcaaatgggtgaaagaagctataattttattaaaaaggtgtcttagttgataattttatcatacattttttctccaacttgataacttcaagactatgggtaggatttggatataatgagattttgagccatataaggttaatgttgtttagtaattgtaatctggcaggatatgttttctttgaacagagctaaaacatgtccctagatatgaattttaacaagctaagtataaacagaactaagcttgcaacttttctatatttctatacttcaggataagcttataaacgcaggtaatccgtgcaagtgaacatatgtttcataaaaacaaattatgctgtcttcatactgatgttgaaataagcaagtcaaagttcaatggcaaagaatttgagaatagcttaggttcttggcccatgcacattttatgttgtatatattctaactatgacatgtttgtactgttagttatttggtgctccacggattt

SEQ ID NO: 67312 - DNA, 574 bp, Cucumis sativus
  Intron number 1 from transcript Cucsa.129310.1 (locus Cucs a.129310) derived from phytozome v7.0 (chr-ID scaffold0102 8; pos 297205 to 297778 reverse strand)
gctgcggctatcgttgtgttgttgtggtttttcaggtatatgggtagtaatgggagaaatcgtagtggagattggccggaaaaaagtcggttcaagttcaacggcaaggggagagtggaaggctaaatttggagatgaatgaagtgaacggatggatgaggtaagtgcactttgcagaaaggcaatggctgttgaatgaatttgtagtaccttaagactgccttcaatgtttgtttgatcaataaaatgtaggttatgttctttcattggtaggcttagtccgttcatttgtctctttcaaaccaaattttgagtcactattactttaagttaatcttctttcgctgtgttgttgtggttaatgttctttcgttgtgttgttgtggtttgtcaaatgttcttaacccacatgaattttggtaccttatctaaatagattctaagctattagtatgctttagatcctagagttaaaattctgaactaatattcataaaaatttcatttcagttcacaacacaatgcatatcaaaataaaataccaattattattataggcgtcccattaaaacaa

SEQ ID NO: 67313 - DNA, 678 bp, Cucumis sativus; identical to SEQ ID NO: 67139
  Intron number 2 from transcript Cucsa.159880.2 (locus Cucs a.159880) derived from phytozome v7.0 (chr-ID scaffold0114 4; pos 224312 to 224989 reverse strand)

SEQ ID NO: 67314 - DNA, 453 bp, Cucumis sativus
  Intron number 3 from transcript Cucsa.058950.1 (locus Cucs a.058950) derived from phytozome v7.0 (chr-ID scaffold0061 4; pos 1060069 to 1060521 reverse strand)
tatcccatattcgtgaggtggattcaatacttcaggttgtttttttattttatcataatttatttttttccatcatttcaattagaatgcatacttaagtagtagcggatttaaagagtaatattagttaacagatgaactgggggtttgtttccctgcaatatcaactttccggtgactctaatctaagagagagaacagactttaacttgctaattattagtttgttttctaataattgtgtaaacttttcttcttctttttcaacatgcacattgttttctgttattattttgttctatcgtagattcaaacgtatcatgccaatttagtataacaatgtcatgaaagcactaagaataacctaggtgcttcttgcgttttccagtacccaattttgtgctgttgaagagtttcttattatgtttcaggtcgtgcgttgttttgaggaca

SEQ ID NO: 67315 - DNA, 796 bp, Cucumis sativus
  Intron number 3 from transcript Cucsa.117950.1 (locus Cucs a.117950) derived from phytozome v7.0 (chr-ID scaffold0099 7; pos 262742 to 263537)
taggagcaatttcttctcacaaatttgaaaatacggttagtatctcttgcttcagactcaagttgtggagtctgccagtttatggcttttgagaatgaatgctgaaattttcattttgagaatgtttataattaggaacgggatttttaattagtagattatatagttacctctatttttctatttgttgcggtagtttctgttttgaattatctaacacctaagtttaaagttcagagtttacataaataaaccaacgtcacatccaaattagataaatatcaaaggaatgcaggtatagttcttacctctgccaacggagtgtaactttcttttcaatggcttacccctagaaactgtacaattatgtgtgtttagcttaacacaattctttgttgggtgaatttatgagaatttttcaaagaagcatgtaagtgaagacaaaacactttgaaatgatttgtgttggtttgtggggatgttggggattccaaatcttggggcattacaaccggtatctttcaatcatttagatataatactgttaaagttacaaaatgatttgaaactcccattgcacttggaaaagctacaaaatgattatgctgttctgtaaaacaggccttgaaagcttaaagcttaagtgaactagtaggttcttgaactttaatattacctgctttttggtcttttgatctataagaaaaatattgaaatttgaaattgttgttactctctgactctactacctcgttcagcttattaactaattgaacttctgttgcagttgaagaaa

SEQ ID NO: 67316 - DNA, 939 bp, Cucumis sativus
  Intron number 3 from transcript Cucsa.085760.3 (locus Cucs a.085760) derived from phytozome v7.0 (chr-ID scaffold0087 0; pos 166044 to 166982)
ctggatttggacattttgccattgctactcaagatgtgggtgaagccaatttcttcatggtttttgttttcctgaaaattgagatgaagaatattaacatgaattgtttttttttgtgattttccaaggtctacaaaatggttgaaaatgtaagggccaagggtggtgagaatatgatcattagagaaccttttgagctgaaaggcagccctaattttttgctggcctacgtgaaagatcctaatggttatatctttgagctcattcaaagagtccaaactcagccactctgtcatttaatgcttcgtgttgctgatttacaacgctctattaacttctaccaaaaggtaaagtcacaaattttcaaaaagtttcgaacaatttagccctcaaactttagtacggaagaatttagtcacttttaacattgggtaacaactttagtctttatagtttctaactaagtcgttttcgtgtaagctaagagactaaaattgatttttaaggaaaaaatggtaaaaaagttgactgttgttagaagtttgttaaatttgaacgatgatgggagtttcccacaatgaacaaagaaaacataaaatagaattcaccagaaaactttttaccatcatacagagagatatctttctactgtgctgctaacatcttatttaacgttcatttggtttttcatttttggattgttaaaaattaagctcacaaaaactaagtgaaatcttaaaaactaaaactaatagtctttacaaacttgtttttgttatttgaatttagttgagaattcaaatgattaaaatgaaaaagatagaaattgtgtaaaaaaagtagacacgaaacgacaattgtaaaagaaaattaatggttatggaacgagaccttccaaactttttatcctaaattagaatctgtttccacatacaggca

SEQ ID NO: 67317 - DNA, 923 bp, Cucumis sativus
  Intron number 1 from transcript Cucsa.090250.1 (locus Cucs a.090250) derived from phytozome v7.0 (chr-ID scaffold0089 4; pos 1602826 to 1603748 reverse strand)
ctgagctcagtttcgagatcacctttcgccgaattgtaagtggctctggcttaatcacttgttttgaggttacgtcattatgtgttggttttatatcttttagaaatttgtttgattgattgacaattacccatttcttttaattttatcaatttttggattggagcctgatttgatgcgggctgaacattctctcttctattcgttatagtcttttcagtcagtggcttcatgctctgctctgtctatttgtagtttagagtatatttttagagttcttgagaacttctgttttgaatctcgttctcattttaatgctaatttgggacaaattgggtttgttgctgcctcgcttttctatagctccctaatcttgctgattactctgtaatctgttccttttgcagtttttattatctgtaccttttaccataattatatagtatctcctttaatcagaagaaaacgtacatgttgttttctagtttacgttgtatacctttttctacatagttgaggaagtcatggtctttctggatgttctactcctgtcttatttttaactatcaatttttgttgccatatttatactttctttttgtgtttatgtttgttgtttatagccaagaaaaatcaatattacattttcatattacttcttttctaaatacatttttgaatgtcggattgccatgaatatgtttcttaaagtttctaactgcttatcacttgtcttgtatttcatgcaaataaggttatttttttaacttcggttaatttaggtggctcgtgattctttattgcgcttggcatgttattttctcgaagtctgaatatcaaattttctccaaaaaccaaacttaaagactatgggattacctatcgcagggtgctggcttgcaaaatcttgggaacacctgttt

SEQ ID NO: 67318 - DNA, 874 bp, Cucumis sativus
  Intron number 1 from transcript Cucsa.170050.1 (locus Cucs a.170050) derived from phytozome v7.0 (chr-ID scaffold0117 4; pos 320690 to 321563 reverse strand)
cagatccgtttattgcgatcagtgccgtgtcgtgggtgagtcgcacttttcttcccttgccggcgattctttttttttctccttcttcttctgtggggcccttgatttgatgggtcttcaggatcacccgttggatgtgttacacgtggctgaatgctgtagggaattaattggatattattatgttatgttaatgtttgagtgacagctaattcgaaactttaggagtacggtttgtcgtagtgggtgatgaatgaaaaatgaaagatgaaaaatgatcattatcatcatactttctttagctttttttttttcttttcttttttattaactattaatttaatttaatcgatgcatagactaaatgagtttgaattactatattataaagtgtatgtaagggggaagtctgactatttatttatttatgtatttctttttgcatagtgggtgggggtggagtggagtggagtggaggtatctttttcttttaacagagagaagatgaaaaataaaaagaaaagcgaagcattttcttggaaatttaggattgtttgtttgtggttgccatgtcccacagctcggaaatgctgacaaaatacgtagctgcgtgatcttcttttcttctgaatattaaattttttcattcatctttctcttcttcccattttgtttatctttttaactttttgaatatcaaattcatgtgatttttcttttttaatttttaacttttgggttatcatacccttatggattactactcttcaagaacacccaagagggtgttttgtttgatggttgatttaaattgtttgaaattgtatgccaatgaataggctggagtgcacatcctgtgtgcgcgaaacgctac

SEQ ID NO: 67319 - DNA, 793 bp, Cucumis sativus
  Intron number 6 from transcript Cucsa.057930.1 (locus Cucs a.057930) derived from phytozome v7.0 (chr-ID scaffold0061 4; pos 244868 to 245660)
caggcgcttggaaatttgccccagatacagagattgtaaggcctttatattctaattatttttcggatgattttcttttcttgcttaattcgcggatttgattttttattttgatggttgtgtttatatgattccctaaactagtgttgaatctgcaaaatcatacagtaaatactactaactaatgacattaattttgcatgagaagcctttactaactactaattaggcatgattatagtagaaagatagtagaagtggacatgacagataatagagtgactaggacttatctagaattgatacattcttttaaaaggatagtatgttgttgcatgtgttacttttatgtcatatcaaattaaaatgacaaatgttatatctaatagtcatggtcatcatttaatttacttgttaatggacggattgcatcaaatcacaatccaaacttctagatgtaattgaagctttttaaaattcaagatctatataataaacaatttataatttaacattttcttttttccttttctcgtcgttgtggagagagccagtaatcaatcatgatttttagactgactacttgagtagattatgtgcatttattcataagttttttgctccgtagacatcttacatcaaacaacttttcgggagagttgccaatgtcactgggaaagctgaccacattgaaggaattgtaagtcttataattttttcacaagctcatttgttttgtaagctgcttgatgccacaaattataaatgaacacttgagccttacccttcgtca

SEQ ID NO: 67320 - DNA, 536 bp, Cucumis sativus
  Intron number 1 from transcript Cucsa.197120.6 (locus Cucs a.197120) derived from phytozome v7.0 (chr-ID scaffold0135 7; pos 625646 to 626181)
attttcagaacattagttcgattcttctgaatcttgtaagttttgcgctgcttagctgtttttagttcttagaatttcttgattcatcaccactgtgtattgattgctgccagaaacttttattttatttccattctcccggttttcctctttattttgttagaatctgctgtttggaaagttaatttgtattactttgtggacgaatctgaccgatcttctgatcgcattatcttctaattttgtcatgggaataaagcaaccaaccattcctttgttcacctcttttacgcaaatagtaatgttgggcttgttgctttccttctttttcacacagaattggaatccggtttaggcacatcaatctagtagtttattgcactttacagattaattagtttcaatcttttcttcttccacttttccgtggattcttgttgtattattttatttttatttagcatccatttgatttttaatcttttcattgatgtaatgcagctgaagctatacttcttggtttccaacattatctg

SEQ ID NO: 67321 - DNA, 869 bp, Cucumis sativus
  Intron number 1 from transcript Cucsa.023990.1 (locus Cucs a.023990) derived from phytozome v7.0 (chr-ID scaffold0033 0; pos 23276 to 24144 reverse strand)
gctatccgtttccctgctcaggttagcctttttttttgttttgggctttggttttagttttggttttttttccatctctctgcttaactgactgtgaaattttgtgggttgtttcgattggtttgaattttgacctgtattatctataatctgtgggtaggatacttgatgtaatgtgggttttgtttgtgtgttgggtgtcttcagttttcttttcatgttgcctcttgagaggtggattggttttccatgttcgggtttggattgagaaagctgagttgagtgttgtcttttgagtaatgattgaggtagaaagattgttgtatgactaaaacggagttgatggtgtatgatgattaagaaagaaggaaaaaggagaattttttttatggatattgaactagggctaaggtaaataattttgtatgcttaataaaatgcgttgcttttttgctctgggggaggaagccttccaaactttcaatatatatgaattttcaattaaagaaattcaggccaaatgagaggaactacttgttgaccgatccattatgcctacatggaatttaatattctaaaaatttctttaacactcaaatgttgtggggttgtaccgtggggtcttaaggtggtctaaacactcactgtcgcagatattaaaaaaattactgactgttattatcctttttttttctaagttctatcaaggatttaggaaatcaatgtaatgaaatattgttggttgaggacttttgcatatccattttccttcagctcgaattaaatgttttcttttttaagaatggtattatatgctgaattcattgttggtaggcggctggtgcggttgctggtgccctggcaatcaa

SEQ ID NO: 67322 - DNA, 705 bp, Cucumis sativus
  Intron number 1 from transcript Cucsa.074390.2 (locus Cucs a.074390) derived from phytozome v7.0 (chr-ID scaffold0078 5; pos 263393 to 264097)
gtatcttgaatctcccccaactaattcctttccaggtatacaagctgtctcttgctttccactccttccttaatcctctatcttttctctgcatctgattcccttattttgattctcaccctttttttcttccttgttttggtcgagttcttttgctttcacatcacacgcaaatggggtcttaccaaaatttgtattttttattcgtaattttggggttgtctgttcttgtaacgtttataattgctggaaattgaagtttctgatcatctctttctaagcgatggaggaatttctctttcatgttgtgtctcgttcagcggacagagttaaagggaagtatgtccacctcctaaatggttctaaaattatagaaggagaaaatgttgtgtcgtaatttgccaaagttagacaaaggattttcttgctactcaatattgaccactataaagtttgttgattgattccatttgcgttgtctatggtaaaggtcaaaacatcgacccttttgtcgtctggaaaagtcaacggtcttttaatgagtacactaggtggtgcagcggaatacatttctacttggaattttcttgtttgaaatacttttcaaatttgagttgtaaggcatctggtgttttaatgataagtgctttgagtactatattaataccatgtgaaagatctcttctctgcaacaggcttttagct

SEQ ID NO: 67323 - DNA, 332 bp, Cucumis sativus
  Intron number 1 from transcript Cucsa.105370.1 (locus Cucs a.105370) derived from phytozome v7.0 (chr-ID scaffold0092 9; pos 85189 to 85520)
tgggcatgtttattttcatgttatatgaaaataattgccccgccatctctggaagaaaccgctgccttctttaccctgagctcggccgattctccttccaaccgtttcatgagaatccccctcctcggcccttccatcaccatgtaagaataatattattcgtttgtatggaacattaggatatgggttttgtgaatgggggatggaattgattgacccatgaagagaaaaaaatgaatcagggaggaaaaaaacatagagggaattttgttatttttgtgatggttgctggtttgatttgttttttctttggttctgcagtttgaaaagat

SEQ ID NO: 67324 - DNA, 515 bp, Cucumis sativus
  Intron number 2 from transcript Cucsa.105370.1 (locus Cucs a.105370) derived from phytozome v7.0 (chr-ID scaffold0092 9; pos 85639 to 86153)
cataggaattcgcctcgaacaagaattcggattttgtaagtactctcaaacacatataagacgtgtttgaaatgagttttcgaatgtttaaaaacacttttagtcgttctagacaaactcgtaatctattttgtattggtttatcattgtttcattgtgtcttcgctcttagcattcattttccacctagaagagaagagattttgcccgtttttcttactttttaacatgaatttgattttgttttcttctagaatttctcagctcactcttggttatgtaacaaaacagtacaaaaatcttaaaatggaaaataaaaagtgttaaaaaagtcatcagttatacttttagaaagagttaaaataactcatataatgttaaaaaattgttcgaactgaacccacagttgtatcaaagaaaagctgaacccatttgggattttgttttttgttttaatgtgctgagacatttgggatgatttgtttatatttttggtgtttggcagtgagaatagg

SEQ ID NO: 67325 - DNA, 833 bp, Cucumis sativus
  Intron number 2 from transcript Cucsa.196850.1 (locus Cucs a.196850) derived from phytozome v7.0 (chr-ID scaffold0135 7; pos 390575 to 391407 reverse strand)
gcataaccatctcaggcctgacattaaggtatttcaactcaaactttatctttggagatctgaaattttcaaaaggtgatatatttggtttctgatatacattgaagtgaagttctatttgagaatctgaatttagattataacaaggttttaagtttgatgacatgtttggtgttcattattggttcaacttatgaagtacagaattgtttctattcagtaatgtatgtagtaaagtaggttgctagcttcttcttttcttctttacaggtgataggataagtattgtattagttgagctatactgttttggggaatgacagcaatcaaaataatgaactttgctctcttttttcttcttaatattatcaggcaccgtccaataatcatttcgtttgtgttttcctgttgtgaaaaccaaacttacaagtgataacttatggtgttctcgctttactacctacttttaaacgtattttcaaaagcaagttacattttttaacattaaaacaagtcttcgtgattttgtttttgtagtcttatttagagttcaatcttattttttaacaacacgaaaaacttcctaagtgacagccaacataaaaacaatgttatcaaacgagatcatagatttctaaagtttgactagatttgaccattaacacctaatgtaacagtccaaatcgcaaggtaaacatacatcgtaactagttgatttatacgtaacaacttaaccaattgaattgtagttatgtttggttaggaaatagaatacgacatttctagtctgtgaaattaaccaagattgattgaaaacaaatacagaaagatac

SEQ ID NO: 67326 - DNA, 1003 bp, Cucumis sativus
  Intron number 1 from transcript Cucsa.143430.1 (locus Cucs a.143430) derived from phytozome v7.0 (chr-ID scaffold0107 9; pos 1775299 to 1776301)
cttcccgccctctgcttgttcgagccgtttccacggtacaacccatgtcccccccttttcttctctgttttccattcctgctctttctactgattttggcgtttttactgctctggatctttgtatttgttctaattgcatgtgggtttgttttggtttaatctattttttgttttccttctctaactttgacgctgttctgttttagattctaataaatgcagatacgattttgtttgttttatactttctttttggacggttcgacccagaagggttatttcagttttctcttgtgtttgattaactcaattcaaaagaatttatgttgggatgttttctcttttaccgaatgtgggttcccctgaattttttttagttgggaaagtgtttgtgttgtaagttaagttcatcaccaattgcagcagggtgtcgaaagatttctattgcgcttcatttataatcgaatatattctgctttctattttattggttactaaaagtattttttggatgggttctcttttttttttttactttctgctctactgtgggaacacgttggtggattatcttaaaaaataagctatatgtttctttcattgattgcatttgtctgtatttttaaccattccacggaataaagcatgtttgagagatttttaaaatcacttttatcctgtttaaaattactttgatctcaaaatcagttcaatggttaattttacacaacatattttttacttttaaaattaattttgaatgattagaaatattttgagtgattttaataatgacaaaaatgattttaaccactttagaagcactccaaaacatgctcgaatgctgtcagaaaaattctttttgattcatgtatttttgctatctagagatatgttttggattagttaggtgaatttttactgagctaggttcttattctgtaaaatttatggcttaatttgcagcctgcaaagccaggggttgctgctgagccgaagcg

SEQ ID NO: 67327 - DNA, 588 bp, Cucumis sativus
  Intron number 2 from transcript Cucsa.075570.1 (locus Cucs a.075570) derived from phytozome v7.0 (chr-ID scaffold0078 9; pos 225746 to 226333)
ggagggtacatatgtcagttctgaaagtcctgaattcttttacatatatattttgccacttgtttctctagattttctttatgttcctctatttcttaatgttctaagtggatttgatttgagtgcgaaactatcatgtataaaattgttagatgttgtctgtctatgtgaagatgaatctccttagtttgttttggtacatcagtattccatctgagaaacaacgcataaacatcattgcttggcatctagtggtcaatgtatgtgagagaggtaaaaagggtaaagagaaatttaactgttagttaaggggagttgtgccctgcttgtatggggaggttgcaattggagaaaatttgctatcattttagcttaaaaaaaaactgggggtggtgtggacttaaaccaagttttggttattttctacattgaatgacactcatatacctaactacttacatttagcttagttgtgtacttactgtgcaacatctaccctttcactatgctatctgctactgaataattcatttatgttttctgatattttcagcatcccaatctgcgaagaagattattgaaataaat

SEQ ID NO: 67328 - DNA, 992 bp, Cucumis sativus
  Intron number 3 from transcript Cucsa.075570.1 (locus Cucs a.075570) derived from phytozome v7.0 (chr-ID scaffold0078 9; pos 226371 to 227362)
attgccagttttggcacagaaatcttggaattaaggtgatctatggactcctttagcatcaaagggttatgaattgttatacacctattttatcacagctttcacaacttgaacccgactatttccgtgacaatgagatgcacatgagtttgtgtttgtgtactgtttgctcagtcagaatcccttaggataggaatggaatgaaagttgaaattcccatagaaagtctatcaagttggttattgattgaaataacacatatttagacatttccatgccttccttttttggcagaatcattttgttggtaaggggagaagttagcgtttggattcctattgattccagcctttcttttctctcagcaccaattagaaaggtcttgtgaacgttattttttctttttaattggaagaaagggaagattttgggcatttaactctatggtagttaaccagacagactcaggagatatccttttggactctgcaaactaattggtacccattccgttttgattttaccattccaagaatctcactggtcttccttctgaaaaacattagtcattgaaagcctgaaggttggttaatggttggtgtcgaggttcatttttaatgattggtgacctgggtatttgagtgcattcacttgttttccatggtgaatttgtggctaataatcagattggaacattgaacaaatcttcctagcttgtgtattcacgtgttttccctggtgaattccagagccatgagatcttgaatgtttgaattttaatagttcatgagaacgtcttttctctagatatgatagattattgcattactctaatgtttggattaacatgacatgactagtttgagtgatggtgacgttgacattcatgtagtgtatcttttctattataggctgttaaacttgatgtcataaatttacattttacatgatttgctgatggaaatcgtttgatacgatacagtgtcgacgac

SEQ ID NO: 67329 - DNA, 642 bp, Cucumis sativus
  Intron number 3 from transcript Cucsa.161300.1 (locus Cucs a.161300) derived from phytozome v7.0 (chr-ID scaffold0114 4; pos 1184912 to 1185553 reverse strand)
ccaggttcgtttagtctacttatacatatttccttattgtataaattacaaatttaattcttatgaattgaaaacggttagaatttaatccatatgatttagtaaaagctttataaatagtctccacactataaactaaattttaactttttataaaccatgaagaccaaacgtaaaacttcaccatcattttaggtgaaaaactcatacctacagatgtagtttaatagtccatttttacaatcaaaatcggattgtttgtgtaaggggtccatcgagttcttttttcccccttttagtatgtttatgcatgcatgcagagaaaaaaaaaagtggatgtgtggtatatatacatgccaaagttaataggggggcaatgaatttccaaagccggaattattgaatttgagaagaaaaaacaaaacaaacatttacacagccggaattgttgaattcttttgagagaaccaaccaataactattcataataatctggtttcataaagccttttgactaattttgatttagactcctcaaatcatgtcaaacaacacgtaaattcatggatgttttaggagaaattagatgaataattaggaaatggaaattttgtagagttggaaggttcagaataccactgg

SEQ ID NO: 67330 - DNA, 425 bp, Cucumis sativus
  Intron number 1 from transcript Cucsa.153530.1 (locus Cucs a.153530) derived from phytozome v7.0 (chr-ID scaffold0112 4; pos 584296 to 584720 reverse strand)
gtctttgtccccaagcccaaatccaaaatcccttggtatggtgttaattaggtttaatatcattattaaataccatgattggatgtttatatgaggcacaaacatatagaaactgatgtgagaaatagatgataccttattttctaaaaacagatatgaatatatatatttttattaaaaaattcaagatatgagaaaccctaatgcatttcttcacaatctctctatcttctctatgaatcactctctaaaactattggttttcatggatcaaagtatgctattctaactcatgttattgtgaaaattatctagttcaaaatgttgtctcttattattttatataatgaagctttctatggtgtataatcatgaagttaaaatttacaggtatttcaaacacttaaccaacccacctgctagac

SEQ ID NO: 67331 - DNA, 407 bp, Cucumis sativus
  Intron number 4 from transcript Cucsa.178490.1 (locus Cucs a.178490) derived from phytozome v7.0 (chr-ID scaffold0122 7; pos 728264 to 728670)
taataattgtcaaaaggtttttactcaaatcaacctccatttacaacttattaatttaccatatgacttttttacttgcctgcacaattctcaatccaatgtatttttgtttagcattgaaaagaaatgttcttttttcaatacgttgaataatttacttgcattcaagaaattcaaataaactgtgtctgacttctgaaagttcttaatttagcttgaaacatctatctgtcaacagtatattgagttcacagaatagtgggaaggaggctagtagttgaaagttaaggatgtatggtgtgattcttcgaatcgaactgatctgctagacatttgctgctcttgctatcaacaccttttttttgagaatgtttgattgagtagaatgttcaacaggtggttgccag

SEQ ID NO: 67332 - DNA, 684 bp, Cucumis sativus
  Intron number 1 from transcript Cucsa.075280.1 (locus Cucs a.075280) derived from phytozome v7.0 (chr-ID scaffold0078 9; pos 30032 to 30715 reverse strand)
caaaccttttggggaagttcatttgaaggtgggttctgtactgttttcgttttggaaattataattcatattctgtatgtaggaatagaataggatacatattttcttctttgagtctggatggatcacttttagtttttctttttcgtggttcttttgcttgattggacatccgtgacggtggcgtcatgttgggtttgatgttgcatcttaaccaagaaagtgcatgtgtccatctacgcgtttcaattagcgaattataataacatatgagcttcgtctgcatgtttcaattttgtggggcagcaggctcgaaacgcttatttttcgcactacctagaaaaacgtctctgaaaaatttctctctgttgttcataaagtaaaagttcaagctgtacccagatttcattccaccttgaggaacatgagaaatgaactcttacaataggttgtgacttcacttggcttcccttctgggaaatctttatttgctatgtagtttctcctgttgaaggttaatggtctcactttgattcagtgttcatctgggaaggaaatatagagttccctgtatgaactctggcttctgttcattatttctctctccctcaacttaccttggctattcgccactcttaacatattctattttgcaggtttcttcagttcgtgctagtaaatcag

SEQ ID NO: 67333 - DNA, 588 bp, Cucumis sativus
  Intron number 1 from transcript Cucsa.130050.1 (locus Cucs a.130050) derived from phytozome v7.0 (chr-ID scaffold0102 9; pos 51368 to 51955 reverse strand)
ctgtcgaaagacttgggggtcaagaaagtaatttccataacttcttcttcttctttctgacctctggggtcgaaacttatattaattatcgtcgagttgtgctccttttagttttccttttcccacctctttgcttttgtctcctgattttatgaattattggtttaataattggaaggggaggattgaattgtttgaaatagtaattcatgctttttgtctatattgagattttctcgaatgatttaacctagtaccctttaaatttaatctacctttggggtgagggtttttttttttttttttgagaaggttattaatgtgtttttgatcgagtggctttaagggtggtcgtaatttaatctagtattagagtatggataattattgggttttttttggggagatccttgagttaatttgttgatagggttatgtagatttttatcaaaatctctttttcttggagtgaattgttggaattttgactatatctattagatagattgttagtgattttctatcatgttttatattttgtttttagaaaatcttatggtttaatgatttttgtctgtgtgtatatag

SEQ ID NO: 67334 - DNA, 256 bp, Cucumis sativus
  Intron number 1 from transcript Cucsa.158530.1 (locus Cucs a.158530) derived from phytozome v7.0 (chr-ID scaffold0114 2; pos 661403 to 661658 reverse strand)
ccttcaatcttagccatctcttatccggggtgtcttctttgctctctatttattaattgtatgatttctcaacgttcaagtaagtatttgatttgttaggctatgaaagaaggaaatgttggaaggaaaatcctcattttcgtttttggaacagatttagaaagaaaaaaaatcataaagctactaataataattttcttttatttgtttgtattatctagtggtagcaaaccaatcatattcacaatattaatca

SEQ ID NO: 67335 - DNA, 622 bp, Cucumis sativus
  Intron number 1 from transcript Cucsa.090300.1 (locus Cucs a.090300) derived from phytozome v7.0 (chr-ID scaffold0089 4; pos 1632936 to 1633557 reverse strand)
gcttcaggacgtttgcgtcgcggatctcgcttccggtacctacttacttctcctctccctctccctctcccccccatttactagttcaagatgtatatgaacctctctttctctatttctatattcattcactcaattttctaaaatggttgcataatcattggtttctaagttttgggtttatgggtttttgttttttcgtagttcagagtaaagggtatagggtttttgttcagacaagacatttcactatctctattttggacttgtgcataataggaagatttggttttgttttctttcaaaatgtctctatgttgttgagttagaattgagctttgatttgctaatggagatggtgtgtaaacatagtttcacactgactagaaggaaaggaggaactaacaagaaaagtatcaagatatcgtcctatatagagatggaatcagattgattcaaagaatttccaatgttctaatccatgtttaagctaaaactagacaccattataggctttaatttcgtaccataccagaattgccaaacagttaatattttgcagatactaacaattgaatcaaaaacaggaatcaaagtaaacggattcacctgcaaatcgaat

SEQ ID NO: 67336 - DNA, 658 bp, Cucumis sativus
  Intron number 2 from transcript Cucsa.137320.1 (locus Cucs a.137320) derived from phytozome v7.0 (chr-ID scaffold0105 3; pos 19532 to 20189 reverse strand)
gacccaattaccaaaggtagatttgattgtatttcactcgtgtgcatgatagtagttagcctcattctttttttcattttgtttaatcattcttctttcttaatggtaaacctagagttcaacttttgccttgaaaagcattccactgtataactctgagcaaagccaagaaattgtcggctacttccacataatgcactgttctatcatgagtattgatattctcatgggggcaaactcccaataaaagaaagagaacctcacttttttgagattcttagaatgcttgattaccttatgaaggctggggaagggttcaacaagtttccttaattggcaatatccttaaacaaggaagaaattggttgatagaattcctataacatcaagctcaactctgcattttttaaataatagaataaacaatttttattgagaaaaaaaatgatagaatctcatttctgcaatcttttgaattatcttcctttatgaatattatttatctatttttatattttattaatcatgcactaaaatatgatgggaggaatgcctcaacctttgcaccatgatttgtttcatcaactacccaccagatttttattttatgcaactggagggaaacgattcatcaatgatgttatgccatttcaggatc

SEQ ID NO: 67337 - DNA, 876 bp, Cucumis sativus
  Intron number 2 from transcript Cucsa.130600.1 (locus Cucs a.130600) derived from phytozome v7.0 (chr-ID scaffold0102 9; pos 677278 to 678153 reverse strand)
ggactttgctttagtaaggtaagagtcggatagcactgttaatctagtgatgttagttgagttgtgtttggtggtttgtgatgttcgtgttgtgttggtatctgtacatggaacttcttttaagcaattgtgaagccttgacagagtgtgaatcacgagtaatatggaccaggctgaagttgtgaatttgacattgatgaaagatgattaagtgagaatgattagctgtcgactatgaatgaacaagctaaagaatttggctagggcttggctttgtggggatcagaagaggactagatatagttgcttgtccttttaattggaatatttggtttgtaaattagatttgttaattttcaatctattcaaaacagtatttgtattgggtaataatattctgaaggttttttttggttgctgtaaaaataaagccgttacttttattaacacctcaattatgtatggatattggtgaaggtggtgctttatcatcattagcatgacaccaaaggttatcatttattgaatatctggcaggaaatgtataactgcagaaaatgctatttatatctgattcaattcttgacttgatgacttcagaaatgcctccaaatcttttttattctacctgagtttaatcagcttatcagcatctgctctttttttgccccctctcctttttatgtaattttttttatgatcctataatgttgaaaaacttggtgataattgtattaactattatataaatatttgaaggggaagaaaaaaattactcttttctgacattttgggttgttgcttgttttatttgatcattaacactcatctaactgggatgtttttatgttccctgtttctaggccgaaaccaaag

SEQ ID NO: 67338 - DNA, 602 bp, Cucumis sativus
  Intron number 1 from transcript Cucsa.130600.1 (locus Cucs a.130600) derived from phytozome v7.0 (chr-ID scaffold0102 9; pos 678173 to 678774 reverse strand)
attgactcgaggctccaattcgggggttcttgagggtaattttctcattttttgatgggtttcttctctactcggtttttaattatacttcactagtttgttgacgaatagtattcagatgggttgctgggtcttctttgattctatattgttgtctgtctattgtgggatgtcgaattggggggaagttgagaagccttttacccatgattttattctgcttctttctgctgtagttccccttttttttctttacttagggaatcgtatttccttgctttactattggtctaaagtaagtccgaatgatacggtcatcgatcccttatctatttgttagttgatttacgaaccttgaaattgacaggagtgaggtctttgcggtttgttagctttctaactttttgaggttattatgtcactgaaaaaagtagagctggtcttttttttatgtctctttcacagaatttataacatatctgtgaatatgaaatatctacaatagaaaaggagttaaatgccccatgtttttcttcccttgattacttaatttttcccttttttcaggctaacttgtgatacgtagaacacttcaaaaatct

SEQ ID NO: 67339 - DNA, 802 bp, Cucumis sativus
  Intron number 1 from transcript Cucsa.130030.1 (locus Cucs a.130030) derived from phytozome v7.0 (chr-ID scaffold0102 9; pos 32569 to 33370 reverse strand)
cgcggccgtctccgcagccgctactgccaattccggtttcccttttgaacaaattgccagcggcgagtataacaacatgaataatcttctctaccctcaaaacgacgtggttaaaatggaagagcctaatttcttgcctcagcttgatcccaataataataataatgtttattttccttctgatcatcaagatcaattcatctcctcttcttatgatccttacatcaacttctagtttttttttcttttttttttttgggttttgtgatctgtacttaattatgttaattactatgtattttgcaaaaatttagagtggggttaagactgttcattataattataatcgttaatcactacaaatttggagtctaatctaagaccttctgtgtaagaaaatttcaccaatatcccaactttttctttttgttctttatttgggtgtttacaattactatcatcgatgtttgagatatagtaattagtgtctttatttactaagctatagctgggatgattgacggtatactttgttttagtgtataggtgtgtgatattgtggtagtgcgagaagcagaaacccaatttgaagttgttcaagaacagtggtgttgagtctctcaatgctcggaaggacttatctttgatcaaaattaaagactttgggcgcaacttgcatttaaagactcggtggattaatggtaatgttaatttgtgaaatagtgaagatttgttttgaatggttgagatttcatagtaccaatttagttataagtttttttcttttcttttttgaagaaag

SEQ ID NO: 67340 - DNA, 1027 bp, Cucumis sativus
  Intron number 1 from transcript Cucsa.135220.4 (locus Cucs a.135220) derived from phytozome v7.0 (chr-ID scaffold0104 4; pos 84667 to 85693 reverse strand)
gctccaatcaccttttctctggtagtatttcactctttctcccttgctctcttcacttttctttcctcccaccccctttttccttttttcttttcaaatttcaattaatctttgttttccatgttctgttttgtttatgaatttttgattactcgatgaccaattggggagtttgaatttatttgttttctgttctgaggctgaattttactcgatatgtttagattttgagctgtgttcttgtcatattcaattggggtttggttttttgtttgttttgtattacgtgattgtgttccttgagttattggatgagcaagtcgatgtttgacttagattccagtatggtggtattaattagttttagttgtcggcaggttttgatgttcagggactcgagtcaagcatgagtctttaatctggatgcttagtcaactagttagttgctctttttttaacgacctacttttgccctcttcttctccttagcttctgaccttcgcttgttggttatgaagagaatttgttcatttgagtttgtttgttgtttgctatcaggaaagtagtttatattcattctagtggatgtttatgttaatagtaggagtaggaccattttcttttttagacctttatttgaaagtatcatcattggagtcagattcttgattgcacgaagtcagatatcatagtctgtaattgagttgctcggtaaccttgttgcttcctagttactgtattctggaattggaatggcaagtgggtgtgtgttctatttctgcttgttttgaatagagtacgtttgaatacaacttctaattttttttttcttttgttctctttttgggccttgctttggattcagaagttctctagattcgctgaatcttgacttcacttttgaggcattgagtcaagcaatatttgattgatctgtttcttgagccaagtgaaaacatgtacaatgaaggagccaaccctgagtttatttttgatcagggtgtttattatcctactgccgccaatt

SEQ ID NO: 67341 - DNA, 469 bp, Cucumis sativus
  Intron number 3 from transcript Cucsa.100090.1 (locus Cucs a.100090) derived from phytozome v7.0 (chr-ID scaffold0092 6; pos 697380 to 697848 reverse strand)
aagtagctgttcaattagccagtaaatttgcttctctcttctattgttttctttttctttcaaagagtattaattttactctcttcctattaaattaacaatactcctaattttaaaaaataataaataatttctacttggataactattttttaaaaaaataatttatattttcccatcaattactaaaagataacattttcaaaggacaactttgaattctcagtccaattattctatatatatatataaaaaaaaactatttcttcagttttaaaattatatatattaccttttaaatttacttataatatcgcaaggtttgcatataaagtaggttttttttaattagtgctaatttttcaaattttaataaagtaaactactaaagttaagtgatgatatgatatattttacatcctgaaaaaaatcagagcatccgaaagtggtatcggtttttctaaataga

SEQ ID NO: 67342 - DNA, 930 bp, Cucumis sativus
  Intron number 1 from transcript Cucsa.079400.1 (locus Cucs a.079400) derived from phytozome v7.0 (chr-ID scaffold0079 3; pos 2153455 to 2154384)
ctcttctcgctgattcctcatttcttctctctcaggtatactctctctatctctctttttctctatctcttttcttctgcttgatcctttgtggagcttcagatctgatgattttgttgctctttaatggatgcctgtctctctttctttcttctcccacttccaatttcactctcatcttctcacgttttgtcttttctaattatttctccaaattgtttttctctacctcttttctttctgcttttcactccttgtttttcctgatcctcttcttgatctgctattcgcttccgtgttttcgctagctcggtgcaggatctttttttctcttcggttttgtctttttttctttttttttccctttaaagtttggtttggtttgctctttgatttatttgtgatttcttattttgctagttgattagttgataattcatgtggcgatggactgtgtatatgtttgtacatagtaaaaatgccttttctttgggttagttttactcattcgtcttggtgaaaggattaggaaggatttgatacgttgaatgtcttgtattatgtaaagtttttagcaaatcaacttgctagtaattaatgagcgcttctatatctgtccacattccttctatgcttagagacatgatatgtttgacttttttgtttccatctttgagtcattggttttctttccttttttttttttttcttttgtgttaaaacgttagtgtatttttgccggttctctaatcaactttacgtttctgttttgaattgaaataaattgagggattgtcctttggttcttttaaatattattattgtgatctgcttcaaagaattttttctacgcttctggtttaatgaatgactaactgtttctctccgatgcaacttttctgttcattacactgatagaggaaaaaggaa

SEQ ID NO: 67343 - DNA, 360 bp, Cucumis sativus
  Intron number 1 from transcript Cucsa.133090.1 (locus Cucs a.133090) derived from phytozome v7.0 (chr-ID scaffold0103 7; pos 889807 to 890166 reverse strand)
agaagcccctcttcttctacgttaatcttgctaaggtatatatacgtaaatcccttctttcacttctttccgtttctttgattattcgtttgttatatatatatctcagaaagagattattattacacccatttcgttattgttatgttcttcttcttagaaaatggaatccgaaattagtaatgtatgaaggatttatcaataatccgtgttgttcttttgatttgatttatgatttgagtaattgtactatctgggcaattgtttgatttcagtttctttgttgttttggtttgttttttttattgggaattctaaatcgatgtttgccctaaattcagaggtatattcaacagcata

SEQ ID NO: 67344 - DNA, 429 bp, Cucumis sativus
  Intron number 1 from transcript Cucsa.057640.1 (locus Cucs a.057640) derived from phytozome v7.0 (chr-ID scaffold0061 4; pos 38842 to 39270 reverse strand)
ggttcgccctcttgaaggcacgtttgaatacagaacttcagtagtgtctgttttcttttctttgaaatgggggaaacactgattgcttctagtatttcagcgtaaaggggaagtctaatttatggtcagtcaaatgaaagcgatggtttttttttcttttttactggctcactacgtgtttgatgctaagagtctattccttttatcttgttggttttgtttgtttttctttaaaatggggaaacgttgactttttctagtaattttgcgtagggaagtctaatttatgtttaatccggtgaaaaggatggttgttttctaatgggtttcccagggtttgataaaatgcttatgtgatttcattcatttcatctggtttgttttgtttgtttttcttttcaggatagtgatcaggaagctctaaggaaa

SEQ ID NO: 67345 - DNA, 680 bp, Cucumis sativus
  Intron number 2 from transcript Cucsa.051020.1 (locus Cucs a.051020) derived from phytozome v7.0 (chr-ID scaffold0055 7; pos 209195 to 209874 reverse strand)
acacaggtaattttatattttgttgtctttcaagttaaatctaaacatgtcctaaattttgttaccaactacaaagtattgaaaaatacattaaaatattgtttaaaaaggttaagacctttttaaattttggctttttagtgattttatttttcatctcaaactattctatgagtgatagtactgacaagatatataatgcaactgacgtaaacttctaccgtaaaatctcgatgaataacttcatatcgttattgttattgtaattatgattgtgattgaaattgaataattgggcagataaaacaaaaactttttcggttatagaacaaattagtttaaaaggtaaagtatacatcatctaatgtctcaagcatgacaagattgatcatagttaactatggtaatatatatagtttgactctttagaatcatttaatagaaagcatttatgagaataaatatttgaagttattacatgaagaaactaaaccgtacatttcaaaacatatataactgttattacacaagttcaagagaaaattaatacaatggattaaaagtgtagataaaatgtcatgttgtcctcactaactatatatatatgtgtgtgtgtgtgtattatgtgttttgtgtttattgtagggagaaagaacaagcttcaacaaacaattggatca

SEQ ID NO: 67346 - DNA, 510 bp, Cucumis sativus
  Intron number 2 from transcript Cucsa.049880.1 (locus Cucs a.049880) derived from phytozome v7.0 (chr-ID scaffold0055 1; pos 51892 to 52401 reverse strand)
ggtcgctgccgtcaacagtggccgttgctggaaaggtattattttattgtttgtttaccgctcagttcttgaattttgaatttctatcttgaaataagtttagccatttttaaatataattaaatgaatctatatatatatagaaaatataacaaaattttaaattttattaacagatatgttactttatacacctttttatcattttctatagaaattgataaaagtgtctgttaattattttgagtttttaaaagtaaatgactattttggtttatgacatgaaaataactcttaaaagtaaaccttcaatattgagctacaagaaacagagattttttttttaatcttaagataggaaagggtattattaaagataattaaaagtagagaagaaatgagtagagggttaaaggaatgggaaagaaaatgaagatatgggaagaagtgtaagtgtttttggaatgtgaatatttgcagaaagcagttagaggtcgaaatcttgcattt

SEQ ID NO: 67347 - DNA, 247 bp, Cucumis sativus
  Intron number 2 from transcript Cucsa.163080.1 (locus Cucs a.163080) derived from phytozome v7.0 (chr-ID scaffold0114 4; pos 2522546 to 2522792 reverse strand)
caacacatttggaacctaagttgtatttgtgtttatatgaattagaagaatgcatacatcataatttctaatatgatattttctccctaataataaactgtttgaaccacgtaaatctctaccgtttatctttgatagttgattttatatcagcattgacattactaaatattttgtaacctactattttggataatcttataatatttcaggatcagagcctacatacaatcattgcaccaaaatt

SEQ ID NO: 67348 - DNA, 712 bp, Cucumis sativus
  Intron number 1 from transcript Cucsa.143280.1 (locus Cucs a.143280) derived from phytozome v7.0 (chr-ID scaffold0107 9; pos 1624489 to 1625200 reverse strand)
tgtttgtcttctgcggatcgctccgtcgttgaaatgtgagtttctaaccacctacattttgggttttcttgttttgcttctgtttgtgttgaggcgagtggtggtgggattcctttgattgtgtttaattttgattgaataagtgatatttggggttgaatgattgcttgtttcatttcctttttttttccagcaattgcgaaatgtagaagggattgttagggagtttgagtccgatggtactcttccattgtgtttccttcgttaattgttgcttggttttaaagaatttggattttatctatttctttttctgggatctggtagactagagatttgctgagaagtggttttggctgtggcagatggctttagacgaaatgtctcgtctgatctgtgtatattgtgtatgggtttactctactttaatctaggacattggaaaactttaggggctgatttttcatgatctgtttctcacatttaggtgtaaaataatacttggtttgcttatttttctcttctgtttcaagttgtatgttggaacctctaacggtttagtttggtaaacttttgtaatgggttggctttgctgaacagtttggagtgggagtttgttcttttagtttattgcctggagtattcatttggttttgtgatgtttctgcattttacagaatatttgttaacttcagtgttaacttcagttgtg

SEQ ID NO: 67349 - DNA, 778 bp, Cucumis sativus
  Intron number 1 from transcript Cucsa.149950.1 (locus Cucs a.149950) derived from phytozome v7.0 (chr-ID scaffold0111 0; pos 910306 to 911083)
gaggagaagaaagtgaaaagggtatagaaaaagaaggaaaagagaaaagaaaaagagggaaaagaaagaagatgatgaagattgatgttgaaaaacaatggaggttaaagatgatggaagaaggagagaagagaaggcattagagacgagaccagcagaatcttagctggatgcatctcccccacacccatacacccactcaaaaaaaaaaaaaattactctattataacttttttttcttcttctcacactctatgattccaccttttcacaaaatattatcactcactatctctctttctgtctggtaagagagaaaatgaagcaaagaaaaagaaaagaaaaagtgtcccacacaaatcactgaaccattactgcaaaaccttcctttcttcttccatttctcaaacaatttgtctcacaatatgtttaattccttcttcttcttcttcttcttcttcttcttcattctgttttttcaatgtaaatcttctgaaactcctcgtagattgcttcaccaaccatttttcccccttgattctgttcctccggcggagccaccgtccactccgacacccccgccccccaatcccaaatacccattttccactaccccacctactaatcctgatggctctccattttttcccacttatcccggaaccccacctcctccggcaccggcgagtttcgcatcctttccggctaatatctcttctttgattttacctcattcgtctcagtctggttcaagttcaaagaaggttgttcctttggt

SEQ ID NO: 67350 - DNA, 802 bp, Cucumis sativus
  Intron number 1 from transcript Cucsa.100040.1 (locus Cucs a.100040) derived from phytozome v7.0 (chr-ID scaffold0092 6; pos 659579 to 660380 reverse strand)
aaccggacaaatttcatactgtgagaaaatatcaaacttttctttcagcaccctttgatttttttcaaaaagtgcttgtgttatccatttttttcatgtgggttttactgatagtgatggaaaatccattgaaatacttgaagaaataggttaccaacttggcagctagcattcatacatactcagaaaagaaataaaaactttgggaatataatgatttttcttaaatttttaggctgcttactgtttatattaactctgaaacttcttctgctgctgcttccaactttgttatttcaagtgtgtattgctggtgtatcgggaaaaatgatcttcaaaaatagaaaaagttcacttttgagcaaaatattcccattggaacttcttccttgcaggtcagtttctgtttgtttctctgtttttcaattacatattaagaagatagttacttatcattcttcctcgattgcaaatgggtgtcctaagtttttgtacaagctgcagttccatggtagtttaaaagttgtcttaaagttgacgtgttcagtttcttctatctttgtcatcttcattctggtggttgtcttaaagttgtgtgttctcaagcttgtaggccgctcattgatagaagtcccacattagttctattctaataaactactgtccttctgtacatgtcaatattgaattgaatacaatgagtatttcactttttctttttcccattatctttttgtttttcctttgagcaccatttcagttttcatactttggcttgtttggtttggcagtacctgtacat

SEQ ID NO: 67351 - DNA, 671 bp, Cucumis sativus; identical to SEQ ID NO: 63281
  Intron number 1 from transcript Cucsa.127560.3 (locus Cucs a.127560) derived from phytozome v7.0 (chr-ID scaffold0101 9; pos 138897 to 139567)

SEQ ID NO: 67352 - DNA, 746 bp, Cucumis sativus
  Intron number 1 from transcript Cucsa.098900.1 (locus Cucs a.098900) derived from phytozome v7.0 (chr-ID scaffold0092 3; pos 687678 to 688423)
atttcactatagacaacctcaaagccatcttagtttcttttctcttgatctttctcattttcttctaatacttgtttttagacaacatctatttttttttcaatcactaaaaaatattacacactacatttttagtccttagtttttaaagaatagaagcatttggtcaatgaactttcaaaatatactttatttatctatgaatttttccaagttttcaaaatatacgttttttttagtgactttgtttttaccatgttcttcgaaatttggagaacaaaagaactctaaagcaaaataaagtatctcctatttaaaattataagatatctacaagcatgtaaactattttaatttgtatttgggaaaatcggtaattgatatttataaatttggaagtatttactacttttattcacaattcacaaatttttttcttttgtgtataaggtggagaatgcatccattatctccctatcccaatagaaaaatgaagataacttttccacccaccattcttatctctcaattttctctctcgatctctttttcatgttcaattaatcatatgtcaaatttttcttactcatttttttaaaataattcaaaataaaattgtatgttatgaaaatgtgatttctctaatttatactgtttataatttctggttcatactatgttcaaatatataaaactgtgaatcaaataattgtaacaaattttaattttaacgttttatgcaggac

SEQ ID NO: 67353 - DNA, 630 bp, Cucumis sativus
  Intron number 2 from transcript Cucsa.106900.1 (locus Cucs a.106900) derived from phytozome v7.0 (chr-ID scaffold0093 0; pos 363303 to 363932 reverse strand)
ctcagatcaagagggttattgacctgctgctggaggttcatatccatcactccatctttcttatatttccccgtttgtttttctccttctatctaatctgctgtacttggtttcttgtgtttgaccggattcttcaatgtaaggctttgtattggataggatttaatggaccgtgtattgatttgagccgtgtagaccttatgctgctgaaattttgcattttattctgtccaagttccataagttgaatgtgtgttttttaatggataccgttttaactgggggattttgctggaatgaggacttcttcaggtagtgaggcttgtgattggcattagatggcaagaggagccaggaccctcttgagtggcttttgggtggttgttttgcctacatgtgttggtgcaagattgtatttttacatccgaattacatatgttaatctaatcccttccctgtaatcttctctggattttcaattggctgtaaaaaagctaaaaagaaggcctactgaaatgcattttctacttactgttagtgaattggaaccttagggatatgttacaagcttaccgcttgcttattgtgcatgttaacagacaaggcaagcgtttacacctgagcaaatca

SEQ ID NO: 67354 - DNA, 479 bp, Cucumis sativus
  Intron number 2 from transcript Cucsa.151890.1 (locus Cucs a.151890) derived from phytozome v7.0 (chr-ID scaffold0111 9; pos 229793 to 230271 reverse strand)
ctgacagaaggcctagaattaaggtctttcttttttcttttatttcttttactatactatactttacttatgatcttattcataattatcatttcattttacaccccctagctaccttattatattgaaaacctttttcaaaagctcatactcatacgaagaaaataggtacacccatggccatgtattaacttcttttaaatatatatatatacactttaatttttagtcaacttctaaaaataaaaactacttttgaaaattctatcttttttagttttcaaaattaagcttggtttcttcaaatttcaaacatgggtggagtactagaaaaccctaaaggatgaagaccccttttaagtaatcattttggtcatggtttatgaaaaatgtgatttgaatattccatcgatgatgtgaagaaattaaagtgtttatttgatttgacacaggggcgttttgtgaagacagattgttga

SEQ ID NO: 67355 - DNA, 575 bp, Cucumis sativus
  Intron number 2 from transcript Cucsa.075760.1 (locus Cucs a.075760) derived from phytozome v7.0 (chr-ID scaffold0078 9; pos 379165 to 379739)
tcacttgaaaaactccagtgttagctattgcccaagtaatttctcttccaaaccctctttcttttcttttaggttgtttgattatttagtagctatttggtttttggtttttggtttttcacaagtaattaattaaggaataaaagttgaagaactattttttcttctatattttgtaaaatagttgcagttttctgttgttttcaagaataataaaaaatagtagaatctgattttttaaatttattgtttttagaaaccatatttgagtttagcactttcaatttaaacaattattttaagtgttttttctgggggttttttaaagtgtgtaagtttgtttaattatttgttttttggttcatcacattttttgtctcactatattttaaatccaaaattttcattttaattttcaaataaaaataaatttaattgtctagaaaaataaatgaatattgatagactttgaatctgaaatttcataatttgtacttttcatttacgtaaataatttcctttcttcttattattattttgggcagagcttctcgggttaccggcgaattcaccgg

SEQ ID NO: 67356 - DNA, 1041 bp, Cucumis sativus
  Intron number 1 from transcript Cucsa.134600.1 (locus Cucs a.134600) derived from phytozome v7.0 (chr-ID scaffold0104 3; pos 231440 to 232480 reverse strand)
gttagtttcaaactttcagtttctctctgtcactggtatgtatttcatttactattgtttctattccatattttcttcaagtaaacgaaatgaaaacaagtcaacctaaacctcttccttcgctcacttccgcattctcaatcttctgccgttgcagctcccaaatccgaccaattttggatggggttctaatttttttttaatcaaaacaagatttcaaatcattttggtcttattcgatattgaactatttctaaaatagggtccctcaaggattcgaagatgaatttgagggattcggcattgtgatgtgaattactgctcagtgaattttgcttcttgactaagctttgcacttgtgaaaacctgcatatacatctaatttacgttctattcttgttatagtgataattatcgcatgtcaggtttatttcttatttctaggattatctctagtaagaacagatttgtgggcttgaagcagtcattttaatttttttgcaaattcttattggtaatgggaatactttggcttcaattcttgttctattctcgtaagcttcttacaattaccaactattaattatcatactgtgtgtagagcaattgagaatgaccggttttgatatggatgcactctcaaggagtgtgaagtgtttggtttatgagcttttaagtttcattgtcgatcgagtccaattttcatatgattcttcattgaattgtttcatatttctggatactttatacttacaggaaattattattgcaggtgagactttctatttgaaggttgaacaaaaggctcatttacattctttctccttgaaaatcgtttgtttgttattaaaaaaaaaaaagctcattcacattcttggttatctttatctgatgaagtagtttctgtaaatttggtgttggaaagtattaattcatcagctgaagcttctaatgaacgacatgtttttgcattattttctttgaaattaaaatcctcaggtgcttctttgttgatatacgtagggaaagccagaagagaga

SEQ ID NO: 67357 - DNA, 420 bp, Cucumis sativus
  Intron number 1 from transcript Cucsa.097770.1 (locus Cucs a.097770) derived from phytozome v7.0 (chr-ID scaffold0092 3; pos 31007 to 31426 reverse strand)
tctctgttattgcaacttttgcttttggcttcgtctgtatattctgtcttttccttcttctttgtttgattatttctctcttttttgtgtgtaaccaaagcctaatcttttgtttgaatgaaatcttatctctcgaggaaaatgtatacaagttagttgttgactgtctaactaaacagttgaaacaacaactataatagaaatagtaaaacggtccccgagtgtgtctcgactcctgagttgggtctgtcattccaccccgagtttgtattacatcacttttttagtttaatgggtgattagaacttcattttcttattgagtttttgattgttttattggataatggaagtttttatgtaagatgggtgattatttctctctctaatgtgggtgtctaaaaattgttgacagtttggc

SEQ ID NO: 67358 - DNA, 1049 bp, Cucumis sativus
  Intron number 1 from transcript Cucsa.047860.1 (locus Cucs a.047860) derived from phytozome v7.0 (chr-ID scaffold0054 2; pos 2749962 to 2751010 reverse strand)
atctgagaaattctgcagtctttatatctgtttcggtgagaattgactaacgaatcttctaaacttggagtttattgattttagtttttagttaatggtatgaacttctgatgtgatttgaacttttgtgttacatgctagtgattgagattgagctactagctagcaggattttctgtatcttgtagttgaggtatatttgttgttcagagaacgataatcttgctggatgaatgtgaatctaatttaggctcggaaggtttagtttctgttttgtgattgtgcatttttttttgtcgatggctttgttgaatttgtttttagctttcatttttctgtttgactggaattttgagcatgaagaagaagattttctgctggtggtggttaattttgggttaagagattgcagatctgtaaaggattttggacgtagctaagagatttgaggatgttaaacaaaaatgaaaaagaaaatctaggttatgtaaattctctaggtttagttctttgcctctcagcgatgaacacctgtcacccgaataattgatgtatgcataatgcgttctccggacccaacattgtcttccagctcgataaatttaatagtttcttgtttgtgattgtgtggataatttggaacatgaatttgttagtttcttttaattattttttaaaaaatatttctcacgagttgtcgtgttgatgttaatttgtctgccatttttacgaccagtgatgaatctttaaatactgctcaagagaagtatcgttagcttagatccgtgagttcttgctctatttctctactttttgctttcaaaaatgtttttccaaagaaaaaaacgaagaaaggaggtgagatccaaccattttagacagtgtagataaggctccatggttgagagtttttctttaaaatggatattcaacacatttgtaaaagcttatcttcttttaaaacccgccttaaagagacggggtgtcaactctctttcttctctgtcattgtaggttttaagacgaggtttgcaggtttaaggaggcga

SEQ ID NO: 67359 - DNA, 591 bp, Cucumis sativus
  Intron number 4 from transcript Cucsa.109300.1 (locus Cucs a.109300) derived from phytozome v7.0 (chr-ID scaffold0093 4; pos 228255 to 228845 reverse strand)
agcccttcaaggttttaatttcttcttccaactctttttagaatatttttaaatttctacttttcttataatatttcttcatttttatttgcattttctggtgaataaatgctcctattggtttttggagtatcatatttatgtgaacaatttttttttaaaaaaaccaattaaaaaaatgaaacaagagaatcatttttttttagtaattccacttctgacttagataaggattaataattgaaaaaatatatcaatctttactcaaattgaattgagattaaatgttcaccaccacaaatttatatgtaaaatttattgtattttgaataataataagcatgttttttttttttcttttgctgtttaactttagtagctattatttttaaaatacttttaccttttaaatatataaacacatttttaactttgaccaaaaaaaaaaaaaaaagaatacttttttgggggaaaaaatacaaattcaaaagtagaaaatgaagaaaatataatagaataatggggtttgtttattatgttctgaataacataagatgacaaatgatggtatacttatgggtgcagttagca

SEQ ID NO: 67360 - DNA, 372 bp, Cucumis sativus
  Intron number 2 from transcript Cucsa.109300.1 (locus Cucs a.109300) derived from phytozome v7.0 (chr-ID scaffold0093 4; pos 229105 to 229476 reverse strand)
aaccttcgcccggaatcgtaattctccactctcttatcatcacattttgtttgtttgatatctatttcgttttctttagcctttgaattttaaaatttgaaaacaaaaatttataacaaacaaaccaaattatttactcgtgacaagaaaaaattcattaaaaggaaaaaaaagtttactgcacattgtgtatataaacatttggtttctcggtcagttttaagaaaacaaataagttgatgtttttatatttgataatggaagatgatgattctttgttagttttaagaaaacaaataagtttttgaaaattaaaaaaccaaatggtaaaatttggatgatataatgaattttaacgttatttgattcagt

SEQ ID NO: 67361 - DNA, 986 bp, Cucumis sativus
  Intron number 1 from transcript Cucsa.128000.1 (locus Cucs a.128000) derived from phytozome v7.0 (chr-ID scaffold0102 4; pos 124041 to 125026)
agaagctgctctcggatatctttcctcgctctcaggttctctatctcttctcccttttgtcaaaaatattttggagttttgtcaatggctatgctttttttggttaggaatatgtgttgatctcatactcattttagtcgagctctgatcaagttgttgtattgtatcgattttctagcctttgcttcttaaagtttgttccatggactggtggctgggatcggatttgctatggggtagagttagaaattttataggaggcaaaattttacattctaagcttatttatatgcatatcctttcaagcgaagatggacgttattacagaagagacttccacattttctggccgtattgtatcgattttccagcctttgcttcttaaagtttgatccatggataggtggctgagatcagatttgctattggatagagttagggattttataggagaggcaaactttacattctaagcttatttatatgcataacctttcaagcgaagatggacgttattgcagaagagatcagtaagggataaatcatttcccaatcccctggcttaatctttcaagccacttttcctaaaaggtttctgtacactcaacattgtactatttaatttggtatgactaagaggaccagttaataaattattaacaacaatatttattagtgagtcagtgttgcattgcaattttttacataggaatttttactttgaacctaattatatgctactaatttttctttgtttaaggtttagcttttgttatagcacatgtagcttataatgcatgcggatgtttttcttcttgtacgcccatgaattctttcatttattaagttcaatttttaattataaaaaataaaaaaggcgtgcgagtgtttcttttgttcctaaaaggcctataagttcaattttctattttagtatctgagaatttgcttctgaaattgatccttctctttcatgttatggcagg

SEQ ID NO: 67362 - DNA, 535 bp, Cucumis sativus
  Intron number 1 from transcript Cucsa.144370.1 (locus Cucs a.144370) derived from phytozome v7.0 (chr-ID scaffold0108 0; pos 793373 to 793907)
gttggacaaatacagctcacaggcacggcgtcaaggtacttaatctgttcactaattacttttgctgttccaaagccaaacttctttgtttgctttctgttattattagttaaaaagttggattgtctgaatattggaattagcctaccgtggtttgtttgtaatttgtacatttaatgatattatgaaaagaattttcgtaatgaattgttaattaaaataatccaaatattaatgtgattaaaaacaaaatctattttgaatttacatgtttcttttttttgtttggaaaacctaatttgatgccatctttagtctttttattcaactggaccaaaaaatgaattcataacatttgcactatgtctattcagtagttcatagttttggatatagctatttgaccacaatggtatgtttataaacaggctactatgtgtcatgataaccaaagcaagtgccttttcagtatttataacttaattgttttgaatttataggtgctaggaacttttattcttgaaggagggggaaa

SEQ ID NO: 67363 - DNA, 757 bp, Cucumis sativus
  Intron number 2 from transcript Cucsa.144370.1 (locus Cucs a.144370) derived from phytozome v7.0 (chr-ID scaffold0108 0; pos 794004 to 794760)
gctggtaaagcttctaaagttgatctacctggtcttcattttctgtaacttcatcaaatggttcatatggtttattagacgtcttaacagcgtacttcttcagttctttaaaaaagaaagaaaaaaggaaaatggttctcttcttcattttttatttttacaagcttgcttagaatcatgcataatcgttttatattatcttttaaaataaaagaccaaactttattgagagaaaaatgaaataatataaggacaaacaaaaaaaacaagcccacaaaggggagagcaccctaaaagaagggtcttcaatataactaaatatgacctaataaataattacaaaacaaacttgtcactgacaccagagagagagaaacgttaaaattggctagggaccaaacgtcaaacggttccctctcaaccccatgaaaaattctactattttttttcttagacaccccacagtaaagtacacatccaatccttccattaaaggccacctctccctccaagtagcgaatggaggaggaactcctcatttctcaatcgtgacactaaaagctctataatctactaaaagtcaaaacaccttgaaacaaatgttccaaaccaatcgcatttaagaaaaattctaaaatatgtgatcttggtatttctcaatcgcattctaaaaattctaagaacaatatgaacttttttcttgatattttatagttgtttcttgttcttgttatcgaaacaaaacttattcttgcag

SEQ ID NO: 67364 - DNA, 216 bp, Cucumis sativus
  Intron number 2 from transcript Cucsa.176570.1 (locus Cucs a.176570) derived from phytozome v7.0 (chr-ID scaffold0122 5; pos 767240 to 767455 reverse strand)
gacatttgcgagaaaggggattccttcattagggagtaagagtttggtttttatttaagttgaaaaatgcattgacttaattgttcatcgcgcttattcatctctattcaatggttttgattgttcttcactgtcatcactctcggtatttgatcaactggcttatttaatggtatttccttctgttttttttattcttgtaggcaaactggaaat

SEQ ID NO: 67365 - DNA, 566 bp, Cucumis sativus
  Intron number 1 from transcript Cucsa.135730.1 (locus Cucs a.135730) derived from phytozome v7.0 (chr-ID scaffold0104 4; pos 543790 to 544355 reverse strand)
aagttctataggtaagaatctttgttgctttcctgtattgtatttgaaacttatgctgtatgttgcgattggttgtttcttagagcggtatcctccaccctcatatttaatttgctgacctagttgtgaattatttgattttgtttcttgtcttttgttatttgatgctctgcaaatcctgaaaagaattggtttgactttttattctgttgctagaaaatctaaaatcttgagatctggatacttgtaagaaggtttagacttcttatgcgtagactacagtaccattctcgatctttatgtgtatcttaaagcatattttctatggagattttactgctgttgcttgtagatgaatttttcaaatacaaaattctaaagaatgaacttgcatgtaattcgattcaaacttgatatattttgatcaatatggttttattcctgttgtttaagtactcctgaagcattctacctcctttgttcaacaaattattccttaccacgtaatctgatctttcctgcagtcattacataacatcaagatctcataaatacttcagttcacg

SEQ ID NO: 67366 - DNA, 982 bp, Cucumis sativus
  Intron number 1 from transcript Cucsa.012870.1 (locus Cucs a.012870) derived from phytozome v7.0 (chr-ID scaffold0016 4; pos 656537 to 657518 reverse strand)
caggttcaatttttttacgattttactaaaataaagttgaaagttggtgaatatattatgaaaaacaacatcaaaattatagacaactttttagatttcgtgtggcaattgcaataagcaataatagattttaacccaacctaggttgcttagtagaacaactttattgatttagactgcataggaacacatttaaatttgttctaatgtgtagaagctattagatacaacttttatacatcttccttttccttcatctcaaatttatcattccatacagtaatttattttctcacatatttcgaattttgattggtttaaaagaagttttataagaaaacgctacactaaacaaaatttaacaaatcatttgtatcttcaaataattatgttataataaattataaaatctatatgagtacaaaaataatggaaaaatcacagtttagtttatataactaaattatacaaattttatttcaatttactactaaacatcaagattgtaactagttttttctattttaaaattaaaatataccaaatacttctcctaactaattatattagcaattattttaaaactaccttcaaaacaaaataaacacataatttaacccccccaaaaaatagaggagcaaggcttgaaaagccattccaaccataaacttctgtttaatgagattaatttaagttaaatttcatatactcaattaatcttacttcactaatctttaatcgtttcaaaacgacaccaacacatcactttatatatatatatatatttatcaatgaatcatataaaataacgacttctcatatatgatacacttttgataaaattcaaaacttatttgtcgactatttctatgcacggaacataaatatacttaattaaataaattgaagtaataattgacactacacagtcctagttctctatacataataatttaattatatgtatgtatatatgtagggt

SEQ ID NO: 67367 - DNA, 731 bp, Cucumis sativus
  Intron number 2 from transcript Cucsa.159960.1 (locus Cucs a.159960) derived from phytozome v7.0 (chr-ID scaffold0114 4; pos 287085 to 287815)
gattacaccattacattctgcccttcttccgcaaggtaaaccccattctctctctctccaccctccaaccttctgttcgtataaaatcagcttttccacaccaacgtttatccttttgatcgaagttatttaaaatttgattttatatttttaaacacaattttcctatacttaaaattgagtttttaaaataatatggttagattaactttctaaaaaagatattttgaaatacaaaattgtgtttctaaacacttaaaacaattccaaactagccaaaaatcactcttggtggaagctaataacgaaagagatatgataattaatgaaaatttgaatttgtatccaaccattaacgtcgaaaatctaatgatcattgcactttttccttttttttacgatgtatggaataagctaaacaaaccatttatctcaaaattgttagtacaaaagtttcatctagaaaaaatggttttccacattcatcacactaatttactcctaaatctttcaattgtttagaaagttaaaatgtaaaaatttatcacacgccatgaatcggtttccttttaaccttttggcattcacattgcttttcttttttcctacaaacaatctaacatcaaaaaggtgaatcattacctgtaaagttacagctttggcagtcatcttcctcaccatccttttttttttcagccaaaaatcagaaagagacccgtcaagccgaggcg

SEQ ID NO: 67368 - DNA, 802 bp, Cucumis sativus
  Intron number 1 from transcript Cucsa.136310.1 (locus Cucs a.136310) derived from phytozome v7.0 (chr-ID scaffold0104 4; pos 955090 to 955891 reverse strand)
ccattggtgttgaattcgctacacggactttgcaggttgtttacgctaccctccatttttatattccttttttttttttattaaagtcatttctccatttagatcgttggtcgtgttcttacgttacttaattaacaatttcatgagtttgattctgatgggttgagaatccttaattaggataatccgtttaaattagaacattcatattgtaattgtttatcaataggcctgaattgatcattttcttcgagtttgaatctgactttaggaaggagtgtatgaatattgactcgcatatttcttccttgccaatttgtttatgaactgatttaagtcaaaaggccaaatttgaccattcatgtggcatcatatataatattaaatttatatttattcatctttttaatctattggaaaagagggagtggttcaaaaactactttgttcaaactctgtaataataatgcatactgtttccagttttctgaatatttcaaaactcacacttgaaggaaaaatattagacctgatagaccatgttaattagaggctatcaatttttataaatcctaacaagttgaaatcaatgttaacgaaaaaaatggaagtaattaatattgcaaaaggttttaacgcaagacctccttgacactcctatactgtgttaaaccactcatttgctataaaactaaagttagaggtgaaggcatatttgatcttacactttaacatattaaagtagatgattgttaagaattggtctgaggcaggtagaggggaagacagtgaaggctcaaat

SEQ ID NO: 67369 - DNA, 423 bp, Cucumis sativus
  Intron number 2 from transcript Cucsa.158850.1 (locus Cucs a.158850) derived from phytozome v7.0 (chr-ID scaffold0114 2; pos 891762 to 892184)
cagaggatttgttctcatccacgaataaacggtttgttttattttattttattttatttttctctctttctttattgattattagcagcattgagatcgaggcgtgtttctgttcttcgtgctttcggctcttattctgttggttctttttatttttgggtttaattcagcaggaaaaattgaatgaatttgttgagtacttatttatttcttcaaagctaatttgatttcatgctttaaaaatctcaattttagtgtagcttttaagataacagcattcctttcatatgttctgtatgaatgtgctcgttcttatagtgattttgagctggtttttagaatatgtattttgaattttgcatgtcttagttgggtaatcccttatcaggcaacgtggagttgattttcattccagtttaagtg

SEQ ID NO: 67370 - DNA, 541 bp, Cucumis sativus
  Intron number 2 from transcript Cucsa.157280.1 (locus Cucs a.157280) derived from phytozome v7.0 (chr-ID scaffold0114 1; pos 263611 to 264151 reverse strand)
ataagttggaacaacacctctctaatctcagaaaggtatttttgttctctttagcttgtgaattcatgtcagtaatttattttttcttcaatactttttggatgtggcgtgaacacttcaatggtttctggaaattatttacttattaagattttggagtctacttagcttcaacaacgcagtactgtcatttttcgatatatctgtgtagaatttacttaaaagttaaagtatatacaatgaaactgagaaggtaacgtctctacaaatttcaagataacagttccgttttcttcttatttgtggtatagtatatccaaggaaagattttgaaactaaacggacaatagagataatcaaatattgaaactttataatattttagaggatacgtgataggtattatcgatagtatgctttttctttagcctttaaggtcctagaaatgacatttttttcccttcaactactatcttataagggtcctatcttcggtttctttgcaggaacttgtggttaaaaatttgcatatcaagcttct

SEQ ID NO: 67371 - DNA, 591 bp, Cucumis sativus
  Intron number 1 from transcript Cucsa.112440.2 (locus Cucs a.112440) derived from phytozome v7.0 (chr-ID scaffold0095 3; pos 1019708 to 1020298 reverse strand)
gttggccttgtaagtttagacgatgtttttatagattggtttgtcctgtttctctatctattcgcatgctagggttttctttttgttttctattgtgctctacttctgcaaggttgtgttctttttttcttcttcattcgggtcccttttcttaaccgatattaaattaatgcaaatttgtttgggcttctaattgggaagccttttggaatatctcgacattttgattgctgcatttcattttgggtatatttctatgattgaaggatgtgggtctgttcactgcatgcttattacttatgcagctatgcttattgagtctcagtacggtgggtttgtttgtttgtgcaatctgtttccggattcataatttttgagcagtagatgaaaaatgatatttgtaaaattccttgagtgttggtgggtatctgctcctgctatttgcttttggattttacttttattatatctggattattcgaaatgttctgttcttgttataacttatacccgaagatgtgttcctccctgcatccagctttgtgggttacttatgatggacatgatttaattctgtttggtgttgtgcag

SEQ ID NO: 67372 - DNA, 1013 bp, Cucumis sativus
  Intron number 1 from transcript Cucsa.025290.1 (locus Cucs a.025290) derived from phytozome v7.0 (chr-ID scaffold0034 5; pos 141794 to 142806)
tggaatctgctgagaagacgtggaaagaattatcggtaatttgtgctttgctgttgaatgacattcttatttcttccctgattcgagtccatcaattgtttatatcccgtgtttatgcttggaatggaactgttattttgcattgaatttgagagcccgtgcttgtattaactactgatgtatgcatcaagtcgttggaaatgtaagggcataaagtgcagaacattgttaactattggatcaatttttcggttgttgaagtacagtggctatcgagctggaataggagaagtagctaagatatgtcttggaaaagtcgagctcacagaatttttgtgcttcatcatattatgatttgtgcatttttgtttcttgaagatgccaggaaatgtaatttgcagttaatgtaactgtggaactagtgaactctctatgttgtttcagcagtgactagaatcctacggtgaaagtttaagtttcaaaattaatagactaggtgcttcacgattccatttagctacttctagagctatagcaaatgaagaaaagaacgaagaacttcctcactacagaccttgtctatgcacttgatattgaaattagaagacaaatactgaatgcattttggatttggctatagtgatcactttataattccttgctttcctattgcagttgggatttggataggacattctttagctttcacaattaatttttaaccattgttttcctcctgaaagaggacaaggaactgtggtgtatctggaatctctatagtagtcgtataactaatgaagtgattatgcttaaaatctagataatgtttactgtatttgagtttcttccccttgcattctctagatccacttttgaaatttgcatttacatctttgatgtatttccaattatgcttttcatttggttatagctttaatattttcctacaccagaatcattatccatataattatttaggtcaagctggcagatccagatattgtctcaaaccc

SEQ ID NO: 67373 - DNA, 453 bp, Cucumis sativus
  Intron number 1 from transcript Cucsa.042290.1 (locus Cucs a.042290) derived from phytozome v7.0 (chr-ID scaffold0054 0; pos 746808 to 747260)
cctggtctgaagctttctttctctgctcttactttctttattctttttgttcatataaatttcccagatttagtacttctttttttagcattgttttggggttcaattcgattattgtaaagttttttcaaatggggtttttaaaagtttgtttctttgtttgaattcaaagttccctgctcttaatttcttttgaagttcttttttagtttttaattgaaagcttccagaaaaacttagggaaaccatcgaagaagattggtttttctcattttttttattcaatttgttagtcttctatttcattccttccgaatttttacttccttttgtattgtttttgtaactccatttcctcaatttctatatgtatatatatatttatatttatggtttcattctatcaatttgtatagatattgaaattttcattaatatgtttgaatgtagtgt

SEQ ID NO: 67374 - DNA, 455 bp, Cucumis sativus
  Intron number 1 from transcript Cucsa.174090.1 (locus Cucs a.174090) derived from phytozome v7.0 (chr-ID scaffold0121 9; pos 51402 to 51856)
gagaaatacttttgctgttcagagattcatgtattatacattctttcccttattacaactacctgtaagatatccattagtagtctttcatagaaaatattccctttgttgctgatctttttgcttttatgcagttgaaatcattgagattttggatatatagactttttttttcacagtttgttagacaaatttatctggctgttaaacaatagtaaataatcgaatcggagatgatattttcttgaggaaatctcacaagcttaattttgattcttaccaatggaatgaatgaatgaatgtacgatattttttaattcagtccagttttagtaataggaatataatagagtttgtttgttctctgttaactttgtctttcttctatggtattccatctctttgcctcataacttgaagccccatttgcttgattctgcagccatataaagtaa

SEQ ID NO: 67375 - DNA, 405 bp, Cucumis sativus
  Intron number 1 from transcript Cucsa.103080.1 (locus Cucs a.103080) derived from phytozome v7.0 (chr-ID scaffold0092 7; pos 1958570 to 1958974)
agtccctcaccgttcagtgggggtaataatctattcttctccatctctcccatgtttttttttttgtttattatggattcctcttttccgattttgtttgattggcagaaagactagggcaacaaatgggcttcgcttggtttgtatttggaacaccttgtatctttttttgaacttcgtttcgtattatgtaatttattgcctgctttattaatagcagaacctattgggacttcgcgtactacttcgtttagatgtacgaatgattttcatttcattttaaagctttctaatcttgggatgggatatcaatcttcattttggaatagaaatcttgcatttgaatatgtttccttttcattttgtaaatgatatggtgttcgttttacagggaccaagataatt

SEQ ID NO: 67376 - DNA, 499 bp, Cucumis sativus
  Intron number 1 from transcript Cucsa.032050.2 (locus Cucs a.032050) derived from phytozome v7.0 (chr-ID scaffold0042 9; pos 1326238 to 1326736 reverse strand)
ggttatagggtacaattcctcttccaactccgcgactggccagtatcttcttttcaacttattcttatagttttcatcaagtgataacgatgattgaaattgcaattttatgaagcactggggggaaatatttcaccatcctaattatttggttttgactcatccgattcactgaggcttattttcctcatcacaaacagtggcatgctgtggttgaagtgaaactaattcatagatacagcatatctgttaaacgaactgttttttctaaatagaatttacctcaaaaccttcgaggagtgtgcctgtatataatcgtgaaaggccgaagcagatggtgcttttgcctgcacatctttatgctttttctctgcgtaacaatctttttgatggagataatgctatgggaactctttcggactgttggtttttctgttaagttgattaaatttcaagttttaactgaatcctatgtcttgctgttgcagctctcgcgggc

SEQ ID NO: 67377 - DNA, 1014 bp, Cucumis sativus
  Intron number 1 from transcript Cucsa.107400.3 (locus Cucs a.107400) derived from phytozome v7.0 (chr-ID scaffold0093 0; pos 788776 to 789789 reverse strand)
taagtctttgcgatcgccagcgagcgcaccctcaggtgatttacttttgttcatttctttccctccattatcagttccttatcttgttaatcaccctataactttagtactgttcgttctcggatgtgtgttttgtgcagatttacctaattcgaatcgctaaacacgttgttttttctttcattgtttacctttctctagctaaagcaacacccatactaaactatctaccacttgcagctgaaaagcaagctagcaatctgagaaaaattaatcaattgcatgactgcaccctaggcaaggtaatttcaatttacttcgtagagaagattgtcttaagattcaatttggaggtaataaaatgtcaggtgcgcgcatacattgatctccttcccgattgcaacactcgaattttctttaatgcagttttgggaattcgagatgttgatttgtgatttttatttatagatttgattaacgcttggatacgcttgagaaatgttatcggaacgataaagaagactatcaaattattcttatctttttggagggaggggataggggctgcaataaacatgtagtattgggaaggagagtttgttcaattagctggaagtacgggaaacaggaggaagtttgctctatgagtggacagtcgaggttgacagatgttattttagtgaaaaaggagttttttttttctatgaaaaaaaaacaaattctttaagcattccgttctgtgcttccattaatttgaaacaaatatggagcttaccttttcagctgaatatcttaagaagaatgtaatatagaaaacagttaattaagcaaacagggttaagtatggggtttactatttagtttgtgcttatcatgttagaatctcttggctgtcttttaatatggtatggctttataataaattttcttgctttctaacttcatttttacctggttaattctgcaataaattttttaatatgattactcgttgcttgttggtacacagtatca

SEQ ID NO: 67378 - DNA, 956 bp, Cucumis sativus; identical to SEQ ID NO: 62909
  Intron number 1 from transcript Cucsa.012150.1 (locus Cucs a.012150) derived from phytozome v7.0 (chr-ID scaffold0015 4; pos 1620444 to 1621399 reverse strand)

SEQ ID NO: 67379 - DNA, 758 bp, Cucumis sativus
  Intron number 2 from transcript Cucsa.193160.1 (locus Cucs a.193160) derived from phytozome v7.0 (chr-ID scaffold0133 5; pos 127960 to 128717 reverse strand)
cttttcatttattgcagactgacccttcagttcaggtgacttttgctattccctcctttatctttaacgatatcataaaaatggaatgccctttttctaaaattgcaattatggattttctagttttttattatttattttttctatttgatttattatattggttcaatatattattgttggttaaattacaaatttagttcttgattttgtatctatttagtaacaaaattctaaaaatgtataatagttattgaattatcaaaaaatactaatatattctttctttatttatttttttgttaaatattaagtttgtcatgtaattagttgaattaaccaaccattctatagaatactcaataattaaattttgtatctgataagtaatatttgattaattttttatatagtaatttgttcttcactttactatttcaaaatgagtgtttatttattctctaacattatatatacttcagtagggagagtagatgttatcttattgttgagtttgagagtctgagactcattctaaaatttgttaaaatcatctttgaaatcacctgaaagaaaagtgtttaatctttcaaaatccattttgacgagtgaaattatattttggagatgttgaattacgcataaatagattttgagttattaaactcaaactaaaataaaatatgataaaaacaattttaaccatttaaaaattctctctgtcttttggtgcatttggtgcatggtgtacgtagaaa

SEQ ID NO: 67380 - DNA, 418 bp, Cucumis sativus; identical to SEQ ID NO: 62749
  Intron number 1 from transcript Cucsa.128860.2 (locus Cucs a.128860) derived from phytozome v7.0 (chr-ID scaffold0102 8; pos 30530 to 30947 reverse strand)

SEQ ID NO: 67381 - DNA, 939 bp, Cucumis sativus
  Intron number 1 from transcript Cucsa.040350.1 (locus Cucs a.040350) derived from phytozome v7.0 (chr-ID scaffold0052 7; pos 29200 to 30138)
gcggttgtctcctctgttcggtttttcaccaagtgtttgaccttctaaggtttcatcgacaccttgctttgataccatattgaaagaagaaaaatagaaagacaaactattttacgtggaaaccctagaacagggagaaaaaccacgatgttgttttcttattatttttctctatctcataatgatacagggagcatatatttataggttatagaaccataataaaaataataaaagataattagagcactataaaatcttaacaaattctcgggctttcaatatacaacaagcccgctaaatctaacaatattgaattactctttttatttagtgaatatttccgtgatttttggagtcatttgattttatttattcaaaagtaattatttaggtttttatggtccaaaaactaatttttcattcatgagaataaaaaaggatcaactaaaggaaaaacatgaatattttattggaaaattattgtaaatggcaaaattgttgaaaatatttacaaaacagagcaaaattttagaatctatcgttgtaaatattttggttcattttgctataattgaaaacaatcctattttatttcataattttggatgaactaaaaagtttatgtgggtgtggtaaggaactttgatttccaatactatacgtaaacaagtaacatgttttgaattggttgtttcacctatatgtatttttacagcatttggagtagttgaagataggatgtgtataatcaagtatatgggttttaaattattacatttttcccaaaagtaatatttttggaagtaaaatgtgcaaatgtgatgggcaatattggtgttcttatctctctcctcccattacaggatttaacaaatgtactatatttcactatataaaccaggacatttgtagagtgcaaggaagtaaaagcagtaa

SEQ ID NO: 67382 - DNA, 811 bp, Cucumis sativus
  Intron number 2 from transcript Cucsa.139550.1 (locus Cucs a.139550) derived from phytozome v7.0 (chr-ID scaffold0106 6; pos 754741 to 755551 reverse strand)
gttaccaagcctttgtgcagataggctacaaagttttatccaggtaccgcaactgatgcaaatttttaaatgcaatcatatccatgatagtgcaaaattttaataagttcagtctaccaaaattgaagggcataccacgcatttcattaccagggcatatctaatgttaacatcaattataagaacttacattcaattagaattttattgatggtatgaaatcataaaaaggctaaaacagctgtgaaagattacaaatagagttccattgtgataggagagaagtaaagttgtagtcacatcaagtataagcacttatcatacccatttgtcattcatcaattttttacctttctaaattatttccggagaaaatataacttcacacaaatagatagaagtttctaattattctttatgatcgacctatcagtagacttgacatctttcttcaatataaacataataaacagtcaatataaacaagaaaaacttacaccttttgtccttcaagtctgaaattggtagcagtttagtccttgagtttcaacctcaaacctctcaagtttgattttttagccttttagtaccgactgccgattttccattatgatgggaccaaaatgttaccaaaattaaacaagaaggctaaagtgtgttagtgaactttcgtccagtttaccaagtggagggaataaaacaggctgcacatgactaagccaaaacaaaaggtaagtaggagcttcaagttgtgtgtagttaagcagctaagtatttattgggagattggatagggattgtatcaactcgg

SEQ ID NO: 67383 - DNA, 602 bp, Cucumis sativus
  Intron number 2 from transcript Cucsa.142660.1 (locus Cucs a.142660) derived from phytozome v7.0 (chr-ID scaffold0107 9; pos 875059 to 875660)
taactgagaggtatgtccttaattacttcaactccaatgtgatattctttgatgttttgtctgtgttcttttcccgatgagacaagtctttgctaatttgaatttacttttagtgcctaacttgaaggggaaaaatcgacttcggattaaagtttgattagttgatatgttcttttcggatttcttttaagagaaataaatatttacaaaatagtatcgatagattttttaaattttattatatttataaatatttttatatttcaatttattccattttgtaaagaaacttagaaacaatcagcgttaattatagtgaacttatttccactatttatatccaagatgctctcagctaattaggtagatatccttaccagtactcccaagatatccctagtcaatattctaacatatcaaaaaagtcaataactagccaagagattaatgaattcaatccatggtggacacatacctagaactagaatcaagcgagttgtctcatgggattagtcgagttgcacataagttggttcaaacattcatgcatatttaaacaaggaaaaagaaagaggggggtttgaaagttattcatcgcaggt

SEQ ID NO: 67384 - DNA, 390 bp, Cucumis sativus
  Intron number 1 from transcript Cucsa.031510.1 (locus Cucs a.031510) derived from phytozome v7.0 (chr-ID scaffold0042 9; pos 548056 to 548445)
taatacaattctttcctgccctaatcgaattcccggtgattctctctcatttcatgcatctgtttctacacacttgctttttcaccaattgctaattatattctttctagggtttgccggagcttgtatccgctcgatcttgataacgtcctgtttcagtcaatatagttttgtagggtttgcaagcttagaatatctgctttcgttactctatttgtttcatccgtttgatcagaaaatgaaacttcttctggaagctttctatttcttaagtttctagctgcaacattaaactgtgtttgtgcctattttgttactccatagatttcttttgctctgggatttagtgctttgatttttgtgacgtctgtaggctgtccaattgaaggc

SEQ ID NO: 67385 - DNA, 972 bp, Cucumis sativus
  Intron number 1 from transcript Cucsa.192720.1 (locus Cucs a.192720) derived from phytozome v7.0 (chr-ID scaffold0133 3; pos 568553 to 569524 reverse strand)
aaggttgctcttctcagaattggcaccagaggaaggtaacttttttgttttgtgcggctttttcagattctcttttgctttatagttttgggttgacttaagtttctaattttgagtttttgggtgatttgagtttgaaaatgtggaggattgaattattgttgaagggtttggatcagttcaatttgtgtctttcaattgggatataattttgctgtattgtagaattgttaggaagtacagtatgtttctcgtgtttgtacttgaatctatcaaaacttgtatgtttacgtttgtccaaatgaagtagtatggaagtattttttgtgtgcttgtaaatcagaccatgaagaacacgaaagggtggaaaattgaacaaaattaaagaaagtaatagattcctgagaactatcaattgtggagaacttccttccttacgaatgtgcttaacttctgaattgatttaattcggataaagtattcatgttgctcatgccatcaaatttaggatccaatctgctgctgttagagtagaacgagttcttcataagaagagtaagtctaagagggggttcgaattcaaagttttcacgtttatctttggatttcatgtttcttcattttctaagtttcatgtttctccttaggctttcgagttgttttttgtgactgtataggtagtattttgcttgattgctcctttttcctagaaggtcccctcttttgtaggcttggttttttatttcattttttctaaaagaaaacagaaagtaaaaaaaaaaagtttattctagtaggagttagggggacatttaattttcttgttgaaaccgtgaactatgttgataaacagtctacttcattttctatatgcttgtttgagctaaatcttcttttgggttgcttcatcttcttctgtgtcatatataattttctgtgtgtaggacagcccattagcacttgcccaggctc

SEQ ID NO: 67386 - DNA, 987 bp, Cucumis sativus; identical to SEQ ID NO: 66879
  Intron number 1 from transcript Cucsa.126650.2 (locus Cucs a.126650) derived from phytozome v7.0 (chr-ID scaffold0101 7; pos 530039 to 531025 reverse strand)

SEQ ID NO: 67387 - DNA, 835 bp, Cucumis sativus
  Intron number 1 from transcript Cucsa.131940.1 (locus Cucs a.131940) derived from phytozome v7.0 (chr-ID scaffold0103 7; pos 62366 to 63200 reverse strand)
cttcccaataaacgcttctccattccttctgctaagtaagtactcccatcctccttctttaaattcactccattattctcaattattattttccattattctctcttttgttttttgggctaaaattaacttttattagttatagcaaatatatacaataatattagtcaaaaccataatttgacaacctttgtttcttttcctttttcctttttgcatgtttgcttttgttctttttagttgggatgagctatatatatatatatgtatgtatgtattctagaaattatatttgagttcaatatatctatatccatgtgtatctcactatatatcatactatttgcagcaaactttagtttattttagtcatgcatgtgctttccaaatgttcatattttgtctctaaatttttttaaaaataaccattttggttccttcattttctctttaactaattttaaagaaatataaagttgtcacttttaattggaacaaaaatgaattaaagtcaaaagtttggagacaaaatttcttttctttgaaaagtaaaaaaaaaaaaaaaaaaagagtattgcatgacaaattatatatatatgattttgtagtaagatgtgcaaaaatgaatataactaattagactatactcaactatttttgtcaaagtactttatcttataccaatacattgaattataaattaatttttgtgaaatataaccgatcggtactttattttctaagattcaaatcttcatgatgtgttgtaacccactcgtcgggtagtataattaacaatcctaatgcaattttcttcttctttaatataggtttt

SEQ ID NO: 67388 - DNA, 920 bp, Cucumis sativus
  Intron number 2 from transcript Cucsa.106690.2 (locus Cucs a.106690) derived from phytozome v7.0 (chr-ID scaffold0093 0; pos 214671 to 215590)
ttttattgcagattgctgctttgcgttgtggtggtgagttcgatggattttttttcttttttcttttttctttttttttctgcgtgtgtgtgtgttattttcttaattctgcttggaatttacttgtggatctgctttctttgcttagttcatttatctgtgtttgtttgagctatttgcttgctattttgatcgatggttttggcttgtccaatgcttcttcatattctgattgttggattgtttcttgcattggcactttcgagatcttgatttctctagtcagatgtcgacgcgttgacttgttttctttttgcgttgacttggtcgtagttgtgaaaatttattctgtttctgataattgagtaataacttaagcttgttttgcgtcggttgatggagtttcgtaaaatgaaatgagattgccatgttttgtatgactgacgacataccccgatgatttgtctctgtttctagctcctgagtatagtctgtacgcagatgcctaaatagggattagattcaatagactaaccaaaaactacgtgtcattagttagttatgcagtttagaagggccaataggcaatagtccaaatcaacatcttttgagcaaattgaatttaatgatttcaatcaaagattagtcccattaggaatagatgaatccttgataggaaatataatggtttttattcttctttgtaaatagttaaggtgttgatggtgctatagggtgttatccattttctttgtttctctccccacatttcatcttgattaggaggctttcccaaggtagcaatgatcaatcaaggttgctttgtgttgtgtagtttggttggtttggggagttagtgttgggtttttggctggaaactttaaggtggttcattggtcttctgaaaatctttaactgga

SEQ ID NO: 67389 - DNA, 326 bp, Cucumis sativus
  Intron number 4 from transcript Cucsa.148700.1 (locus Cucs a.148700) derived from phytozome v7.0 (chr-ID scaffold0110 7; pos 734223 to 734548)
tcactagcttaggagtaattggtgcactagtgaaggtagtcacttgtttcttttctttacattttgttttctgttctgaggttaacatcaactcttgctagtatcatgatgaaatgattactttggaacaaactaatgagtttaaagacaaggacgaactttaatgagtttaaagacagcaacgagctctaatgagtttaaagacaaacgagctgtgtaccaaagagaaaaaagaaactttcagttcaaaaatcaaaatcaaattctgtgtaactacatgagttattttgtacctatgcaattgcttacctcactcttgcaggttg

SEQ ID NO: 67390 - DNA, 928 bp, Cucumis sativus
  Intron number 1 from transcript Cucsa.159990.1 (locus Cucs a.159990) derived from phytozome v7.0 (chr-ID scaffold0114 4; pos 311253 to 312180 reverse strand)
tcaaggtttgtgtctctttccacttttgttgtgatttttgtttgtggaaaatcttatgcttcttctacggatccgcactgtcactgtgaggctctgtgtaggaaacttgttctaattgcgttgaattgagagtgttttctgaaattgtatagtggcaattcccagtttgtttgggaattttcgtgttattgactccagcggttgtcaatttgataagttgggggggtttgcttgttcgtactgatgaagacaggacggacccaagtacttgtgtcccctattttcgttgattttcttatttatgtttcctagaatttcatttagatgtcaccccttttttctcctcccttgtactgcttttaacgtagaggactgatagtgacaatagaaagaaagagagaacgaagattaaagaagaagaagaggaactttgattgaggaagatatttacagtatttgaatctgtgaattgctaccaatcaagtttccttgtgtaggtggagacatggtagaggtaatagatgctttgatttggaattgggatgtgaccttatttgccgatgcagttaggactaatagttgggagatttatgttgtttttgttgtgcattagagtattgacgattcaggttcctctcacaattgctcatattgaactatagacttaattcaagctagacttagaatttttttggaagtgattgttaagacctcatacaagttgctttctatttagttggtgaaatagactagaaattattgacttttttggtcatctggacaaattcagatgccatctctggacttaattagttttgatatgttggaataatcacacagaaatttgttgcatgatcgtgttttctttattctcttggttctaattgtttcaggatcctgttgttcgccctttggttgagcaagattc

SEQ ID NO: 67391 - DNA, 374 bp, Cucumis sativus
  Intron number 1 from transcript Cucsa.104080.1 (locus Cucs a.104080) derived from phytozome v7.0 (chr-ID scaffold0092 7; pos 2707189 to 2707562)
agtttagaagagaggctgttgattggatttggaaggttggtttgttttttcttttgaaatctgatgatgatggaaaaatgtctgttttctctttttgattcatttctaaagaggggttttgatttttctaaggtctcttttccatcaattaaactttgagttgcttttacccttctcattaatcttcatttttttctttttgtttggtttgattattttattcgtaatgatggggtctgttttcttttcttttttttttttcgcttttcttttcccaatttcaacagtttatggtccctcagtacttgtgattccattgtgtgccatcttagttagttcattatttgattcagtgtggtgtgatgaacaggctc

SEQ ID NO: 67392 - DNA, 433 bp, Cucumis sativus
  Intron number 1 from transcript Cucsa.019860.1 (locus Cucs a.019860) derived from phytozome v7.0 (chr-ID scaffold0028 4; pos 4824 to 5256 reverse strand)
aaacaaatttttgaggtacccattgcataatttaatccatttttggaatttgtttttgttattttctttaaaacgagagaatatttctgtagttatctatggctgatgataatcattgcgagtttgatcaattatccaatattcaatcacaaatttgttttcatcttccttttcaatttcccactgcaaatccatattttcaattctatttcaagattgccaaaaccatactcttcttcttccccacttcatgatttttacagatttgaagcttttatggttgaattttgaaaccccatttcaaatatcatctcacccaaaccactttctcctttgatttcttaatatttcaatttcttcgcttaatttctcatctgggttatttctaatttccgcagtttcctcaaaatcagagagaaatcgactagcaatc

SEQ ID NO: 67393 - DNA, 1011 bp, Cucumis sativus
  Intron number 3 from transcript Cucsa.025380.1 (locus Cucs a.025380) derived from phytozome v7.0 (chr-ID scaffold0034 5; pos 230676 to 231686 reverse strand)
gggtcctcactccttccatctccggtaactttttctttttcctaacattacctttttggtttatctacaatggaaaaaacttgtgttcctttgaatttagtgttagttgaatggtaatttggtttctttgttctctttcttcttctctctttgttcttgactcaatttctaatacaaggggagggtaaaattagcaaaaataaaaaataaaaaaattaaatccatcttacgtatattttttaaattaaaaaataacaaatttaaaaaacagattatcaccatcagctaattttagattatagattatggtcatattctttttttaaatctaatgcaatttttaaaaattaaaactatttttaaaatatataaaaagaaaaaactttattttctactttatattttttaaatagtttcaaatttttgttatatttaaaactgatctttaaattattttattttccagtttttaattttaaaaattatcctatgtttacatgtatctatatgttgtatatgtacatatatctataagtttctttgttttatcattcacttttcaaaaggatgatttaacttcatactcaactttagaaaaaaaatcctaaaatttttatataaaagtaataaaaaatcaagcacaattttttgatattgaatagaagaatacatagggtttagtttttctttccattcaacaacgtacaaaagttaattaataattttaacttctaatctttaagtcgaaataatttggtgggactaaattgagttaaatgttgatgttgacaaagaggaataaatgcacatattcttgaaagaaaaacttccacgttcacatctaaataaattgtttcgtccctctcttgaatatctaaaagtctacaactatttctttttggtgaaaattaaagaaccaaaaaggaaaaaaaaagtgttagaaagaaaaatagaactctaaaaagaattcaaatttgatggcagttttgtcggctgttggaggaatcaaga

SEQ ID NO: 67394 - DNA, 286 bp, Cucumis sativus; identical to SEQ ID NO: 62956
  Intron number 2 from transcript Cucsa.130620.2 (locus Cucs a.130620) derived from phytozome v7.0 (chr-ID scaffold0102 9; pos 691545 to 691830 reverse strand)

SEQ ID NO: 67395 - DNA, 539 bp, Cucumis sativus
  Intron number 1 from transcript Cucsa.184500.1 (locus Cucs a.184500) derived from phytozome v7.0 (chr-ID scaffold0127 4; pos 200781 to 201319 reverse strand)
cgttggtgccagtggagttgtcctctctgatcaaggttgtattacgtaaaatttctgtcattctaatattttcgtcgcttcgaattttcatgtgtatgttttgttaaatgaagttttaacttcagtaaaataccttttataaaggctctgctcgactggagatatttagggctgattggcctatcgtgtggagttaatgagtttgaggcttacaagttgtaagatggagtttattgataaatgaaaaagacagagagaaaaaaaaaagagtttttccgataatgtgaagagaaattgaggaccatgaagttattgagaaatatgaaaagtagatagagaaggaaattgagttgtttaacacgccccatagtctggattaaatgcataaaatttatgaattgaatcaaaggataaataaactaattttgtttgttgatactttctttttggacactcaactgccactaaagctgttggatggtgagtaatctgtttcctcatttgaatcaggtcttcctcctattgtggccaggaacacc

SEQ ID NO: 67396 - DNA, 530 bp, Cucumis sativus
  Intron number 1 from transcript Cucsa.103620.1 (locus Cucs a.103620) derived from phytozome v7.0 (chr-ID scaffold0092 7; pos 2377214 to 2377743 reverse strand)
ttgctctttcggcccttattccagatcttaaaaaggtgacatttatgttccttatatcctaattaaatttctcttctttattattatgcaaaaaaattaaattgttttcatgtattcgtttattattttacaatccacgggtacacaagttggctacctgcatccgatcattgctcttccttgaattagtagtaactgacgttaaatcacacaaatcaacttaaaagcatatactagtatggtttaattatcaatgtttcaacaattggttgtatatatcaaaagttaatgtttcaaattagatcaaagtttactatgaaaaattttaccttgacgttcaaattccacattttccatttgctttcaagaaacatatagaaccattcagcctaaaattaaagtttatgtgtgtgaagatttaagtttttgttcctctatttcttgctatccttttttagaaaagaaaaaaaattaagctttttaatatattcaaattctcaatagttgcaatgatttttttttggtactag

SEQ ID NO: 67397 - DNA, 1017 bp, Cucumis sativus; identical to SEQ ID NO: 63755
  Intron number 1 from transcript Cucsa.197100.2 (locus Cucs a.197100) derived from phytozome v7.0 (chr-ID scaffold0135 7; pos 614269 to 615285 reverse strand)

SEQ ID NO: 67398 - DNA, 513 bp, Cucumis sativus
  Intron number 1 from transcript Cucsa.093680.1 (locus Cucs a.093680) derived from phytozome v7.0 (chr-ID scaffold0091 9; pos 21467 to 21979)
tgttcgagagagaagaaccgccgtagcgacttcaggtttgtcttaattcttctcgcttttttcttttcttcttttcttctttcatcattattctgaaattcggccaggtttttagattgattttcaagtagtcaatttgtttccagatctttttgttttcttctatggtttatttctttgccgtcgttcaacgctctcaattttgtttctgggcttaggtttaggagagattagggctttctggatctccctgggttacatagttcggatgccttttcgaatttctcccgtttgaatgtctttagtgattttgtattgtatgttttttagtttatgagtgcatgcgattaggaaatagatttgggtattaattagataggaggatttgtgtggtagtgccgttcgactttctgaaatctcgtgtaggtgttctgtaaagattcctagaatgaaaattgtgttggatgatgtcgaattgtgattgagttggagttggggtttgtttttctgtag

SEQ ID NO: 67399 - DNA, 645 bp, Cucumis sativus
  Intron number 1 from transcript Cucsa.116120.1 (locus Cucs a.116120) derived from phytozome v7.0 (chr-ID scaffold0099 5; pos 34278 to 34922)
gcaagcctggtaaactttcctccgtatgaggtttttattggaacttagattttttggctactcatgagaaaaagtaggatatttaaaacttatatgaacttaggtactggatatttttggaatcttattatcgatgaagtattatcatgggctgtcattcatacatgctagtttcaaggattttatatatataccacttttctacggattctaatttgtaatgtaagggtttatgcatttagctagggattcatttgatataaacatcttagcagtaaattgtgatcaggcatcagcctttttgacatctttttttgataagaactttctctgagatatgtactagattttatcttatgcaccctttcctggttgacaataatctgtgatgcttttattgtattcgtttcccctcaacagaagcatcgaaacttacgagttgtgggatttcactgtttttgttggtagtactttgtttttctcatcaaattgtcactggaatagttcaattggggaaggtttgataacaagtaatggaatcattgagctgttggatgcagggtttcttggacctctagtttagtttcaaatactgaacagtaaacttatctatctattatcttactgcttgattaaggatttgat

SEQ ID NO: 67400 - DNA, 872 bp, Cucumis sativus
  Intron number 2 from transcript Cucsa.114720.1 (locus Cucs a.114720) derived from phytozome v7.0 (chr-ID scaffold0096 8; pos 83648 to 84519)
agaagggtttgaagctttcaaacccttgtggacaggtgagaaaaaccctaatctggattctttttcaaacattccaagtggagatcaaactatcaacatttaaatttgaacttgattctattatatatactcaacaattaaacttcaaaatttgaaacctaattgtcgtttgaggtgcatgttcaacttctttatgttttggaaaattcttaagcttctattaacaacttagctagttttcgagttcaaatgttcgcccatatttgtacttaatttaaaaagttctttacaaaataactaagcttagggtttgaacgatctagagaagcacttgggtttgggtttagaaaattgtggataaattaaaaactcttttcttaaaagaaaattgagaagcaaataaaatttattttgattttaatttatcaacgttcgtggatttgcctaacaaattaaccctagatgagcaaccatgagttcggctttaaaacctaaccttttcactccaaacacattcttaaagctattgatttgcatttgaaataaaccgttagacgtttttctttgaaaaagatgcgttggatcaggtgtacccgaacatgtccactagatggacaccccttagaatcttcatcattcccactttcattaatatagaaagaactagtacaacaagagacaatacaaatataaaaatattaatatccacatcaagataactcgaatttagcaataaatcaagaaacatatcatgcatccatttatatcaatgcatgaatgaacaaattaaaccaggtataaaatcatttataattgaccatactcttgaaattacagttgatagttgaaaagaacaacaaagtgacaagaaa

SEQ ID NO: 67401 - DNA, 511 bp, Cucumis sativus
  Intron number 1 from transcript Cucsa.057830.1 (locus Cucs a.057830) derived from phytozome v7.0 (chr-ID scaffold0061 4; pos 149846 to 150356 reverse strand)
tgaaacggtaaattctagtctcttccgctcataatcattcaggcttttagtctataccattcgcttaatttattcattctaattttattttcataaattttaaatttacttccaaatgttaattcattgttgatttttttttataaaaaaagaatacattgctatttgatagcatttttaaaaacatattcacattattgattttaactcgatttagttaagaactaacttgagaataaatttaaaatttgaaattgaattttcacatttaacaagaaaccttaaatggagctagggtttgctatatttggaagtagatgaattaatcattaatttttgatagatcaaagtcggggcctaaattgtaaaaatcagattgttggtagggaggatattatttttgtttttgtatagtcaaaattgattgagattatgaatatttgtcaaagaaaattatttggggatgcattttaggggcaaatgggatgtgtgatgtaggtggaggaggaga

SEQ ID NO: 67402 - DNA, 766 bp, Cucumis sativus
  Intron number 1 from transcript Cucsa.177330.2 (locus Cucs a.177330) derived from phytozome v7.0 (chr-ID scaffold0122 5; pos 1362163 to 1362928 reverse strand)
ccaaacccatcatcttcatcaacaaccacgcttgggtgagattatatttattcaaaacctctttatcttttgtttttgtttattgatttttaaattgtgtttacgagtaccctcaaattatttaaattaatcttagaaacgtgttgtgtttgttttgaaatatatagacagagtactcctccctatttttatcttgacgaaagattcatattttgttttggttaaaatatcattttgattatgtataatattggttcatcaacttttaacattaatctctatcatgagttttaaaaaatgatgtttattaatattttatttataaatcaatcaaatatatgtgcataatgtgtcttttccattacagttattattgaactaattttgataagatttctaaaatgatcaaaaatcgataattaaaaaatacacaaggtcatgtacctatacaaaataacatatatatggaatttgatattattctttatttcaccatatacttctttgactttgatcctaactttatcataattttcttttccattgttgagtgaaaaacaattttttatagaggtttgaaattaaggttttcattcaataacttttttttagaaagttgtgaaaattaaaggaaaattatgtcaaacatttacttttggtttttaagatatggaattgctaaatgatgaggaatcgttaattatttattgtcttttggtttggagtgaaaggagggggtggcaaagaagagaataataagacggcc

SEQ ID NO: 67403 - DNA, 889 bp, Cucumis sativus; identical to SEQ ID NO: 63167
  Intron number 1 from transcript Cucsa.058500.3 (locus Cucs a.058500) derived from phytozome v7.0 (chr-ID scaffold0061 4; pos 656507 to 657395)

SEQ ID NO: 67404 - DNA, 555 bp, Cucumis sativus
  Intron number 2 from transcript Cucsa.105290.1 (locus Cucs a.105290) derived from phytozome v7.0 (chr-ID scaffold0092 9; pos 38732 to 39286 reverse strand)
caagcggcgagaaaggacagctaacacacttcaatgtgagtttacttgtttcattgttgcttatatgtataaactgaggttgtgaccatctgttgttgttcttgagttgaaattaatcaaaattctggacagggaatcaaaaaattttaagttcatgaaatgggtatttgtggattgactttctaagtgcttaaaaacgtttttttttcaagtccaaatatattttgcttgttttcactactgcaggagcattgtcgacctattcatgttttcttgcgtgtgtgtacaatgaactgtaccatttttgttcagtttttaaatattctcttttattggaagtacatggctttaaaaggaattatggttgcctctggtcacggtaattcgtctgtctctcaaatcaccttgttcattgtccttgtgtcaagcgatacaatatgtttttcttagcctcttctttccatctatctttagaaaatttatattatatctaaaattttccacctttgttttcctgttttttcagagcgacctatttgaacaggttatttcaga

SEQ ID NO: 67405 - DNA, 889 bp, Cucumis sativus
  Intron number 3 from transcript Cucsa.043690.1 (locus Cucs a.043690) derived from phytozome v7.0 (chr-ID scaffold0054 2; pos 420110 to 420998 reverse strand)
ttctcgatctttgtgcagctccaggtaatgcttctttctggctttttgatgaatagttagttatacacgcgccgcagagtatgcacaatgtgtagatcaaagtgatgtaaaacagtcaaattgctaccaacttcattgttaggttcatctaaggaggaggacaataacgatagtgtaaattgtataatcaccaacaatttaatatttttagaatggatatgaatagacaggaaagttttttcttcctcgcaatgttgacaactaagtcaggacctcaggggacctattttaaccgtgctatacctacatcagttttaatcacattcaaataaaataaacaaccttgagaattctatgcgacgtttagtctcaaaattccaagctggattagtgacgggcaaggtccccaaggatgaaaagttctagacttgaacttttgatcctctcatgtctcaatcagtaaaatatgtaggctaaaagaagggaccttcgtttactcagtttaaatttggaagcatcttgaatggggaaggcgtcaatagatgcatagtctagaaagtttaactgtaaaagttgttaaaggaaaaggatttccggccattcatataaaatataaatacacatatttttttgataacgatgaacagcaaaagtatggtcttaactcaagatttgaattagagtggagcaagtgaatttagtgtttcagttacccgaatgaataaaattaatgtctatgtatcacactgttaaatgttcatttaatgtaacacactgtgtagtgaacaataagtttggtgcaacttattattagatatttgaataactaatcattcagtcatctagttctcacatgtgcgtgtcattacattcaggggccaaactttgc

SEQ ID NO: 67406 - DNA, 475 bp, Cucumis sativus
  Intron number 2 from transcript Cucsa.043690.1 (locus Cucs a.043690) derived from phytozome v7.0 (chr-ID scaffold0054 2; pos 421062 to 421536 reverse strand)
cttacaaaacaggaaaggtgaggaaattcaacatcagctttgggtccttggtaattcgggatttgtgaaatttttatctgtaagttattgcttacgaataatgcacgtgtgggaaagagttgcttatatcagttttccttttggcatttttttcatacaattcagtaaattggatcgaggaagtgaataactccaggatttaatgttgctgcctaacgtagatgtaattggattctgaatgttcgatgttgtacatttgattctgagtcttttttttttcttctttgataccataattgttgtaaatggaagagtaaattaatttgcacatttgtctattgcaactttgcacttcattcaacgatgaaacggcccaataaatagacagtcaaagtgtagttggcataggtggcaataaccaattaaaaataaagtataatataaatatttaccatttgttttttcattcagatat

SEQ ID NO: 67407 - DNA, 833 bp, Cucumis sativus
  Intron number 1 from transcript Cucsa.112780.1 (locus Cucs a.112780) derived from phytozome v7.0 (chr-ID scaffold0095 3; pos 1190886 to 1191718)
tggtgtactttcaaggagctatatacaggaaggatgtaagtctttctgcgcctttgagaaacttattgatgtgctattacttctcagaggttcttctctttttatcttattttctggcaagcaatctaggttatgcctaaattatgttctgcattggtgtttcatatcatttcctaaatcccttttgtttgtgatcggaaatgcatgattatgatcccttatatgttggacttggtaatctcgttggaaaaggtatatgatagaacgtcctttttggtttatgtatgaacttgatgtttaaagcagggccatgaacagtaatattgcaggttcatggtaagaagaatattttgatactctaactaaatcattatgatctcaaattcaatgcataatcggacttggatgatcttttgctgatgagttgcttgcaagcagtggtgacctatagccaactgttgatatgcaggtgaaaggaatcttgaggagtactaaaaactaaatatttaatgctttgttggattcatctgcacctaattaatctatggaatgaccaatcctgttatatacagtgcaaaagaaatgacatgcattaacatactaaaccaaagaattatcctttgttacgtatggctatttaaattgcttttcatctgcttagtttggtttctactgttgcattgcttacctttatcattttttcttagatcctttttagcgaccctgcgttcttacaataactgataacatttaagttgataaaatttattcaaattttctgtttgaatttgtcttcagggaggtgtagttcgccaagaactatattaccttct

SEQ ID NO: 67408 - DNA, 1041 bp, Cucumis sativus
  Intron number 1 from transcript Cucsa.167150.1 (locus Cucs a.167150) derived from phytozome v7.0 (chr-ID scaffold0115 4; pos 529232 to 530272 reverse strand)
tggagtttttctggcaggaaaaaacgaccctacaggtgacttcactttctttttaatgaaaaattattcttattagcttgttcttctgaatgtgtgggtcctatgtacacttacggttctttaggttttcattctgcatattcaaactgttaacctgtcatatttcattcaaacactacgtctacactcaccctaaagttgaatggagatgtgttaaaaatggctggtcctaattgattcttctgactctgttctaatatgaattattgtggatacctagagtactagattaggttatgtgcaatgcagtttataggactgtcgtgtgggggtgtgttaaaattttgaactttaggtgcatgttaattgttacattacaatacatgatacactaaatgttagttttaatacttgttactcattcttgatcaatatctttgtggcaagatgggtattaggctcatagtttgttacaaacttcagtttatacggatccattgtcattctctcctccttttgttcgggacatcagagtgggttggcctgtgctgtgcatttttttcttctgcttgttgaaggatgatgttacaaattgcttactgatctcataaaaggaatcttgatttctacagttttcacttgtttcacttgtataacgtatgtgctccatccctatcatgtctctgacatggttttccattcttctgctgttctgcatgtcagtttgtttacgtgtcattgagattgggaaatatttggttgactttttcccaaattggcactgaataaaattgtatgagaactttgatgtaacgatacttaatctatatgtaacaactagtgggtgcggtctttcaacaatctattaaggtttaggttttttgatataaccatgataacataattgaacacaaataatgagggtatttaactcttcgtcatttttataaatggtgtacatgtagtggaggaatttaattggtgctttctttgatatgttatgcagagggtgtcacaggcttgagcttggaatcttttaaa

SEQ ID NO: 67409 - DNA, 515 bp, Cucumis sativus
  Intron number 1 from transcript Cucsa.048530.4 (locus Cucs a.048530) derived from phytozome v7.0 (chr-ID scaffold0054 2; pos 3217803 to 3218317 reverse strand)
gagctatctgggtcttgagggtatagtttttttagtttcgtttttccctttttagtattttgtaggctaatggagtttaaaagggagttggaggttttcaccgtcaagaacttgtgaacttttctcgtatctttacgattctttgagtggaggcgatagtttatttgatgttttttaggggttcggagactgagggaagaaaattttggtggaccttagtaaaattaccagaatatagtgataacggtacatttatattgatcatcagagattgtttttgtggcttctactggtctgagaaggtgatatggggacggcttttgaattctcaatctatttcacgtgaaatgaaacttttgtattctactgtatttttcagtttcgtctttggcggaatctgaactctttttggtattttatccttattattgatcaatatgcaatgatcatattatgtcatgcaataatctgtaaacattcttgtgtgcttcatttattgcaggtggaaaagaata

SEQ ID NO: 67410 - DNA, 342 bp, Cucumis sativus
  Intron number 1 from transcript Cucsa.174740.1 (locus Cucs a.174740) derived from phytozome v7.0 (chr-ID scaffold0122 1; pos 487794 to 488135)
ttacgacgaatccttccacgccgcaccacgattctgtaattccttcgaccctttccccttatttctgcactcatttgtttgatttttctctttaatcgagttgaaactaacttacctatgtgtacaactggatttagtggaatcccacttcgtgatcttgattgccaatgaaacccaatttgtactaccttgatcgaattgatttatttagcatttttatctcattgagtgagaaacgtaatcagtggggagatttgttttttcttctgttggaattgcaaatagtttgagtgatttttctttctttgaatgttttgatgcaggcccttcctactacaggaa

SEQ ID NO: 67411 - DNA, 579 bp, Cucumis sativus
  Intron number 1 from transcript Cucsa.126140.1 (locus Cucs a.126140) derived from phytozome v7.0 (chr-ID scaffold0101 7; pos 127945 to 128523)
catatcatattattgtaattgtcaatgtgttttacttttccgatatccataagaacatatatgtactgtacaaccttttgtgcttttagtcgtctcatatttgattcatcaactttcaaatttaatcctttaaactgattttttcaattaaaaaaattatcttcaactccaacttgccataaccatccactccttaatgtacatgaaaaccaaaattaaacagatgaatgagaaatcatgagcagagagaatggtaaagaaaacacacgatcgaagaaaagtcgtcataaagtggtggtttgaaatgtgaccaataattcaacttcaatgaatcgcacaaaagctttgacttttagttatacacatccccattagcttcttcctcttccccacagaacttacgtttttaataaacattttatcttcaaagaactctgtaatttagtcctaatagtaatcaccaaatgaattccgcctttcctcttcttcttcttctttcattagttacgacattcttctcttcaaagatcttcgcctatggcagtactgatacaatcacatcaacaaatttcatcaaac

SEQ ID NO: 67412 - DNA, 739 bp, Cucumis sativus; identical to SEQ ID NO: 63890
  Intron number 1 from transcript Cucsa.176860.2 (locus Cucs a.176860) derived from phytozome v7.0 (chr-ID scaffold0122 5; pos 921918 to 922656)

SEQ ID NO: 67413 - DNA, 718 bp, Cucumis sativus
  Intron number 4 from transcript Cucsa.118170.1 (locus Cucs a.118170) derived from phytozome v7.0 (chr-ID scaffold0099 8; pos 2082 to 2799)
attgtactgttcacaggaacttctttggcagtcaggtaactctccttttgagttgtgattttgattttcaagatgcatgaaaataactggagaagaaacttgtttagggatcaaatttgcataaagctatctctgctcgtgtgacattgtagcagacgtgactttaccctttcagtcatcctacgaattggcgtctaaagtttttttgaaccattgcatgttggaaatatatagccctcaagaatttggggagctaagatccttgctaatggtcattacggtcctttgggaattttgaaccacgttactatgaaatctatctgtctattggctcaactaatgacttttccccaatgaaaagtttcatacttcatttaaagtcctccgtgtaacaagcattgtgagatctgcttaattgaggttttagttgaagcatggagttttaaatgcaggtttctcgatggtttttttttttttcacaagctgatccaaacacaaatattctaagaatttctgctttgatgttgattccggatgttctgttttcccctcaattacatatttagcagtgttactaataagtatagcaagcccatttaactcaacgttgaagttcactttatattaattttccatttctatagttcaaattttcctaatttaagaagatcatgattatatagcttcaaagctttgagtcagagctctcgataccaga

SEQ ID NO: 67414 - DNA, 946 bp, Cucumis sativus
  Intron number 2 from transcript Cucsa.107960.1 (locus Cucs a.107960) derived from phytozome v7.0 (chr-ID scaffold0093 1; pos 218690 to 219635 reverse strand)
caaacaattttttctgtaagttcttttaagctttcactaaggaggttacaaaagttgattcgtctttatagtttttgatgatctgttttcaatggtagtgtatcaatttgcagtccatttttacacactttcctcttttgatgttggggccctcttaatcttttgtcttttaaacttgaatttgttaaacttctcaatctgggatgtatttgtattggttgtattggaggttttgaagttccatttttaagccatgagagcttagagccgccctttcctgaagtatttgaaaaacccgcatttactttttgtaatttaatctaattttgctacctttaatttggttcccatctcttattcttattggtcaatgaatttcgtatttccactattattctttgaagatttgggttcttaattccatggcaatggctacttagaaactaatgtcactacccaaatacgatccagttggtaatctgttttagaagtgggtgaaaaagcagagtgtctagtactgttggataccatgctcttttctatacaattgtatgagtcctacttctaaaagttctagctattagattaatattcattcccaatatattgcttgaactttttctaaattaatgttacatggcaagtggacttcttatcttcaaagttaaaatatagaagaaatgggtacaagttggctcaatcaacatttatctcttagagtttagcttttagaaagttagatggttcatatataaattcttcactgatggtttatgttcagaaattttgtcatcgtttcaagctaaatagcaggttccttgtagtactgttttttttcccttgtctcccttatccttgcattctatcattttggttatagtttatttttgttcatatgactctgtttaagttatttaaactaatttttcttctcagcttggcttgg

SEQ ID NO: 67415 - DNA, 741 bp, Cucumis sativus
  Intron number 3 from transcript Cucsa.184900.1 (locus Cucs a.184900) derived from phytozome v7.0 (chr-ID scaffold0127 4; pos 551008 to 551748 reverse strand)
tggtatgctcttttcacacgcttctttaattagtctagggagttgaagattgctagattgcagaagcaagccaaaaggaaaatgattgtgcagaaagaaaaccaacatgtttgtgtaaaaatttatgcaaagcaataaaacggaagaaagaagggaagagatcttaagaaagttgcctatgatttccattataacataccaaatcaggttgaatgtaagcgatgtgtgagaataatgtgctgatttatccgaattgaatatgcaggtcaataaatttcatccttggtatacaaacggtgttcctttaaaaatgttccttttggctttctacttgtttctcccatccaaatgtttggttttctaacattatatcaaggtttatatgatcaaatgttgacatttcttttcatctcacccacaccatttggctgccgcaactacctttaatttaaacatcttttgctttttcgcaacaaaatagagctgtattttataaagtacttggcctttatattatcatcacattgaaaataaatgttctaagataagaattatgatgtccgctcaacttcatttgaaatttcaataaagtatcaaaagtcaaaaggccttttgatttcatagttattttttatttgtcttgtcattggtatatttttgtaatcatcgcagacctctcagtttgtataggatcaatattttacaggttcacctccttatacttccaaatcttgagccata

SEQ ID NO: 67416 - DNA, 812 bp, Cucumis sativus
  Intron number 1 from transcript Cucsa.183300.1 (locus Cucs a.183300) derived from phytozome v7.0 (chr-ID scaffold0126 1; pos 115694 to 116505)
tggtatctaattccctcatttttcatctctctttactctctcctttcatattcattcttttttctttttcaaggttttagtttttttcaaaaatcatctctttacattcttaaaaatttcactctcatcattttcctacataataattaacattttaattcttattcaattatttccaaattttgttttatctttttttattctctacctttaacacacaatccatattctgatttttaaaactgtttttagattctatgtcaattcaaacaatccactttctaaaaactaacatttttatgtttttattatatatagatttcgaattttaccttttatgatgtagaatcatattataaagtacatgtaaaaacatttagaaatgtagtatatcatgttattttcattaaattctttgttttcaatttccttttaaagattttttaccaaacatatcccatttacttgtaattgttatctcaactctaaagctcagacactgcagaagtcccctttctgttttttctttaaccaacaattgggtttgattttgaaaggctctctaaaatatgtgcaactttaaagcaaatggatgtgaaaatagtggtaataaggttagttattttagttagttgaagatgaaataaaaataaaagtaattaaaagtagcaaaattaaaaatataaaaatgcaatgaatataataatgaacaaacgttgaaaagtacaaaatctaaaatcatagtgaaaaaacaggaatggaatgtacaaaaaacttgagccttagcttacatattgttttgtagagctcaa

SEQ ID NO: 67417 - DNA, 833 bp, Cucumis sativus
  Intron number 2 from transcript Cucsa.172470.1 (locus Cucs a.172470) derived from phytozome v7.0 (chr-ID scaffold0119 6; pos 310760 to 311592)
ttgaaaattacttgggatactgccatagagccaaggtttgatttatgtgctttgcttttattttatgtggaattgtgaagcttgtgttatttaatctccttagaactcaaggaaaaagttatacaatctatagaacaaagcttgtgaggcttttgcatgtcataatctttatatgcgtgcatatggattattggaagatttcatatcagtgttttcttcctacaatgaaatttctttcaaatatctgtaacaatgattgggttcaatctcatggtaaccatctatttggaatacaaaattcttttcagttttctaatgatcaaatactatggggtcaagtggatgttcagtaagactagttattttgttgtccagggagattaggtgcacctaagctgacttggatacttgtgttaaaaaagaaaaagaagtaaagaaaccttatgaattcccactgtcatccatcacgtacatagtgtttgagtaaaacagatgtcctaattgtatgccccaaaggtgataccttaccacaacaatttcgattgtgagaactcccatttttatgaaatcatctttccttatgccttgacgtgtaagacttaagagcattacttgttgattgacagataatattgagatgtaagaaaataggattctttttgtgcataacctgaaataccgtcctacgtatctcctgctgacacaacaaaacaactaaaaagatgattgaacaaataaaattggcatcatggaacaaatttactttcattctcatttattgtttcagttagctaatgtggagattacttttgcaggtcaaagctggtatcgtt

SEQ ID NO: 67418 - DNA, 505 bp, Cucumis sativus
  Intron number 1 from transcript Cucsa.017350.1 (locus Cucs a.017350) derived from phytozome v7.0 (chr-ID scaffold0024 5; pos 63072 to 63576 reverse strand)
gaatcggttgcgaatttcctctccaagtatttttgtttcattttgctgttctgcttcccgacaagctttctgtttcatttatgctttctagaatggaaaagtcgttgctctctttcttcatttcttggtcttatatgcattgagttgctctgctgtttgattatcatgttatccctttttgggatttactagaaataagaaagtagtttacttttaaatttgttagtgaatgtatgtggtgaagaatctgccaaattgtggcttatattgattaattgagaacaaagttcaacaagagttaacttttgcatttatagtattgttttgggtctattttacgttcaaaaagattaatttctctatgtacttgtgttcctcacggttcagctttgtttgaatttgtgttttctttcttatgttatagttttccctcaatgaattttttcataaaacagccctgttttattgactaatatatctgttttgtaataacgatagggttctg

SEQ ID NO: 67419 - DNA, 851 bp, Cucumis sativus
  Intron number 2 from transcript Cucsa.129530.1 (locus Cucs a.129530) derived from phytozome v7.0 (chr-ID scaffold0102 8; pos 418036 to 418886)
ttcaacttcaaaattggtaactaattcttttaaatatattactagagaactcatgctcagcaattgtctaattctattccacacttaattaactttcatagggtttgaaaatggtaagtgtcaatagttcatgttcaaataatgaaaataaaatcaaatttgaaaaacaaatcaaacatgtgctaatcaaaaagtcgtacattattaaacaatgaacgacagttgcaaatataacaattagatctagagtatgtgctgatatagctctcgatgtctatgacagatagaatatatttcaggtagaagtttataagcgttattcataaactattattgtcccagaaagtgttacccactgcaattactttaaaaacaatataagtatagtcaaatctgtgtgaaacatacatacaacttttatcaaaagattaaaatttcgaatatgtcaatagagtcgtggatggtagaatgatataattgcaataagtgttgcaattaatataattggtaacaattacttttcttttctcacattttgtttgtgcttttaccgtgaagattgtgtttgagtggagaaaaattggtatcaaataaacatgaccatcatgttaccatcacattggggctacgagaacgtggtcatctattgagatgatgtataaaaaatagttgtgcattgataaataagcaaaatgttagattttacatgtttttaaacatatgtcattaataatcatataggaaaaacaaaacaaggtgtattgttgtttcttcaacatcattgttattagattgttaacataaaattttgtgggattttgtagggagaaattcagaaagagaagattaca

SEQ ID NO: 67420 - DNA, 816 bp, Cucumis sativus
  Intron number 1 from transcript Cucsa.029480.1 (locus Cucs a.029480) derived from phytozome v7.0 (chr-ID scaffold0039 7; pos 97177 to 97992 reverse strand)
tacatgtatgattttctctcttcatctcttatcctcctatactgtcttttttagttgagttatttaacttctttttcatttttatgcttcttacaaaattatgataagaataataataatttgttgcatctacttatgttgatctcatatcttttttatttggaacgatacacgtagtttatacctgaggcaaataacttgtgtactgttactagtagctgtttagtttttcttttttattcttgaaaattaagtttacataaactcatttcatgtttaaaacaaattagtcaagctttaaaattaaactaaagaaaaaagtttttgttttccaaattcaacttagaattcaaatcttaaatcaagaaaaaagactttaacttaaagaaaaaaaaataaaaaaccaaaatcatcctaactaaagtggaaaagaaaaaacagggatcaagaaaaatattttattacatgaaaatttattatagtcacatagaatgtctccgaccttagttataaagaaaacactttctcaaatcaaattggagaatacaaaaagcgaatcataaacttggagtagtacttagcacacactcaatatatgttttaatttgttgaaactaaagcatatatactgatccttttgtggtgcttgaaatatatcactggtcgtaacaactaccgttaaaaaaaaaaacaacataactagatattaattttaaagtagaaaaaaaaattatgaataaaaattgagtgtgagtttgattttgggttgatttgtttgtaggggagatacagctttttgtagtgccgagtgcagag

SEQ ID NO: 67421 - DNA, 819 bp, Cucumis sativus
  Intron number 1 from transcript Cucsa.077610.2 (locus Cucs a.077610) derived from phytozome v7.0 (chr-ID scaffold0079 1; pos 729250 to 730068)
cctcctctgctgattccaagcctcccaacggtactttggtatctccttctccctctctgcttctttgcttctttcctgttgcgtatggattgtaaagttaatgggtatcctgtcaaaatgtcaactggtacttcataagtttgtaaggattcttgtaacgtaggcttctgggtatactttatctagtggaatactctgagtaaatgtttctcataatgaatctggtttgttcaaaatattggagctgatggatgtgagattacattcttacgtatgatatcgctggcaaacattgaaaatgtggatgctttattcaatttcattgtagagcttttacaagatactagatattaagtggtgtgatactgtctataaattgttgattgataatgggttcttttttaaaaaataatttagatgtttttttcttgtcatcttgatgaacctgattgctgtaatattataatgagttccttctggggctgattaccaccgtagttggttgtcagtggtggtcggcagtagagtcattggatacatttcgatggtgggagagagatagagggattgacgaaattcctcaataaatgtgcaagttcaatagcaaacgctattaaagttggtgaagttgagttatttaacatcgatttatgaagtctggggaccaaacactcggttgggtaaaaacccaactcaaatgaaatctagtcaaggccccaagcactccttttatgttttttatatttgaatttctatgattgtttgaatatcttttatggaattggcagccaaaaactcggagagacatcctgctggaat

SEQ ID NO: 67422 - DNA, 1001 bp, Cucumis sativus
  Intron number 1 from transcript Cucsa.003950.5 (locus Cucs a.003950) derived from phytozome v7.0 (chr-ID scaffold0004 6; pos 99271 to 100271 reverse strand)
aggatattcggggctgattctaaattacaaaccgagttatggtctttttacgatcccacttctggtaatcttattcaactaattttctccatatattgttgaactgattttctttgtaaattttaggtagctttggtgattgatttttaggccttgggtttccttggaatttgagggaaaacgatgagatggaagtcatcaatgtagttgtagtagtttatcatagtgttcaaactttgctcacactctctagctttagcctattttagacggccatataatatccggaatttgttataattccaccatgatcaatttcgttgtgagtacatctttaataaataacacaaatgtattccatgctgggtttgaggagaaatggattctggtcaagctcattctaatatgttttttagagatcttgcaaggatgtactgctaactagtcgctatctgaaatgaaaatgtggttattattcggtactggctttattcagttttactcaaactgatttgggtggacttgtcaagcagtttgctgggaaaggatttagttttgctaggcttggctagtctgctgttgttgacattgggagcaactggatgtggatatcacattaataaacagctagcaaaactgagtgatggttaattgtgactatggtgaaatgtttattgtgcattaagaaacgtgcaacatgaagatttaagccgcatcctttcatttatcttaattacgttcacgacacacttctgatttgaaatttcttaaaacaattttttcctgtgtaccctgatgcttgtgatgtggtatgagaaaatgctttcaattgtcaacccaacgtatcccatttcaattatgatgtatagtgttagttctgaaatctgacattctctgtctgttataaaattttccatcttctattgaagagaaaagtttggtgttgttccatttctgtttccagtgcaactaacatgatctagtgaaacaggtgagtctgt

SEQ ID NO: 67423 - DNA, 899 bp, Cucumis sativus; identical to SEQ ID NO: 63374
  Intron number 1 from transcript Cucsa.112480.1 (locus Cucs a.112480) derived from phytozome v7.0 (chr-ID scaffold0095 3; pos 1043582 to 1044480 reverse strand)

SEQ ID NO: 67424 - DNA, 626 bp, Cucumis sativus
  Intron number 4 from transcript Cucsa.172290.1 (locus Cucs a.172290) derived from phytozome v7.0 (chr-ID scaffold0119 6; pos 181470 to 182095)
gggctccgagaaggtataaactctattatgtttttatgcctaatcattgaaattagaacacagatttgtttataattggatggaatagttaactacatccgcatattgtaacataatatatcatgaattgcaagtattactgttaaagttttcagattgatattagctgttttcagattcttaagtcttattttaactgttaaagttttcttccccttgttttggtgacctttaattctgcttataaaggatttgtattacggcctcttcatttgttgtagtagttaacttgtggtatattttaggtggagtatgctgttgtatgttttctcgggaaaatttgtctctgatgcagacaattatggcatatgaattcgtacttgaataacttttttacagatttgtacaatgatacacgataaagatggttggagccattttttttcatttgtagtgtgtcccctttactcaaatctctttatattttgagctcagtttatttggctttgattttacattgttttatataatcagtggtaccgtcctctgagccatccatatcatagtgacattcattttataatggaacaggcagcaaggtaggggtggtccaccatcacgtcaac

SEQ ID NO: 67425 - DNA, 639 bp, Cucumis sativus; identical to SEQ ID NO: 66499
  Intron number 1 from transcript Cucsa.012990.1 (locus Cucs a.012990) derived from phytozome v7.0 (chr-ID scaffold0016 4; pos 771004 to 771642 reverse strand)

SEQ ID NO: 67426 - DNA, 983 bp, Cucumis sativus
  Intron number 1 from transcript Cucsa.020790.1 (locus Cucs a.020790) derived from phytozome v7.0 (chr-ID scaffold0029 4; pos 32944 to 33926 reverse strand)
caccgccggattcccatccctcactttccgttcaggtccgttctctcttcttcttcttcttcttgacttcgtcttcttcttcgtcttcaactactcatcattctacattcatcatcttctcttcttccccttttcttgatctgtttctcacttctcttcgatttcgattcctctttacctcttttacattaccttcctttctctcgtttttactcataatcttctaacctctgcgttttccgatctctttacaccttaacttctgtattttgaagagttttttttatagatttgaagatcgtgtttctctgcatttgatttcttgatctgctggatttgccagtcgtttgtgttttttgaggcattgagcttgttgatacgcttggtcaattcgtgagggtttatctctgttgttttttgctttgggatttgaatttttagtagatttgttgtggtatgtagttgtttggatttctttaatttattgtctcggtagatcataatgtgatttgttggatttctttccgttttcggggatagatttgttgaattgtgtatggattgaatgtagaactatttaattatgtagacgttatggttttttttttttttttttttcgctttctctacttatcaactttagatcgatttggtgtttgaacatatgtatttaattcgcgaagggcttttagtcgaaatataatgaaacggaagaattattatgtaattagctaattggattttagataatcggtatttgtgatgatgggagatgtattgattgaggaagttcattttatctaatttgtgtcttggtaactgtgttcactgaatcgtgtgttgataaacttaaaacctaatttcttttgttgtaagtttatttaagtctttgctttttgggggaaaaaagttacgtataaagatcttgtgaaaaaggtatgatgaaagattgttcctgtcctcagtttcctttgacggtcacc

SEQ ID NO: 67427 - DNA, 407 bp, Cucumis sativus
  Intron number 1 from transcript Cucsa.099310.1 (locus Cucs a.099310) derived from phytozome v7.0 (chr-ID scaffold0092 6; pos 152220 to 152626)
atacgcctatcccatgtaaagatattctatactttcattgccttttctttttttctttcttaacttaagatcttgaagaactttgcatcatcaaatcaaatatatgtttagatacaatatttaatgtcttccttaataaccatttgattttggatttgtaggttttaaaatgtgtgcatgtgttctttacaacttttttaataaatatttcaatgttttcttacaccaaattttgaatcccaaaaaaccaactttattgttttaaaaaaaagttggcttggttttttaaacacttctaaaagagtagatataaagcagttgatgagatatatgtatactccaggttacatctaaccgttactcttcatttaatataagtgtgataaattaattttctttaaatgcag

SEQ ID NO: 67428 - DNA, 976 bp, Cucumis sativus
  Intron number 1 from transcript Cucsa.096720.1 (locus Cucs a.096720) derived from phytozome v7.0 (chr-ID scaffold0091 9; pos 2234375 to 2235350 reverse strand)
gaaacggcaatttctgactcatcttagtggcccgagtgagtaattcttcttcattttcattttccgtttttgaattcttaggttcatcggtaattccgcggcaggaatttcgcccttgcgtttggtattttccggaaaactagatctccattctctctattttctttgtttgcatcgcttccatgctttttattagctaatcggtttggagataacatgcaaatgaagaaataatcaaagctcaattaagaggatgattaaaggaggaaaaaagtcaaattatggatggttggaagccattgaaacccttcagtcaaaatctaacacgaaatatacttggttccatttcataatgcatagttagtaattcaagtatgtcaatggaagttcagcttaaaagagaagagactgaattgggcagttcagcatcagtggttgttgacaatataacaaaaacaggaggatccctgaattctctatttgatatatgcttttagcccttttgttattcttaattaggacttgggattaaactgcataaggtgaaattatggaattttcggaaggcgtttgaccaattcatcaaaatctttttcgtagtattgataacaatgatttcctccgactgtcaaaatatattctgttctcctatatggattgttggttgtaagttgtaagtcgtaactcctaagtttaagttctattctgcacattgtggtgagcttctatttcaatcttatgttgtcattttaacgaaagtaactttgactgacttatatgatttggacttctatatagaacagactgatttcagggtttgtaacaaagcaagacatcctgagttactatacaaacttcttggagactttcttttaacactcggttttgagctttcaattcatagttaatgtcagttctaagatctttttgtgtttgtgcattatgtattcaagatgatctctttaagcctatgcag

SEQ ID NO: 67429 - DNA, 747 bp, Cucumis sativus
  Intron number 2 from transcript Cucsa.049630.1 (locus Cucs a.049630) derived from phytozome v7.0 (chr-ID scaffold0055 0; pos 104749 to 105495 reverse strand)
tctttccctccaagtcagtactctttgttagccatgtgagtatcccccttttctttcctttctgttttaccatgtactattatcttcttgcctttttatttcttacacaatgaacttttttattgtctgctacattactatagatttgtatccctgtagtcaagtgctgttttgttagcgtttatatttttatttggtattcataaatttctaagccactattcttcctttgtaagtatagctcattgctgtcagaagagttattaaggtggactgtaaagcacatactggggcaaacttttctctgaatattgatattttgagcaactatcatgacaagtatcatctctctgttaggatcttacttgaacaggatctgttctataggtagtaaactatgaccttgagttctaaggagacaagtatcatctccctgttgctgcaattgaaaagatgaaatataaaagcgctgatgaattttgcacacattggaaagaatcggtttgctgaagatttagtttcaatgagacagtagatgtgctagcatttagtagatgtagcattttgttcgcttggtgatgtgatcaacatttttggagattattaaggtttaataatcagcaggatagttgcatcattgcatgtcttctccataccctctatctttatctttcataatgttaaagattatttgttttgatgtcaacttatctatgtttccttgattcttcataatatgtagggcgg

SEQ ID NO: 67430 - DNA, 721 bp, Cucumis sativus
  Intron number 1 from transcript Cucsa.049630.1 (locus Cucs a.049630) derived from phytozome v7.0 (chr-ID scaffold0055 0; pos 105475 to 106195 reverse strand)
gatttttattatcagatccaacattcatcgatcgtgtatgttttgtattttccggtgcttttgatttcttctatcatttgggatcgtttgctctgaatttttccaagaaatcgatggagtattatgttttttttgttttacaatattcatttctttcttctacctctcagtagtcgtttgtatttgagggtttttcccctcttgttgcattatatgatctgattcttgtttttgatagacattcaactttccaattttgaaatggggggtttccatttatttggaatgggatcaagtttaacgagtattattacgtgggaacaaatcgttggattgaaagcaattgctttccctttggtcaaaattgcaaggttctccatatttcagagtatcttccttttttaatgtttcatttctgaacctgaaatctaatctcatggcaacgacggtcttaaaagattgagtttagctggagactcgttaattacaaatctcttttttttaaaaaaaaaaatatatttatatattttttctgccattcctcaaatgaatgcttgagttaaaggcatggacatctcgaatttgtggaataaagttcatggttttggtgtcagtatttttgtacaaactaaaacaatgacctttttctttattcatattgatgcttaatttgaattgtttttcaggttttcttgcgtgctctttccctccaagtcagtac

SEQ ID NO: 67431 - DNA, 764 bp, Cucumis sativus
  Intron number 1 from transcript Cucsa.072830.1 (locus Cucs a.072830) derived from phytozome v7.0 (chr-ID scaffold0076 5; pos 382661 to 383424)
agatttaggtaagtttttggtttttttttatgggttttggatacccattatagattggattaagatttggttctttcttgacttcggaagattatttgagtggttttttagagttgttcttggagattaggccgctgtctagcaacatcttggtgaggttttggtaagtaattaagggaactaagttgaatgttgattggaagtgtcttggtaaggttaataataatttatgtgatgttatatgttgattcaaggaggaggattgggttttggaatgtgaattgtttacttaaatattattgtgcggttgtaatttgaggtaaggaatttactatcggagtcctggattgtaattaagatgtattcatgactgcttttggactgtgaaagtatcatgaaatttcttcttgcatagatctttccaactcaactagtgaattttcttacagttattctcaaaaccccaccaaaacatggacatagaagccattacatttattccaattaatgagcatttttgtacacgtagttgtttttccagaatgttttcagatgagggattgggtgaaggttgtaaaagcaataagattggtgttcgggcacaaggcatcaaaagatgtttcttttaggtttgatagtttatcctaggatagtttttaataaattgcttccgctgaagtgtgtaagttgtatatttttctaattgtttttacattattgttttaatagctttattgaaaaatacgggctccttatcataaaag

SEQ ID NO: 67432 - DNA, 580 bp, Cucumis sativus
  Intron number 1 from transcript Cucsa.126060.1 (locus Cucs a.126060) derived from phytozome v7.0 (chr-ID scaffold0101 7; pos 84594 to 85173 reverse strand)
tgaggttggctgcttcagaattaggtataactgcacgctctttggccctttataattattgtgtgtgaagagaagattataacaatgttttcattcattgtagaatcggataaaaggaagcttacagttgtgctttgtctgtctgttgcgtcactgataagcttcttgatttttgttgcttgctttatcttttggcgtagaaggacgattaagggtaagtatattcttttagaagcatacttctattctaaatattatatatatttgtgcatctcacaccaaattgttcaatcataatttgcgatgagaaaagaaagatgtccaaaaatggatccatcttcgtatgcaagatccacccaagtatatattccacttagggtatctaatgtgtacctatcctttacatccatggaaaaattcaaaagtatttaataaagagaagaaagaaatgacaaacgcagaaaaagatgggtaaaacataaaatccaaacaagaactgttaatctgataattatttatcctccaactgttatttgctcatttttgtttctttatcttcaaattttggttgaaacaggta

SEQ ID NO: 67433 - DNA, 758 bp, Cucumis sativus
  Intron number 1 from transcript Cucsa.142550.1 (locus Cucs a.142550) derived from phytozome v7.0 (chr-ID scaffold0107 9; pos 805124 to 805881 reverse strand)
ctcgttttgctgttgacgaacacaacaagaaagaggtttggttttctttttcctattccattttgtcatttcttaattgggttctgttttgttttttgttttatccctaatgatatgtggtttctgcgtgtatgtacccttctatttttgtgctcttatgtgtatattcgtgttgattgtggatactggatggtcattttcttcaattgacaacgaagttttctgtattgcttttcaaatgaataggaagaataatgggttggatagggattgggatttaagtcttgtaattttactttcccatgatagctcctttttgtataaattgaatgggattaataagaaaaaaaattctcgatgtcttctagatccaatccttgggttggggaaagataggtgctctggattgggacaccaattcgatgggagagctacattgtagttaaacaatgaccgtgtttattgtcttactagttttctaaacaacataattttatagaattagataagttgtgttatgaggagtactggccagacttaatacagttagatgtaggattggaaaacttgcaaaggaatcttgaatttgtaatcttttctaggagttattaggaaaaacaaaaaaattcttagaagtcacatctaatgatccttaagagtcatctttttgccacaaatatcaggtaatcaaaaagttctgattgaaatcatttgtgtgtgcagaattcacttctggaattcagcaaggttgtgaaggt

SEQ ID NO: 67434 - DNA, 696 bp, Cucumis sativus
  Intron number 1 from transcript Cucsa.116470.1 (locus Cucs a.116470) derived from phytozome v7.0 (chr-ID scaffold0099 5; pos 369954 to 370649)
ctgcttattctcacttctatccaaatctctccgccgtaaaatctctctcccctatatatctatagagatatttatttatgttttaattttaaaaaaacctttgaagctttacattttcatggggtttttaattttaattttagtggccatgatgaattatagatcggagaaattaaaattggtattagtttgaagaaatattttacacaggaacaatatttaggtaaataaaaaaaaattagtctcatggtgtgtattttgatgcttttttttaaattaaaattttctttctagcaaatcagaaatttcttatgaagaaactttatattctttttttaaaaaataattcattgactcctagaatttgggagagcaaattgaggagactgttccctttttccttcctaatctttgaactttcattgatttttttgagaaattttgaaaattacttttaaaatttacaccaacccatcaacacgataaaataatttagaatacttggaagagatgtaattaagaagaatttgctgtagtaacaatttgttattggataatttacacgagtgtaatcttagacgatgatatatattgtatggaagtattgcgcattttaatgatacaaaaaattttcttctttgcattttaatggaggaattgatgatttagggtttatttctgtttacatgtagggag

SEQ ID NO: 67435 - DNA, 858 bp, Cucumis sativus
  Intron number 1 from transcript Cucsa.147730.1 (locus Cucs a.147730) derived from phytozome v7.0 (chr-ID scaffold0110 7; pos 123842 to 124699 reverse strand)
tgaaggactctcgccgtttcaatcacgctttagaagttcgcttttccttctctcacttcctctaatttctttaactgaattcttagtgtgttgtattgcaatacagctttctatgttgaaggaattggctcttttctagctttgaaatgcgttttggtgatctagctgagatggttttgtagtatttggttatcttttcttgctctaattttggaaatggggtttgtatagtgaagttcctgatggtttgtttgagaaattgttagcaaaactgtttataggatttgggattggatgaattctaaagatattgttgtaaaacggatacttgattttgaatgtgcaatatgattacagctgctgaaagataaggacactgaaagtgaagttcgtttaattaccattttgttttctaaaattaagcttataaacacttgttacatctctagaattttgttttatgctctactttttaaggattgatttcaaaatccaagcatgttttgaaactaacggtaagaaagttttttattttacaatttcttaaccatgattttcatcttttaaaagcatatttttttatttcaaaaatagttttgtttttgaatttgactaagaagccatatgtttacttggaaaagatgaaaatcatggttaagaacttgtgacaaagtcaacacaatttttaaaaagcacaaactaaaacaaaaaacaatatggttactaaacagggcctaagtcatcttcaaacaaaatgtaaatggtttttgagtggatccttaagacagatctctttaacagttttcaagcaggttctgaatttcttcgtttcttgattttgtccagatatctcagtgg

SEQ ID NO: 67436 - DNA, 646 bp, Cucumis sativus
  Intron number 3 from transcript Cucsa.158110.1 (locus Cucs a.158110) derived from phytozome v7.0 (chr-ID scaffold0114 2; pos 245536 to 246181 reverse strand)
gtgccttttacaattgcaggtttcttggttggcaggtattccaatagtgtatagttagttcaagaagtctaacaatattaaaggcctttttaccatagaaacttgtgcttggtttgttagggtggatgtttaacttaccatatttattcaaagaggtatttcctaagctaataaagagtgcgatcttctacggtgctgatcctggtcttgggctaagttcgagagtaggcctgaatttcctctcttagccattatcagttatctattgttgaggattccacattagaataatgagggaccataacgtttgcaagatacatgagctactcctctcctggctagttttgagaagtaaccccatgttatgtaatatctatattgtccaacttttaatgaagttggctcaattccatcaagctttctttgcttttgctatctataactcgtgactaggatcatcagtttgatgctgttgttggctaccttaatcagccaatgctgtttgtgacgaaagtagattgtttttttgtacctctattgcctgctattgtttcttcatgtgaaagacttttggatgcgtaggaaaagctttgatcagttccattttccctatataatttgatgcaggatactctgtacctacatt

SEQ ID NO: 67437 - DNA, 405 bp, Cucumis sativus
  Intron number 2 from transcript Cucsa.043960.1 (locus Cucs a.043960) derived from phytozome v7.0 (chr-ID scaffold0054 2; pos 561286 to 561690 reverse strand)
gggaacctagagctttcgtttatcacaactttctggtattctcttcttcccgatctgtaatgtgagagatttgtgttttataaatatatatgcaacttttgcgtggaattttttaaacttggtttgtttatgctcttacgtgttgaatgtgtctttgggagcgcattttttaaatgaagtctttaggggctgctcatcacttaggttgatcatgtttatgttcctctaagaagtcagtgtgcttctttgttattatgatgaaaggggttaaggataattcccatttttatatgtctttagatcgtgttggagttttgagttgacttaggctgaggctcgtcgattaatcttggagtaggaaaatactgaactggtttactttttaattgcttagacgaaggagga

SEQ ID NO: 67438 - DNA, 889 bp, Cucumis sativus
  Intron number 1 from transcript Cucsa.134520.1 (locus Cucs a.134520) derived from phytozome v7.0 (chr-ID scaffold0104 3; pos 172451 to 173339 reverse strand)
cttcctccctcagcgcttaattctcgtctctcagcgtgagtttttatgttctcttgctttatgcgagtctgttattcgatgtattgatctttgattcagtcttcttgtgatgttttgtttgtagtcaatattgggtaagatcagtggtttgagtgcactatttgatttgtagcagtataggttatctggttatctgttttggttgtgaattgtggcatttctcctttgatttgtgattatcgaattcttcttatctgatagtgtagaaaaaatggttcttctatgaatttgaacattggtgtttttttcgtagaggaatttggagcacttattagttcattataaacatagtaatatttggctgatatgatatgtctgtgagctcacgactaactataaagttgtatagatagcttaaaataagcatgcttaaagagtgttgaaggcatatgtcaaaattttctgagtgaagtttctctcttcatttttctggataatttgttttggagtttttattcgtaacttaaggcctaaaagaaaactaattacttgttttcttgatgccccaagcacatttttttgaattaaacccatctaggggcgtgtgttcgaatttttggttaagcttgattaagaaaagccttaagttgggggtttagggacctggggtgggcgtggactttgagaaaaagaaaaagaaatacttatcttcttgaccggtatctagtatatagctctttgttcttaataggtgtttaatgttgattagtttgttgacttagttttctttcaaattcaggccactgaattgtccttgcgaagttaaaaaatgggttcgatttaagtagattgcaacttcagggggaaagttaatttggtaacttaagaa

SEQ ID NO: 67439 - DNA, 540 bp, Cucumis sativus
  Intron number 1 from transcript Cucsa.119300.1 (locus Cucs a.119300) derived from phytozome v7.0 (chr-ID scaffold0099 8; pos 1195142 to 1195681)
accagataaatgtaatctctctagaagataaatctttacaattaatactatgaaaaatacgttgatcaatatatcaattgaaaagtttaggataataaaccacaatttctttcaaaagatgaattcatagctagggtcaatcaaaatgcaaataagctagtgttcgggttatcagcaagcctttcacttggaaaactacgactggaaaggaaatcctttcgaagtaccctaaataagaagaagcttcttttccacatctgacgatgccaagtggggcaatcatctcttcaccttataaaacaattgatgaagagaaaaccaaaactgttggtgtcagggcaatagaaaatattcaatagcaacttaattattccaataaggtcttaactactatgtcaagatctatcgaggaaatgaaaccagacaagctgggaaaaactatagcaccttcagaaaaaccaggattacctagagttaaccctaattgacatgtagtacaaccaaattccctcgagatcaagttaaagggatcgaatattg

SEQ ID NO: 67440 - DNA, 960 bp, Cucumis sativus
  Intron number 2 from transcript Cucsa.061750.1 (locus Cucs a.061750) derived from phytozome v7.0 (chr-ID scaffold0065 1; pos 219054 to 220013 reverse strand)
agccaccagacccaccaattcatcaccaaactttggttctctctctctccctccctttttctttttttcttctttttaatttggatgtgacaaatagagttgattgtttttctatggataagaaccattattgttaataatgaaatacaatttgcttattactcctataatatattatatacaattctttcaaatttcttaatcaaaattaaaataagaatagaaagaaagaaaagaaaggcatcttctccccaaccaaagtccttagttttttaagtgaatttgtttactaagtgatatgctgaatctgatgcctacttcaattctatatatatatatattcttaagtattcccattaatgagatttcacaccattggaattaaataaaaagagactgtgttcagataaaataatcatcaaagtatatatatattatgtttctgagaaagaaattaattggttctgtaatctctgattttaataatcctaaccatataatttcaaacttaacaaacaccccactttagaaacaagaaaacaaatatataacactatatatatatataggggcattctaagaaaatgggaaaatattgaaaataagaaaacaaaagccacatatttttctgaagtttgacttgaattttaaaagtatgttttgtatatatgcagacaacaaaatacgaagacccaaataggtataggcatgtgtattatcaaaacttagtttaatgttggaaatacttttagaagtacacataaaacacaaaatgagaaggttcataagttcatttcaaaaatctaaataattatccgaatctgactgttttatatatatttggtttttgtatgtttgtctttaatgaacaaaaatatacatttatatgtatatatttgattcctgtgtttttggttttatataggaagtaaaagaggagatcatcaggctgaaacaaga

SEQ ID NO: 67441 - DNA, 739 bp, Cucumis sativus
  Intron number 1 from transcript Cucsa.184810.1 (locus Cucs a.184810) derived from phytozome v7.0 (chr-ID scaffold0127 4; pos 488718 to 489456)
ctagaagatcaaaggttagtatatatttcacttttttatttttattgttgttggtttaagattttttttttcttttatccataaattttaaacaatgtcttataggtttttgaagtttttaaaaactatcaaatgttcaatcttatatatagtcaagggacaacctcgacagaaaagattcttatgagaatctagtaaataatttgaagtatgaattcttgatcatgaatacgttctagaagtgctcaaacccaccaaatttacttcaatttcgatccttagagaaagattaccttaacatcaaacctgttgagctaaataatatgtttttagacccaaatattgccataagatcgaaaagctctctggacaaaagagatcaaaattcattcattgtaaaaactgtccaaagttaaatatgataaggcaaaaccttttatatggtctccaagtgaagccctaatgccaaatgatcaatcatgcatgccaaaattacaaaataacatctctacttataaatatttcacaaaaggaataaaattgaaaaacataaatgttatgatcaatatatatagatgaaaatatatgaacaatatatagtttgatatcctaggcacttcaaatcaaaaaagggtttggagtcactacaacacatgaggtttaagtgagttggatactaaatattcttcacaataatttgaaaccctaataataatttgaagttttgtttgcagaaaag

SEQ ID NO: 67442 - DNA, 920 bp, Cucumis sativus
  Intron number 3 from transcript Cucsa.107770.1 (locus Cucs a.107770) derived from phytozome v7.0 (chr-ID scaffold0093 1; pos 64410 to 65329 reverse strand)
tgggaagagagtgaaaaatcaaaggcagagaataggtaccaacaaatcctctttttttcttttttttctttttaaaattttcccatttagctgattttggaaaaaaagaattataatttaaaacatatttatagagaaaattacaaaataatataataattgtgtccatcaaaaagtctaaaaatactaaattcgaaaaagacagaacaaaatggtaattaagattgtctttttcaaaatggttaatttacaaacttgttctgaatgtttgtagctcataggggtcttgaatcttaaaaatcatcaaataggcttttgggatattaattttaggtcaaataagtcaattaatttttaattttgtaaccaatattttttaaattaaccactctttattgactgaaatttatgtctaataaattatacaacttttaattgtatacatatctcacataaacctttaaaaatgataaataaatctagaagtctattacacaccactcaaaattcaaaaacttattagatatatattatctattcaatttttttatatagtttggagatttattttaagcacaaacataagaagattggatacctatttaacacaaaagcttactgactaaatttgtaatttaatttattgaaaaaggttaaattacaagtttagtagctataagtggtatggagaattataattttgttaaatttagtccttatcatttcataaacactattgtttgagaaaagcattataagtaatctctaccatatacattttttttattttgtttatcaaagtatatagagtaaataatttacgatttaacctctttgatactattatttgttggatgtatgtgtttttttaaatggaatttattgagcagagctcacaaaaagctatcagcaattggatc

SEQ ID NO: 67443 - DNA, 992 bp, Cucumis sativus
  Intron number 1 from transcript Cucsa.172230.1 (locus Cucs a.172230) derived from phytozome v7.0 (chr-ID scaffold0119 6; pos 144952 to 145943 reverse strand)
gttgtaaggatgctttaatttacttctacgttttgattctttttctttttggatttgggtgtttttgtgtctgtttttacacggtaattggattgaatgggaagttgagtttcagctggaaattgttggatctagtctggttattgttggatttcttttgctctggtgttaatttcttgtgaatttgtttggaatgatgaggaatttggatttggaagtgtattgatgttgtgttgggtttaattgattgtggatgtttagtataggtgaaggctgttcgatgtgagtttccaatcagtttttgtttatcatctgagttgaaattttgttttagtgtatgccatacatttccaaacaaaacaaagaaaatgggttggtaaagacagcataataaaactaaattgtgaccaaatggctctgcggtagctaattccaggttctcaatgtggaaatgtttctaaaatgtaattggtattgtaaattttatgtttgttaagaatagctcaaagtatgttgacataacatgaagtttctgagttcaaatttgtaaattttttgtttcttcatgctcatttccagtatataagtaattgtgtaagtgtgttatttcctccatgaaattagtccatgtttaggagtgattttgaagagttaaaatcacttttttcatgtccaaaatcaatccaatgtttaattttgttattttataagtaattttcattctattaaaattgtttttgaatgattaaaagcgtttttcaagtgactttgaaaatgacagcgattctaactatttcagaagaatgtatctgtgtgtgggcgttcaaaatgtcgagaattagcctgtttactgtcctgaatttttgggagcaataatttcttttacatgaatttaagttcaacgaactctgtcttgttttaattccatataaatggtaccttcatggagttttgcagcttattgtgttgtggcgaaagaatctctcagtaag

SEQ ID NO: 67444 - DNA, 814 bp, Cucumis sativus
  Intron number 2 from transcript Cucsa.192380.1 (locus Cucs a.192380) derived from phytozome v7.0 (chr-ID scaffold0133 3; pos 237944 to 238757 reverse strand)
cctgctctctttcgcattgtacaagtatggtcacattgtacatgctctttactgccagcaccggaattttaagttttttcacttgattccatcttagttgttccttttaacagcaggccatatcttaatttttttttatctcagtcacatctatttgcatgcttaatggggctcaagtttccatacccattttaattgggtttgggattgtctctaaatctatccatgatttcccacctagggtgtaagttggaaattatacctttttcgtacttcagttttgggatagccaatggtggataaacttagaggcaaactagatagatagtgtttgcaaatctcgataggtagaggattggcattgggtcaattggttttaaacggtgtgtgactcaaattagcgagggtgctcttaagaatcattggggtttagctttcttgtctgatttctagtttttcgttattatgttcattttttttgcagttgacttatttgtaacctttcagttatcaatgaaaattttgtttcatggtttaaaagtaaaccagattagactctaggtgggaagtttgtaaatgagaaacccatatatatacatacatacatatacatacatacatacatacatacatgcatacatgtaattataattataattataattattttctttttatcttcatggtgtaaacatattgatttttgatttatacattgaccttgctgataaatttattacttatgttgtcatctcattgttctattcaccaatttccaggacaaacatcctccaattccagatagcctatcacc

SEQ ID NO: 67445 - DNA, 363 bp, Cucumis sativus
  Intron number 1 from transcript Cucsa.192380.1 (locus Cucs a.192380) derived from phytozome v7.0 (chr-ID scaffold0133 3; pos 238857 to 239219 reverse strand)
gcacctgaggtatgaattaattttgtagatggttagatttcaccttcatttttgtgtaaaatttttttaggttttttacgctgcctgaaaactttgaagtttcatttgaatatccaacagggtagtgacaagttcctaaatgacttgtacctgtaccttggttgactaagctttagatattttgttttaaaattactttggttcttctaaaagttatactttttactttttcttcacacttatattttagtacatctgaaacattttacttgacaaccttttgatgttactttttttttttataacaaacaaatttcattgatgtatgaccttttgatgatactttcgttacaggtaattgaa

SEQ ID NO: 67446 - DNA, 1043 bp, Cucumis sativus
  Intron number 1 from transcript Cucsa.009240.1 (locus Cucs a.009240) derived from phytozome v7.0 (chr-ID scaffold0012 3; pos 217259 to 218301)
caagactaagcattccaaactccaggctgaaggtggtcaatataaagcatcgactgctgaattttccaagcctttcttatattcattcccaaaatcatagcccaccaacttggcaatccaacactggtattctcctgcaataacatgttgttccataaaaaatttcaagctcttctgatctgttctgacaattaaacgtctagccagtaaatagggttgccattttctcattgcaagaacaatggctataagctcccactgttatattggtttaaaacgatgagtaggaggtaaagcttaactaaagaaggccaatggctgtttattctgcataagtacacctcctacacccacacctgaagcatcaattcctacccgaaaaggttcttgaaatttggggagctaagacgagttttgcaaccataacaactttcaaccaataaaacacttctacttctgagttccacgtaaagcttcctttcttcaacagttgtgttgatggtagagcaatacttccatagttggcaacaaacttctgataataacctgttagtcccaaaaatccatacattatctcccttaggctttcaatacttaactaattcacactccaatcttctcaccacaattcttccaatacttaaccatgccaaattttgtgcttcaataatcttaacacaaagtgtccagttccttaatcttaaatctaaatatttgccaaagtattggtaacaatccatcatatctataactatttttcacacttatgaactccatcttttcaactcatttctcatacttccaacatttaacaaattcttcaagtttattcttattaacacacaaaacatgccacttacaaaaacaataacaacaaccaggcataattagttaaacttaaacaacctaaatgcaatatttagggtttacattatatacctatgtaatgtgattatttgttttggttatcacatttgattgttgtatggttttccttcttctaaacagagtaatcagaaacaaaagaatagggggaagtcaac

SEQ ID NO: 67447 - DNA, 250 bp, Cucumis sativus
  Intron number 1 from transcript Cucsa.113480.1 (locus Cucs a.113480) derived from phytozome v7.0 (chr-ID scaffold0095 3; pos 1604025 to 1604274)
ttcagttccgcctaaaatcgtattccttcctaaacgtgagtttttgcttgttctatccttttgaagtttgaggtttgtcgaagatttgattacttttactttctttaaagaattgggaatcactgaaaatgatttgtcagtttttaatcctcttgcagggaattagaattggtttattaattggcatttctcttttgaatcttaattatttatgagattttactttctcccttaggatattacaagaaca

SEQ ID NO: 67448 - DNA, 627 bp, Cucumis sativus
  Intron number 4 from transcript Cucsa.108570.1 (locus Cucs a.108570) derived from phytozome v7.0 (chr-ID scaffold0093 1; pos 706462 to 707088)
ttgcatctgctttcaacaatctggtactctagcttaagggttttctaatattttaagttttgattattttacccttttcaaattgtagatttaaactttcatgcagatactgaatgagcctaatggaataacttttctttgaaccaagacgtcagatacagtattatttttagtagaacctctattttgatgaattatgttgttttggttctcggtcgttataaatccgggagtttagacatttttacttgcattgaagtcttcatgtagtttctttgcacaatttaatgacttttctttaatcaaataaaagaaaccaaaatattcataggatacaaatcccaaaagtatgtgtttttgtagttacatatagtatcaaaattcattagattcagttatcaacaaattttttccatatttacattttgtgatcctatcattcacatgaattgaagtggaaccttggtgcttagatttcagaaatggatctaatattaaaactctttactttggttggaacctatgatcaagaactgttgtgaaatgatgcaatttgatttaaattgtggaatcacaattgataaatatgttttgctattctttttttaggctgaactgtatagagtc

SEQ ID NO: 67449 - DNA, 898 bp, Cucumis sativus
  Intron number 1 from transcript Cucsa.114960.1 (locus Cucs a.114960) derived from phytozome v7.0 (chr-ID scaffold0096 8; pos 286190 to 287087 reverse strand)
agcgaaaaattcctgttgctgtgcactccattgtggtatgtataatgtaacctcagtttggctttgaactatttggttctttcaattgttttaatcatccaataccaaacatctgctcatttgatctatatctgtttgctcatccgcgggacgagtgatgcatcaatttttaagtttctaatgttattgcaaatttgcaatgatttcatatcttccccatttctccgttacctttttgtgatctgttgagtacttattcatcccatgtatgtttcatgactaaataattgtgtggccttaaattattcaaacgtgcaaagttctgtacttaccatggaaacatcattttgttctcttttacaattatcatatctagctggttaaatatctaatctttcatctggctcatgaaaatttggcacaaccttgtatttatttgaatttaacgatacttgcctacacttttcttactgattttctttatggcttatttgtgagtttagtgtaatctcatataatgcataagtaggtctcccgtctctttaatatctttgaactactaacaataaaccacataccgtaggaatttttactaaacgtacatgtaggaaaatatgctctcatctcatgaatgagtgttactctcgtcaatctcctatttagtttgccagcttcctggttctcataaaagtttcaaagtcattgactatcctatgttttttagacaatcaacatgcacagttatgttccattacatgttttttagacaatcaacatgcacagttatgttccattacatgttttactattctctctgttcttgtgcttctgttactaattttttccttcgtcattcttcttaggtacaaactccttctggagtggcacgaacccagaa

SEQ ID NO: 67450 - DNA, 939 bp, Cucumis sativus
  Intron number 2 from transcript Cucsa.165060.1 (locus Cucs a.165060) derived from phytozome v7.0 (chr-ID scaffold0115 3; pos 445258 to 446196)
gtactctcaatattctggttagtgaacttgcttctgcccattttgattttggaaaaaccatttggagatatggttgaaattgggtgttgtttgttgcatggctgatttcggaatttgaagcttttacatcgcattttttttggtcatttgccttttagatttaccttcaaattagtggttgtacaacttcaagattcataattattatgtgtcttgtctctgtcgttaactaaaataaaccatcaattagttggaatagcggagttgggtattgggcatgtcaaaaagtgaaaaacaatctggaagaattcatatgaactttataatcgaagcgcccaccaaatgatattaaaatattatcatagtattaagggcaatgttagtgatgagttagggaagttaacatgattacaaacagaatgagtggcaaatgatgtaggtaagcaattgtttagaaggttctaattccaagtacgttgtataattttgttctaattccaatgacaatcgtacatgttgtatgtaaattagtttatcaaaaaagaacagatgaaatttattgatatatgtatggttgaactttcagcaaggtaaaaagtccttcaaagtgggacaaactttagtcctccttgcacttctaacgagaataatgaattgaaaccactgtaaagagatttaaattctaaagtaatgtccttgtaggcaggtgctctaatttttctatacttgatatcctacacattgtttaagtaaaatattgattgaattgcaatcaaaccattgaaactagaagctagaaagccttctatattgacctccagtacttcaaagtttaaaaccctccatcttttatagcaacaatgtctcatcgttgccttgataattaatcacatgatccttaggataggaactctgacaatttctttgtgtaggtaaaca

SEQ ID NO: 67451 - DNA, 541 bp, Cucumis sativus
  Intron number 1 from transcript Cucsa.090320.2 (locus Cucs a.090320) derived from phytozome v7.0 (chr-ID scaffold0089 4; pos 1666561 to 1667101 reverse strand)
tgtcatttgtcaggcttttcgtttgtcttcttcaagtaaatatacttttctttcgctaatttcctctttcttgctcgtcagactcggcctattaaacaaatatttcatctgggatctgttggatttgcctttcttctcgagtttcttttatattaatatgagcttaggagcttaattttggatttgggtgtctctagattcattaaacaattgctttatttaataccccttttgagttgttaaaatatattttctcccaaaactctatttgactccactgatagggacattggttttacctatttgtgaaccactttgatgatttagaggtgtttaatcctttttgtattcaactgggttcgtcttattttattcatttggatttagcttgtgaagtttaaacgtgacttatttcccagtaaagaggcaaagagttcttttttttctttttctttcttttcttattttccaaccatgcctctatctgagctttatcgtgtggccagagggaaacttgattcaactcaagacaagaacagca

SEQ ID NO: 67452 - DNA, 816 bp, Cucumis sativus
  Intron number 1 from transcript Cucsa.137700.1 (locus Cucs a.137700) derived from phytozome v7.0 (chr-ID scaffold0105 3; pos 452259 to 453074 reverse strand)
ggtaactattacttatatctcctcgttgtatcattttctcatttaaacgtcccgccactctgaatcgaatatatttgaaagtgattttggagtggttaaaattatttgtaacatgttttttatccttctaaattaatttagtatttggctttcattttcaaacacaattttcattccgtctaaaattgatttttaatagcaatattttttcattggaattttgaatatgacaaaagtgatttttatcatttcaaaatagctcttaaacatttcagatttggtaaccattttgttttggtttttggttttagaaacgtaactattctctcttctaaagtaaaagagttgaattctttgtcaatttaaaaaattaaatatatttcttttagttttcaaattttgttttgacttttaaaaatagttaactaactaacaattttagaggtcgaagagatgtttgtagatttatttttcaaaagttaaaaactaaaaatcaaatcgttaccaaattcgtatttgtttcgagaaaaaaaaaaaagaaaaaaaaaggctaccagaccacccgtcattattttctttggatctttataaatataaatcttcaaatcatttacaaattctgattttgaatttctgttataactttgtgatgtatttaagtcacctatattgaactcattttcaatacatagaattgaatggaccaaagtattgtttaactttaggatcaaataatattgaaatgtaattcttttttgtttttttgggttcatcaatgtaggtttgatagggtggttcaaaaggaaagcgacgcat

SEQ ID NO: 67453 - DNA, 298 bp, Cucumis sativus
  Intron number 1 from transcript Cucsa.196240.1 (locus Cucs a.196240) derived from phytozome v7.0 (chr-ID scaffold0135 7; pos 25100 to 25397)
aaacttttgaagaggttttactcttttcttcactatttccttttttgtttgtctatgtctctgtctatgattattgatttagtttacggtaatgtagggctatttttagtacttggtcatggtatgaacttcaatgaactgaatggcatttagatgattaattttgttttctgtttcaattggttgaatctggagaatcaagcaacatgggtttagactagttttgatttctggttaacccaatctaacgatactgtaattgaaacgatttcacagaaagaattgggcgttacttggg

SEQ ID NO: 67454 - DNA, 1029 bp, Cucumis sativus
  Intron number 1 from transcript Cucsa.132810.2 (locus Cucs a.132810) derived from phytozome v7.0 (chr-ID scaffold0103 7; pos 667792 to 668820 reverse strand)
gatctgtaaaagaagagacccttcttctcaaacaggtgaatttttgtgtgttcattttgattgtccttcctacttttgcctagattttattagtttcttcacatatgatagcagaaactgcaatggcgattcattttctcattttttataaagaatggtgaatcattcgttccaaaacagccaaacaaaacaaactaacgagcgaagggacgaggatgtctaactactagaagagtagttgtccacattggaaagatttatggaggtgatgggatcttagttcagtaaaaggagtatatgactttggtttagagtcgttttggttagaaacactttagttggactaactttagtcaaattcctttttgtattctctagtttgagagtgaataccaaataatttaccaaagaaatcccatacccttttcgtgagaaggtgactcctcagttcctttgcaaataacacatatatttggagactgatcaattacacacttgattgctatggttgaagactaatcaactgtttcttttgtagccaatgggaatttctcttccctgttgggattctttatcttttactagaaagtgaagcacaatactcgtctttaccttatcattgttctatgtgcattaaattaattactaagagatgattttgaatgtgtttgagaatcctttagaataaccgctttgcacttttaattccaaataaaatacttaagaataagctattcaaatgtttgctttgctccttgatcgaagtaaatgggccaaaagtagtctataaagtgttgcgtcagaattatgattttattttaagaaaagacttgttctaagtcactttatatgacttttaaaatagctttagctttattataattgtgtttcaaccaattctagaccatatgtaatgagtatctccaatattttaaaccatggagtatattgattgatcattgtcgaattaagtgattgtcgattgcacttttttttcttttgggggggggggggtctttattaaaggca

SEQ ID NO: 67455 - DNA, 611 bp, Cucumis sativus
  Intron number 1 from transcript Cucsa.046660.1 (locus Cucs a.046660) derived from phytozome v7.0 (chr-ID scaffold0054 2; pos 2045278 to 2045888 reverse strand)
gagattcgtcaatcacgggtaaacgatcaacacgggaatgggaagacaatttcgatttcaacatcatggagtttgaacagccaatgttgaagagaaagaccagcatcaataacatgttctataacgatttcgacgtgtttgagtttcaagacttggggagtggttatttagataacttgttgtcttctttatgatatatgatattgtccaaaaacttcaacatatgggattggtaacggcaaggttttgtcactaaagaaaccagcagagaaggaaacaaaagaaacaaaatccctcagaaaacatatatcaatttgtgattcattattgtcgttatgacaaccatcattcacttttaatctaatatggttgattgaattcattcttccgaaaccacaacaccataaattccaatctaatttgtgtctacttgtgttctatttcccaaagcataattaacaatcaaagcgtcaaatatatatacacataaagagagggagagagaaaaaagaaaaccaaacaataatggatggcaattagcaagtaacataacaaattttagccaattctattcaggggctttgcaatctgattctgttcttgaagtcgcc

SEQ ID NO: 67456 - DNA, 502 bp, Cucumis sativus
  Intron number 1 from transcript Cucsa.076160.1 (locus Cucs a.076160) derived from phytozome v7.0 (chr-ID scaffold0078 9; pos 599355 to 599856)
atttgcagtaagttgttttgaactcatctttcaagttttatgtactctctggtatactgattgcacaccttcctgcaatgtttactggcttcagtcattattgttttttacatttctttctttttgagttcaatcaatatgttggaaaactgtatttgtaattatgttatttaccattttggctccaaggtttagtgaggtgtgcctttgtaatatgtaatctcctatttctctataatgatagtacttctctctctggttgtggacagagctaacaacattgttcgtgaatcgtgtgaatatctatgccgatctctatattgttcgcattttttttgtttcttttgatcgtcaatttcaaaacgcaatatatagctatattcaatttaggtacatttaatttcttcttttccattattagaattacagtattaccaatagtcgtatcttcgttcaatgttcttcaggtaccaaataggtctgcggtatactggtggtgctc

SEQ ID NO: 67457 - DNA, 496 bp, Cucumis sativus
  Intron number 1 from transcript Cucsa.184580.1 (locus Cucs a.184580) derived from phytozome v7.0 (chr-ID scaffold0127 4; pos 256241 to 256736 reverse strand)
gagattaaccaccgaaggaacatcaagttgaccaggtatacttctactgctactactactactactactacacaccttccacccatctttctgcattcacactatccaaaaacttatcaaaacagtcattataaacagtagttgaactgcaaaaagatggaatagaaaaacttaaaaaggagtcggcctgtctaagcaacaatggttggacaaccaggtggattgcaaaaaaaaaagaaaaaaagaagaagaaaaagagtacagcatagccacaaaataatagacatttttgttatatagtacgtgaatagtgcaaatactttagtgcattttgattattaatttatttgtgtgtttgttatatgttatgaaaaatagagggaaagttgtaataggtggagttgggtgcatggtaaataattagaaaaatgggataatgtatatgaggagagtgcactaagaaatgtgtgtccaaaacaggataccaaaagatata

SEQ ID NO: 67458 - DNA, 903 bp, Cucumis sativus
  Intron number 1 from transcript Cucsa.041700.2 (locus Cucs a.041700) derived from phytozome v7.0 (chr-ID scaffold0054 0; pos 274242 to 275144 reverse strand)
tttgatttctttttccaccttccaaatccactcaggtaatcccttctcggcaatctgctgtttctctcaattttctctgacgatttttgttctgcttttgaatttttttgtttttttaagcttcattgttaaaatgcttagatctttactggatctttggatccaacaccattttgaaggtttcagtgattttgaaatggttaatatcattctttctatatgctttttaatttattcaaaattgtacttgaaagcctaaattgattttgaaggacgaagggtatgtggaggagtgttttttaacatcacaaaagtgattttaactctttttctttgaaaaatcactagttgataattatcatgttattgttggtttctgggggtttgattctttttttcaggatggaaaaaagttaaacaatctaaaaccatttatttacataaagacaatatgaaataggaagaacaagaatggaaagacatgttgatgttttgtttagccttttttttagcctttttcggctgagttttcttttttttgctttgtgttgtttgagagctaggattggatcatgcatgttcattctatttccatctttcaaataaaaatgtgaatgctaattttgtcgctaaaaagatttagattactggctgaagttcaaaattattacatgatttgttttaaatgttgaacttagattttgttgcaatgtaaatacttttgagtcttgaactcaaggacacacttgtactgcctttagaataaatcctgttcgagtgaggttgttgcaatgtaaatactagttttgttggattacttgctgaagtacaaatagttacgtgatttgttttacattcctttccctttagaattcgtacgtttgggctcaggatcgagtagta

SEQ ID NO: 67459 - DNA, 564 bp, Cucumis sativus
  Intron number 2 from transcript Cucsa.013020.1 (locus Cucs a.013020) derived from phytozome v7.0 (chr-ID scaffold0016 4; pos 829133 to 829696 reverse strand)
gtccttccgtcaattctccaagctgggtatatataatatatatatatatatattatatctatatatcttcttcttcttcttttgttttttttactttccattttaatccttcaacttcagaaaaaagggcctaaatttaaaacaaaataaaaggtttttaatttcttatgaggagttgaatgcagatgaatgaattcaaacatccaaacaatggagatatcaaacaagatgcctctgcccaatgtgtttctcaaggtatcatttacttctttcctatatcatcttaattaatatattttataatttcactttactcagctttttttctttttaatttctaatttactattagatacaatattaagttggaatactcattcataatttattagagatttgaacatccagaatgcacttttctgtctctaaggtttgaattaaagtccaacgtcttagttatagattaagtgatttggttttcttacttatttggaaattctattcatttaatattatctttttaaatgaggaggattcattatttccctcttctcttcacaccat

SEQ ID NO: 67460 - DNA, 913 bp, Cucumis sativus
  Intron number 1 from transcript Cucsa.066000.1 (locus Cucs a.066000) derived from phytozome v7.0 (chr-ID scaffold0069 6; pos 583744 to 584656)
tgagttcttccgctaccatccaaggagaaaacgtaatcccttccattcttttgcttcgtttttagctttccaagtgtttgattacatgacccatttggttgttttgaagtttgctgctacagatgggtttctggtcatttttcaagattatccttatttcctgaggggaaatgtgtttttggtgtttagcttctctttttttggttcaacttggtgtttaatctgtgatgtgattaaggggtgtatttgaattgattggagttatttgaacgtgtttggttttggttgatttatagttcatgaattgttttggtgtctaaagtttagttctgagatctggatagctgatctggtttgtcttggaatggatttttgtgattgcaacaagtggatgatttagtctaatgatcaatggtgcagacggattacagaaacggttcctacttttagtagtttatttatttccctctcaaaggtcaaatctaccttttgtagttgtatggagttttgttgttgcaatgatctgagttttgcatcatgaactgagaaatactatctgtacatgcacaagtcatttacttttgtggcattacagaaacaggagaagctaaaagaatatttgagtttgagttgtgattttcattttcaataacaagatatttcaatcaacaatcctcgattctgttaaggaaggaaaatcattttcacacattttcatttgcttacctataactataaggcaaatgaaggggttaaaaggtgtgtgttttgggggtcagtcaaccatcatttttattgtatactaatcggtgatcaaatatcagaaacttagcttgaccatttagaatgattcaagtttttttcaatcctaagtgtgttgataagaacactcttttgtgaatctgataggcca

SEQ ID NO: 67461 - DNA, 790 bp, Cucumis sativus
  Intron number 1 from transcript Cucsa.174420.1 (locus Cucs a.174420) derived from phytozome v7.0 (chr-ID scaffold0122 1; pos 72211 to 73000)
ttttcttgccttctctacctttcttgcttcaacaggtttgtttcttcttctggtttctttttctactcttttttttaccctcattttgacttaatgggtggcagtttgtttgattgttttcacaatagtctctatctttccctctttttggtcatcttttgtgactgaccggctctacaatctgtttttcttatgttgaatttgatgactgattaaatggattacttttgagtttcaggggtttatttctctccttttttttattattattttttttattttgatctttttgggtcttcgtcacctgggtggacttcagttttctgggtcttctttcttgaactttcaaatgggtggttggttcagagttttctggctaatgcattatgctctctgcatgactctgcacaaatgattctgcctccggaatttgacgagaaatccctgtttcttcttttttctgaaagttgatcgtgattatggttatgattattttaattttatgtttgtttaattttcggagagaaactgagagcaaagttaaaaaggagtgcctaaatattggatgagaaatgatgtttacctaacacagttataggttatattcttggggctactaattctgtgcatggatcgtattacttttttcttgtgggtttcatctttttaattattgttattttactaatatctttcgagcactgtttgatctctagagggtgatgctgatttatcgtcttttttttttcctctccttttttatttatttgattttctttttcagaagcgt

SEQ ID NO: 67462 - DNA, 439 bp, Cucumis sativus
  Intron number 5 from transcript Cucsa.059940.1 (locus Cucs a.059940) derived from phytozome v7.0 (chr-ID scaffold0062 1; pos 508685 to 509123 reverse strand)
gtctactgctaaggtacaatattgaaacactgccttcgtttccaaaatgtaatttcagtggatgcgaagacaaggatttatttctattttttttgttattattatttttcatttgatcctatatttctttctcgtctttctgtattcttatgttgaaggtgatacttgattttgaatttctgttgtttcccttctcttgttccatgtaatatatttttttccccatataacttattacagatagggataggtgataaataagtttgttaggttattatacatgcagtggatttctttattagcatactaattgcggctctttgagatttagatatcttaaggtaaatgtggaccttttgtaattttctaaatatagttatcatgttgctttcataaattttcagggaggcattgttggacccttatctttcaagatatt

SEQ ID NO: 67463 - DNA, 569 bp, Cucumis sativus
  Intron number 2 from transcript Cucsa.107140.2 (locus Cucs a.107140) derived from phytozome v7.0 (chr-ID scaffold0093 0; pos 601719 to 602287 reverse strand)
gctttggggttttcaccttccgttggggttgcaaggcaggtaatgctttgctttttcttttttaatattcttgaatatcccgagagaggaaaatgggaaattggattgatataaatgctggttttaaaatttgaagatttagaagattgctgaagctgtttgaatattgaaaagcacagatttgatggctatcttgtaaggttataaatctttaaaatatgtataaacttcacactctgtcagtgtcaactatttaaaaacataaatattgtacaaaaaaaaaaagccaccaaaacaataatattgacagaattgacactactttcattttttctcaatgaaacttgtttccataaaaaaaaaaaaacacaaatattttaccttttctttttagattgttgtatcctcaaacgttagaccttggaccacaaatctatttattaatttagttttttaaagcttttcttcatgttatggataattacatttaagagttttatgtgatagaaacgatatcaatcttctatcatgcagaggtaagggttctagagctcttttgaaaaggtaca

SEQ ID NO: 67464 - DNA, 612 bp, Cucumis sativus
  Intron number 4 from transcript Cucsa.154570.1 (locus Cucs a.154570) derived from phytozome v7.0 (chr-ID scaffold0113 2; pos 108199 to 108810 reverse strand)
cctcaaggtatttggcactttctaccaacttgtatctaaaaaaaatgatcgtccacaggcagattgattaatttgatataaaacaactttctacttgaaaagttatttatcttccgttcaaatgcaattacactgtagacaatggagaataagactattggataccatgttaccatagaaagctagtagattatggtatattcaattctgtatacatatatagacataactatgtcttttgctttggggcttgtaaacacattttggactcaggtgtgaatcagaaaaggaaggagagcaaccccttagtttggcttaaagtaatatatctgcccttaaattttcaaaatgagaaacttagctcgtaaaactttgtcaaaattccgagctcaccgctgcttggaatagcgagataggacttaataccatggatgtgtatattttttagaaaattcttacatgtgaacaaggatagggaactttcatttcattaggatcactctcaaggattatggtacagtgcattaatctttgcttgtattgatagctaaaaaaatgtcatttcctgtttggacaggggaaagactcttgcaattggagagcgagaaggga

SEQ ID NO: 67465 - DNA, 709 bp, Cucumis sativus
  Intron number 2 from transcript Cucsa.089950.1 (locus Cucs a.089950) derived from phytozome v7.0 (chr-ID scaffold0089 4; pos 1350359 to 1351067 reverse strand)
aacgaggtatgtttttgagatggactcttcatcttttttttctcattttaattttgactgcaaagatgcttttatgatgaacagaataacaaaaaaatgaaaccgttcatttgttttttaaattgcattattctattctatatatagaactccttatgctaatctaaaatgactaggtttggaacgtacttgtttgtaatttttgtgatatgatactcagtcttgttgattgaagcgggttcttgctggagccttgatgtgtcttgaccaatgattcttttttctttttgaattatggactagtacaaagtatatatagataactccaataaatagttttcatgcacaaaacatgtctacagccagatgctcgttaatgaagcattgctattaaggcatggaatcaaaaatgttacatgtttgctaaataatttaattctcagtcatttttacacacatataagtaaacatgggcatattatttgattttgtgttcagataaaaatgaatttgaattttctttaacaagttgatatctattgtcattttttcaaccaggttttcaattttttgtttagaatagattaaactcgaagatttcttactatttagcatttggaagtatgaagctcttgagttcactatttgtgtttgatctaaaactttcacatttcatttgccagctcttggtgcattcaatattgttgag

SEQ ID NO: 67466 - DNA, 753 bp, Cucumis sativus
  Intron number 1 from transcript Cucsa.089950.1 (locus Cucs a.089950) derived from phytozome v7.0 (chr-ID scaffold0089 4; pos 1351113 to 1351865 reverse strand)
tgcttccttcaatcaggacgctaggtaggttcttccttctctctctctctttcttctttttttttttctgtgtatcaaatggtggtctgatcattctttgattccaactacttcgaaactcattttcattgaattttgtgtaatttggaggtgtgaggaaaattatgttagtttttttttttttgtgtgtgcttgttacgtaattctgttttagagtttttgtgagctagctggtgatattgtgtatgtgtgaatattgtattatgtattgaatatcgttttatgaatagtttggtgtttagtaacgttgagtttagtgtggaggaatgagggaatgaatatcgtttagtgttgagttttatgaatatcgttttacgaatactgagtgaatgcttcataatcataggatttgagttattctaggagtccgaattttatttcaagtcctacaaatatgttggccctttatattgttgaagcaagcatgtgcagaagaaaaacagagagttgaaaagagttcaaagtgtagtgacattttttttcctgttatacatatctcagccttttggctaaagatcaactgttgacattgttcttgtttggttttttttcttgtctcaatatcctctttgagtgactaccccatactttgaagaactagatgcaagtaataataaataaataaacatataaatgagtgtctaagtattggtttggttggaattggcagtttatttgcaataggcacaagag

SEQ ID NO: 67467 - DNA, 697 bp, Cucumis sativus
  Intron number 1 from transcript Cucsa.073230.1 (locus Cucs a.073230) derived from phytozome v7.0 (chr-ID scaffold0076 5; pos 819234 to 819930)
ccctctatcaggtatatctattattttttcattcatttttctatgattatttttatcgacaaattgttgaaaccaccatctcaaccaattatgcaccctcaaacttatacaagtgttataattaaaccttcaaacttacgtaattataacaattgtctaagttgtttgtaagcttaatttagtttttacaaattttccttaatttactaatatggtttccttgattcactagtatggttggtatccttagtaaaattacaaattgttagaagttgatatagtttaaaaataatagtattaagaaaaaattgttccatgcatgccatttaactcaaatatcttttatctatgatttgtttgtgtttgagattgttctccatgtgttgttgctacatgttaacacattaggattagaaagtttgatagctaattgaatggcttggaagagtattaaaccaaaacacatgttgtgtgtgtgtcagtttgagcccaaaatctgtgttgatgaaccaatgatcatccattctctaagtgaagattattttgttttgggcaggtggttccatttgtatggtacatgtccatagccactttgccagcaggaatacttggtaaaagccccttcttccttcaacatttcaataaattctatatcttcacagatatatccttacatttttctctatctagaaattgg

SEQ ID NO: 67468 - DNA, 669 bp, Cucumis sativus
  Intron number 1 from transcript Cucsa.047810.3 (locus Cucs a.047810) derived from phytozome v7.0 (chr-ID scaffold0054 2; pos 2710159 to 2710827 reverse strand)
tttcccttcattcattttcatttccacagataagggtatgttctctctcccctcatttgttcttctgccacgtctgatttgttcttctcttatctgggattttgtggtactacatctatgtgtattgtttcttcactcatttgggtatttcgagtttttgtgtttcatgcagttcttattcgtttattctctgtttcattgatgtgggtttggattcttttagattgacgttcacttctgctctatgaatttgattttgatgatgatgggtgggcttgttttctgtttcattgtcggtttatctatggaacttgagtgaaatgaatctgatattcactggttcaattagattcatatcttgatactcgatgaatgttcgtttgcaatagttttcaagcatggaataaagtatcgataaacgcatcttctgctggtttagatgaataaaccttaaagtaataaactaataactagtttactttgttaatcaatgattatctcgtacatcaatcgtattattcatgatgagacttgtactttcttggtcttgatgagaattgttgcttcatcccttttcatcaaatacctgacagatcgtttcaatttgttgggttttgaattaatttgtctaattttcttaaacacagctttaagtaggttgctgaaaag

SEQ ID NO: 67469 - DNA, 558 bp, Cucumis sativus
  Intron number 1 from transcript Cucsa.120390.1 (locus Cucs a.120390) derived from phytozome v7.0 (chr-ID scaffold0099 8; pos 2498049 to 2498606)
acttgtttgaacgagtgtaagtttcgatgattctttcctgggctaggattttctatgtaggttctctgttttcaactctgatctaatggaaaaattaatttttgtgaaatgttctcttcagtgttctttgatgttatatggttggtgtttcacttttagaattagttgaagttcatagaaataaagactaagaaaaatggtcttttcattctttctgtatgtgtcttgtcttgtatgcagagcatatgagcttttgtctcttctaaaatctttggtgtttacattctcatatgttgaactgagaaattttatggcagcttgaatatttagatgctatgagcttgtttgagctttggagtatgctgtctgtattttatttgttggcctctgccagattttagattagcaacaaactaatatcagaatgattgaattgagccaatttattctataatatgttgttttcttcatttttactaagatgggaataattcttctgctgatttttggttcatatgtgcagcagctttagataaaggtttagaacagcaactcttg

SEQ ID NO: 67470 - DNA, 1038 bp, Cucumis sativus
  Intron number 1 from transcript Cucsa.032820.1 (locus Cucs a.032820) derived from phytozome v7.0 (chr-ID scaffold0042 9; pos 2070749 to 2071786)
cttgaagaaagccggcgcttctggagtcagagcaggtatctcactctgttttttttctttccttcaatttaccttaaaagggttattgtagttctatgatttctttgcgattttttttcttcaaatttctgtaattgggtatggaattttttgtaatttgtacttttatgcctcggttcttccgttattagagatggatcgtctattaatgaagttctcgacgatttttctttatttgaattgtgaaattgaatttattatactcatttgttaatcaattatattatttgcttatttggaggcctattaccaaaaatggtatgtatagctctttccaagtatcagactgcatactgccaatgtcatgcattgtaaaatagtggacatatattttttttaactactatttgttccttggcagatgagtagccccaaaagtttaattccttatatataatttgaattgagttagtggcgatgaatttagttctatatcattttaattttatcggcatgaatgaataccattgtttaacaaccttcagccgcctgaacgtgactcgatttgattcaagtctatgccaattgggagttttttttttttttgttaatcactttggcttcatggagatatcttatctgcctttgtgtagcttcttttcttgataaattttgtttttcattcaaggtattaatcagagttgagagagttgtttctttctagttactcttgttggcattgatgtatttaccatttacgtttatttgtttgtttgtttttttttgtatctttttttaagtggttcctttctagattttgtattttggagcattttggtctcttttcatttacttttgtttttttgtatatatatgatgtttgatgaaaatctcctgcctttgaaattgatgattggcgcttccttatctgtatgatgctttatatgcacggtaactgttatcttctcagtttcactgtaattgatgtgatgattaatgtcaggagttggaggctattcttacctatacgagcctctt

SEQ ID NO: 67471 - DNA, 480 bp, Cucumis sativus
  Intron number 1 from transcript Cucsa.057670.1 (locus Cucs a.057670) derived from phytozome v7.0 (chr-ID scaffold0061 4; pos 60666 to 61145)
ttatctataacgacccacctgaggttctggaagaggtaataaactaatgattctgtgctgacgaattatcaattacactgtcatctcaccccaatgaaatcaaaccattgaccacctttgaaaaggaaatttacgtatatataagagatcgtccgccgttgaaaatcttgactacttttgttgggacatcttgactacttttgttgggacataaaccatacacgtaccatacgaatgaaacaataacatcatctcatcattgatacgagactttcaaagaattgaccataacacgtggattgaaacaaattaattcaaacataattaagtggaagctagagatattggagatattacctttagtattctaactttaaaaaaaaaatagaaatcaatacactgttgaagaaatttaaaacttgattcattatgaattgaatgtgatcttttaagaacgaaatttcttttggttggcagaaa

SEQ ID NO: 67472 - DNA, 393 bp, Cucumis sativus
  Intron number 1 from transcript Cucsa.045760.1 (locus Cucs a.045760) derived from phytozome v7.0 (chr-ID scaffold0054 2; pos 1486730 to 1487122)
tcgactctgacctccctctcatccgtgttgaaaaggtgttggagtagtttgttgggttgtttttgctctctctgtttccaaaacaaaaatctcgagctgtgtgatcaaatgtttttggtttaacttgtggtaaaactcttaccagttatggaaatcaccagcgcccttaattatttttctgctaaaatttcgccaaatttgtgtagattctttttttacagctcattctttctcttctccaatctgtgtatttaatgatgccgttcacactccctctccttctaaatcatactttgcatataagaacatcaaatttctacaactctctgtcgtagtggtttcatcattttttttaagatactttgttttattgtttgggaatagggatctacc

SEQ ID NO: 67473 - DNA, 597 bp, Cucumis sativus
  Intron number 1 from transcript Cucsa.189330.1 (locus Cucs a.189330) derived from phytozome v7.0 (chr-ID scaffold0130 5; pos 35507 to 36103 reverse strand)
gccgcttccctgtacttatccacggcggtgctaaggtataatttcgattttgaatctgatttctgaatatagatttgaaattgcttcatttggatggtgggttttttccttgggattctcatcgtatgattgacgacgctgattcttatgcgattgttttgtttttgtttttttctgtcttgttcttttaattaaaaattagggatcaaggaaaaattgggaagatatttggttttgttttgttttgtttgtggcatttttattttcgaaaatgaaagttttggatttgtaaagcatgattttaaattgttaatgatgatgttattgtttgttttggctgcttttgatttcatgtttctaataagaagatagggactatcttggttgacttttgtttttgcctttatttatagtggaattctttccactttttcttttgaagggtcactttttttcctttttttttcttttcctttcattttgtattcaacaacccactttttcttttttgctttagtgaccaaatttctaatgttggggttttcttatatatatttgatttcagagcttttcattggataaaaagacagggaaaaa

SEQ ID NO: 67474 - DNA, 680 bp, Cucumis sativus
  Intron number 1 from transcript Cucsa.113670.1 (locus Cucs a.113670) derived from phytozome v7.0 (chr-ID scaffold0095 3; pos 1773708 to 1774387 reverse strand)
tgcttgctgttaccaaagagtgagttctcatctttcttcccttttccagtttttgatcgattttgttttcggattcgattttattgttttttgcgggaattttttttgttttttttgtttttggcggttcatgatatgttttctcaaagctgatttcgcggtggaagatttgtctaaatttctaaaacaaccgtatctctcatctcattattatgcgagaggaaggaaaatctggaaaattaattagtgcaagttataagtcacgtacaatagaactggagttggatttcgatatgaatgccttgcctcttttgaatgttggaatagtttattgaaatcggtgctgtttcacttgaggaatttttttggtttttattgtatcgagttggttttctttttccttttatctaatttagttatttgccatctctctctgtatttttgtttcaatgaagaaatggttgctgtttttattgcttaagctttcttttgtttttcttgttgcaatttttaatttgtaggtgctttttttaacttgcgtcttagaatttcttttcgtatgtttaaattgatttcctcataagattggatttcttactagttgagcttatctcattgtagaagtaacttctttccttcgtgtatatctttttagtgcaggtccgtgaagacatttacgt

SEQ ID NO: 67475 - DNA, 812 bp, Cucumis sativus
  Intron number 1 from transcript Cucsa.085690.1 (locus Cucs a.085690) derived from phytozome v7.0 (chr-ID scaffold0087 0; pos 132903 to 133714 reverse strand)
ctaaatttgaacggccaacaaaaaaacccatatctgtaagtgctttgctctttcccttctcatgacttctggtttttatatcccagacattgcgtttgccaatctgagtttttatcgtttctcataatgtttctcttcatcttgcggttccttgattggatcttggaaacatacacacgaacacactgttttatggattggatattcatgaaaggaaattggaatttgtttttctctgggttccttcaaaaaaatgtctgtaattttgattggtttggatttttttagatggtccgttataattgtttcaggcggtatttgaaaattacacgcgcttgatgttatcatcttcaatgtgacatattgtaccctgtatttcgaatcagtgattgattttttttttaaaatgggacactcttaaattatttgaatcattggatgttctaagtctcttaattttagtatctaatagcattggaatggcccggtgtttctcaaattgcttgcttgcgacttgtgctaaataattttgttgttttggaggaatctgcaaattattagcgacttgtaactcgaactttcttttcctttttaagccgtttatgaaccgtgaccatgatgtatttgaattttgtttccaagcatcgtagtattcattgcctctattttacctacctatttatttggatttcaattcaatcttgctctttcctaactaaggttacatggtatgctttaatttttaaggtagaactcattttttttgcctaaatttctttcaattctatgttcagatattttagagtagcaag

SEQ ID NO: 67476 - DNA, 791 bp, Cucumis sativus
  Intron number 1 from transcript Cucsa.018320.10 (locus Cuc sa.018320) derived from phytozome v7.0 (chr-ID scaffold002 52; pos 755593 to 756383 reverse strand)
gcgactgtcattgccgggatagtgttctcatcgctgtatgtattttcggcggtttactcgtcttcaaattctgtttctgattccagctcctggttttcgtctacttcctctgaatttaccagtacgtgttgtctatttcttgtagtgtaattacacttgacttgatcatgttcttcttatgtcactgggatgtatggtagattgtgattgatgatgtatagaaatttagctgattttctttccttcttcgaccgcatttcgatggattggttgactttatgtactgtaagctaagttgggtttgcgcttgattgagcctaatcattcagtaatgattttgttcaatttttatgtatcaacaatggtggggttggaaactcctctctctgacatttttggctaaacccttctcaaaataaaccatcagatgctagttattgggctgttacccaacatttttgctgttccaatcaacttgtaagataaacgtttggttttgttcattcttaaactggcccttcaatgcttaattttgtcgtctattgaattgttgcattgactaatttgttgtatccaatacaatattagctgaagtttgatttccataacccaagcccggttctcgtatatgcttatgatgaaaaacatattttgggtctggatgcaagttttttttctttcccttgtgcaactccctgttcgtaattttatcactaattggtattgtcctgtgttcggtttgctttctctttctagatttcgattcaactcttatcaaggatcaaagatca

SEQ ID NO: 67477 - DNA, 764 bp, Cucumis sativus
  Intron number 1 from transcript Cucsa.091490.1 (locus Cucs a.091490) derived from phytozome v7.0 (chr-ID scaffold0089 4; pos 2493962 to 2494725)
tcaatccagttcaagtgagagaaacactaaagaaggtaatggaaagttgatggtttggtttcccatttggggaattttttgtaaaagaattacatttagttcttctgttctgagtgtgatttgcatatgagatctttttgttgtgatttaagtttttggaggaaaattgaagatctttcttcactttcagtttattgaaaatttaactttggtaggtctcttaattttattttttttcttttgaaaggcatgatgacagcaatgtttctatctttcatttcattttatgtttcatttctctaatctgagttcttcattttcagtacaaattctcagctcaaaggttgaaaattttaaattctgcttcactttctatggaaatgaacgctctgatctttggtttccccagctcaatgttcatcttcaatatttgaagaatccaaaatttgagatttaaaactcaactcaattcaattaacacatgatatttgaacaaacttttagctctctctctctctgtttctaatagaagccatatgcaaacaaacaaacataaaaaatcattcttattcattttctcagaaaacaaacagtccccaatgacttcagcaagaacaatatatgttttctttctatgtagccataaatggatggagaaactcaactcctattaaaaaatcaagattgagcaaacacttcagcttcttcttgttcttacatttttggactaatttgccttgttttcaatgtgtttgaaggtggaa

SEQ ID NO: 67478 - DNA, 291 bp, Cucumis sativus
  Intron number 1 from transcript Cucsa.136550.1 (locus Cucs a.136550) derived from phytozome v7.0 (chr-ID scaffold0104 4; pos 1165482 to 1165772)
agttggtgcgtgacacggtcaaggagctcctcgatgtaggtttttcagattttctctgttattgttattgttttgtttgtgtgtgtgcttcttctgtggctgttagtgggtatgtttttcaagtcattaaacaagaaagaatgattattactttatcctttttttatattcagtttggttttgtcattatttatgggtgttgcctgaatttttttttgtttcattacgtcaatttgattttcatgcaatcactgcaacatatgcatcacgtgaagaattttctttaggtat

SEQ ID NO: 67479 - DNA, 877 bp, Cucumis sativus
  Intron number 2 from transcript Cucsa.136550.1 (locus Cucs a.136550) derived from phytozome v7.0 (chr-ID scaffold0104 4; pos 1165854 to 1166730)
agggtgcaatcgaagtggttagttattccccaagcttgtgattttcaggctacttttattgcatttggttcttgacatgcacacgttctttacctttccatacagtttatgggtgattaacgatcccatcagagaaccattgatgtttgttgtgttgggtataagaaactgcttgttctgtagtttttagtaaactattagtattaggcatccttcttagatggaaaggtacttaccggactgtgtttttatataaataagagtcgaaatatttagctccaaagaaactcgaattcaaaatttcaaaggagctgtttagcccatggagttggacttggggagtgaagttcagcctcaacttcagaagtttgtggctccataattcacagccatcagccttttgctttattgacttcttatacagtgggcacacgacttcccaactccccagagtgcacaactccactccttttgctagttcttgtcaaattgttggcagttagcgcgacatttgctcatgcatatagtttttattattcttttacttgggagtactttaagctgagcttctaatcacataatatttctacggttcgtgccagctgggaattgtgtttgtagttcaattggccactttaaattcaaaatgttaatgaaaatgactgtcgttatgttgaactgtttagagaattggtttttctcccgtgagcccgttgatcctattttccaagtcatgagtgatctttttaaacttcacccctctggtagcagcatgattgacttgactaattatcagaataatgcacaccttgtatttttttccaatgttttatttcttcagttttttcacgtttgaatgcccattttctgaaggttc

SEQ ID NO: 67480 - DNA, 567 bp, Cucumis sativus
  Intron number 1 from transcript Cucsa.108520.1 (locus Cucs a.108520) derived from phytozome v7.0 (chr-ID scaffold0093 1; pos 661770 to 662336 reverse strand)
gcagtgattgtggcagcagcatcattgtggaggtcagtggcggcagcttcatggtatgggaatcattggcaatagggttttccaccatcgtttgtttttttggcgatgatggcttgggttttgtcatcaccatgctctgatgccgtattgaaaagaagaaaacaacacaaggtacatgtagaaaactctagtacaggaagaaaaaaccacaatagaaccacaatagaagccacttttgttatttcctaataatctaaaatatacaggggtgaagaatatatatataggttacaagccctaacaaataaggaaataaaactaggggtacaataaattacaaaaacacccccttatttccaaccatatatatatggtgactgattctttttcccctcattgatatatatatagcgtctgattccttttctcctcgttgatgttcggatcttaaggaaaaaacacaaatggttataacgtaactgcttcttagttgtgttctaaatgtgataaaatgttcattcaaactcttgagagaccattacttcttttcgtattggatatttgatc

SEQ ID NO: 67481 - DNA, 459 bp, Cucumis sativus
  Intron number 1 from transcript Cucsa.018340.2 (locus Cucs a.018340) derived from phytozome v7.0 (chr-ID scaffold0025 2; pos 768276 to 768734 reverse strand)
agttctcatttcctatttttgtgaagtgtgtataggtaagtgacatttagtaattttgaactcacttttcattcgtccttcaactttctggtttcttatgaagcaaattggagagcgtttttcctatattttttagttagatttttgtgagaatggctttctcaattcttttaagtttcatatctatatattttctggaacaaaagaactccgctattgacagttgctatgcgaagctcgatcttaaagatgatgttggcatgattcaaatggttctcccaacgttgttctgtcgactcttcgattctgaggacagcttttgtagtttttttacgagaaccgctatatagtagtctataaatttccttccatttattaactgacgaactttctttgcttattatttatggagaattttggccatggactctgaaacctttgtttgatgattagttggag

SEQ ID NO: 67482 - DNA, 661 bp, Cucumis sativus
  Intron number 1 from transcript Cucsa.046240.1 (locus Cucs a.046240) derived from phytozome v7.0 (chr-ID scaffold0054 2; pos 1809098 to 1809758 reverse strand)
ggatctggcttgggattggctaaggcagattgttggtgacattcttcttgctctatcttgggtcttctttcttgtttattcctggagagaaaaatatgattagtttccctaactaaattgtcgagtcttttcttttgattccaagttacaaattgcattgagatttttctgggtttgggtatctgttcaaaattggggaaagaacgctactgattcaaacattcatatcgcagaaaggggacaatccatcccactttcccttgtgtgtgttgtgtcttttcttcttttcatttcttgttgattgaacaacgtttttcagctttaaaaaccacaatcctttttgtaaatattatgtgattattaataagtccaatgaaatataagtcatacttgatgctttgttgtcgagttcattagtatagtaagtcaaatgaaatttaagtcatacttgatgctttgttgtcgagttcatcggtatagtgaaagataagagctgtgattgatggaaagaatttaatgaacttccgggccactgaattgtcatgagatatgattattaactttgtgattcaagagctgaagttctgtattaatctgatgtcttaagttgaacggatttgttgtagaagccgatatcactgattcacttgatttcggttgg

SEQ ID NO: 67483 - DNA, 919 bp, Cucumis sativus
  Intron number 1 from transcript Cucsa.064820.1 (locus Cucs a.064820) derived from phytozome v7.0 (chr-ID scaffold0068 8; pos 2521 to 3439)
gtgcgggaagggaaggtaacttgagaaaatacattttaaacttctcttttactctctctctactgtttgatttatctggtcagtattggggatagagtctatattaagtatagattgtctgggaacttgagtggactggaattatcggcactagtctactagggcctttatctagaaggaaactcatattggtctggccccacgcgggccgtaggcgggggattcagggtggaagagggggagagaatgacaatcccttccactcgaagtttagttttatctaaatacagaagatgtcgaatatgagaaaattgtaggtatgatcgttagcaacagggttattttgttttgtctgcagccataggcaataattgttctgcaagcaatgataattagtgatgttgtatctttggttgctcaatgattgttgtctgagcagagtaaaaccattgatttcaagtcaacggtaatgctttattgatttttagaactctaatggaaaaaaaatcgcaacagctttcaattaaatctcaaattagcttaaaaatgattcttcaaccgtgagatagtttctttattttcatttatctgctttcctttatgttttccccgaacaatctctggaataagttctatagatcgtcattagggggaagatttggaatttaatcgttcttctccctctatctatagaaccaaaatatcacatgtgaaccaggtgtaacggatcagaagtcagttgttcagtttgtgtcactctgtaacagtggccctagaaataatggaaggtcacaccatatttttgataaacataagtgtgtacctacaaatttacggtcaaaattatattaagtccgttattggttttgtctgtattggtttagatcaattcatttattcactgctttgtgggggtgag

SEQ ID NO: 67484 - DNA, 241 bp, Cucumis sativus
  Intron number 1 from transcript Cucsa.148580.1 (locus Cucs a.148580) derived from phytozome v7.0 (chr-ID scaffold0110 7; pos 645970 to 646210 reverse strand)
gctgctcaggttttattttctttctttcattgtcacctctctgttttttgtttggtttgtgattcttttatgtcgtcaactttttaattggaatttggagtttggggtttggtttttttgtcttctacttttgactctcaattccctcattaattttcaagaatacaatttcgtcatctttgacacacccagtttttgtgtttcagttacccggaagaactgacaacgaaattaagaatta

SEQ ID NO: 67485 - DNA, 462 bp, Cucumis sativus
  Intron number 1 from transcript Cucsa.131880.1 (locus Cucs a.131880) derived from phytozome v7.0 (chr-ID scaffold0103 7; pos 26151 to 26612 reverse strand)
cacaaggtaggaagcattgataacttttcaattataactgttttggttgttaaaatatcaaatgttaagaagtgtaaaattttagaggctagaattaattatatactatcttcgttttacttttcagcttgagttcgctggctttgctgctgataaactaagctagtgcttaagttttgttttttaaaaagttgtataatatttaatgtagtgtagcttgtcttttttgaggtttgagaattatgtttagttgagttttgctttcatttaaatttcactaaaatggaagtatgtatatcaatgttgttcgactgaggttccaaaatggccacaatgagactatgagagagaaatggctataatgagacactatgagagagattaaaaacaacattttttcgtctccttcatgatatgtcatctcactgttttttttctttccaacgttgtttctgcatacag

SEQ ID NO: 67486 - DNA, 812 bp, Cucumis sativus
  Intron number 1 from transcript Cucsa.188190.1 (locus Cucs a.188190) derived from phytozome v7.0 (chr-ID scaffold0129 4; pos 119989 to 120800 reverse strand)
acttcatcgtcgttgagttttacgccccttggtatgcttttcttctccttttgattgtcattttcttcttcggtctttctcaagttttcgtctcagatctttgtcatatctgctatttggtttgattttgtgatttatgtgagatcaatttgtttttgttgttttgttctgagggtttatttatttatttatttttttaaactctgattcgtttttcgcatttaaattcctcttttcgctttgtttctttgggttggttttactgcatggttgctaagcagttttggtggtgtgatcttggtattagcattttggaaccaatgtgtgtctgtttgatttctttgatgtggtgtgtaattgagtatgctgtcgactacggagcggattcttgagttttcatttcaattgaacgagtgtatggttgaaatgtatacttgagaatcctctacctacttgacttcgttctcaattacacacatctaaaagggataaaggaaacatgtcaacctatttgagatcctcacaagagaagatcttgttcataatcactgcgaagcatttctttaattggttatggttatgtatatgtttgactttttctccttgtgatgttcttccttttggaccattttcccccttcagaaacggtgccaatttaatgaattggtccagatttcaaccttctaatcatatttatgatatgaactttttgttcttacattatgaattgtcattgagcttacccattcttttaaacgttttctccaaataatgtaggtgtgggcattgtaagagcctggcaccagaggtaa

SEQ ID NO: 67487 - DNA, 972 bp, Cucumis sativus; identical to SEQ ID NO: 66721
  Intron number 1 from transcript Cucsa.093890.2 (locus Cucs a.093890) derived from phytozome v7.0 (chr-ID scaffold0091 9; pos 149560 to 150531 reverse strand)

SEQ ID NO: 67488 - DNA, 303 bp, Cucumis sativus
  Intron number 4 from transcript Cucsa.103970.1 (locus Cucs a.103970) derived from phytozome v7.0 (chr-ID scaffold0092 7; pos 2613194 to 2613496)
ccattgctcacccacaggtacccaaattcttaattcattgttgactttcatacaaattaagcttctcttatatttaatatttaatatcatgaaaaagagctgtttgggttttgtttttatcttcttttttatttctggcttttcttgtctcttccttagttcaaaccttatttttattggaggcaataggacccgctgaaatcacacatcacttgctttactttattgttttcctaattgttgtagtgaattagtacattttttctggtttaaacaatgttagtaatattggttcaggagttg

SEQ ID NO: 67489 - DNA, 424 bp, Cucumis sativus
  Intron number 2 from transcript Cucsa.046750.2 (locus Cucs a.046750) derived from phytozome v7.0 (chr-ID scaffold0054 2; pos 2085859 to 2086282 reverse strand)
ttgcgactgaaataaacactgccgagcaggtttgttattccccacctggaatttagtctgtttctgtgtatacaagctgcactcatgaagctgtttaaaactttaaattgctgttcgcgttccagttccagtaatctaaatgtatactgcattgtgaaagctaactgaagaaatttgatatctttaccggtcaatgaactaaatggatcttgatttaaacgattctttttacagtttctttaagagtgaataacaaaggggaaaattctaccattgaaaaaatgacgtagaaaattgtttgattgtttgtttcaaggtcatacgagtgaataataatatattactgatttttcaggctgtgaatatctcaaaagagagtcagaggccagtttatccttttgctgccatagtagggcaggatgag

SEQ ID NO: 67490 - DNA, 450 bp, Cucumis sativus
  Intron number 1 from transcript Cucsa.098340.1 (locus Cucs a.098340) derived from phytozome v7.0 (chr-ID scaffold0092 3; pos 367274 to 367723)
tccccgactcttccctattacctaattcgacccaggtaatcttctccactgttcttctctcaaatctaaatcgatttacattcttcaaattttacgatttctttgggtttagatctgcattatattatggagttcttcagtaattttattcaatatgttttgctaattcaatctctttatcccacaattcatcgcttcctgatttttttttatctttggttttaatgcgaactcgtttttgagtttctgcgaaaaatatctgtggtttggtttcttgcttgattgggatcttagattggaaaagctagggtttcactacattttaatttctattactaattcgtcatttagaatgcagtacaatatgacttctggttatttttcattttttattaacgtgattgttgctgatttttattgaatacgacatctgtagacttaaaatttttc

SEQ ID NO: 67491 - DNA, 313 bp, Cucumis sativus
  Intron number 2 from transcript Cucsa.110030.1 (locus Cucs a.110030) derived from phytozome v7.0 (chr-ID scaffold0093 4; pos 923195 to 923507)
gttggaaagcgtatttcgaactccaagatcttgaagtgagtttctatggttttcttaatctattttacttcgacttttttctcttctttcacacttgatttcttttgccccccaaattcgatctctgtttcgaactcaaagatcttagagtgagtttttattgaatttctaattcaatttccctctcccacttaaatccagacctaattttgatcaattctatcaaatacatgtagagtaatgtaacgaatggtttgttatatgtggtttgaaatcagaaagaatcgccaaaacaagaagtggagaaactgat

SEQ ID NO: 67492 - DNA, 620 bp, Cucumis sativus
  Intron number 3 from transcript Cucsa.096760.2 (locus Cucs a.096760) derived from phytozome v7.0 (chr-ID scaffold0091 9; pos 2262195 to 2262814)
gcttcttccagaggtttgctcacaaattcatttatagcttccatcttctttttcaaacaactccatcattttcatccggatttttttcttcaacactaccgtatagaaatcatcccatcataaactgcagagattaaaccggtggattacaaaagttgaaagtacatgaaagtatagaaactgacgtttgttttggtggcctgagtttaatctatgtttatggttggattcaagattttggacttggatttatacgctctactatgaactatctccattttctgtctttctaccaccctctatcgatcatgttcataactatatctactaaaactatttttgacgttcagaacatgtagccatcaaatttgaagttgtgtttgatttgatttcagaaaatttacatttgttttgtttcttccagtcatcttattttaaaaatatgtttgttagtgccctttgaaaagaaaatatgtatcttccaatactaaaattgaaaaagtatacgtaaatatttgattcttttttgtataatgaaaaatatttttttataactatgaaatattgggtaaattgtgtttgcagggcattgctgggaagtgtgagtgattattgtgcga

SEQ ID NO: 67493 - DNA, 1016 bp, Cucumis sativus
  Intron number 1 from transcript Cucsa.114700.1 (locus Cucs a.114700) derived from phytozome v7.0 (chr-ID scaffold0096 8; pos 63522 to 64537 reverse strand)
caagtggaagaatctcctcagccgctacaaggttggtccactttctaattcggtattaattaagaaaattttcgaatctgtaattttagattggtttagtttctttctccaagtgggctcctctgaatttggactctacttgctttcttctattgattctcctgccatttgatggatggggtttcaattcgccatttctgattgcagattcttgaagttcagcttgagaaagaacaggacaagaagtcttgttgtctttgttcaaaatagacttgtttttcacacttcaaacttcaaacagatatattctatttccatacttgaactcgtaactttgagattattattctcaaactcaatcaaacatatgtttgattttgatttgcaagaagaaagggtggtgttaaaggaggggaggaatttactagactagggcattaactctaaaaactaaccttctaaattgtatggcacttgaaaacttggtgaaacagatttggctttgataaggaatagctttgtagattttttccatggataaaagtgttctttagcttcctgtaattgccggtaagtggaagctcttaaaaaagatagatggaactttaggatattactacatcaagacaaaattaaatatctgttgattacatggaaaagaacatcgttctactttatttcctaggttacatacttgtcaaaacttccatttccagtcgtttgatcctcaatcttcttggttggttattccccaggaatttaggcacctaagtgataagattagagtgttacttctattgaatctagaacgtagactgttcttaagttctctcttttaaatctttcttgcataatctaatggacggtcatctccattctaatgaacagatctaatagaggaagcttcttatgcacttgcaagatgactcatgcctccatagataacattaaacagtgttcctatgtttctaatgttacaacatttgtgcaggggaaggagacatctcataaggagt

SEQ ID NO: 67494 - DNA, 748 bp, Cucumis sativus
  Intron number 4 from transcript Cucsa.143170.1 (locus Cucs a.143170) derived from phytozome v7.0 (chr-ID scaffold0107 9; pos 1474508 to 1475255)
ccgattctcaatttcgtggtcgagagtcttgccaagtaaggatttaagcatcatttagcatatgtaaaaaagttagcttcagtttgtgtatatttaatttttttttaaagaatttggatttatgaagaaaacattggttggattggcagctgaacacttttatgataataaagaaagcattaattaagggcaacaactttggtattagctatctaatctaaacaaaatgcatgtaagtttctaactaaagcatacatcgttgatcactaattttaaaattttcatatttgttattagtttcttctcaattttttttaacttttgttactatgctattttgtaggtgtgtgtagagatatatatatatatacatgtgttggtattggcaaatttcattttagaaaaacaaatgtaacaattaacatttaagtttttaaactagtgatagaatgtaaataacctaagttagagataggaggagtgattatataaatttgattttaaaaaaaagttatctaaacataaacttcattacttgattttataattataaaactaaaatttttaaaactcacttgtataggtttagttaacttctatacgtttagataaggttgagttgaagttcgttagattttgcatatatatatatataaaattgaagatgacttatgtattaatttattttttgtcaacatcttgaaaatacatagcgggaaaactttctggtggtgtaaatcaagaagga

SEQ ID NO: 67495 - DNA, 1005 bp, Cucumis sativus
  Intron number 1 from transcript Cucsa.099750.1 (locus Cucs a.099750) derived from phytozome v7.0 (chr-ID scaffold0092 6; pos 457044 to 458048)
tgcaaattatagtggatttcttggtatcacaggaggtatacttttgttctgcataaggttttatttgcattctttacttttgttttgttgatagaacttcatttttattgttttgacaatggaagtgaggtttgaatactattttggttcgtatatcagttttgatctattttagtttgagtttcttttgttttaaaatgtttgttttgatccgtgtacgttttatataattctagtccttcaaagtcttctaatcactttattttactcttagttcatgtagttttgaaacttttattttggtctctatactctataaaagtgatcaatctcgttccttctttcattttcaatcttaactttctggtactagaaataatgtttaattttctttttcttttctttttttgtctatttatgtgttagtccataaatatttgaaacttttattttggttcgtgtacttttaaaaaatgaaacttacaggttaccgtccttttgttctcttttatcttatttttccgatcatagtactttgatagtagaaatgaggtatcaaatactatttcaatccccaaacttcctgttttggtctatttttgtgttagtcctcgaggttttaaatgttcgctttatttcttgtactttcaaaaaatgatcactttagtccttcattttctcttatatttctttttcttttctagtcataattttaatgcaacgacacttattacactcggtagcgataactttatatcaatcagttgtttacagaatttgtattaaaaattttgcaaactaagactaaaatgatcaacttatcaatttcaaaaatacaaagatcaaaaccaacagtttataaccttttcatggactcaattgagcagaagttaaaagtccattgactaaattgatccagttcaatgtactcttaactaaaatgaacatcaaagtatagtattttaagctttgaaagtaatttttcttgtgtttgtgatcacagca

SEQ ID NO: 67496 - DNA, 626 bp, Cucumis sativus
  Intron number 1 from transcript Cucsa.097420.2 (locus Cucs a.097420) derived from phytozome v7.0 (chr-ID scaffold0091 9; pos 2662866 to 2663491)
tccgtttgccggactctttcaggaaggcgaaggaggttggtgttttttcgtcggggcagcactcgtctgcttcatcctttttttcgattgtgaaggttgagtttcttgaatggtatttggcgatgatcaaatgtcgtcctgttcttactaagagtatcacttctgcgattatttacacggctgctgatttgtcgtctcaggtgaatagttttggagcttgcaactggttgttttgagtttgatgttttgaaatggaatctcatggatttgttgatgtgatgttttgtttctacttagcttgtttgggaaggaaagtttcttggatgagatgttttctctttaatttgattgttcttgatggtatacttgtttttggattttcgcgggagggggttgatgtttatctctaatgggggtccacattttgggcggttgtaaatagaaatttctttgaagagttttattttctccatttctttctttctccattttgttcatcattgcaatttttgttcttgtttactaatcaaacctctccttcattaaagattctacttttacaatggtgatctgatttaggaatcaaattttctttcagaccatttctctgtcatcgtcagagtcat

SEQ ID NO: 67497 - DNA, 401 bp, Cucumis sativus
  Intron number 1 from transcript Cucsa.136450.2 (locus Cucs a.136450) derived from phytozome v7.0 (chr-ID scaffold0104 4; pos 1069240 to 1069640 reverse strand)
tacagatccaccgtttttccaagttcttatctcaggtttgtgattttaactccgttttgtttcacatttccagctcccaactcccaagatcacgattgatttctcgtctttaagatctttgttgttaaacagtgttggttctgggtgcgtttattggcttcaggttcatgtttgttttgttggaatatcatgatctaatgttgaatgggatcgggagtttaagttaatctctctctggtggatttattattattattattttttttttttgcattttcttcttcatgaaacagaagttgatttgaagcgtatctgtgtttagtttgattaatgtagtttttttatgattgtgatctaacaaaacagagaagggaacttaggtttgagagttggggattgct

SEQ ID NO: 67498 - DNA, 651 bp, Cucumis sativus
  Intron number 1 from transcript Cucsa.116160.1 (locus Cucs a.116160) derived from phytozome v7.0 (chr-ID scaffold0099 5; pos 80875 to 81525 reverse strand)
cgtaattcttctaattttgtttcattgcttgtttatgattttttgatgtggtttatttactgctcttgtgtgtgtgtgttcggagaaaacaaaatgaaaggataatggtgagattcttttggattatttctctgctttgctttttattattaactaataagtcaaatgtgctgtgattattgcttcatagagctgtttgaaatttttgatcgtgtcaatttgagagacgtttatcttactgtcactaataatgctagctaattcttgttcctgctcaattttgttttgtcattggcttgtgaatttgtaattttcattattaagctactttcttcttattaacttatgcgtgaaatgtgctgtgattattggttagaatgtcgttttgttgcatcatggagctgtttttcactaattactaccgttttgaagtttgtgatcgtgtcaatttgagagccgttaatcctatagttattcttactaaaatgcttgctaatttcttttcctgctgaattttgctttttgattggtttgtgaatttgtaactttcatgattaaggtactactgcgatcatacaattgctttacgttctttaattttttttttttgtcgcagagttgatttagagttccctaagattgaggttaggt

SEQ ID NO: 67499 - DNA, 581 bp, Cucumis sativus
  Intron number 1 from transcript Cucsa.122990.1 (locus Cucs a.122990) derived from phytozome v7.0 (chr-ID scaffold0100 0; pos 272245 to 272825)
gcttcactatttgttctcttctttgtctgcacgctgtatgttcttctctttctcctgttaattatgtctattgatgggctgtgtgctgcggattctggtcttgacgttgaaattgttgtctttcctgtgggttgcgaattgggttctgtttggttttacttggtgggaatgggaagagtacaagtacaagctatgaaaacatcgatttgttaaagcgttttgattaagatatgatcatgggtttagtgatttggtttgattttttaagctcgtggggcttaagacttttgcagcctaatcgattgctgatcccaatgtgaaacatatagaaagaatggcttgcattctttttgtggattttagtggtttgactgaacagggaaccactgtcactgttgttggtcattaaactagaacaccactctattactagtttatatattcatgttcctttctttgggatgaatgagcgtttgcatggagtgaacataaaaaatgttggctagagatttatgacctttattttaccaatttcttgtttcttaactttaaattctcatgtggatgattgcagataccag

SEQ ID NO: 67500 - DNA, 752 bp, Cucumis sativus
  Intron number 1 from transcript Cucsa.149400.1 (locus Cucs a.149400) derived from phytozome v7.0 (chr-ID scaffold0111 0; pos 231465 to 232216)
ctgtcagctctactttctgttggtgaactgctttcgtaagtcagtttttgtgaatatgattatttgtagtccatttcattttgagtaataatgtttgtgggtcatcttgcttttctctgtttctgatgcctttacaatgttcattgcttcagttttacttgtcatgaaaatcaccctctaaactaataattatcaattaatatttgtgactctatatgtactgttaatttgtcaagttccacatcggtaatttggttacccaatatgcttgtattgtgattttcagtcgggaaactctccgcatcctcaataagtaggttaagatcgttgcagagaaaaaaaagttgcaaaattgcgtaacatattatttacaaagtttctctctgtctctctcttctcagaaaaagactaaagaaccaaatccaatgattgaacttctgggcaagaccttcctatattcttcaactgtttgaacgacatatgctttattagtcctctcgttaagtattttctttgacttgattactgggtgttgtggagaactcactcttgtctccattaattggatgcattatccaaaattgattgtaccaaaagctcttattattaatttcaagaaagttgagaaagttctcttaattcaatccactgtgctttacgaccttcaatggtttgtgtggcatttgttacttctaaaaagttttagtatcaatcacttgaagatgtactggtctctattttgtcaggttaac

SEQ ID NO: 67501 - DNA, 813 bp, Cucumis sativus
  Intron number 3 from transcript Cucsa.011980.1 (locus Cucs a.011980) derived from phytozome v7.0 (chr-ID scaffold0015 4; pos 1386538 to 1387350 reverse strand)
gaatacagcatcctttggaccgaatctctcatcatgtaagttcttcttgaaatcaatgttaatctcattactttttcaacaatgaactccttgttatgctaaatgtttttcttactccctttagggattttgatgtgatgcctttgttattagtacaatatttagagtttttctcttttgagggaaaaaaattgagtgtgggttctgaatttttccctaaaactgagtcccttgttttgtaaaaaccaccttttcccattcctacaggataaagggctgtttgggttttcctgtgaaagaaaaaggaaaaagaacaaaaaaatttgccatttgaagattacaagagaaacatgtgattgggttggggttggaccttgttgactgatgtaaaacaattttcttgggaaactaattcaaaattctttttttattttttattttattatattttttggtctctctcttgacaaattataaagaattcggaaaatcactatgaacagaaactatcagcacttcaatggatgcagttcatgcctgcaaacattctgaataatttcctcacatgaaactgttgttctactgtcaacgtacctaacacactattagtggactatgtgcaaatctgtgtgttgattcattactgtttaagtttttttccatctttatatgtcaattttgtaacttttactttcactttaagcagggactaatcttaaaggaagcatattgagattatggatgatgagatcgattttcatagttggttttgattctctctttttttttctgtttgattttcatgtagctttt

SEQ ID NO: 67502 - DNA, 538 bp, Cucumis sativus
  Intron number 1 from transcript Cucsa.101110.1 (locus Cucs a.101110) derived from phytozome v7.0 (chr-ID scaffold0092 7; pos 392722 to 393259)
tggtgtgtattcctgtcactaattttaagctcaaccaaagagttttgatctttgcttttacttttagtttctgaattggaagacgatctaatcattattttggcaatttaagctagttttggttgttcgaaaagttgtttttcattttgctttcaccgtgaaatcagtgtttttcttttcatttgatagtttgttttttaaaactagttgttttccatgtcaatttttacatttttcctgtttgtttgagaacaatgcaatatttagaggtatgtattcatttatttgttaatctggttgacatgattcttgtggttgtttttacaaatctaatatattctctcaccctccttcaaattttgtctgttacgcttgagtccctgtgtttgttgaacctacataacaggttggtgcagcatattgtgaaatggaatttggcacggattcatgtccttaacatacatggctagttgatgcagcttggttaacctataactgaaaatgaaataattggtttaaacaggtgcatttggataaa

SEQ ID NO: 67503 - DNA, 370 bp, Cucumis sativus
  Intron number 6 from transcript Cucsa.083690.2 (locus Cucs a.083690) derived from phytozome v7.0 (chr-ID scaffold0085 8; pos 460674 to 461043 reverse strand)
ggttattttcattgcaagaacaaattgatcataaggtaactggctgttttctccgttgatttgattgaattgttgatgggtttaaagtagctacggtccatggaaaatttaaattttgaagttgctttataagctagtggacttcagttttcacgtccaagataggtatgcaatcggagatagctaagcggaacttcgaaattaacatcccttgctcaagattactgttcttttcattattatctgttttttgcatacccctttctctatcgtgtttcagtggttgatgccagaattctatacggggctggacaatattcatctttcttttgcaggttgaatttgttagacaggagttacagaataaaga

SEQ ID NO: 67504 - DNA, 813 bp, Cucumis sativus
  Intron number 2 from transcript Cucsa.137050.1 (locus Cucs a.137050) derived from phytozome v7.0 (chr-ID scaffold0104 5; pos 51207 to 52019 reverse strand)
attttgaggctttgtgtggattcatcagtctcgaggtaaattattgggaaccccaaatcttccaaacatctgtgagttattgaagttccatggatctgtttgtttgtttagatttgtttaatttctgataagtttttgctgccatcgaatcattattttaatgatactctcttgatgttgtctactttcgttttgtttgaacttttttcagttttaaatagaatgtttatctgatttcttaatgttatctgatttcaattcgcttggattctatttaaactattatattataaaggtctctttcgtcaggcttatgctcaatcttctttatacttttctttttcttctttgacataaccttcttttagacttgttaatcttgatgtgaccagtaataaaatattttatgtgtatgatggttagaacagttgaattcattgttctgttttgatgtagtgaaatgtcatgtatgtccttaatttttatggcttgatttgatttgttcttttaagcagaaagattgcttttcactttttgagtatgacttttcaatatgtgggtgatgaaagaaatttgtggtgaataaaatgataagcaaactttttcaaatgtctcacaagatttaactagggaaaacaaatacttcttttttctctggattttagataactttttgcttctcagttgctcccggggccccaagagaagtccattatttttcttctcatgttaaaaagaattttttttttttttgtcttgtttagatgcacaccatctcgtgtttaattttcttttctttccaggagttgaaag

SEQ ID NO: 67505 - DNA, 893 bp, Cucumis sativus
  Intron number 1 from transcript Cucsa.005290.10 (locus Cuc sa.005290) derived from phytozome v7.0 (chr-ID scaffold000 55; pos 372810 to 373702 reverse strand)
ctcgtcgtctacccataggtacttctttatctcaacctcaattccatccttctttcaagattagcttctcactgcttcttttgacgagttttaagataaacacagatctccttttgacgcggattgtattgttgttcccgttgttcttagcattttcttcactctggatatcctgttcccagcttaccacatgcagatagattgcttttataccaatcgcattatctttctttcttatacttcttcgtctatcaccatatttttcgatattttttcttgtctcttcgtcttcctgtttaagactgctagtttttctgttggggtgtttttttccctctcttttatttgagtgtttatctaagggttttacattgttcatgtgtagtttggaaattagttttattgtcttgtagaagactatcttattgaaacggggaagcgtccccaccagtgcaacaagtgttttaactatgttatttgagttctaaaactaaattatgggggtgaggatggggttcgagggtgttttggcattgttattcctatcgtgtctcgtgctttctacagctaccttttattttaagccttcttgcgggaaggtagccattgcattcagctcactttccatcttggcttctttcattttccgaacttcacccatgtgctttatatcataactttgtttccctattctttatggtttattttcatataatgcagcattatttttattttatttcatttgcagagttttcagttttagtaaaattcgggtttttacccattatattctcgggacatggtttccggaacagtacttctccatgagtatgataattccttattttcacgaaaaaggtgtaaagtgacggagattcaacatcaagacccag

SEQ ID NO: 67506 - DNA, 510 bp, Cucumis sativus
  Intron number 1 from transcript Cucsa.083370.3 (locus Cucs a.083370) derived from phytozome v7.0 (chr-ID scaffold0085 8; pos 243381 to 243890)
gacccaatttggattttgctctccgacgatttttggtactattcaccagcattttcaggtccccttttcgaaaatgtagatgcccttttccctttccccttttcccttttcccttttccatatcttgctttgaagttctatatctttttttctgctccagtttgttttccctagtgccttattgtattgggtttaattgtcttctgctgttgaatttggttgataatgtgtaatggtttcgaattttcttccacactttttgagttttgcattttagagttcattttattgtttctgggaaatattgatttctagaatttaagtttttgttcgttatcgatttaacatttcccttggattgcccttttttttttactagtcgtctcaatttgtgtttgtttgatagggacacatttaatcgaacagtttgaaaattctagacctgttatgtatcttaatttcttttcattttcagctgcattgtgtaagggtgggagattcagtgttgga

SEQ ID NO: 67507 - DNA, 499 bp, Cucumis sativus
  Intron number 1 from transcript Cucsa.011190.1 (locus Cucs a.011190) derived from phytozome v7.0 (chr-ID scaffold0015 4; pos 497038 to 497536)
tttgtggccaggttagtctattgttttcaatctctctctctattttctctattttctctatttctttgttgtttctttttccgtatctgttgttttcgactttttttggatcaaacccttttgattgaaatacccatttatgacgaggaaggtacagttattatctgcaatgatgtaatgatggttatgcttcgttcttgttatgtttatcagcagaatattttgattccaagtgtgcattgatttgagtttcaatcgaattttgctgtccttttcaatttatagctaaatttccttttctgggtttctaatttcagcttagtaaaagaatcatttcggtttttttttaatgtttttccatcgtccccacttatcatttgcatctggaaatgaatttgcttgctttgaatttgttggatcgtggtgttgtttgatcgttgattatgttcttcaatgttttgtagcaggggcctcgtggtgcttttagcttgtctagatt

SEQ ID NO: 67508 - DNA, 545 bp, Cucumis sativus
  Intron number 1 from transcript Cucsa.100810.1 (locus Cucs a.100810) derived from phytozome v7.0 (chr-ID scaffold0092 7; pos 133832 to 134376)
aaaacgcgagtcaaggtctgtaaaattttatatttattgtatcataacgtagacttataaattgatttaaaaaggtatatataaaataaaactaaaaattataaaataaaaaataatcttccaactttgtgatttgtgattacctgactttcaaaattttcaaaaacatatttaaccttttgaaaatggttcaaaaaactcatacgtaaatgatgattgtaatctcactccttttatttgtggaggataatgatgagtatatctcgaacctcaagaatgctattttcctctttgaagctgcatcgggactaagcataaatttaatcaaatctaccatatcccccataaatgaaatgtggattcttgcagaactgaagctgtggcaaaattttaggggatttaaaactagttcctacccataaattatctcggagttcctcttggaggtaaaccatcatcagccattttctggaaaaatatctctaagaagatccataaaaaattgagcagttggaagtattttcatacctatctaagggtggaaa

SEQ ID NO: 67509 - DNA, 701 bp, Cucumis sativus
  Intron number 1 from transcript Cucsa.113040.1 (locus Cucs a.113040) derived from phytozome v7.0 (chr-ID scaffold0095 3; pos 1331043 to 1331743)
accactaaacctcttgtcccattctaccagcaaatgtaaattatcgcttttgtttctacaaatttcaattccttcatggaaagttttgaataatttctgatgcaaaataaggaggaaaaaaaaataatgctctggctggctttatcaaatttcctcttgttgattgttacttcttgatgacagcttcttctgctctgctttaatattcatccatttgcaaacaaaaagttgcttttttcctcttcccctctgaagtttttttcctttttatgtacggttcttatccatttcaacccctattctctgatgccaaggacattcttgttctttttgtcagtttttccttttcaagttcaggctcaaaatactgcctttctactaataatttcttttgattcttttcccctcattattattgaataattttgctgtacaaaactcagttcccttttccttttcctttttttgttgaaaggttagaaaaccctttttcttcctaaaaatccatgaaagttgtactattttcacttaaaaacatatcttaagcacacccatttggtattcttacttactctcttcttgaacattcatacaagttgctatctacacgaacccaagttacaaagctggatttttttttttatatattatttatgtcttattcagggcaaagcaaggaattacagaactaacctggcaaa

SEQ ID NO: 67510 - DNA, 850 bp, Cucumis sativus
  Intron number 1 from transcript Cucsa.126360.1 (locus Cucs a.126360) derived from phytozome v7.0 (chr-ID scaffold0101 7; pos 273643 to 274492 reverse strand)
gaaatgtagagctagagctatttccttctctatatgcttctagattttcatttttcctatcttttcttcttgactctgaatcggcttctcgttagcttctgttcacttccctttggttctgggttagttggcaattttgtggaaaatgggggaaggtctaattgtaagattcgtacgagttttctattgttttttctttttttcattttaggttaattgtggatatggatattgtcacaaaatgcagaattaagatgatccccaatgtcttttgcttgctcctttctgtactcgaaccatcacttggccgtgtaacaatttgtcgaatgcatataaagtggatatgcaagcttcttatgctttgtttctttcttatcttagctgtccaaaattggacaaatttgactctaagttctttagtctatagtttaaatattatggtattgatagtatttttgtaatatttgatcatgtgaccgcctgatcttgaatttacgttagttttcttttatgtaacagttttatttttcttaatcttgtttaatttctgtttccatgaaattatatccacaaaattcttgttcatacttatgaaatgtttgctacttaaactgtgtaaagtttaattatattttacaaaactgtgtgaagtttaattatattttacactcctcactaatccaactgacggagtgaaaagggagaagaagttaaatgacaaaagtgatgtttttgctgaacgaatatcattaaaaaaagaaatacagaactttctgtttgttgtgattatttttcattgactactaatgatttaatttcatcttctttgtttgtagttatagccgtcttt

SEQ ID NO: 67511 - DNA, 805 bp, Cucumis sativus
  Intron number 1 from transcript Cucsa.043270.1 (locus Cucs a.043270) derived from phytozome v7.0 (chr-ID scaffold0054 2; pos 131697 to 132501 reverse strand)
gctctaaaaaattggtatgttataaccttttcaatttccattatctttcacaattctttatctttccccccttcaatcgctttgtgttttcgcctttacttgatttcatcctctgtaatatgtttgttcatttcaatgtaatcgccattacttgatttgatcaatgatcatcatcctcaccacccttttgttgtttttcaaaatgatattgatatgctcaagaaacttttccttttttgttttttgttttgttttttttttttgctttttttgtggtatggtagaaaaagtagtgatcaaagtatgatatgtttcgaatcttttgtgtttcccctttttttattcaacaatcaataccgtttttgtctcccacttaattggctttccagtgaaaacaaattggataccatatatgtatatatatttattattgtattagtacattgatatgattatatgaagctttatcccgatcatgtccttgactaaatgtcaccaccaatcattttctcacttagaatacaaccgattttcttcatgtaccaacgactaccaattattgagttcttgacattttaacatacagtatatcttgttcatgagtcctactactgatgcaataatctttatcccgatcatgtccttgactaaatgtcaccatcgatcattttctcacttagaatacaaccgattttcttcatgtagcaaggactaccaattattgagttcttgacattttaacatacagtataccttgttcatgagtcctaatactgatgcagatagttgtggattttactgcatc

SEQ ID NO: 67512 - DNA, 672 bp, Cucumis sativus
  Intron number 1 from transcript Cucsa.042100.3 (locus Cucs a.042100) derived from phytozome v7.0 (chr-ID scaffold0054 0; pos 584915 to 585586 reverse strand)
ttggtgttttgtggttttggctgagttattttgaggtttgtttctggctttttcttttgatttctcttctgtttttatgggtttctttttgttgacatgatttttcatctagtttctctcatattcttgtgtgcagctggaagtttttagtcatttggtgcttgaaatagctttcatggaagtttttttgtagtttaaaaaggttaggctgatacggggtttattttgactaaaaaattaattgcgattggtgggtgcttttctgatattgatattgtaactcttggtcctgatattttcatgaaaaattgtaaaaattgttgtggatcattgactcaagtttaatgcaagcgatgtagctctgttattgtcctagaaaatttggatttcagtttcataatcttctggatttctgttaattgatattcaatgttgaaagcctggtaagtttttccagcttcgtcgaaatgaataatggtcttttgaacatgtccaaccacctttctagctcttagagaatttatgctttgggcatgtcggaggattcaagtggattggttgtctcatgtctctgtacctttaagatgctcgcacatagtttgttcaccctgaacttggtgttaatttgttctaacaggtagaacttgcataatacttggaaactgaaaagta

SEQ ID NO: 67513 - DNA, 414 bp, Cucumis sativus
  Intron number 2 from transcript Cucsa.074470.1 (locus Cucs a.074470) derived from phytozome v7.0 (chr-ID scaffold0078 5; pos 324959 to 325372)
atcccgaggccttcgccaagaaccgagctcttgaggtagttcattttagtttatctactctcttattgttttcttttgatctttgtatgtccaacttggtattctacttctaaaaatgactattttggtactcaacataaaatttagagaacagttttgctttaatgattaaaatttgagcaatgagttaagttgtagattctagaattaatgtgttgggttagaaagtttctgtttgggatgctgagattaagtactttggtaaataaaaataaaaataaaaaagaaaggaaattcttccataaatgtacaaaatttgcaatgctagctgcgttatttagttgattggacacctctgataactttaaaactaaatgacgatcaaatttgcaggtaatccacggaaggtgggca

SEQ ID NO: 67514 - DNA, 593 bp, Cucumis sativus
  Intron number 2 from transcript Cucsa.156350.1 (locus Cucs a.156350) derived from phytozome v7.0 (chr-ID scaffold0113 9; pos 673826 to 674418)
agacagaacccactgtgaaaggtgtgaattcttctctccagtgctctgagcatttggatttccttttagccctaattaattcctttccttacccgacaaatgtttacaaattttgttatggatggtttcctttcttgtcatttcattaaaggttcatgcatagaaacatttgaattcacaatcagactctaataacaaaacgagtattttaggtcctatttggtattgatttagtctattttgttttttagaaattatacatgtttttttaagacttcagtgtaaggattttcacctgttattaaccacatatgtgaattcttaatcaaattctaggtaaccatttgatttttaatttttgaaacattgacctacagtaattctcataaaaaatcaaattgttactacatagagtcctagctttcaaattgctcttaaaagtaggtaacaagaaaagcaagggttaaacagtatttataaacttagttttcttttgatgaatgatggatggctggctagagtttcagaattgtgcccattttcaaaatttatggagtagatatgaacagagttgtttcaaatgacatgaacag

SEQ ID NO: 67515 - DNA, 772 bp, Cucumis sativus
  Intron number 1 from transcript Cucsa.065780.1 (locus Cucs a.065780) derived from phytozome v7.0 (chr-ID scaffold0069 6; pos 423778 to 424549)
gcaggtatgtggtatttcaatgagttcgttgtgaacagttttttagcttccccaagcttttcttcttttcctgtcaactttatttggtgttctaatttcacttgaacgagctagggtatgtttaggagttggtcatttttctggagctcaaaattatgccgttgtatcattcaaaatcaatttaatgtttgatattacatcagcattcaatttgattttgaataattcatagcatattttaaattgttttatccagagaagaaaagcacgttttagagttttgtagtgattttaagcatggataaattgacttggaccaattacttagggcacgtttgaaaatgatttatacttttattagatttaaatttaaaattacttccaaacagactttacaaccatttcaaaatcactttcaaacatgcctaaagaacaaaaaaacttgtggaaccagattgtcctgtttgcttctaattatgtaatgattgaagttcttcacacaaattggataatagcatagctatagaacaggagtcgatgtttcagtgaaaacaaagactttttggactctttgtgtagaaaaaaacttgatcagagtattgagggcgaggaattatgttctgttgtctctatggagagataaaaggggattgcatacaacatacacactaacaaatggcaatatttaccattattgatttggttccaatattgaaatactatctctgtgttttcagccattgactgaatttaaaagcaaaaagtgtaagcg

SEQ ID NO: 67516 - DNA, 859 bp, Cucumis sativus
  Intron number 1 from transcript Cucsa.083540.1 (locus Cucs a.083540) derived from phytozome v7.0 (chr-ID scaffold0085 8; pos 337101 to 337959)
ggatatttataatttcaatccttgggatcttccacgtatttatttttatttttctccatcttcatctcatcttatattattatatgttcatatcaatttttcttttgtcaatctttttttatttgttcatgtgattgttatatttgggaagacgttgtatgtttcttttagataattaaaatggttaacacaaagaaagaattttagaatatatattatattgtagggaatttgcaagtaataatgaagggtttctagtgtatgcatggtatataaaaaaaaatgcactctatgttgaaaatttatatattagttagagttgtgattaatgacacatagtgaatgtatggtcgtatagttaagttagagtagtcgtcgtttcatataaaattagggtttgttgagaactaaagtttttgagtgctcaaaccctaacattttgaatttattagattaagagaaaacctgtgaaattattataacatctttttataatcatatatatatatatattaaaaataagcttacaatatctacttcaactctatatatattagtttttttttttttggtattaactactttatatgttagaggtaatggtgtagataattaaaaaccaacataatcttttaaaacagaaaacttaatcatttgcaaagaaccacaaaaaaaaatattgtaaaatgatgttgtatatcattacaactatcaaattttaacgggagagatgataaaaatcgagagttttttaattaatttaaacgacttctattttgataccatgttgtttaaattaattaacgagattaaatgatgaacagtaagggtaacaagtggtttcatttaattgtagagt

SEQ ID NO: 67517 - DNA, 826 bp, Cucumis sativus
  Intron number 1 from transcript Cucsa.177000.2 (locus Cucs a.177000) derived from phytozome v7.0 (chr-ID scaffold0122 5; pos 996656 to 997481)
agtttctcaccttcacctccttcaggtgcacggctgtctgtttctccatcttcatctagacgaaccatgccattaactcttccaccacgtgcttgttcctcgcactcacttgaggagcttgacagacagggaagtcgaaaatcatcgtcatcggcctttcggcgaactggggttgaaggattttgattgtgtatatgaacttttttcttaaaatatatatatatatttatttttcaaccttttttggtcattcaaacgaatacataaaggataaatgcaacccctggtgttgtagtagaagaaaaggttttagttatgtagatataattgggttatggtgggattgggaaaatgccattttacagagatctggttcgcttcataccacctccttcggcctgtcttattcttacatttctctaacgtgcaaaataactctttgattattacggcagaagttgcgagacgatggttggatggagaaattcgtagatctctccaaataaacactacttttatgcacagttgttgggtaagagatgaatattgaaatctatagtaagctgaaatgaaaataaattgcaaatttgatttatttaagtggtgttagattaagtttgggttaacaaaaagataatgcgtgagttaaatgttaaggtagaaacagaagagaagattgttaattttaaattaggtggcaacaaatgatataaatatatatataactgtcccctaatgtcaatcccgtacactaggttcgttcttatagtaccttaatttaaaaaaagtaggacaattttcaatttcaatttcatctatccgccgg

SEQ ID NO: 67518 - DNA, 779 bp, Cucumis sativus
  Intron number 1 from transcript Cucsa.135480.1 (locus Cucs a.135480) derived from phytozome v7.0 (chr-ID scaffold0104 4; pos 339588 to 340366)
tgatcaattctgtagtactccaggtagagtcatcaaatatggctgcaaagaaacttgttttctctgattgattataactcataggtttaagttatttgaggtgttagattaagcacaatctggtttattttgtaggcttcacgttgaattgaagtaaactagattcatggtgaaaaaagaatcaatgggttttgtggttaaattcagttatgaccatattggatatgttgtatataagggattgtatccgtgaactctgtactctgtactctgtaacatatcatattcaaagtttttcatcatagtgaaaatgtactatatagtttataatggaaatgcatcaatattggaaatgctttctgacactaaccaacataacttttttgttttttacaagaacaatgttatcgatggtacaatattacaacccggggggtacgaagcaacagaatgtcttatcgtgtttttaatattaaaataaaaaacgggagcatactattttctatatcatttttcagagaagtgaagctcaatgtttgatgtttcaggactatgggatgaatatgtgtcctgtgcaaagcagcacatttcatatgcttgatgatttagtttgttttattttacttctgcactctgcagatttaagatgtaatagtgtagttttgttgattactttttcagacccgagcttattctctcaagagcaataaatctccatttattattttctcttggcattaagtgattaaggtcaatgtgcattgttgtgatgtatcagg

SEQ ID NO: 67519 - DNA, 1008 bp, Cucumis sativus
  Intron number 1 from transcript Cucsa.099880.1 (locus Cucs a.099880) derived from phytozome v7.0 (chr-ID scaffold0092 6; pos 551319 to 552326 reverse strand)
aatctcatttacaaaaagtaaaaaattatttagcagtaaattattattaaaatttaaatacaaaaataaatgcaactcgaacaattttccgaaaagactaactaaaaacacgattggttaacataaatcacaactataaaacttttatatgattaattacgatttaattgcacattaacaatttgaatttagagagaaattactcaagtttttcaagccgaatgaaataattatttataaaattattcaaacatgtgtatgtgtaatctaaaattcaaacatatatttagattatgtacttttccttgatactaatttaaacacatacattatgttgactactgaacaacattaacattaaattatttgtaatatatatatatatctacctccccaacttagaacttcaaatcatcagtagatttatagagattctaagtcttagcagcaagattttaatactgatagcatcattacttatttttaatttctttacctcttcctcttcctcttcctttatatactttcgaaaatgatgtaatcttaaatgattggaggtatctaatttatgaaaaatatgttggtttttctattattgatttaattttatgaaaactaatttattcaaaatatgatgtaatctcatttattatctattctatacatcatatattacacaaacacacacaatcaaatcctccctatgatagaatagagacataaatgcgatatttaatgaaaattgacaatctaaattttgacaactaagatatttaatgaaattcgaaacattaaagttgacaatttaaattataaaagataataataagaaataccaaagaaaagaaaagaaaaatcaatgaacttaaacgtcaaaagatcaaaacaatagaaaagcacattaaaaagttcaatgataaaataaataaatttaataaaaaagggaaatgtggaaataagtaattaattaaaagtgcttattttttgtggtcatgtgttaggtgataa

SEQ ID NO: 67520 - DNA, 411 bp, Cucumis sativus
  Intron number 1 from transcript Cucsa.146570.1 (locus Cucs a.146570) derived from phytozome v7.0 (chr-ID scaffold0110 0; pos 27250 to 27660)
cgtttaccctttttaggaatttgatcctttattaggtaatgaattgttttgctatatagttctgtaactttccttttttatgaattcgtctgtttccttttctcagtggctcgcgcttattttgtacaaattgatatcctggacctctttcttattgttgattatacgattgaattgtgcattctatcgattccttgttcatttgttcgttttgggtgctgatcgacccagagtagcgattgttgcatattttcctggaggggcttggtttttgaatctttgagcattttttaattgttagttcgtgtttgttttttcttcttgagatattcttatgtaggttaatgaagcttacttttgattcttctttttgcaggttttttcgtattgatttatatatattggataggt

SEQ ID NO: 67521 - DNA, 250 bp, Cucumis sativus
  Intron number 1 from transcript Cucsa.128550.1 (locus Cucs a.128550) derived from phytozome v7.0 (chr-ID scaffold0102 4; pos 528920 to 529169)
gcagaattgcacgtaattacaccatgtctttctcgattctctgtttcattaccgtttattgattctctatttgctatgggttttttttggatttcagtttcgttgttttttttctttctaaaaattcccaattcttgtcttgattggtttggtggttgtgcagttgttccaggaggatggattctgagtttctttgaatgttataggtttgttggtataattaggaaaatgtgatgaatgcagggctaag

SEQ ID NO: 67522 - DNA, 493 bp, Cucumis sativus
  Intron number 1 from transcript Cucsa.094240.1 (locus Cucs a.094240) derived from phytozome v7.0 (chr-ID scaffold0091 9; pos 438098 to 438590)
ggtatgtctcttcttcttcttcttcttcttcttcctttcttctttttctcgtttaaattttccaatgggtatgtctattatttttcttcttcctttcttctttttctcgtttaaattttcagcgtttgagtagctttccccccaagttttgaatgtgttcttactatcttcataatctttctattgtttagggaggagctttgattagagtgtataatggttttgtttgatgtaaagtttttttttatcacattttgattattctagcttctttgcggcatttggttaaatgttatatttctctttatttttttttactatgttcaaaatctttcagtttagattgtttgtgcaggagcctatattagattgttgtatgtttatgtttgatgaaaatttaatagtttcttctttttatgtttttttttgttttgcttggttcccatcatttgtaatttggaaaaataggggcgtacaagtacgtgtcagagct

SEQ ID NO: 67523 - DNA, 956 bp, Cucumis sativus
  Intron number 2 from transcript Cucsa.114760.1 (locus Cucs a.114760) derived from phytozome v7.0 (chr-ID scaffold0096 8; pos 123315 to 124270 reverse strand)
ctgtcgaggaattgacgatagctagtaagaatgtcacgccatactctatgccataattttgtagcttttatttactggtctataaatttgctgtctcctggatcttgaaatttctcagctgaagagaatgtcataatatggtttatgtaatctttatagttcatagtaacagattaatactcatataattatatttgtgtggagcttgctaattgttattcagtttcatgatttgtggtgctaagctaccacaggaactaaaactttaagctattagattaagttaaattggactttttttttaaaaaaaagaaaatcttttatcttcactgattagattataatggagctgtggtaccatttcctcaacgtagaattgagatgccaaatatcatactttatgaaaacttggttaacattttattgagctattggaccaattttactcaggagtaacgagcgcgatgtatggtatatgaatttcacaaaactgattaactatctaataaagttggagaaaccttatctttagaagataaaggttgttctcacacaagaaatacactactctacttggtgatgagtaaataattttggcctaaggatatcatttttagttttatgcctttggaatttatgcttgtttccttctaatttacttacagtagttttcacatttcttgaaaaaacgtttgaatttttagtcaaattcaaaaggcaagaataagtttttttttttttgtaacatttttgtgaattaatggttcctcttgtcctaggttgcaccactatcatgggaaaaacaattgtatattctgatgcagaatcttctgtacaaaagagcttttatctgcatggaacttctgtttttttcccctttcctttatggtcaatttctaaatctaaatcttatacgtttatattttttgtttacttgtggtcttcagggaatatat

SEQ ID NO: 67524 - DNA, 538 bp, Cucumis sativus
  Intron number 2 from transcript Cucsa.165790.1 (locus Cucs a.165790) derived from phytozome v7.0 (chr-ID scaffold0115 3; pos 1107839 to 1108376 reverse strand)
atacagagtctgtgctgaaggttttttttttctcattttactaatttgtttctgaaaataaatgcactatttatgtctttgcaagccatcggttataacaacatactggttgtgcttaaacaacataatgtatcttcaacatgttaatccaaaactcaacagccctcacgctttatttaagtagtcggatggatagatttccataaccaaagataggcaccaatgaccattctttgtgttgttcatctgtttggtgttgaatatgctaaataaaagacagtaaaattcgtttgaaaaatagaaaatagtgaaattacaagagtctaatgcttcctatctgagttttagctatgattccacttatacttatgaatatgataaaagaaaaaggtgagaagtcttcaagaaccgagagcattgtgagctcggagttttctttttttaaacgcgggagttctagatccctgccacaagattttgattttattatattgtaagatgtatatttatatatatatatttttacttgcagcctgga

SEQ ID NO: 67525 - DNA, 1000 bp, Cucumis sativus
  Intron number 4 from transcript Cucsa.066260.1 (locus Cucs a.066260) derived from phytozome v7.0 (chr-ID scaffold0069 6; pos 805526 to 806525 reverse strand)
ctgcatataatttgttagtatgtgatacggaccaagagttcactgtgatgagtttttcagttttctttcctgatattgcattcttggaagaagggtagtgtaaagttgctgcattcccgagtcatttggttttgaaaaggttaaaatcatttttgtcatgtttttaagttttgaaattgttaaaatcacttttgtcatgtttttaattatttaaacgggtctgatggatgagtttacacttttctaacacgtttttctttgaacagaaatatttttgaatgattaagagcaatttaaaacatttttgtaatgatttctaaccctttcaaaattagttctgcttgtgggaagctagtccaattgttctttgacaaacttaaaactatgtattatatactaacttatcattcagatgcaaaaaggttatgattggtaatccttccataaccaatttgattgatggaatcttgaaggatattttgtattattactgatatcaaatgttccatatgatgatgacgacttccttggtgattatatgaaaggaagatatcttcccatgccttggtgcttttttgttgggctgttacaccgccagtagacttggtgagatcaaatagctcaagttatttagggccaacttaaattaactttctaggaaaaagttgataaagttcttgaaaattcagtccaaataatcccttttcgtttatgattttaatatatttctaataccttcactcacacgtagatattagaattatagacatggacacataaaattgaggcgatgcctagtcactcttagattaaatgtttgagatattgggggatgaatccatattttctttcctcataatttctgccattttgagaaggagttttgtgttatgtaatttatgttagtttagtttagttcttttgctggggtttgaaggttctttcaatctcatcacccagatttctttgcaggttgtgttggttgattgttggggtgaat

SEQ ID NO: 67526 - DNA, 629 bp, Cucumis sativus
  Intron number 3 from transcript Cucsa.075840.1 (locus Cucs a.075840) derived from phytozome v7.0 (chr-ID scaffold0078 9; pos 417942 to 418570 reverse strand)
ctgagaagaaagggcttatttcaccaggaaaggtaaaattatatgagacaaaattttattgcttcttgaatctgcgtttcattacatatgtgattggataaaaatgtgttattgaataaattatacactgtatccctgtcttcccatgcattttttgtttttaacatgttttcagaccacgtttaacaccacaacagtaactgaaaatatgactacacgaagcagcttgtcttagggattgaatttttttaatgccctgtctgagtgtcatgtatacttaagcatatggaccttctcatggttctttaaaaataagaactgcgcttctcattttagatacttgtatcaacaaagaaaacttgcagagtaacatatcaaaactgttggttagttatgacatcttctttttatactttcctacctcccatcatgatagtgattatcattattaagctgcatatcttgggtgtgctattttgttttataacttggaaccattagataaatatttccgatctctacttgatgtaagtgcagaaattttctggtctggcccagaatactcaataacattatactcttgtgtattttcagagtattttggttgaacctaccagtggaaacacagg

SEQ ID NO: 67527 - DNA, 449 bp, Cucumis sativus
  Intron number 1 from transcript Cucsa.075840.1 (locus Cucs a.075840) derived from phytozome v7.0 (chr-ID scaffold0078 9; pos 418933 to 419381 reverse strand)
taactcaggtgaacaaactcctcctccttctttcacggtttcttgatttttatttgattgcctaaattaaattccatgtttgtgttattaagctttgcctccgtcgtcggttattgtcaattcgtataactaatttttgtggatacatttttggattgtaatggtaatatccttcattacggtggttttggtatcatacctttgattttagcatttttcttggttctgttgtagtagtagtagtagagatcatgaagaagtcagacttcaggaaccaaataaatcgtgttttgaatgtttaggaacagctgtgttttcaggaatcaaataaagtcacctggtcaatctgttttctcttattgtttgaatagattgaacttcacttcaccctatgtttctttgcattaatagtttatttccctgagatgcagctggtaggtaagactccc

SEQ ID NO: 67528 - DNA, 458 bp, Cucumis sativus
  Intron number 1 from transcript Cucsa.092360.1 (locus Cucs a.092360) derived from phytozome v7.0 (chr-ID scaffold0090 5; pos 260329 to 260786)
gaaggtcaaaatccggacgtgggacggaaaggcaaaacctaggagtttcccaaaatgatctaatgctacatttccatctcccaccatttcttgtctccttaaatcaaaaccattaattccaaatgcttttgaccttccacttagcctattctttttctttccacgtccagctgtttttccccactttaccctcaacaacccaaaaattttcaatttcttacaactttctaacattctctccaccatccatacgacccctctataaaaatggcaattcctaaaccctaaaatccattcattccttacatctctacattaatatatattcctttataattaataaaatggctttattattctcttattcaaaaaacctaaccaattattactccattattctacttttgatttttactgttggagtttgggcgggagaagctccagctgggaatttctac

SEQ ID NO: 67529 - DNA, 802 bp, Cucumis sativus
  Intron number 2 from transcript Cucsa.094020.1 (locus Cucs a.094020) derived from phytozome v7.0 (chr-ID scaffold0091 9; pos 233197 to 233998 reverse strand)
ctgtaagtttttatttttctattatttcatttgttttgtctcttacaagatattagaatcatgaaatcatagccaattacatgtgcatttgttgttcaagtgtggttagaaggtattatctcctcaaagctttatttgtttacaaaaattgaaatcattttcgtgtaattttgtgtatcattatatccttcttcatacaactttctttgttatatattttctcacataggcaccgtcacaaaatataagaacattcaaaacagaaattggaaggagcattggaataaataagttgaataggattttcagaataattcttgctagaattaaggactcgaagtcctttattctcaatataatgagttcgaaatgaaaattaaatgaaatttgggaataataagtttttttttctcctgaaaatgcacttaattagcctcaggaagctcaaaagagccgaagtcccccatcttttggacagccagttaaaacacttatcgggagtgaatgttaagggattgatgtcaaattagtttcaacttgtagggatacttagttttcttctagataccgtgtctactctttcttccatattctggtttaattcctttaagacattaatccctctttcactatactaggaattgtcttgtgttttgatatcagctcatgcatcaaatcgattgtatacctttgttcaaggcaatactttgcctggtcttgtaattttctttttaccatcttgatgtgtaaaagtaatctgcactcatttttttgtatttaacatctcagagtcatttacctc

SEQ ID NO: 67530 - DNA, 521 bp, Cucumis sativus
  Intron number 1 from transcript Cucsa.073250.1 (locus Cucs a.073250) derived from phytozome v7.0 (chr-ID scaffold0076 5; pos 838459 to 838979 reverse strand)
atcaccaacgcgtaaatattagtgaaaaaacgtacgtctttaattgacatttaatctattttttttctctgtttattctaacatcaatttttagatgtattatgtgtttggcatcaggataattatacattgttttgctttagagaaatcttgggcggtctcttaggagttaggacatcatcatctcaatgcttttggttggggtcttgtttctaagtaattttgtagttattctattttaacccattggagaatttttctttctaatcttctttgatttcttttggtggattcgtttgtaccatccctttcattctttggatattaatgacatatggcactttgtatgtcttttcgtgttaaaaaagttataatgtggaaggtatcacaaccggtttcaattttcaaatggtcccattgcttttatcgtcaaagtttttaatctttgatacaagaaagaatgtgccatcattatcattaacttcataagatcttttcaagcaggccattgttctttcagc

SEQ ID NO: 67531 - DNA, 665 bp, Cucumis sativus
  Intron number 1 from transcript Cucsa.119120.1 (locus Cucs a.119120) derived from phytozome v7.0 (chr-ID scaffold0099 8; pos 1027738 to 1028402)
aaggtaaaggggcgtggaggtggtcgactgtttcaaatttgtgatttagcttttccattttcttgcatttacccttgtatccccaagtagctttcatatttatttagattaacttttttaaaatatcaaagatttgttggtgatgggtttgtgcttcaatggggttttctctcgttaaatttaatgttcatataattgtttaaagtctcttattttcttgttccttttgtcatttatgcaatactgagtaatgagatcgtttttatttgcttgaatatttgtgtttgtcagagtttgggtcaattctttttaggtaagatggaaaaatcgtctctacatgcatttctcttccctgtttttgagtgagaatacgtagaactttgaaccacacttcaagaatcaaactggttgtgagactgaatcaaaaagacggtttgtttttgctttgtgattctataattttgttcatggattgattataagttgcttttggtggctgctttactttggctttggaggtccacagcgtatatcttttcttcttttcgatttgcatccatttgtcctttaatcggttttttttttttgtcaaatgtagtgtaagagatagacctattaccatttcgtttgagaattggaggatttcaccactggagctaggggga

SEQ ID NO: 67532 - DNA, 508 bp, Cucumis sativus
  Intron number 1 from transcript Cucsa.195620.1 (locus Cucs a.195620) derived from phytozome v7.0 (chr-ID scaffold0135 2; pos 5252 to 5759 reverse strand)
ctccttcacgtatgtctcatcacttttaacctaattcttctttttctttcttaatggttctttttgtttcttgaagtggatttataacgattgagtcgatcttatggaatttcagtttcatttcggaaaattttctagggttttggtagttgctgagggagtgtacgtctggaaatgtataatttgatgagattcgatgaggatgtttaggaaatggaacctttcttttttccaaattaggcagttacgaaagttcaatagagcttccttttgactttgaaagagaatagaatctgcgcatcttttggtttgaattagtgtaaaagtaagtaacagtgaaatttggagtaacggtcacaaaactttaaagcaaatcaagccacttctttagggcaccgaatcaatgaatcgttgttattttgtcaattgaaatggatattcaattagtttatggttgatttaaaacaatgaagataacttgaattccaatccattttttacagcttgt

SEQ ID NO: 67533 - DNA, 596 bp, Cucumis sativus
  Intron number 1 from transcript Cucsa.177610.1 (locus Cucs a.177610) derived from phytozome v7.0 (chr-ID scaffold0122 5; pos 1588274 to 1588869 reverse strand)
gagacgacactctttgtgtggttagagatcgaaaagtaagctctaaaattctgaagtttatgcccttttcttttctttcgaagatttctggcatggaaaagttcctagatccctttctgtttgaatgatgatcactgattcacttatgtatgcaattttgatatttgtaaatcttccacaccttgttttacggcaaatttcaggttcttgaacttactttttgagtatgatgtgcaaaattgtttgcccttctgtttataaaattgaaaattgtgacatgtttgttcttctactaagaacctagttattcatttcactcatcagtaagggaatatgtgacttacaaacagagggatggatcaaattgactgtgatctagtgttttatgtcttttgaataaatgatggcgtcttctttatttttattcaatattcacgtcctttattgctgaatgatgcctttgcattctgtgtgatcagattttcaattctgtttaataagtactagcttaggattagtactttgtttttataaatgtagcaaataccattttatggcatactaatatagtaactattgttaggttcggataactg

SEQ ID NO: 67534 - DNA, 417 bp, Cucumis sativus
  Intron number 2 from transcript Cucsa.137380.1 (locus Cucs a.137380) derived from phytozome v7.0 (chr-ID scaffold0105 3; pos 104719 to 105135 reverse strand)
tggcaaaggaggtgtgggcaaatccaccactgcaggtactttcttttgcctatgttgcctaattcttaatttttacatttttcgtttaattttaggtatgttaactcgaatcttcacttttcgcaattgttgtctacctctaacgtcccttttgagtttagttggtaagagtaatcctgaatgatcatttcaaaactttgatcacaagtggttttagaaaagggattttgaattgttagtttgttattctgacttttctaattgtctgtctttattgcttgatgctgatgtctagatttctagtctgttattgaggcactaataaatcttttgtacttattactatgtggtggttgttcttatacaattgggtgggtggcagttaatttggccgttgcattagcaaacaagtgtcaa

SEQ ID NO: 67535 - DNA, 553 bp, Cucumis sativus
  Intron number 1 from transcript Cucsa.196760.1 (locus Cucs a.196760) derived from phytozome v7.0 (chr-ID scaffold0135 7; pos 334211 to 334763)
gccggagaagctttcaggtgcttattagtcttattcgcttttctcatatgttaatgctttttttctttatggaaattaatgtgttctataatttgatgtttcaacattggtgatgtggataagattcttgcttcttctttttttctttctttctctcgttggtgtggggtgtgaaaacttgttttttttttctttcgaccaagtgcgaatatttgttggtgctttgggttgaaataattcgaatcaacaacaagacagtctttggatttgggaacagacggtctctgctgttattgaatttattacgtattgggagtgtttacaatgattttcaccctgatatctgagagctttgctatctgtagccttttgttttgatgtttactgagtaataagatggttatggtctgataatcttttgatattgaaattgttattgtctcattgtgctatatgatctataaatgttcattgtgttcttaacgatatcatttgatttaatggactctgtgtttttattttcatttccagctaagcttttcacgaggattat

SEQ ID NO: 67536 - DNA, 934 bp, Cucumis sativus
  Intron number 1 from transcript Cucsa.005220.1 (locus Cucs a.005220) derived from phytozome v7.0 (chr-ID scaffold0005 5; pos 294353 to 295286 reverse strand)
catttctctgtctttctctcagatctttactttcagtgagtttctccttctgattatcttcttttcagtttgttttatccgttcgaatttctggatctgaggaataattgtttttttcttttcttttttgtggctgcattgcgtgtgagatgatatattggcattatggttgtttttaattctttcttcttaagttttttcagagagcaatctggactcatgtccaatttattgaaataagtgagccgcaatttatgcgttttctttactctgcctccattgcatttaattttgaagtaaattagcttttcacgaggacttggtatggtgtatcttagctaacggggatctagaaacttagaaaggaaaaatatattgatctgtgaacttttatatggactaattcaatggaactttagctgaattgtttttgtttcttgccactgagtttgaaacaatctatttagataggttagtcttttgccttatttcctcaaaacaatcagatttttttttttaataaaaaagttgttctactgttgtaaatacagggggctttcaggtaccctaatttatatatggtcggggtttatttgtcatgaattaacttctttctttggttatctttcaatagatctaatattgggcttctttgacagattcggttctgcatatcccgttcaatgggtaagtaggtttaacataaagtcttcggcctctgttgctggtttcttgcgggcattccgtcactgagaatctttagtgggatttccttattgcatcgagcaattaatgatttttcaggtacaagaatttgttgtagcacattcagcatcggctatagagttgggcgcttttctgggggagaaggatctctcttccattgcctcctcttttgcctgctgccgacactgtctgtgctcatttgtaatta

SEQ ID NO: 67537 - DNA, 505 bp, Cucumis sativus
  Intron number 3 from transcript Cucsa.102660.1 (locus Cucs a.102660) derived from phytozome v7.0 (chr-ID scaffold0092 7; pos 1643647 to 1644151 reverse strand)
aatcacccgagcaggtgagattattaattttttttttggtggagggtcaatattgcagtgacgattttttctaactttgttacttttatctgcccattgcaatcttttttctgaaattagttaacttgtttctccattgcatgacttcctttgaatgttttacttatcagctatttttcttttcctaaccatgctacttttaccatgcacaaaatttgtggttgatgattttagagcttgagctctttcagatgtataaatgaaaccataatctgtttgtctcggatgattgttgagcttattgattgcatttgatctgattattccagtaataattatgcaaaccgattgcttcctcactaccatcaccttatcctagttaatttcaactttgtatctgtctgttttccattctttaatatcctttttttattctctggcatttttaaccaatgtttgtggcattgcagaagctggttcgacttacacttgaacaccctcagta

SEQ ID NO: 67538 - DNA, 984 bp, Cucumis sativus
  Intron number 2 from transcript Cucsa.118400.1 (locus Cucs a.118400) derived from phytozome v7.0 (chr-ID scaffold0099 8; pos 257911 to 258894 reverse strand)
agacttaaagtgtgagtacttttacaatctctgagcatgatattgccttaaggcttatgccttccattctgttttctcaagtgaaaggcattcagttcttttgcttccttgtcttctgttccctcttttaactatagtttcagttctttagaatcatctcatgaaacatattccattcgctccttgatttgatttaattccaagtgttgttaaagagagacattaaatacactctagatattttttctattgtctgatttagatgtagtaaaaaatgtaaatgcatttattttattatatcgacaaagaactttattaaaaaattttaagtggcttcctatcttcatttgtgtctctttttcccgtctttctcttgccatcttccccatgaatgcttggctcttttcaacatatttcttccatgtatttttgggatcacaaagggtgattttttgtggagcataattggcttatttctggcttcaattttgtgcacttatgggaatttgaagtgggtgcaatttgcaatacttgccctctatatatatattgtcaaacttttatgtggattaattaaaagaaacaaaatctccaaggacacaaattaaagaacatagaaagaataaaaagaagcaagctaggaggaaaataggcattctccaaattatgagaatacttaacatgaagcttcaatattgacttgatcaaaccgttcttgccatagcaaatgcttttcttcaaagatcctcgtgtatcttttagaaaaatttcatttaactcaggctgttcctttgaggacatccaatagttaacacacgttatttttctttctaacagagaaattaagaattttccgtttacttttctttgtctctagctatcctcaatgattattctgttatctcaaactactattctttcctttgtgggtttcgttcttattatgcagtccccaggtaaccattgctacagcaataatttttt

SEQ ID NO: 67539 - DNA, 971 bp, Cucumis sativus
  Intron number 4 from transcript Cucsa.104240.1 (locus Cucs a.104240) derived from phytozome v7.0 (chr-ID scaffold0092 7; pos 2834641 to 2835611)
caattgcggaagaatcaagctcttgagaggtaatagtatattttcacgttcgtcatttttctaaattggaccctaagtgaatagaaagaactgatttttctgtatacttgagcacttgaaaggtagatagttggattttttggtcatcatcatcattattttctgattagtaatgtaaattagactaatgtaacaaatgcattaattttcaactatctaaaggggacatttggttagtgatttgacaattgaaatatgttaacaagggattcagtgaacaatagagttgtgtgttctaaggacaaatgattcagaaatggtaaaaccatgtggctgcctcacaataaccattcagcgtggattaaaaattcatcattccctctaagaatcactagatatattattgatgtagttggatgataaaaaactgtcaaccacattttggtggtatcattatataatctctttagccttttaaccattggaccaagttatggtggttgaaacatttgttctatttgaacctgactttgtattttagtgtatgtgtgtgtgtaaacacagagcttttaaccgtcaagtcaactgatggtggttttatcaagtattttctttcaatatggctctatgtttgaattgattttgaaaccctaagagcttaggacattttctttgtatggatagttttggaaaatatccttatgggctatgaaataaatctcctgcttccttctaatccttggttgttgagatggaagtgaaatgacataatgtgtttctgaatggcttaggacatctttttttgcatgttgcgaagaccatagattttagctgcacttttggatggctcccaaatgtacaaatataccaatattttctgtgtaactatggatcaatttagaccacacctgcatatgcttttgtgttgccaattgctacatgtatttgactgcttcagctttacaggtttc

SEQ ID NO: 67540 - DNA, 643 bp, Cucumis sativus
  Intron number 1 from transcript Cucsa.079490.2 (locus Cucs a.079490) derived from phytozome v7.0 (chr-ID scaffold0079 3; pos 2350307 to 2350949)
atcttcgtcaccgcgaaagcaagagggatcaccctgtaagccatctattttctctctttcttgtttatctcatttcatgattgttttcattttccggtaggccttcgatttttcctttctttctatcattttttttgttactgatatgatcgatttcaagttaaatgaaaactaatcttcaggatccgtttttgatggacttttgtagtttccttgctgtgtcgttcagatctgtggatttggttgggatgtttttttcttgcatcttgtaattgtctgaaatgaagaatatgatggttgctttaagtttaatgtgtgtttacatgaagcagatgacaaagttgaagaattactgtgttccattttgttatatttctcatctagtattatttgtagaaccctggaatgtttgctatgtccgttttgtttccatgtcggttattttttgtatttgcttacgacatattatagttttcgattatttattagtttttataggattgcaatcttgataaaatagtggtgtttctgccctcgtctcaatactcaaattagtaattatttttattgtatgagtatgagttgattaaattctctttattttaaaggaactgttggttgagcaaattaccgaaaaggggga

SEQ ID NO: 67541 - DNA, 537 bp, Cucumis sativus
  Intron number 2 from transcript Cucsa.069380.1 (locus Cucs a.069380) derived from phytozome v7.0 (chr-ID scaffold0071 4; pos 193454 to 193990)
gtcggattaaggtatctctttcttaactgcatgccaaatgcgaatgctgaaaccatggtgtggagctgttgtatgttgtatatggaatcatcattgcctgtttattttgcaaaaaacttattggtttaagattttaatagtttatgacatccaatcccacatacaaagaagagtgttaactgttaataatatgtataaaatatcaaatatgttccaatttatcggcttaagcttttgggttgaatgatacattagttaaaagtgagcatgaaggttcaggtgggttatccggtgaaattcaaagtgtgtataagttgacccagacactcacatatataaaaaaaagttaagattgagtttgaaagttagtaaaacatatcaaaacatgggacatttatgttaatctatggacagtgaaacacagcctactgaatttcgttaccattcggttcagtttattctaaaacatgattgcttttcttttttatcatctttattttagatttgggacacgttgaaggggcagatacagactga

SEQ ID NO: 67542 - DNA, 670 bp, Cucumis sativus
  Intron number 1 from transcript Cucsa.162370.1 (locus Cucs a.162370) derived from phytozome v7.0 (chr-ID scaffold0114 4; pos 2034826 to 2035495 reverse strand)
acatcattcgtgttgctcctagcaaagctattgaggtattgtagcctctgattttgtgtccattctctaatatatactttgtttctgattggattatgcttagttgatggtgggagggagttcgaagctgcaaagctttatccttatctgatgaattggttacttttgactatgtgttgttcttgtccaattgattctatataacctcaagggatgtatttttgtgaaaaggttgtggtcatttcaggagttttaggactattgaactctagtttgctagtcaaaactggcttttcaagaagcctctctgttgttatactccgattgtgtattatcagcatcaatatgtttgttttagtgcttgtgtcattatacctgtggttattgcgttatagcattaccttgttttgaaatcgttgaattttcgttaggttgctggagttgtagacttgaattctgctttatctacctcatgttgtggaaccgtaaaaagtagcatactcttttaaaatgtaacatgtgttccatgcagtttcaaacagtaatttaaatttcgttcaatacaaaatagtgaaaagttcatctaggaaggacgttgaatctggcttctaatttaactcattatgtattttgaaactttctacaccattccatgtgcagctctttgtgt

SEQ ID NO: 67543 - DNA, 336 bp, Cucumis sativus
  Intron number 2 from transcript Cucsa.040650.1 (locus Cucs a.040650) derived from phytozome v7.0 (chr-ID scaffold0052 9; pos 86313 to 86648 reverse strand)
ttcttcttgctcttccgcacgagttctttaaacaggcatgaattttcgtatcgttttgctttcatttttaattttgattaatttcttttatgattgttcacaaaaattgttttttttttttgaaggaaatctgattcttcttttcgatttgatttaccttctaccatttaaatataatgattaatcacggtttcatgaatgaattatacgatacacaagtaatattttacacggaatatcgcgaagttaattactaattaccgaaaaagttttcgtagaagattgattcttgtttaccggtactgatagttgtcctcttttaggcggcaagagata

SEQ ID NO: 67544 - DNA, 793 bp, Cucumis sativus
  Intron number 1 from transcript Cucsa.169210.1 (locus Cucs a.169210) derived from phytozome v7.0 (chr-ID scaffold0116 3; pos 155839 to 156631 reverse strand)
ctttgtcaggttcatgccatcttttttctgttttatgattatggtgaaagctatttcttaggagagtttaatttctctttttgttttagctttacaagtgatgaaaacatgtcttttatagtataggcactactcatgagaatggatgggttgattacttagtttatttcattttggcctccattgactttctgttttaatcattcaactttaaatgttttgttttagtatctaaatattgtgtagtcactgtctttgggttttcattaatatttgatctatacaatctaaacctcttttaaaatccaatgttaaacctacttcaacaagctttaggcatctttgtaacaaacatctacctctcagattctcatcaattaagcgacacaaaatacttgtctaaatgaaaaaagtttttgctagtgacactggatgggtggagggcatatcgtcaaagaccgccaaattgccaattgacccaaagacttaaattgatggatgaaaaatatcaaattatacctctaaacttaaagagttgtattaatttaaattatgaaataattattgtatcaactaaacatctaaactatggtagatgaataaatttagatttttagacttcgaagatcatacattactcaaattgtccatgttataaactgatgtttgaataagtgcacacatttgaaaattatatctaacactctaccaaaaggcaatcgtgctgatacgaaatgtacactttttactatgtgcaggactgaaagtagccatagattgcaaatcaagtgat

SEQ ID NO: 67545 - DNA, 745 bp, Cucumis sativus
  Intron number 1 from transcript Cucsa.116930.2 (locus Cucs a.116930) derived from phytozome v7.0 (chr-ID scaffold0099 5; pos 717894 to 718638 reverse strand)
ttctccctcaccgtcactttccctattcctcaaaggtgaacgccttttacattctcttctctcttctctgatttgcaacttttcaccctccttcgtttcaaccacgtttgatttgatcctcgtttcttgcctttacatgtactgtgtgttgttctctggtttattggtaatctatttatctactctctgagattggtttttttcctatttgtataagactggaattctcgtttcttgttgatgtttggattgtagttgcgggtatgatactggaaattgactagggttttagtctttaattagacggaaattgtttgtgatttggggagctatttgaagcctgaaggccgaatggtttctccggatcttccttaccgacagtgtgtgtatcggtagcgaaattctaattccctgatttagctgctctcaccacctagatgttaatttgtgttcgatgaagaaaattatgttcacacgcagtagtgggttttccagatctctcattacctctgatttttttttactgagaaaccatttcagaaactttaagaaaatcgaagtgttagtgaagaaggggagtttattaggctttccttagtctcgattttccttggatgttttgtagaggctgattaataagttcttgttttctgcattgagggagaattgtttttttttttcctttaatttttgaatttttctttatgtcttgggtgcagtttttctttagctttgtgttgaattg

SEQ ID NO: 67546 - DNA, 740 bp, Cucumis sativus
  Intron number 1 from transcript Cucsa.337150.1 (locus Cucs a.337150) derived from phytozome v7.0 (chr-ID scaffold0335 6; pos 293104 to 293843)
agtgatagggggaattggagggattggtggtggtggtggactcgttaaacttccttaaactattaatctaagagtggaggattcgtttacaaagtttggtgtgtttcttatgtgtgttttattgtaatgttttaatttggagtttctttagggtttatataagaaaaagataagtaatttgtgtgtttggtttgcaatgttagtttgatcactacatcttgttgatgtaagtttgatgacaattgctcttgtttcttttaaatgtctaattgaaaatggtggatggctacctttactcataaagggaaatgcatatgtgtgtgtgggtttatgttagaatgatgttgagttaaaggaaagaaaagataaagattgggcctcgttttggcatcaagaaagtagcacacgtactactagcaactaatcttaaatgatgttaattgatcaaaatcaaaatgattttatgtatttaattttgtttataataacatcttatttcaaatatatgtgattttctcaacaataaaaaatatagattttattgatataagttaaggttttatcttgacaaactcaaggactataatatcttgaagattatttatcaatttgttgtaaattatttcaacaccacacatgattaacatagattttgaaggttcatcaatgcaccaaaatgagcatgtatttattgaagtttcattgattgattgatggaggtgggcaatagggattggtgg

SEQ ID NO: 67547 - DNA, 790 bp, Cucumis sativus
  Intron number 1 from transcript Cucsa.255690.1 (locus Cucs a.255690) derived from phytozome v7.0 (chr-ID scaffold0222 9; pos 3583895 to 3584684 reverse strand)
aataacctagcagagattttggagtttcaaccaaggtagctaaaatgtctttttttccctttttggttgcattttgatggtctttttgggcatgtttttttgttgtttagggaagatgggttcaccgttcttgttctcttttttacgtttagagcattagaatctgggactcagagtcgccgtttatatttgaacttgagatgttgaagaagctgtaagtttccatatttgggaaccgacactctggatttggaactttggaactttggaacttgagtttacctcttttcagtcttcttctagaaatcctgttttgtaatatgctgcctcatggatagagctgatctcttcttttggctttttctagttcattgatgacatttgattgctaggacaacacaatttcaagcatagcttagttgaaagagcactaattatcctttcaaaagttgatggttcgattcccacctctctatttgttaagctcaaaaagaaaatcaatcgtcagaacaacggacttctcttatctctgcattggagcttgcatacatttctttagtatctacttgaagtggcttgaatggtttgtgcttcattttggtgatgctttctgacataattggttgttcttaacactgaagttttcaagtagatgaagtctgttttgaacatgatgaatggtgttgtggatattgagaatttcattgcttttagatttgtcatttattctggtctttctgttgtctgttgtacagtgacgtgagcgactccggtgacgaggaggctgatt

SEQ ID NO: 67548 - DNA, 483 bp, Cucumis sativus
  Intron number 1 from transcript Cucsa.248580.1 (locus Cucs a.248580) derived from phytozome v7.0 (chr-ID scaffold0220 7; pos 449844 to 450326)
tcaggcgcaagccatttggggaagttcatctcaaggtctctcaccaatcccatctccttctttataacaactttccttcaactaaccatgccattcctttttttctcttcttttttcttgatcttgattttaattttcacgctttattttggaggtggtgatattgcatatcaacatcttccttcattttgtgtccattgtttgtttctgcttggttattagtttgtacgtttcctccacctttgtagataatgacttcttttttcaattgaaattcaacgtcttcatccataattacaatttatttgctcgaattttagtagagttttttatctcatctttctaaatcgtgaatgagacttgagaattgatgtctgggttgcagatgttacttttaatttacatctggttctattattcatttcccaccattgaattgaattttgatatgacaggtttcgtctgttcgagaaagccgatcag

SEQ ID NO: 67549 - DNA, 894 bp, Cucumis sativus
  Intron number 2 from transcript Cucsa.234190.1 (locus Cucs a.234190) derived from phytozome v7.0 (chr-ID scaffold0199 9; pos 155434 to 156327)
tgaaagcaagaagcagatagttaggaaggattcaggttctttaactttactcttcattcattcatgcaatgtcggctaattttcaaatatgagttgataacttttcccaaaactgatatccattagactttgtcaactgttagatggtataattatattaaacttaagcatttgggtaaattgggatttaagatggtttctaagtaggttggttcagattttcaatgaatgggacatctgattcctcatattttcatcaaatatgagttataactgtctcgctttgtttctgacccttgtaacatttgactgctgggttagatttaagttgttaagaagtcgacacagtgtttgataaatgagtgcttattgcagcaacaaattttctaatcccctaagttacataacttcttgagctcattttttatcttacatgctagcttttatcattcactttttggcaatctaaatgtagataattcaaacttaggtttctgaatatttttttttagttcaacaacatctggggtggttgatctcttggttgagggtattttcttggattggttgagcttaggttggcataaatgtaatatatattaaagctattaaccaaatattcacatatgatttcttttatccatcttttttatatcaaccattaaaatcaactgacaacttgacttggaattttcgcgagatgtcttgttcctacattttgaacatattttgttccaagacaaatgacttaatcattgaatatcttaaaagattcatttttatgcgttgtgtaaattgatttccatcaagtatgactgaagtgtatattatttctttgtctccatcccaatttatgaaggcgatagtgcttggaaatttagtagcgaacgtaaa

SEQ ID NO: 67550 - DNA, 468 bp, Cucumis sativus
  Intron number 3 from transcript Cucsa.386800.1 (locus Cucs a.386800) derived from phytozome v7.0 (chr-ID scaffold0391 8; pos 337381 to 337848)
gctactccatcagggaattgatatagttctcatcccagataagctaaatattttcctcttcttgtctagattggagttctaagaatgttaatggttgaagaatgccaataatagataccaaagagactgaaacttcatcataacatcttgaatgataacatttcaaaattaaaataacattaaacctaatttaatggtgcctagtaggcatagaatatcaaaataggaaatctagaaataaatctctgcaatgtcattgtctctccatgtcatacttacagtctatatatctctagtaagtaaaattaatatataatataagatgttgagaaaagattgaattgcatacaaaactttggttctgtaaataaagggtatagtttgttctgttgacagttcaaactcactgtttcgcttcccatccgcaacagagacaaccaaagttggaaaccttcacagcaacattgg

SEQ ID NO: 67551 - DNA, 451 bp, Cucumis sativus
  Intron number 1 from transcript Cucsa.312350.1 (locus Cucs a.312350) derived from phytozome v7.0 (chr-ID scaffold0299 5; pos 1797807 to 1798257 reverse strand)
gaaggtggcggccgtccaccgagaatcacataactgtaagttcttttagtactccacattcttactcttcttcaattttttcattatctttcttaagccggctctctacattttagactttgctatgattgaagattcaaacaccaatcgttcatcaaaactttgtatttttaattcattacgatggaaggaagaggatattatgtgtgtctgtgtgggttttcgcattcccttacctcctaacagaagcttagccatacattttcttcgttttttggccataggttattattattttttgtttttttggtgccaatttttctcgttttgacgaatgtgttttgtacatgcacctggggtttgtgttcttgctcgttttcttgtacaggacgcttcaaagttgtaatcggtttattaatttggaacagttttttctgggtcagtatcaaga

SEQ ID NO: 67552 - DNA, 505 bp, Cucumis sativus
  Intron number 2 from transcript Cucsa.251470.1 (locus Cucs a.251470) derived from phytozome v7.0 (chr-ID scaffold0222 9; pos 540388 to 540892)
tcaagaacctcgagaaaggtattcattcttacatgttggattattgttgttgttgttttcttcttcttttgtaatttagtgaatatgggactcaaatgagactgcgttttcgtttctttagttagttaactttcatgtcactagtagaggatgattggttggtaattttcttacaatgctctgattatgaatacgatatgatgttgtaaatacgtgaacaaattatagggatagtattgttggatagaatggttgaaggatccctattatgtgcctaatgaccaatgtgaatctaggggttgttaaattacttcttaagattgtagtctgttttggtggatgtcagcattgttaatcctcactccattgatttcaactgcatagttggattatcatataattgggtttttatttttcaaagttgtccaattcaattagtttgttggtttgatgtcatttttaatcaatagtctgcgcggatttggttcgtggtgcgaaggacaag

SEQ ID NO: 67553 - DNA, 329 bp, Cucumis sativus
  Intron number 2 from transcript Cucsa.396140.1 (locus Cucs a.396140) derived from phytozome v7.0 (chr-ID scaffold0410 0; pos 1453664 to 1453992)
aagaaggtgaatctctcttttttttttaaaaaaaaagaaaattatacatatatattatataaaaaaaaaatctaaatcacaattggagcagagatgctctgtataccaattaagacaaaaagagagctttcaataagtttttgtgttcttaattgaatcaaatggggaccaattattccttatcaaatagtttaattttagtatataatttcttttcttttctcccaatttctttcgctgactttcatagcttttgttttgttgtcgtcgtccctttttcttcactctccaaagttctcttttgaagtcggaattttggcaattttcgg

SEQ ID NO: 67554 - DNA, 545 bp, Cucumis sativus
  Intron number 2 from transcript Cucsa.363110.1 (locus Cucs a.363110) derived from phytozome v7.0 (chr-ID scaffold0361 1; pos 729454 to 729998)
tgtggtagggtctttcacttgctttgactgatttcatcatatgtatatccatcaatttagacttcccttgatcttatattcttctgaacgataatggtatggtttcacgggcttgggatgtctggatataccctccaaattcctagttccaaaacttgaggtgaaatagtaagaaatgttttctgaatttgcattacctcttggagttgaccttgggtgagtgtagtctcctgaagattagtgagatgtgccgtgacaaaaaattgattttagaagataaatggtgcttcaccttggtttcttgttattatattctatattttaaagtctcttcaatgttggtgtacatgagctttgtcactgctccatgggaaaatttgagcgtaaggtgcgattaatttgtgccaatccattcttattgtgttactcctttcagacactgggatgttattgtttgatttgatggacttgcaatgcccatcacgtgtcttactaatagctgcttcataggaactgcttgagctatttggggtgcccgttttaga

SEQ ID NO: 67555 - DNA, 463 bp, Cucumis sativus
  Intron number 1 from transcript Cucsa.219010.1 (locus Cucs a.219010) derived from phytozome v7.0 (chr-ID scaffold0165 8; pos 869642 to 870104)
cactcgtggtcatcccaaggtctgttctttcttctttgttcgttcttttgttttcggactccacgaaaccttacagggcagctgaaaatgcccatttttttaaaagtgatttggttttgtttttcgcaagttgggtttgttgctatcgagccagttttgtgttttttggttttgccgaatttggtggaggaagttttgatcaatttgagcttgaggtagatagaggagatcagtggaaaaatgtacataacgttttattgatgtttgagtagcataattcacaatttgtttgcttttaccatttacttgttcgttttattgaaatgaatttgcttttaaggtatttggcaattttgtggtatgatgaaagatggataatttactagtttgcttccgttgaatttttcttaaccattatttgtttataggagggggctccatcggcattaaagaaacatattga

SEQ ID NO: 67556 - DNA, 554 bp, Cucumis sativus
  Intron number 2 from transcript Cucsa.205110.1 (locus Cucs a.205110) derived from phytozome v7.0 (chr-ID scaffold0141 6; pos 250068 to 250621)
gaggtaaaaagaaagaaaatggaaaatgctctgtttcattgattttcttttctttttctttttctttttcttttgttttgttttttgggtaatggtttgtttttgagttgggtgtattaaatgtttcatgggttcgactttttatgtggtgttattattgttatttattgttatgattcagtcgacatggtttctgttggtttttcagtaaatgctcagcaaattttaaacctcattattcattatctttttttctccttttaacctttttgtattttgagtttctatttgattttctttctttgcaaggctcctctgtttatcattgattttttttacttgtggtaactttctcattttgattaagtttgcttctcattttttggtgttggattcaaaaaagcattgttgattttgtatttctttttcacttttgtgtttgtgttttacagtttctcaatgaatatgatgaatcttttctgatcttttttgtgaacactctgtttttctctgctgtagatatttgatcttgggtcaagcttgttgtcatttgg

SEQ ID NO: 67557 - DNA, 481 bp, Cucumis sativus
  Intron number 1 from transcript Cucsa.340140.1 (locus Cucs a.340140) derived from phytozome v7.0 (chr-ID scaffold0335 6; pos 2637079 to 2637559)
tttgagcaggaccctctctctcggtactctaaacttttttcgtttatgtgcatacaattcattatcatcatacttggagatttgtaatatgagaaatgtttagctcggtgaacctgttgatttcttgatctccgtggaaattaataggaatttcattggaatatagcttttggttgatgggttgtttgcagcttgagaattgataatgttatgatgaagtcaaagtcgagtagagtagtgtttatttggttgctgttggtgatttaatgagcttcaatgtgagctccattaacttggaagttggtgattttggtctaattgagtttgaaatttgtcttttcttggtatttgagctgtagttatttaggtattttggactgattttccctttcttgtcagttatttcatgttcagttggaaatcaatggatcaatggcattggcttatattattattatttgttctgcagttcgaagctaaa

SEQ ID NO: 67558 - DNA, 283 bp, Cucumis sativus; identical to SEQ ID NO: 63671
  Intron number 2 from transcript Cucsa.219800.3 (locus Cucs a.219800) derived from phytozome v7.0 (chr-ID scaffold0165 8; pos 1418708 to 1418990)

SEQ ID NO: 67559 - DNA, 455 bp, Cucumis sativus
  Intron number 1 from transcript Cucsa.343040.1 (locus Cucs a.343040) derived from phytozome v7.0 (chr-ID scaffold0335 6; pos 5309388 to 5309842 reverse strand)
aaagagaggacttgcgcaggtctcgccgtggcctttttctattattattattattattatttatttttgtttaatcattgttgtttgactcttttcttcatcgtgttcaaatgctgaattcgttttagggttttaatttgttcttgttttctgtagtatcatgcaatctccatcgatgttttgttattttctgattatataaatattattttatccattaacaattcgtctttcttgctcattgaatcttcaaattgtgtgcggtcttatgagagacaattgtgaaataggattttagattttttttttgtttcctctgcataataaacaatttcagttctgattttttgttttgttggatcttgccgtgtttgtgattgtttttgtttgtaatgttgtcgtactcatctttggttgcaggactttcactaaaatctcaggaactaacggcaatt

SEQ ID NO: 67560 - DNA, 624 bp, Cucumis sativus
  Intron number 3 from transcript Cucsa.198750.1 (locus Cucs a.198750) derived from phytozome v7.0 (chr-ID scaffold0135 7; pos 1697202 to 1697825 reverse strand)
aaaaagctgtatgttcttctgaccattgggtggaataactttcaatgtactaacaagattgatgggggccatggggccaccttccctctatttgtgttgggtttccccaagggctattaatgtttggagaatgctgttcagcacgggttcaattttaatgaattttctagtccagatagactcaactataggcctgggaaaactggttactcttgaagtttgaatcaactatacatgtcagtcattcaagcttgcactttttgagtaaacaaccaatatcccatcacgcagtatctgctttggatgaaacaaacagaatttgtgtggcacttcgggctttcaacttggaaaattgcttttgtctgttcaaaagaaaatccatcaccatctccttcatgcagattctttgatattttttaagtatatgatgcttctctgaaaaatcaaatatgtattattcacttctttggctatatcttaaatattcataatttgcttcttgtatacaatctcacgtgtttccctaattcatacattattgaaaaaaataatttgaacaaagttgttattcctttgttccttcttttaggaattggaaggccgaggcctggggacatctgctca

SEQ ID NO: 67561 - DNA, 518 bp, Cucumis sativus
  Intron number 1 from transcript Cucsa.198750.1 (locus Cucs a.198750) derived from phytozome v7.0 (chr-ID scaffold0135 7; pos 1698076 to 1698593 reverse strand)
cgaaccctccctcactggaaacaagaggttttgctccatcttcattttgaactacttacgtcttgaagaaattggtatcaatcacttggcaatgagtttcgtattggatattgagtgcgtgaagacaaagtaacatagttttactcatgaagttttttccgaaaggattggagagtcgtttgattatctctttcctgcgctgtctgcataggattcaaaatctgaactatctcgtttttagattacaagcttacattaattttctttagtttgtaacttacactaattgagaaagaaatgccagttgaaatgaagtctatgtacatgaacttatcagataattgagttacttaaataggcatttagactctaaccttcttaacctttcaagaatcgtgactatgtgactacgatcgtagaggagttcaattttggattgaaggaaagagagggtgtttgatactgttgtatattgttttattattttgatcttgtttataattaccattaggttagag

SEQ ID NO: 67562 - DNA, 643 bp, Cucumis sativus
  Intron number 3 from transcript Cucsa.353210.1 (locus Cucs a.353210) derived from phytozome v7.0 (chr-ID scaffold0353 3; pos 824498 to 825140 reverse strand)
cctcaactgccccctcctcaccaccgcattctcaggtatttattccaaattttaaattttatggtatgacgatgacgatgttaagatgttaatcttaagcacatgattgtgaataatggaaatgattttagtgataagcttttttgtgtggaggaatgagagccgtgtgatcactaatttgggattagggaaaagagtgtgtggtggacccacgagtgtgtacagtcacaatagaccttcacgtcgtcgtcacacgtaatcttaacgatggtgaagggaattatgttaatcggacggctatgaacaacccacatctatgttcttactttttatttgatattattttgaaattaaaagagaaaagaaaattgaagaaaaaccaaatccaaagggaaacccaaaaatcaccatctcccccacattcgctatacttgtctcaccgatcttaaagatccttcccctcaaaggtcaatttcggaatttgacttccttcctctctaaatctagtttctttttactacttttatttatttattttcatattactcttacataaaaacgtcttttcctttttttttgtttttgttttttgttttttgtttttttgtttttaataaataggaactccgagacggcgggggcg

SEQ ID NO: 67563 - DNA, 973 bp, Cucumis sativus
  Intron number 2 from transcript Cucsa.353210.1 (locus Cucs a.353210) derived from phytozome v7.0 (chr-ID scaffold0353 3; pos 825492 to 826464 reverse strand)
gcgaccatctggttgggaatttctttgaatcacaggtaaagaaaattatcctgaatcgtagatcgtatatattcaactgggtttttgagatttagttcgagagtttgatgtgcagttgttttttgtactgtggcttctttcgttttttcctccattcggtggtttggggcagaggggattattttgattcttcgttattcttcatctcatggcatcagtcgccttcctacgcttcccttttgattttgcgcactggtttttgtttgcttcagttcaggtttttcaggtaatgcatcaaattttattcacctccattttctactctctctaaagagactatcctactccttccattgttcatctcttcttcatttcgaagaatcagagagtttttattaaatttttaaaattcatatgttgatggagaaaatgaaaatctttcctctgtgtatggctccagaaatttccatctccaaaaatgttcacggacaggattttcctctcaattggatttctttctatgatggaaagatgcgagtttgatttgttgttcagattcgcaatcagcagacgaattttcccagatgctcttatcttttttgattttgtgaatgcattacctatcattggagttctgggtttagatctaatatcaaatcgaaaagaaaaaacctcctcattttccgtcttgtaatgaaaagttttttctgaccttgatcttgcataattaaatccctcacaagctctcgcgattatgagtttatctgaactcggaaatagctggagaaggttcatctttgtttacctgttttcgctaattaggccatgtggggggttgattgcaaaatccaacacaattcctccattttccctctttctttgttttactttatggagatttaaccatggttgattacctcaactaacttgggttagccgtccattccacattacagttatatttaaaagcctg

SEQ ID NO: 67564 - DNA, 878 bp, Cucumis sativus
  Intron number 2 from transcript Cucsa.256830.1 (locus Cucs a.256830) derived from phytozome v7.0 (chr-ID scaffold0222 9; pos 4321589 to 4322466)
cttacaggtatttttgctcaactctgtttctatctctattgctcatcgtgtgatttactctgtattgccgtttgctttttaatcctaactctctaattgtcgtggaaatcagaactctcttctgcttgttggtacttctgatgggatcattcttataggaaatgtttgaatggccacttttctttgtcattatatttggaagtattggaaacttcacttgtgtgggttaggatctctaaggatatacaaccttacttgaacagccaacaggattaacagatccagattgtatggacctatgaggatatgttgttgagtgttgggtataatttctaacctctaagccttgcatgggtcattatgcaaacatattggacggacagacgattagttggtagaaactgaaatggtaattttaggctttttaggaggatatatcgtgggtaccttttcagaactatcaatgtgtaacaagaaaattgtaaaattgtacgctttgaggccatcactcaactacttaccgactctaggggaggctggggcgtgttctgttttgtggggaaacaacaaaatcttcaaaggatgtaagattttatgtcaatgtctggtagattctttatttttctatggacatttatttcttggctcttttgtaaacattcgcttggtcttgttcccttactctgaacccatgtctgcacatctcttgtttccttagacttcctaaacttctgtgctcgggataatgtggctctataagctataagtattattgatttatttctgtatcttttgtctcaccacttgtttttactttttgtcattttggaaaatgaaatgcagaagaagaaactgatccatacagaattcccaacaag

SEQ ID NO: 67565 - DNA, 941 bp, Cucumis sativus
  Intron number 1 from transcript Cucsa.328050.3 (locus Cucs a.328050) derived from phytozome v7.0 (chr-ID scaffold0315 9; pos 322021 to 322961)
tttgttttggtaagtaatttgaagttaggtttagggtaagcgaaaggtatattaattagggagcggagtctggtaaggccatttgtttgtctcttcctttattaattgcaatgaaagagagagagagagagaaggacgttctgtataatctgccatggcaggtgacctttttttaggctgataacagaaatagccaagctctctctgactctgttccaccatttattcaaatttcactctctttttctctctgttccataaattcaatcaccaaactagggcgctcctttgccccattttttcactcttccttttaatactatcagggggtttctgcctcagcacatttctgcttcagggttttacatggaggttgatactttttgttttttcataatttcttctttaactctgtgtattatattcttgtttgaatatttgacttccctgtctgttcatgtttctttttctcattctctgatgttttgaattctttctgttagtgtactttttttttcctccattaacagcgaggtggaggatgggggttgattttgtttcatcattagttgaagataaaggagaattggtgggggaattttctttgtttgaataatcattttaagttatgatgtttctgttgaaagtttttgtttgcttttgaaaagttcttccaactttttttaccactcgtctttttctatttttattattatttttgagtattggtaacagggctttggattcccagcacgtatagcccagagaacttttttttatttttattttgaaccaagttatcgtgtaacaatgactttgatctgattttcttgatttactcaagcgttctgtgctgagattattgttaattttcattgaaatgtcactgccttttatggtaaattgctaacattagttagctgattctctgtagttcttaa

SEQ ID NO: 67566 - DNA, 651 bp, Cucumis sativus
  Intron number 2 from transcript Cucsa.336940.1 (locus Cucs a.336940) derived from phytozome v7.0 (chr-ID scaffold0335 6; pos 90583 to 91233 reverse strand)
gactcccagcatttgggatacttttgctcaatctggtatctctctctctctctacacacaaaattttactcatttttttgcgactttgtagtttctcaaggtgtttctacgtgaaactatgggtttaaataatatcacttaactttcaaaattttcaaaagtttctctattacattaagaaaatattttaaaaactgttctgccgttagttttaagatcagtttccttgtactttcaaaacccactatagaagtacatttatatagagtgtagatacaggtaactcgtttctaaaattatttgaattaaacttttaaaagttttgcatcaattctcacgaactcaaagtttatgaagttccaaattttggccacatttatagagtatggatatcatatgtgttgaactcaagaaaagagtcactgttaatgggttgtttttattactttagtaatgtttcgatctctcacatatttagttttcaaagctgggcttaagtaagagatttagagatagaaaaaatgttgaatttgtaggcttaaaaacacaaaaccaaattcttaattacaaagcagtgcctaaattttcttttcttgtttttgtttatgtcatttgaacaataggacaacagacagaagacatcgacgtagg

SEQ ID NO: 67567 - DNA, 573 bp, Cucumis sativus
  Intron number 3 from transcript Cucsa.281110.2 (locus Cucs a.281110) derived from phytozome v7.0 (chr-ID scaffold0263 3; pos 1017040 to 1017612 reverse strand)
ccatactggtatgtttgcatttctactgttaatggttttctatctcttggccctggtcagtagaaaacagaaattatggtctattaatttgttctcaagtttacaaaaatatcattgaaaagattgacaaaccaattatttgatagttctcttgaaacctcgtacattttttatttgtcttgttcttcttgtctacgataatcaaacattctagtgtagaaatttcttcctcttgttctaacatccttttcttttgaattttttttcttgaatcaattgcctctcattttattggagcacttttaacagatcctgtgatgaaaacaacatgcaattaattctagtcacgttaatctccctccatctacccccgaaagaaaaaaaaatccatgtgcactatggtaaatagtaataaatagatatatattaggttattttaaatttaagaaagattaatgcagaatcattttagctaaaaatctatttgttctttcatgtttctttgcactttaacttagctgtactttcatatccagagtttgactggccatacgagcggaatagattctgtaa

SEQ ID NO: 67568 - DNA, 680 bp, Cucumis sativus
  Intron number 1 from transcript Cucsa.397950.1 (locus Cucs a.397950) derived from phytozome v7.0 (chr-ID scaffold0415 8; pos 515374 to 516053)
gggttttgtttccttgctctctgctaatcctgaaggtttttttttcctctctctcttggatttctcattatttcttattcgtgtgcctaatttttgctcaatgagttttgtttctgttttgatgatttgtatcttcttcataaatggtaatatgaatgtgacccatctgtgttgtttcatttgtttgatcgcctggaaaattttatatgtaaattgggagttattgagctatctgggtatagctcaaatgcaacagctttagattttttcttttggtttcattatttccactcgtcgtttttattcccagctatgttgctcataactttactgcaagccgatccatgtgattacattttgggataacagtgtacagtttggaataagaagcatggtttaggtgttttgctggagattttgaagtatgttgctcatctattggctgagcgttagctatatggaagtttaatggatctgaaagctttgtttggctcactcaaacctttgtttggcttgaaatgatactggctttctcaagattgcaatgtgactttatctagtttatttatttcttcatttacttttcatttctgattaaacttttgaattcgaactgggatgtgcttatgtgcatacttgtttcttggactaactattatgaacttctgtgggggcaggtg

SEQ ID NO: 67569 - DNA, 434 bp, Cucumis sativus
  Intron number 1 from transcript Cucsa.302710.1 (locus Cucs a.302710) derived from phytozome v7.0 (chr-ID scaffold0295 1; pos 821995 to 822428)
attcttctggtacgcgatttctgttttttgttttttgttttttgggggggttttctggtgcttcagctcttcttttctcatgctcgacttatgatcctgatgggtttttctgtttggtttcttctcttgatcccaatttggatttacttgcatttgggtctgtttcgattttcaacagtagttgaagtgtgtatttgatggtgggtgttttttttttttttgagctttcgaagtttcaattttgttttagtggttgtgattcttgtagtgtttttgtgaaatggattttttgtttaatcaatttattgaattttgatgattgggtgtgtttgaattctgaaaattttggggagattgagaggagggaagtaggttgaattttgattttgctatctgaagtgtaattcttgcaccttacttgctaggtagtacct

SEQ ID NO: 67570 - DNA, 966 bp, Cucumis sativus
  Intron number 1 from transcript Cucsa.250420.1 (locus Cucs a.250420) derived from phytozome v7.0 (chr-ID scaffold0221 9; pos 577311 to 578276 reverse strand)
gtttaccgacggccgtaacattccggatttcttaggtcattatcatttctctgtgttattatttcttttcaaaaaaaaattgtttagtaccaattagatcactgaatatgtttcttcttgtcttgcttaaatcttggtggctgaactcctggttaatgctctgatgaatgcgtaacataattttttgttccctgttaagagaatggggtttagttattgtcattttcttgtgcttcaaataatgttttaattgatttggttaatggatgggataacttttggatttatggatcttattttgcttaagtttgaatttctagtatgtggtttgtgttcacaaggattgaagatcaagtataagagtagattttttgttcacgagggcattgggtgtggcttgtaataagttttacattctcactgatagtctcattccaatgtttgttataacattcagaaatcctgattctcaataattttcgagtacattccagcttcccaaaacaggtagaagttttttgctaagaacatgaaagtccgtacattttgtaccctatttgttttctttctgattttagctggccagagggaatgtcattgttacaatattgtcctttgagcatgaacatttttaggctaaggcatggtagagaagtgctaaaatcaaatggtatgattggattgaacattaattagtttgtcctttgatatattatatattgtaatgtcaatgggtcgcagaactctttcgttcccagaaagatggatagaacattatgttgtttcctagaaaatatcccaagtctcgtgaaatatttctgaaaaattaaaattgacacgaacaagaaacaaaaatgtaaataaacgacccctttagtcgaagattataatgttgtcaggaggcttatatgatcaagaaatgttaatgcaggtgagtacgccaacttgcctttgattccaccatat

SEQ ID NO: 67571 - DNA, 545 bp, Cucumis sativus
  Intron number 1 from transcript Cucsa.375220.1 (locus Cucs a.375220) derived from phytozome v7.0 (chr-ID scaffold0374 6; pos 103713 to 104257)
gactccaccgagaagatcattgcagagtacatgtttgttccttttcaaattttcatcctcccacttcttttttttccactctattccccgattttctttctgggttgctctctatgaggctgcaagttccccccttttgctcttaccactgcttgactttctttttctttttaatctgttttcttgctctttttttgtttgctgtttgtttcctatgaaagattttgggaaatgggttgaagttaagtgattatcatttgtggggttttggggggggttttccctcttctttagtacactgagtgcgtttcttgttcttccttattgaactttacccattcttcgatgattctgtaaatttctgcatctgctcaagtgttctggcggtgtttcttcttcttcttcttcttttttaatgatgcaaatcgttggaagttgaagaagagttatcgtatttactgggatttcttctgtttttattgttgttctgcttttgatcattggtctgtttattgttccatttgaacaggattggtggatcaggc

SEQ ID NO: 67572 - DNA, 576 bp, Cucumis sativus
  Intron number 1 from transcript Cucsa.298380.1 (locus Cucs a.298380) derived from phytozome v7.0 (chr-ID scaffold0290 1; pos 31284 to 31859)
tcatctccaacgtcattacctctacactttctccggtacctcttctttacgatcatctcccccttttctaaatcattattaatactcaccaacatttccctttaagttcttttttttttattgattggattagaaaacttgagaacagtttttgagaaacaaaatctaaattggttgtgaaagtatatgttttttgaattcaatgaatctaaaaacataaaatagaattaagattaccaactagacggccctttctgcatcaatactttatcgttagtctctaattatactttttttcactaattactctttactatgttttaactttttactctcactttctttcaatggtctatttttagagtaaattgctaattttgcctctaaagtagggtttaatcgtaattatacatttaaacttgttaaagttagactttcaacgaatggtataagtttgaaggttcgttacttttatctttatggttcaaatttgtatgatcatcttaagtttgtgggtacttgttgatccacaaaagatttcaaaatttccagcttgggttcgattaagtgaaggaa

SEQ ID NO: 67573 - DNA, 509 bp, Cucumis sativus
  Intron number 1 from transcript Cucsa.316810.1 (locus Cucs a.316810) derived from phytozome v7.0 (chr-ID scaffold0305 0; pos 32237 to 32745 reverse strand)
ttgttggctggtcacttggtaacattcttgttagttatttgagataggtaaaagtaaaacaatacatattaatctccatcactctttacgctacttattggttgccattttgtttaaacctcatgagtctcatggaacgattgaaattggagtatttaattcaaatttgcgagaaaaagtcatttggaataatgtttgtcttcacgtgacaatgaagaaaaaatttaagttcgtggaattatgtttgaatgaacaatattatcattttggggattcaacgtaacagaagttcaacaacacataagacacttcaagatttgtgtgaataaacttgaaacaaagaaagttattcttttaaagattacatcgttgaataatatatttggtgataatacaaagttcattgtataagagtttggtgatcaggggactctgtttttgttttttttttttttctaattcaacaagtggggtatgggaattcaaaccgacctccagggaggtaatat

SEQ ID NO: 67574 - DNA, 692 bp, Cucumis sativus; identical to SEQ ID NO: 64910
  Intron number 2 from transcript Cucsa.267140.2 (locus Cucs a.267140) derived from phytozome v7.0 (chr-ID scaffold0236 4; pos 231647 to 232338 reverse strand)

SEQ ID NO: 67575 - DNA, 651 bp, Cucumis sativus
  Intron number 4 from transcript Cucsa.352230.1 (locus Cucs a.352230) derived from phytozome v7.0 (chr-ID scaffold0353 3; pos 133913 to 134563)
tgggccttcctctttcattccacacaaacaaagaagtaattcaacatactacttctgtacattacttaggttaaattatgatattcctcctgtagtcaacatgctgacattcatatacctccagaagtgtatgtttgattaattaatttcaacggtctttatctttagtgattgttaaaaaacggtgaactacattgccaagttagtctacagcaatgttgtgtcaattctacattagtaccaagttaaggtatagtttagcccattacataaataagctattgcacatttgtttcatccattattttggccatatactcttacaattattgcttattggaaattatcatacagtaagtgtaatatgtgttctgttgcatttcttctagaacagttgcaagtattaagatgagattcacatatctattgcattacgagtatggcatactcagcatcatttctctttcaagatgttgaggggttggcttatacatggcatggaaatatgagttttctggaagaagaatagctaaatgggttgaaatgtttttgtgaattacaataacaccattttgttggaaatgattttccccctgaatttatccttagttgtgatgttttggcatgcagcagaagagaattggaattacc

SEQ ID NO: 67576 - DNA, 644 bp, Cucumis sativus
  Intron number 1 from transcript Cucsa.363830.1 (locus Cucs a.363830) derived from phytozome v7.0 (chr-ID scaffold0361 1; pos 1422796 to 1423439)
tcatttttctcaaccacaatcttccattcctccaggttcgtctcctccattcccaaccactttgttttcagtcaacctttatttcttttacaaatcaaccaaacaaataataacaacaaaacaaaccattcgaatataacccgaaagggaacttttcatattaccacagtttcgtgttttctattatcatcctctatattttttgtttaacttcttgaaacataggaaataatggtaggagaagaataacaaaattatttaatttataagtgggatcatttttgtaagtttaattttaaaaccaaatattcaaataaccatgaattatttctaagttttgttgtttatttctaatctatatactattactaaaaaaacaatggaaaaaataacgaaagtttgaggaaaataaaaataatatgatttagacaaaccttaataattaagcattgatatatttagtgaaggttaatatggtggattataatcttcgttaaaatttgggtttgtaatattaattaataagcaatataacagtactaaatatttccttttgggtattaatttttttgttcacatagttaattaattacttccatttttctgtagtcaaagaagaggttccacctccaccgcacaccgcc

SEQ ID NO: 67577 - DNA, 619 bp, Cucumis sativus
  Intron number 2 from transcript Cucsa.252380.1 (locus Cucs a.252380) derived from phytozome v7.0 (chr-ID scaffold0222 9; pos 1296515 to 1297133 reverse strand)
agcttcaagcagaggacgttgttgtcaagggtaaggtgggtatttctactccaatttttggtgcttttgtttgtatacgtcgtctgaaatgtgggtgtgagatcgttgtctagttgggtaataggaaactaagatgtgttatagcatttgcagcatcatttaccgagagggggatggttgttctatgccatttatcacttgttgtgctttttttatactcgtgtgtttttccataggtcattcattttaaataaccacgagactcaaaggcttaaggttatgatttcttgtgaatgttgttctatgcttgttatcgtttgttgtgcttttgtcgtactcatgttttttttccataggtcattcattttaaataaccactagacccaaaggcttaaggttatgatttattataaatttaatttgtggagttggacatttgcgcaaggctcaataagtgattacgaattaagactagaaaatggcatttcgcaatgccatactaaatcacccttaaatattaaaaaaagaaaggtgctaggttactgtaaattttatattgtattagtacttaacaattcatatgtggccatttcttctgtgttcaatgttcaggtggtcg

SEQ ID NO: 67578 - DNA, 685 bp, Cucumis sativus
  Intron number 1 from transcript Cucsa.255580.1 (locus Cucs a.255580) derived from phytozome v7.0 (chr-ID scaffold0222 9; pos 3515185 to 3515869 reverse strand)
ataacttccgccgccgccgacgatctatctctcaggtaccatcaccgatcatctcttttttcttttaaacgccttttgtttcccgtttccattcattttacgatatgtatccaatattcattataatttgttccatttcattcattcattaatgcttataccgaattcccgtatatcttggtttccgttttcctttttttttttcttttcttttttgtgaaattccctaacagtacccaaactttacttcgaagaatatataataacttttaaaagaataaggttattaaaaaaaaatgagttatatcagttgggttttgggctcccatgctttttgtattttgttactcaatccacgtattatagtttgttgttttaattttgaattgaattgaattgaattgaattggagttgttaattaatggtcaattttcattgtgaaaacggtttgtttgaagttcatgcatgtccacggaaccatcgtgattcattggaaagaaaaaccaaaagatgtatcagatactatttgaaaacgacgtttttgttattataatgataaaaattaaaccctggccaattagccatcctaacaaatgaggcttcttttctctaatcacttctttctatatttgtttttctaaattaagaaattcaatcttatttttgatttgtaggtgaagaaga

SEQ ID NO: 67579 - DNA, 487 bp, Cucumis sativus
  Intron number 1 from transcript Cucsa.280410.2 (locus Cucs a.280410) derived from phytozome v7.0 (chr-ID scaffold0263 3; pos 352204 to 352690 reverse strand)
ttttctttgcttcaacaagattccatccccttcttgtaagtttcttcctcctttctttcctttctttattggtttcccttttgttatattcccgtgtcctctgtttgattcttttgtctttcatcatgccttttctgttctgggtgtttactttcctccattcaacccttttcttgttctaaacttttgtctctactttttcctgtatttctcttctgggtttccgttaggaaggttattggtggatggtggagttttaaattaacatatagctctgttaaggatatgggtatcctatggtcttttgtttgttgtagccggtatttcctatttatctagttttgtcgttgcctctcgtgttttatttaatccttagtcttatgttttagaacttagtccattcgttggaaagaaacaaggctttatttcttatatctctggtctttggtcagtttaaagattgtgaaatcattttttcctgatattg

SEQ ID NO: 67580 - DNA, 673 bp, Cucumis sativus
  Intron number 2 from transcript Cucsa.340030.2 (locus Cucs a.340030) derived from phytozome v7.0 (chr-ID scaffold0335 6; pos 2545073 to 2545745)
gttgcttcaagtaaatctcaaatttccagttatttgttgaatttatgttttatgttatgcaatgacgaagttgagaaagagagtagagaagttgaaatctccaactttggaacttctgtatgagttgaggagttgagtgggtaacgattctagttgattatcacgttgttatgtaacgctaactcgttaagtttagaaatggggcctgccctgccctgccattttacagtttttatggacaattctacctagcttgcatctgggagctaaataaatttgatcagaaacagccaattattggcttaaatgcttaatcagatcatcaaacagacgctagaactcatttctctttcttagcatcattttgaattttaaatttggtatctagtgcttcgtatttaacattaggaaaggtcaaaatattttagactgatagctaccatttaatgaaaaaggagataggctttccattccctagacctcaagaaagttatgtagcatgtcgataatagtcatatgtagcagtttttaaaagtttgactattgcactagacattttgggggagcaatctcattgtagtttttgttctctgctggtcaactgctaatttatttattgctgttacaataaattataggtcttgggaccatcacgatattctctctgttctac

SEQ ID NO: 67581 - DNA, 943 bp, Cucumis sativus
  Intron number 1 from transcript Cucsa.392100.1 (locus Cucs a.392100) derived from phytozome v7.0 (chr-ID scaffold0406 2; pos 375897 to 376839)
ggtctaaaaataatccaccgttttcctcttttatgtccacaaaacaatatctcatagaaagaagtacacaaatccgataagaacatgataatcacctgtcgattgggatccttcgatctttcagctgacaagaatgcaatggccatgaaatagtcatcccaagacaaaaacctgcaaataattcacaaaattcaaaactgagttcataaaaacaaaaatagaggaactaccacaaactgactgttttaggagtagaaaaacaaagaaaatcctgaagactctaaaccctaacaaagttaatgcccgtgggattaacggtcgattcaaattcagagatgtaaaccaacaagaaagcaaacacataagaaattttctgacccttcgcgtttggaaggatcaaaaggacaccgtgaggatccgttgttcaagagagccccatttctcgacagatcaaaccgagaacggtgctttttaggactgaaaaagaagcgacaagcaatagctgaagtgaaggcactcagtacagcggctgtggagacgagtgcaagatcgcgtgagttcatggtccggagagtcagtagccaaaaatggctttccggctactcaacgccgatattattatttctatttggagattcgtcccccagaaaattgagcgggaaattttaggcgggcatatttatataaattgtatatagtgaaagatagtttattatcatcgaagtggagatggccgagttggtctaaggcgccagattaaggttctggtccgaaagggcgtgggttcaaatcccactctccacaactcaatatcatttcatattttttttcgttttctcccattaaatccggactgattatatctccgttcatcttcatcgtctacaagccgtaatttcccgcgaaagccgaatctcagtaccacttctctccgacgggtttc

SEQ ID NO: 67582 - DNA, 265 bp, Cucumis sativus
  Intron number 1 from transcript Cucsa.273570.1 (locus Cucs a.273570) derived from phytozome v7.0 (chr-ID scaffold0251 1; pos 661290 to 661554)
ttccggtggcagccccgccgctgtgacctccccaggtatccctttctccgatcaagtacaatattttgttttttgttttttgggttttgaattttgtcgtttttgttttgaattactgtacttaaattaatggataactacaacgtcaaactaggaaaataagtaaggactcatttggggaagaaagaaaagaaaaagaatctttacaatgggttataaactaataaatatgaactgtacattgtttaatggatgaatagattca

SEQ ID NO: 67583 - DNA, 859 bp, Cucumis sativus
  Intron number 2 from transcript Cucsa.250410.1 (locus Cucs a.250410) derived from phytozome v7.0 (chr-ID scaffold0221 9; pos 571480 to 572338 reverse strand)
gaagtggtgctttactcgagagtcaccaaggatcggtttgaatccattcattgaacttttttttatatatgcttgagatttgggtattaacatttaactgccattcaaatatctctaccatctggtatgatgttgtctactttagagaaaaacgctcataacattctttttggtttcactcaaaaggcctaatcaaactattagacaattgtctttcacttatatatacggtggattagaccttgttagtcaatgtgagatgttgctagcattccaacattcctctcctcaaacagttatcgtccctcagtgtttagggtattgtccactttggacatgcataagttctggtaactttgttttttgtttcacttaagaagtcaggtaccattcaagatagttgtcaattttagagtagccaatgtgaaacttttatctgttagatgatgttgttgttaaaattacagaaaaagagtatgatagtaaattcttttagctggagagaacgatgagctgcaaaatagagaattctacatactgcttgatgtttgttgctcgtactctaaaagagtgaaatatttaggattagagagtgagaattcacctactttccttgaaccatcctgacttatatataggggtagatgactaacgacgttatctaaaatacgtttcaaagctaaatcagtttaactttgccttgaccgagcatgtccgtttgtgctatcattatggactaaacatatatatttaacttctttccatttgtttttcttctctaatgcattgaattgaatcataagaaaacgttgattgattttcaggccataacgcttcaaactcagttgacgaatttcat

SEQ ID NO: 67584 - DNA, 608 bp, Cucumis sativus
  Intron number 2 from transcript Cucsa.283200.8 (locus Cucs a.283200) derived from phytozome v7.0 (chr-ID scaffold0265 3; pos 410235 to 410842 reverse strand)
gtttctttgttacttcttggtgcctgctttcttatgtgagtgttctgttctcggattatgtatctgtaatccaactcaataacttatttgataagtactgccatgcttattttctggaatactatagtagtgaagtatgcttttacattctaagatatggaagttcatgttttttataaccgagctgcttctatttcttcttagtaaaatggaaaccaaatgcccatctttttgcttttccatcttgttcagaacagaataataactttcactgaattttttcctttctttttggtcttatttttctaccacctatcctcttcatcactttcagcaccatggccttcgacatttatagttttgggttggattctaacactttggataggaagaataaagggagggcattagagactctatttcctagtgcatggtaatattcagtcttggatgatattatacccttcagttattttttccaaaatttgaatgacgtccttttgtttgtcttttgaatgaaagcttttgcatgaactaaccgcggcaatgattttattttgttgtttggatgtgtttgtcagctgggccagtggtgctctagatcctga

SEQ ID NO: 67585 - DNA, 794 bp, Cucumis sativus
  Intron number 1 from transcript Cucsa.249070.1 (locus Cucs a.249070) derived from phytozome v7.0 (chr-ID scaffold0220 8; pos 224623 to 225416)
gggaattgactgggaaaattacaagggtttggttggtgagagattcgtggcttagctacatgggctgtctacttctttttctttcattattttaaaatattatgattcgctttgtaattctgatgttgatgttttatttctttctatctatttatctttcgttttatttctaaattatggagtacaatggcttcttctaatttttggtcggtgtaattttgaaaacgtctatttcaatcaatctactttttaagagtatgtattgttttaaatgaaagttatagtaccaagtgaaggacttgagaatatatattaatttcacactaattaacacaaattccaaattaataattgtgccatttgattttttttagtccaagtttttacgatgtttatatgtactttaatttgacagcaaagccattgatgggtaagcaaggaagaattatattagttcaattgagttgcatattaactatatattttttaaggttaatgtttgattatttggttttatgcttgagattattattataatttaatttatacatgattcatcttacaatttgactattttctcctttattataaaattaagcaaaaaaaaatattaatatcataaggtgcataatttcaccgactacaaatttaagtatcctctcgagtagaggaaaattggaaataattgggtttatatatatatatataaatgttattatgaacgaaataataaagaaatataaatgtttgttgtaatagttgaggcggctggaggaaattagagggtgcggtaa

SEQ ID NO: 67586 - DNA, 970 bp, Cucumis sativus
  Intron number 1 from transcript Cucsa.327860.1 (locus Cucs a.327860) derived from phytozome v7.0 (chr-ID scaffold0315 9; pos 179860 to 180829 reverse strand)
acggtacacacatgcctccaccatcactattgctccttttcttttttttctgctgcattgtttctttcctttgatcaggatatggctaatgatctgttgttttgttttgctttgctttatgatcttgttttctacgttctctgtatatatatatatattttttttgtttcggtggtgctttttatgttgagtttgtggttgaaatggtgattaatattgctaattctctgttgtatgatttcgtttttggaaatgtggatggaaattgttgatgttgttttctaggttcttttaggttttggtatttcttttcgtgttgaattggtagtcgaaatgctgattgatgttggtaatgatctgttgttttggattacgattttgtttttggaaatgtggacgggaacttgtggaggttcttttctagcctctctctctccttcttaaggttttggcattgattttcatgtcgaatttgtggttgaaatgctgatttacactgatgatctgttgttttgcatagattatgattttgcttttggaagtgttgacggaaattattttttcgatttttttaggttttagcattgcttttcatgttgaatttgtagttgaaatgatgatttatttgccaatgatctgttgttttgttttggataatgattctgttttggaatgtgaacgggaaattgttgttgttttctaggttcttgtaggctttggcattgcttttcatgttgagtttgtagttgcaatcttgattcattaggatttcaacttttgtgtgtgccgcttttgcgtttgagaaatgagaagttatcagttactggaccttacagtaacctgcctatgttaggttctcgatattaatttaattccttgttgttttgttgagtcattggaggatgttccatatctgtgtggtgaaggtttttctttacggagtttgattgattagtccaatgatgcagaa

SEQ ID NO: 67587 - DNA, 737 bp, Cucumis sativus
  Intron number 1 from transcript Cucsa.252590.1 (locus Cucs a.252590) derived from phytozome v7.0 (chr-ID scaffold0222 9; pos 1493497 to 1494233 reverse strand)
agtcttcctcttgaggtttgttgcttatgatcttatctgaatttccattcctgttttaaaatttaacctaatgggtgttgttcttgtttggtctgttttacatttcaatggtttccgtttctctgttgaatggattgtttcattgtgattgtccccgattgttgaaatggcacgatgtatgtggaagtgtggacggaaatcaattatcaatttggtgttctttcatttttcttacctactctactggggtctgcgactagtcgcatatgaatgatccattagggctcaaaaaggaagaaagtgaaaacattaaccagtttttttgggttaaatttttattatactattcattctagttaacgatcttcgaaaattatcgacggctgaaagtttggagcaggcctttgttttcaataaacccttgttctctagctagggtaataatcattttgtttaaattgtttgctaaatctacgaacacatgcgcattcggtctttttgcataaatctccatttatcttatacatgtgtgtcgacttcattgcatttcggataaagaaaagcaaaagagaggaaatatcggctatgggaactaggaaggttgcttgattgatacaccaatcttataattatatgcataatttttgtatttcaattgttatagaatttaggggtttttccaaacctccctgttgaatttgaggctaaatgttggtttttcaggagaatatatttga

SEQ ID NO: 67588 - DNA, 633 bp, Cucumis sativus
  Intron number 4 from transcript Cucsa.199930.1 (locus Cucs a.199930) derived from phytozome v7.0 (chr-ID scaffold0136 5; pos 308161 to 308793 reverse strand)
acgttgttgttgccatatttgattcaggtgtgttatggttgatttttgaaattgttaaaattagtttgttgttatgtttaaaaccaccttaatcacttccataccatcttttgccacttggtgtgattgttgaattcgataaatgagttttcttatgttcagggattcaattacaaactattttggttttgtacttgtatactcgattcaatctagacctctcgtaattttataatgttcaatttggttcatgtaattctcaattttggtttcacttaatttatatactttcaaaatgtgtttattttttactgtagctcgtttgtgctcaagtaacagagtgcactcatcttttttactcattcatggttactcttaattatattaagtttatgcctaaactggattaaactattttcgagcaactcactctctaagcacatttaatagtctaatcacagtttgtgatgcagtaaatttttctttcttttgaaatattttttaaattttcttttcgtgaatatagatctcatctaagatacatccaagtattattcataggttaataatgatatagatgaaagtttattatgattaggtgtgtggcccgaatcaaaaagttttgaagagagt

SEQ ID NO: 67589 - DNA, 685 bp, Cucumis sativus
  Intron number 1 from transcript Cucsa.199930.1 (locus Cucs a.199930) derived from phytozome v7.0 (chr-ID scaffold0136 5; pos 309451 to 310135 reverse strand)
ttcactctacattatcatcatccatttcttcacatgtataaaaatactgtcatatttgccatcacatacgtttcgctttgataactattagttttatttggtgaaaatctagattacagactctgtacttctagtatggtttaatttatttgcttagttaatttactgtttagaagtattttaaaaacttatgcaaagttgtgacactaaagtctcttgttttatatcaatttcttatagtgatttgtatacttcttgggttagtaatttgaattattggctaaatttaaaattaaaacaatttttaaccactaaactttttatagttttctaaaataggtttggttttttgaaaaatattagtaatagtagataacaaggtagattgtttaccaaaagagcttaattaaaaagtttttttttagattgtttaccaaaagagcttaattaaaaagtttttttttttaaaaaaattggtttataaagttttaccaataataacctagatggtttctttgaaaagatgaaaactaactcatccggtaaataagttgtaagaaaaaacacaatttgttctcaattcaatatcttccccacccattaccaagcttattaaactacatttatatgtttactctttacttttataggtgtatatagtgtacttagggcacaaccgtttgaa

SEQ ID NO: 67590 - DNA, 595 bp, Cucumis sativus
  Intron number 4 from transcript Cucsa.212960.1 (locus Cucs a.212960) derived from phytozome v7.0 (chr-ID scaffold0154 3; pos 728981 to 729575 reverse strand)
tttggtattcaggagcatattgatcttggaatcaagttagttttcaatactcttatttctttcttaatactagtgtttttttttagctaagggtctttgtcctcgcttatgtcttacttgttcatttggaaacttatggcctacattaaaacaatttgagaacacccattctttatattataggaactcagctgccctgattagaaatctatcatttgccataatctgacgtagcagtgtgacatttgtggtttaagcgtagcaaaatgttttagaaaaacttgtcttagaagttagaatagaagctggacacgtttgaattcacattgtaatttgtttgttgtgacatagaaacatagtttacacatgaatggactacacctatggaattgagactcgaaaagtttaaacatctgattatatttggtcagaagttttccaatcggtaaatgctgttttggctgaaatttataagcaaagtaaaatcctgatgggtctagttctcctggctggtaaaggttacgtatatgcattattgagcttcacggaggctggtgtttgacaagtaattgctttcttttctccatctttaggt

SEQ ID NO: 67591 - DNA, 1017 bp, Cucumis sativus
  Intron number 1 from transcript Cucsa.378570.2 (locus Cucs a.378570) derived from phytozome v7.0 (chr-ID scaffold0381 0; pos 167570 to 168586 reverse strand)
taggttctgctgagagtgtgtcacatcgattttgggtagaaactgttttccatctagcatacgttctgattcgtgcttatggttttattgagttgacttcagtggccatgccaattctcgtcctgttttttttcctggcattgctagtctagacagcaatcagtttgttatctgcccattatttgagcaaattcccgattacccgataaaggattgacatgacatcaatttagtattaatctacaaaactgttaacgaggaattgtaggacatgtcgtagatctctgatgatagtccgtgtttgggtttatatctatactcacgaaggtgtgcttggtgaaggcttatggccaatgaagagtagaaaggggattgttcatctaggatgtcgcaacagatgaagaaaacacgagtttggtttattgttttaacatcacagtcacattgggtccttggcatgtacatcagggacattttcctgggggcaacgatgttgtctaagttagagtactacggtccaaacaaaatatagggttggaaaatggatatgagtttaggatccatgttttgctaactttctctcctatttttgtggttagcatattacagtagatgcgctaaatggacagttctaaccatatgagctttgttatgccaatatttatttgcgagtgaaagttagttatggactatatccattgtagtagttgacaccgtaagtgtaactgtttgtcaataggtcaattagttcttatttcatttaagttggttggattctactgctagccatgaaagattaaaaaagaaccttatatttgaataagcatgccacttcaatatggaaatatagttattgggatatttactatgtcatcaatattgaagatttgacattttttctttgatttattgtaatgccaccgagaatgcatcgagaaacatattcgtaggtctagcaaaacgaagtaccatttttctgaattgatgttatgttgtgtggtcatatgtatcaggtga

SEQ ID NO: 67592 - DNA, 732 bp, Cucumis sativus
  Intron number 1 from transcript Cucsa.356280.1 (locus Cucs a.356280) derived from phytozome v7.0 (chr-ID scaffold0357 7; pos 997376 to 998107)
gaactcggtggcaacggacaccctgctgaaacagggttagccatttctttcatcatattttcatattttcttaatatatatttcctgtgcttttcttaatgcattttgtttttgggatttgatgatctcttagtctttgttatattatggtttcaaatggttctagagatcaatttttagatggtttcatgttatcttagctcactgaatcagaaatctggcctatgttactctgcattaattatgtttttgatgattgaagcttggattcggatgacacgatataatgctacaccattctatttaatatttactatatgaataataaactgactttattacttccgcatcatttttctttaaactcttaaaggaaatttgttttgccaccatagctcaacagtttcctcgaggccaaaaatttaaattctgctcatattgattgtacttcaaacatggaaaagaattatgttcttaaattccatttagaaccatttctatagttagaagtgttggattttcaaacgtagggattagagggacatcatatcagaacattgggaactagatgataaaatacaaaagcgaatcattcttaaatagtttattggtttatgtttacaccttacctctcatctttcctgttaattatttgtcacttgggatgttaaattatttcttttggtgatacacaaaggttgtactacgccagaattggcattggaagtcctc

SEQ ID NO: 67593 - DNA, 677 bp, Cucumis sativus
  Intron number 3 from transcript Cucsa.259790.2 (locus Cucs a.259790) derived from phytozome v7.0 (chr-ID scaffold0222 9; pos 6144410 to 6145086)
ctgctcatacaatcctggagacaggttactgttgggacacattattttttcttctagtgctgttaattttatgcatttattcgtgcatggctctttaagaaacaatccgctaagatttgttaaaacatatgcagtttcatgttcgttcacataacctattaatggctaaagtaaaatcctcagagcttcgggttgagtaatttcatggcagttctttgtcattgtaatctgcagtggccaaacggcttcgcttaagttggatgaggatggggcaagagcggtgtgtgtatgctatttgtgggttttgtggagatttcccttgggtttgaaaacaagatggattgttcccgactctatatgaataataaaaaggaaacaaagtattattttttttttaaacgaaggacccaatagttatgagaagtatatatgcatgccttgttttgaaataatgaagctcctttcccatttttaagtgccatacatatggtttgtttgatttttttttccttaaagaataccatagtcggaagcattttctagctgggaacagtgatttcattcactcgaactttgtagagctttcactttattttgacagttgaattattgtttgtggtttgtatctctttcacatggcagatcagacgaaacttgattttgaggcaaagaaatta

SEQ ID NO: 67594 - DNA, 941 bp, Cucumis sativus
  Intron number 1 from transcript Cucsa.201890.8 (locus Cucs a.201890) derived from phytozome v7.0 (chr-ID scaffold0137 6; pos 113899 to 114839)
gattaaggagctggataggctaactggtctggtgggtaattctgttcggccattaatgctgcttaattatctgtggaatttagcgactattgagcatctgcatttcttattgtacttgtactgagcttaagctgaacttcagctactactttctgaccagcggttcaagtattacattgattgaaagttcttttttcttttttaataataataattaattggtataaatatccttaacggcatcgtagactttaatatgcgtagggaagaagcggtggttgattgttccatggaggtacttgaaatataatacattacgtgtttttttacttcaaggttttccctctcttgaaggaacattaaggcatggagaaattcagtatgggtttgttgattattatattttatataactggcatcttgttacagcttttttggtaattgttaaacaagtacagactgctgttgtttttttaaaattcaaggacaagacaacctatggaatagatattgttcaagtaactaagttcatagaggctgttcttttcttttttttcctatcttttgtttgttttttctttagaaaggtatgagtggatacctggatcctaatactgaagtatttaaatcaaccaaaatttggttatttatatttaattatcactgtgagatgggataggatgatttaaattgcatatatgcatgttatttgcaattaccaaagagtttatggcttaaccaaaaattggagttgtggttatcagttcttggctttgaattttttatttttacaccccatcttttagctgcaggtaccgttgcattgcaatttgtgttgatttccgatccacttaattactttggtcctctctggattatttgaattgatccattgtacctgtgcagggacaatctgccatttcagtggacgatacattaaa

SEQ ID NO: 67595 - DNA, 793 bp, Cucumis sativus
  Intron number 3 from transcript Cucsa.308430.2 (locus Cucs a.308430) derived from phytozome v7.0 (chr-ID scaffold0297 8; pos 562234 to 563026)
ggcgcggttggtcttggtcatctcttgcaaggaaggttagtggttggtcatactgtttgacgtttaagattcaaactgattttgttgtcttctttaggagttcaggatttgtattgtcccaatgcaaacctgttttataccaatcaatgatgtttaccgctaaaatcattgattctcagaaaatagactccttgtaatctattattattacaaggacatgcgaaagggtctgacttaccttggaagtgttcattgagtccatgggatcgatatttgagaagtgaggctaaaatgcctccgaaaatggaaatttagtgtagtccttcaaactttatatattctccacgatttagcctacacatttctacgagaatactagttagggccttggggatatatgggtaagattagtatgataagtaagagctattgtgggtagttaactagtggtgtatcttagaggttgtgattcattttggtgagcgttttcatatgtaacttgttcttcgtatttcttttagttttattgttaggtcgtattacatctattacatcaacatcttcgtttcagccatctgcacagtagtactataaaagtacgagtcagagaaattttcggtaaaatagttaaattatcaagaccatattagttagttgtaatgcttccttccatagttccacttccatgtttgctttttatgttggcttatattcttccatatgatattttttttaaaaaaacactttgttgaatccgtattgtagttcagtaaagatattgcaaaggtaaaag

SEQ ID NO: 67596 - DNA, 456 bp, Cucumis sativus
  Intron number 1 from transcript Cucsa.212900.1 (locus Cucs a.212900) derived from phytozome v7.0 (chr-ID scaffold0154 3; pos 701126 to 701581)
accgtcctggcctcgtcgccacttcaggcgaggtagattaaggctctacttatggcctatttcaaaataagtatcggtagcttcacctcccaattttttttataaccttttctttgtgttggcgtttaagcggagtttttgaagttttcacaagcttccctgggtctgtaattacatctcaatataacttctgtctgtacagtttccgtgcttgatttgagcttcaaattttaccagggaaggctgttaaacctgaaaaattggtgttctacaattgacgttagaaacaatcgaggacatagatttgttgtatgattttggcttttatatgactgtgattatgttagttataactgcttggactacataagataattgtacttagctcttctttaatgacgtcaatacttcataatttactctccccttctacattttctggagtgtgtgtgtagg

SEQ ID NO: 67597 - DNA, 892 bp, Cucumis sativus
  Intron number 1 from transcript Cucsa.274400.1 (locus Cucs a.274400) derived from phytozome v7.0 (chr-ID scaffold0253 2; pos 101972 to 102863 reverse strand)
agcatccctttcccaaattgctacttgttaaactggtattctcattttctactccatttttgttacgggtattctctcaatctccatctatgtcttccttctcacttgaaaaacaccaattgtcacttgtctaatgaacaaatggaggagttctttgattatatatatatatatatatatatacacatatattataacaatagctaaatagcaaccataaaatacattctttacggcaaatttatttttaatcagtcatccaattctcttgtaattcctacctttattgattgattgacccaacttcttcaactttgtttctatttgtatattcgtctattataattgggacttgggaggatacgattttttttctcttttaaaatggaaattctctccctcaattaatcaatacagtaactaattatactttaaatttatggaaataagagcatgaatccattaatctttctgattggaacgcgaatcaattgctgcgggcgggaagttcaaaccgtgtggccagacataattttcaattattaattaggagtagacgttcaatccattggtaatgaagctatcacctgttttctatgatgcggattatttttcttccgtattgttccttttgtatacattcttcacaacttcatttcgttcaactcctgttctactgtctgcatgagctcaagcaattccgatactcacatatgtgcgtacatatgtttctagatatatgtattattctggtgaattgttttttgttcctgatatttcaacttgcacgtttaaatccattttattttaaaaggatcaaatgtctaaattgtcggtagggttgctttactgaaatgggtttgtgtgcttatctctatttctttttgtaggc

SEQ ID NO: 67598 - DNA, 324 bp, Cucumis sativus
  Intron number 3 from transcript Cucsa.202390.2 (locus Cucs a.202390) derived from phytozome v7.0 (chr-ID scaffold0137 6; pos 411201 to 411524 reverse strand)
atctgccgcaagtgagttattttttgttcttggtattttctcattctaggactgctgatatatcttatcttacatgaactgatacaactaagatttcaacctgactggtctgttcagttttttaatttccttttttctgttttctggtttgaactttggtttggtttgatttgaataactgaacgaataatttcatttcagttgggaaaattttaatagtaaactgaaaatccaatgtgtttaagttttttcttattatcagtttgattttgttgtaacatgaagattttcacgccggacagaaattggccaagccgtatcaga

SEQ ID NO: 67599 - DNA, 567 bp, Cucumis sativus; identical to SEQ ID NO: 63772
  Intron number 2 from transcript Cucsa.202390.2 (locus Cucs a.202390) derived from phytozome v7.0 (chr-ID scaffold0137 6; pos 411582 to 412148 reverse strand)

SEQ ID NO: 67600 - DNA, 736 bp, Cucumis sativus
  Intron number 1 from transcript Cucsa.363670.1 (locus Cucs a.363670) derived from phytozome v7.0 (chr-ID scaffold0361 1; pos 1267878 to 1268613 reverse strand)
ttcgctctgaccgcgaactccgcggcaaactccatgtacatcctcccaaattacttctctctttatccctttatcatctttctttcttttctctaattattatgtctctctctatctctctgtcctctttaattgacaaccccccaattgttattgttttttctttcgatcaaattaatgtcttggagaattagggttttgtaattgtttgactttcttgacggggttcccttgaaatttcattttgttgaaaaaggcgatactttagcttcttccagtaagtaattaacctttcttctattcagtttttgcgtttgggatgggggcaggggctgctttcgaacttctctatttttgggggaatggaagtgccctaatggtgaaaggcgtcgaagctagagcagacgcgtttctcgtaaatcttaccattggagaataagtaggaagatgactattttagcatggtcattatctacatagatgttctccgttgtgaatgtgtttaacagaggctccaaatattacaaatatttaacgaaaatggtcaattgttttagattaagatgttgattatgattagtagctgatcactctgttgcatttcttttagttttgagatgctattgtgaatacaaaatgtttagcttttcatttttttatatcattgattgccgagattttcctttcctggagttttaactgcattctgttgctggctatcatgttttgcaggctt

SEQ ID NO: 67601 - DNA, 293 bp, Cucumis sativus
  Intron number 1 from transcript Cucsa.337410.1 (locus Cucs a.337410) derived from phytozome v7.0 (chr-ID scaffold0335 6; pos 497815 to 498107 reverse strand)
gattttcgtggtgaaattaaacgctggaattccgggtacgttttaatttcttcacatctttaaagggatttcgggttctgctctgttcttctttaggacaaataatcgtgggtactttttcttaatcgaaaatttgatcataatcttgttagttttttatttggggatgtgattttatcgatctagactgaaggggttttggcgtttcgttgccttgtttgacttttgatgtagtgaccggaaattttcaatttgtaggctgggaaatttggctttgaagtggtgcatatttg

SEQ ID NO: 67602 - DNA, 286 bp, Cucumis sativus
  Intron number 1 from transcript Cucsa.302030.1 (locus Cucs a.302030) derived from phytozome v7.0 (chr-ID scaffold0295 1; pos 255263 to 255548 reverse strand)
taggattcgtgttgtccctaatttccctcaaccaggttggcttctcttcactgttttcggactctatcaatttactgcatgtctccgtcaaattcaaattacatgtgtttttttcttgtcaaatggtttctggggttcgttccttttaagggaagaagatgcttttttttcttttcacttttttgaggtcttaagtttataatgagagaacccattttatgttttggtttgttttttttttttttttttttttttttacttgttgatgggtttaatggcaggtatc

SEQ ID NO: 67603 - DNA, 941 bp, Cucumis sativus
  Intron number 2 from transcript Cucsa.308140.1 (locus Cucs a.308140) derived from phytozome v7.0 (chr-ID scaffold0297 8; pos 348620 to 349560 reverse strand)
tcagagaaggatctgactggttggtaacgaatctcctcgctttttctgtttcattagcaatgtctcattttcttgtaggttataggctaatatctactttaacccttatattattgttaattttgtattttgaagttaattcagtgtcaatggccaatctgatctgatcctagctcaatgtacaaggcaccaattaacatcctaaatgttgattgttcgatttttggacctctgtcattgttgaactaaaataaaagaaatttattttaatgtaaatgtaaaacttgatgctagaattgtatataatatagaagccaccaatggctcataatcaagtcaatggcttatgttgaccataattatactaagcagacggtggaaagatgattagttctgttaattggcttatatgtccggggttgaatacaattaattccttagctgtttagaaaatgcatcccagtctctggcatttcagatgaatactaagatatttggttcttctagagtatacaattctttgaatctactaggattgtaggaagctgaaaccatgttgatgcatgtcaatctgcctctgttaacctggaaatacttttgagttaagctagacagaaaaaatgaagaaattagtgttcgaccaaccacacttgcactcaatagttgagtttaattcggcatatcacttaaaaatgctcatttgttacacagcctatcccaataaagcagatccatgtacataactgaacagctgaaacttgacagaagcagctatatcagcttaactacttactgtgtttgagtttatatttgttctccagtcacatctatatggttttctagatctttagctctagtataatgagcaccctgtttcctgcatctatgttcttcattaatttattccttttcctcaggctttgggtacatttttcatattt

SEQ ID NO: 67604 - DNA, 823 bp, Cucumis sativus
  Intron number 1 from transcript Cucsa.285350.1 (locus Cucs a.285350) derived from phytozome v7.0 (chr-ID scaffold0265 3; pos 1765876 to 1766698 reverse strand)
cagtgcgttcttgtcatatcaattagttaatcaatgtttgaatttaatttttggttaatgtgtcatcatgcacgaatcaatgcttaacataacagttccgtttgcataagatggtgatcataacacaccatatagagtgtatgcactgtgatttttattgaaagaagatacaaatgacattctatgctagtcgactcgaaactttagcatccgtttcaagtcaagacgtctagtttatctgtctgcatttactttctttatcatcacttcttttttatcacgacgaatcattgtattggatatccacataagtccgatcaaatgttttttaaagctgagtgtgaagtttcaaagttgaaattttagttctctaaactgaatgcgacacttcatgaactaaaatatcaactccctggccttttgtttgaatttgaagtttctcggatagagctagcttgggaattttattgcataaaatcttgccgttcctatcttaagtctatagtttaaaaaaattttaaacattattttagtgttttaagtttgtaagattgtttacagtcataatactagcatcattactcagtaaagctttcgtttgatgtgaaatttttacattcgaagatacacctgaaattctttcctgtatggttagaggttatgactcctgagtagtagaatgcttaacatggctatattgttttatgtgatgatacatgctcctttttcactttgatacatgctcctttttcacttactgtttcacgaaggaaatctaatacttaatactcttttctagaggggcttccttctgattggaaaa

SEQ ID NO: 67605 - DNA, 945 bp, Cucumis sativus
  Intron number 2 from transcript Cucsa.365520.1 (locus Cucs a.365520) derived from phytozome v7.0 (chr-ID scaffold0361 1; pos 3348829 to 3349773 reverse strand)
aagaaggtctttggtcagactgttagggatatgtgagtgttattcacactttaatcctcaaaaatgatttcatctctgcagatcgtgttattgcacccaagaaagaaaagaaaagaaaagaaaagaaaattcctagtacttgatatagagcctgctggtttttggtttatgattgagggatgtaatttccatttcaaatatttctgaaatcaaaatggatattttgttcaacagcctaagttcattttaatgatccagatagtgaaagacaagtttaaactagagtaatttaattagtttaaattagaaaataagttctacagttataagtttataaactttttcctacagaacattaatgtaacttcattttatcgtacattttaatgggtcaataagcatttccatcttccactattttcttcttttagtagacgtatataaatctttaacgttcaaataagaaaatatcgtataattagatcaggatataaagtgtacaatgcaggccttaatttttcttttgctagtatgatttataaacctttcgtcgtttggtttggaacatcttttttggggtgtttgactgctagttagctgagcgtagagtctttattgttatgatataggagttcttctatcctctgagtgaagggagagggggttatttatggatagttggggtgtgtgttgtgtggtgggacattttggtggaggatttttcaaggggttgacagggtccctgctttgatccaagaaccaaagccatatcttaacaaaatttccagttgttcttttgttaataatttcagggtccctgctttgatctcaaccttttccccttctttgtcaacttgcttcctctgcatattattcacttaaatgacatttgtaattcattttcttgcagaaagagagaagttaataagacggtgcttaaagttc

SEQ ID NO: 67606 - DNA, 486 bp, Cucumis sativus
  Intron number 1 from transcript Cucsa.357440.1 (locus Cucs a.357440) derived from phytozome v7.0 (chr-ID scaffold0357 8; pos 481863 to 482348 reverse strand)
agaccttcacctttggagattcaactgaagatcaggtattattaatttccacttgaaaatatatttcagaaatttcgaaatttctgaattgtataaaatatatatataagttgaatattgcatattttaaaaaggtaaaaattaggatttgatatatagtatatatatgtgtgtattattaatttactaactcatgtcttgatatacaagtgattatcaatatgcatgctccatccttacaaataaccaaatactaaactaattaattaattacaacttttaagtttgataattaattctgtttgatgaagattttgtttttgattttctatttggaaactatattatgcactacttgaattgtttagtcaaattctaaaaacaattttagtttgtgaataataataaaaagactaaaatctaaatattaaattctttgaatacattttgttaaatccagatatcgatccctggactcgggtttgg

SEQ ID NO: 67607 - DNA, 803 bp, Cucumis sativus
  Intron number 1 from transcript Cucsa.236910.1 (locus Cucs a.236910) derived from phytozome v7.0 (chr-ID scaffold0202 3; pos 24577 to 25379)
aaataggtatgtgctttcttttctttctttaagctattcaaaatttatttggtttataagaaaattacatttagaagtgatttttatgcactataccctttacacacaaatttaactcaaaatgatgaactcgtattaattcccattttttttttattaattgaatgacctttcaagcttgatgaactctcacatactatattaaataaatattagggttaatttttaaaaataataagcaatatgattgtatacaaagattatgagagcatatatattcaacaagtctaaaaaattgttgtatactgttaaaaattcctttttcattggctaattatggaaagattaaagtaattagatagttttaactatactttcaaataaaaaaaaaattagcttagcatttaaacattgttgttattattatttaaaatctaacataattgtattgtccaaaattataaaaaatgtgtattagaaacatcaagggtctatagctcagtggtagagcatttgactgcagatcaagaggtcaccggttcgaacccggttgggcccttaaatttaagatatttttttttaaatttttattgagaaattcaaaggaataaaatgcaataacccaatgggaaaagcttaatttcacttaatcacagtatttaacaacaattttcaaccaaaataattgattaattaagttgtaaagttcatgtagaatgaaatttagatgataattgggttttggttgaataatttttgttggtgtagcggagttgctggggcttcctttaattcctccaagc

SEQ ID NO: 67608 - DNA, 968 bp, Cucumis sativus
  Intron number 1 from transcript Cucsa.313800.1 (locus Cucs a.313800) derived from phytozome v7.0 (chr-ID scaffold0299 5; pos 2985585 to 2986552 reverse strand)
ggtaaattctttttcttccattctcgaccttcttttgtctctaccagtttttttcattagctttctctttcccaatgatggattaagtataacctgctgagaagagttattttctgctttcatttcatttcatttagatttctcatgaaaaattttctgttctgctctttcaaaagggatgtccgttggaacgttcttctttatctaataggaagatgagcgagattatgtattttgaatgggttaaactcacttttgtccggtttaaattcactttcaagcactacttaatcattcaaaatcaattttttatttgatttcattattattaataccactggttagctgtgagtggaactaagtaaaggtatccatttgatgctgtgttttaattcaaactcaatggtaacttatgatactgattgacactgtttttgttgaatttaggcatcttggtgctcgtgttttgatcttttgtcagatttagctgttttttgttgttgggtttaggctttgcgtatatggttttttatgttttgttggttggattttgagtggtttggcttagggcttgtttgatgatgctttttatcttgatttttctgtattagctatcaaatggccttattgattggtttttgaacaattttcactttccactttgtgcgttttcagtttcttgattgaaattgttgttattctcgatttaacctgaccagcaagggatttctaggtaaagatgatactcttggtgacacttttaaattggtctgcatgatatgtataagatttttcaatctttattttttatttgatttcattattattattttttcccttatcgtgttgaatatgtgcaaattgtggtatctgcttggtcctcgattgatgaacatgtctgctggccagtgctactagtatatgaacatatgaaatttacattcatttttccaggtgcaattcctggc

SEQ ID NO: 67609 - DNA, 814 bp, Cucumis sativus
  Intron number 1 from transcript Cucsa.341230.1 (locus Cucs a.341230) derived from phytozome v7.0 (chr-ID scaffold0335 6; pos 3614109 to 3614922)
gaaaccactgaaaaatacatcaagattattaaatagtacgtaattaataatttgatgctcggtcggttcattatcatcatctccttgttttaaaagattcgtcctcaaatccaaatcaaaatcttgtaaaacagtcttgaagtcatgagaagaaagcaacattgtagccataaaatgtcgaagcttcgtcgtgtcttgaatacgacgagttgttttgtgagtaaactcaaatatgagtggctcccagtctataatttcatcttcacctactcttcaaattattctcctctcaatttcttcttcattttcataactttgcaggatactgttaaattcttctttcactagagtttctgtctcctagttctctttttctaattttgattgaaaattgttcatctctttactcccaatctctcttccgtcttcatcgccacaaatctatctatatatctatctaattatttatctcctacgcttagaaaaattgcaactcattctttgagtgattgatgctgccttggtttgcatgtctgttccctaaggagcttgcttcctacaatcccacgttagtgagagtgatttatcctaattttgtatggaaactgaacaataaaacttaatatataataagtttatttagtgagagtgatttatcctaattttctatggaaacttaacaataaaactgaaggacacctctatagtacgtggcgaactctaataggcggggtgagccgagaagaaaaacatagccgtaagattagcaaacctcgaagtcgatcgagggaagggcacagagagtcctccgttc

SEQ ID NO: 67610 - DNA, 812 bp, Cucumis sativus
  Intron number 1 from transcript Cucsa.359780.1 (locus Cucs a.359780) derived from phytozome v7.0 (chr-ID scaffold0358 8; pos 597207 to 598018)
tcaagaccttacttagttccgctattactaatcaggtaaccctttcattttttatcttctataatcaccttttttctttctaactatgttagtttgtaatttaggatattttgaaaagtagtacaataaactaaaatatttacaacatatgacaaaattttgaattctatcattgatagacgtatattattgatagaagtgtacgagcgtctaccaatatctattattgatataatttaaaattttactatattatgtaaatatttcgtcaaatttgtcaaaattgacggttattctatttttaaaagttaatcattttttaaaatgaactttaatctaacaaatgagaattatatatgaaaatttgaatctaattccttaaacataagtatacatgaattattatttcccatcgtagcaattatttacttctgtatttggccaactttctcattttagtatttcaatgctttaaaaacacctatgtttgtttggccatattatatgtttcaattttgagaggatggcatctatttattaaatgaaaatactatagattaaaagattaaatcatatatgtttaattgtttcacagtaataacttaactattattacatgtaaattaaaatatttgatccgtttaatttcttccctaatacatttaccattacaaaacaacaattaacttttgaaaaattgacacgaaatgcaaaattcgaaccatgattaaaagctaaatctaaagtcataatcacatagatggattatggtaaatttaatttttctattcatctataggaaacgtgtctgg

SEQ ID NO: 67611 - DNA, 571 bp, Cucumis sativus
  Intron number 1 from transcript Cucsa.273130.1 (locus Cucs a.273130) derived from phytozome v7.0 (chr-ID scaffold0251 1; pos 125676 to 126246 reverse strand)
gttaacgtggagggcgacctaaagtttgttgccttttttcgcttttctgtttctgggatttctcaattaattgatcctgatttgcttgtatgtgggtctgttttttattgcacttgttgttttagttttgtttcagctgactagaaagcttgaggcaaaacagaacttggattctctcttttttctttttccttttttttttttgcgtggttttgttcaaattgtatttttgaatcctttgtgatttaatttggaatctttgactgattctgttcccttagatatgattgggtgggtaaatgtttggttttagtgttgtatggaagattgatgaatttaaagtgtacagttatcactcagtttctggtctttttgggcatatttattaatgtttggatcctattgaaatggatatcataagaatttgggtgactgggacttgtaacaagtaaatgggtaaatgaatccaggaattatacaaacttgaattgtagtgtatgcgatctaatttggctccttttttttctctgtgatgtggaaagcagagaattattagtttattacattgaag

SEQ ID NO: 67612 - DNA, 639 bp, Cucumis sativus
  Intron number 1 from transcript Cucsa.310930.2 (locus Cucs a.310930) derived from phytozome v7.0 (chr-ID scaffold0299 5; pos 637368 to 638006 reverse strand)
aaaccaatcgcttaggttttctattgccgcagtaggttgatgtcgtttgttactgatatgaaatcgttttgttttttttcttttcccgttgctagttttgtgtttctttctgcttgcttgttggttttggcttctggagtatcgttgcccaatttcatcgattcggggtgtttgtcttctttgttgaatattttggtgtgaatatgtgatatgttgtgttttgggggtatgcatatacagaatttcgatcagtacgttttttttttttttaaaaatgaagttcagctcaaatgattgttctaaagcattatacgtggaagtatggaacatatcatctttctggatttccattaaatgcaaatgttccttttcttttcttcttgtaattttgtcgtaggtacccattgataattttgtttattgatttctcgtgagactcttggtggtggttaagcagcattgttctaaggttcactagatttcatcttgttgaagatacatataaggccaaacatattccgtgggataataattttattcacaattgaccttgctttagtatagtgttttggacgtgtctctttgaaaatacatcttatatcatttatctaattatattgtgaataaatcaggttgcta

SEQ ID NO: 67613 - DNA, 441 bp, Cucumis sativus
  Intron number 3 from transcript Cucsa.228220.1 (locus Cucs a.228220) derived from phytozome v7.0 (chr-ID scaffold0193 3; pos 183674 to 184114 reverse strand)
aggttatagtccgaaacgaaacatcttgtggagatgtgctatccggtcccttttgtggtgcatttggaaagagaggaatagtagaattttttaagacaactataattcttttgattctttttggacggttgcaatacacagcttcttggtggagtacgaattacaccaaacacttttgtaattatagcctttctatgatttccaacaattggaaggccattattctttagtttctgttgggagggtcctcttgtcccttgcccttaggtttttctctttttgttctatgaatatacatgtttcttatccaaaaaaaaagcaaaagcaaagagaaaaaagtaaaactgttaatgttgttacttaatgtttgcgaaaaaagtaaaactgttaatgttgttacttaatgtttgcaggtcaggggtggacaactgtggggaacag

SEQ ID NO: 67614 - DNA, 370 bp, Cucumis sativus
  Intron number 1 from transcript Cucsa.336860.1 (locus Cucs a.336860) derived from phytozome v7.0 (chr-ID scaffold0335 6; pos 38738 to 39107)
tattggcgttttctaattccgaccctctgcttcgggtactcttcctttgttcctatactcttccatttttccaattatgaaattaatgctgtaagctggtcaactcatactggtatttgtcatgatttggtatgtggggtagcgaaaatattcggggattggttttgttgttgtgttttgtttgttgggttttgatttttatggcttgtgtaaggtttgtttcatggtagaatttagattttgatgttgatgcttatagctgaactttgaagttcttggtattggactttggaaataggggtttaactttaatccatgttgctggctgttcttttcttttaggttcttgggaacttgattcagggtggaa

SEQ ID NO: 67615 - DNA, 858 bp, Cucumis sativus
  Intron number 1 from transcript Cucsa.212210.2 (locus Cucs a.212210) derived from phytozome v7.0 (chr-ID scaffold0154 3; pos 8483 to 9340)
gagccttctcttattactccaggacaggtattgcattcattttattcttttttttttcttcttctttatttcttcgatgtggattttttgggagttgtgtaattctttcgttttctggtgtgtgtatatgtatggaattcttgtttagtgaagttcactgccagagccagtttaagttcatttgcttgattgaaattggaatttcgcatttccctgcactgtcggtaacgtgttttggtttagttggcaattaataatttccaccgacaaagtctcttctcgcccttttttgttttttttttgctccttattcacatttcaagatttagatcatggactgtcccacgaatacagagctattgtattgttcactggaaattaacacttcttcttcatggaagcttgtcttgatacatttttattttctttatgcaacctatccatgaatttttttttaagtttttgtccttgttttattcactttcaattcatcctatattttttaaagtttatctaggctttgtaggagtgttagattatgagtgttgatgttcatgtgttataatttttttagatatttgatcatccactgtactccgaggcttaagtatgagaacaatactgggaggggacagactggaattactttaaaaagttatctcagtttttaaattagttaatattgatttgattgttactaatttgacattaaatgatatcgtttggtgttatttcctatctctttttatttgttgcctcaagtactttacttttgtagcatgctatgcctgaaataactgacaaggatgttttcatgtctcagatttcgtttcttcttggaatatctccgatctttgt

SEQ ID NO: 67616 - DNA, 512 bp, Cucumis sativus
  Intron number 2 from transcript Cucsa.212210.2 (locus Cucs a.212210) derived from phytozome v7.0 (chr-ID scaffold0154 3; pos 9363 to 9874)
cttgaatataggaaatcttcagctcctcctaaagcgtgagaaattctctgcaatttttgttttttagatttacgttgtagtgctctctgttcttataagtagttggaaggattctccttgaaagttgagtgattgtgtgaatgtgataattttcatcatttatcttctataaataatttatgtaaaatttaatcaatgaaatgttttttattcccaaaaacagtttatgtaaaattcctttgattactatgcataataagagttaaaatatctcgtttaagaaaataggcatttaacaaggaggaggaaggaaaagaaatgctatttctaattcaatttgtatttgacttgtttgttttatctgtcttttttacttgtcccagtcaaagagaacccatgcatttttttcctttctttttaaaatgatatatatacagctctttttgcttaatctgattgaagtttcctgcattgcagtcattcagacattaatctggctgacttgggaggcg

SEQ ID NO: 67617 - DNA, 909 bp, Cucumis sativus
  Intron number 1 from transcript Cucsa.239430.1 (locus Cucs a.239430) derived from phytozome v7.0 (chr-ID scaffold0204 6; pos 254162 to 255070)
tcatcttcttctaattccacttcttcttcccacatgtcatccttctcttctcttcgataatttcaaaaccctttcttgtttcctgatctactgatcatgttcttcttcatacttttttgccttcaattctggttatggctgtgtacgttaaacacttttttctttaattatataatactttttttttaattttctcggaagtgaacgattttcctaacaaaataggaagatgtgaattcggaaatgaaatatctattgctacgttgatatatccgtataattacttgatatataattgatacgatttgttagaaaacgttataaaattatcatctattaatctcatatgagtatgaatatggatgatgaatgttaatatcaaaacttataacttagtttgattataaaaataaattaactattaatttaaatagttattatgaacttatcaacacaaaaatatttgttgggtactgatgttgaaagtgacactatatatcaatattttaaaatcttgtccatgcatgaaaaatacatacaaatattactcctttttatttgaaaagagatgtatacgtcacgtatacgttggctattttttgtatttattaatttaatcttgctcatcttaatattatttaatttaaacataactcaattaatggatgaaaaagtttagaattacaaaatttgaatacctactcaaccttttttttcttttggttaaaactacaaaattaatggacaatggttggtttcttccaccttcctttcaaggggaagtttagtaagttttgaataataaattcctatgattaaattgaaaatataaaattggatttggaagtaaaaaaaaaaatgcaataatgactagttatgtagtgttttattgaatttaattttccatcg

SEQ ID NO: 67618 - DNA, 312 bp, Cucumis sativus
  Intron number 1 from transcript Cucsa.237570.1 (locus Cucs a.237570) derived from phytozome v7.0 (chr-ID scaffold0202 3; pos 401835 to 402146)
gtgatcaggtatatatatatatataaatattatcttcgttttcatttttcactcatgtaatcccggattcttacttttaacctttctgttcttagtttcatcctaatggtttcttaagtttttgtttgactcttcgtgtctaattgttttcttgctacgttcttgacttcaagtaaaactaaggttatagttataattaataatcacgactttcacttataatttttggcatgaggaattaacaaagtcattaattcgggttgagttttttgaacaggtaaaaattagttccttaagtggaaaaattgtggg

SEQ ID NO: 67619 - DNA, 630 bp, Cucumis sativus
  Intron number 1 from transcript Cucsa.378860.1 (locus Cucs a.378860) derived from phytozome v7.0 (chr-ID scaffold0381 0; pos 359732 to 360361 reverse strand)
cctccagagctccgaggccaacgtaactctgttaggttatccctgccttttactttatatttgatttcctctatctgattcgttctttcattttttattttcgagatgtaatcctgattgttggttttggttgatattttgttaattcatgaaacagtgtctacctcttttgtatctgaaattgatcgtgttctatgaattctgcattccttttcttgttacaaagattatcatcacaaatacgcttactgaagattgttatcccctttatgtgatttcattgtcactcacttccttccaatccttgaaacttagaggtattgaactatcgaccaaatatgcagcaacttattaccaatacttctatctctgttggaaaaaacaaacaaacaaacaaacctttagtttatgtgaacggcaaaactggtcatattcatattatgcatgagcctatctgctatcattatggttcttgttcaatttctgaaacattttattgaaattaagtctatcttattcttcactatgatgaacattttatcttgcactatattgaagagctttgcttttcagctattgttgggttgattcgttaggatattttggacaggtcagaaactgatctgataa

SEQ ID NO: 67620 - DNA, 713 bp, Cucumis sativus
  Intron number 2 from transcript Cucsa.255500.1 (locus Cucs a.255500) derived from phytozome v7.0 (chr-ID scaffold0222 9; pos 3474270 to 3474982 reverse strand)
ttatcgaccagaacagagtatgtttctttttcttgctatttgtggttttcatcgacgattgcttttaattcctacacattaggaagttccgggatgtttcactcttgttatagattcatttctcctgaatttgaagtttacattaggatcttaaaatatgcttctcaatttcctgttatttatcattatgtaaatcactcctcagcttcttcaaccgcgtctacttgtagtggtaattgttgatgtaaactataacatcgattatttaacttccgattcgttgagtaggtcgttctcgttgtttggatattattgatcgttagagtggttgcctgtgcaaactatgatattctccgacgtcctccaccagcttaaaaaatggatttttagttaatttttactgtttcttctacttcccatgaattacaaattcagattcatgtcacacaatctttgtgaaactttgaagcttgcagtctgatgggaacttttttttttctttcaactgaattttattctgcaatatcagtgtttattggttgagaaagagtatctggatgaaattatcatttgtgtccacagttttgtttttagttttgtatgtttcgttatcatttcctggtgtatgtgtatcggttttattttctattagattttatttgttgttcattctatgcatatttttctatgctaccacatacaggctttggtgg

SEQ ID NO: 67621 - DNA, 772 bp, Cucumis sativus
  Intron number 1 from transcript Cucsa.256420.1 (locus Cucs a.256420) derived from phytozome v7.0 (chr-ID scaffold0222 9; pos 4049261 to 4050032)
cctggttcttacgttcaaagggtacgttcattttaatgtgtatttcttttttttaattgattatgatgtgagaatattgcaacaattataattcatttgttattagttttgagagagaaattaacaaacaaaatataattgatatataactcatccgagtggtacataattaaacttggtttgtgaactttttattttttaaaattatgtttgtatatagattatttttacctacgaatttcttttatttaggatgttttcaaaattcaaaacccaaataaaagtttgattataaagaacttgttttggatgtattgatttttagaaaataaatcaaatatgtaagatagaaaatcattggtgaatagacaaatataatttttcttagagaaaaatctatttcaagtaatgagaaagatgaaattgatttgattacaagagttccttcattttgtttttgtttttgtttttgaaaattagttaaattgatactaaaattcttagtttatatatatgttttatcaatatttttttataaaaaatcaagtcctattttgaaaactaaaatattatctttatttcttcgtatatggcacgtcaagataaattgttgtaaaaagttgacaggaaatcaatttaattaaaccaacccatacttcaaaaataaaaactatattttcatattgatgagaaattaactacaaacacatttagttaagtaaattaacatattgtagggagatcaagcttccataatcggtggagcaatcga

SEQ ID NO: 67622 - DNA, 626 bp, Cucumis sativus
  Intron number 1 from transcript Cucsa.283120.1 (locus Cucs a.283120) derived from phytozome v7.0 (chr-ID scaffold0265 3; pos 346748 to 347373)
cttgcaatcttgtttcctctcgccttcagattcaggtatgtgtttgtttccaatcccctaatcagcccatttgatcattatacctagcgattttatattctttttcctttccttggttggtagatctgagttccatggttggctgatttgtgtggtggttttttttttaacgataccactttctgtttaggtttctgggtttcttttgtttggtgggtttacgagaattttgctttttgtgatttcatatttgtcacaacagaagttttcctttcttgtcagaataagatgagattatattacgatgaggcttaggtatcagtttgatcttgtttcaactttgtacatcaatgatcggagtggctaggatgtggtttaaatttaattgttgggcagattagttcaagattcattgtaatggaccaagttttaacatggggatgtgcagctttgcataacagtttttccaccatcttcgggcgtttggaacaaagattatttaatactataataaccaactccttaactcaaacacctcaaaaaactaatgttcatcgtagctaataatctgtgcatgtatttgttttgtagtgagaaggcctgaaggctgagaggagctgaattac

SEQ ID NO: 67623 - DNA, 559 bp, Cucumis sativus
  Intron number 2 from transcript Cucsa.283120.1 (locus Cucs a.283120) derived from phytozome v7.0 (chr-ID scaffold0265 3; pos 347374 to 347932)
tgtctagaaagctgaaattatttcctgcagataaggtaagaaaatgaactacttttggattaatttttcttctagtgaattactgggtgggctcgtcacttttagtttgtgtgcgtctttaatcacatttgggtctatggttcgtctattttggggaagcttttatagcttgcgggattttgcgagaacttatgagttttgtaaggtgaatggaattctagggtgcttaggggagtggaaagggatcctaggggagattaagtccggcatttgttttcatgtttctcattggactttgatttagaagacctcatgtaactattctatagggactattttgtatgtccttgtattctttaatggaagttgttttcattgtaaaagtccattagaaaagaaagattagctttgatcatcacgacctccatctacgtcaatagttttctgtcctgcttgttatgtgttgtgttgaattgggagagtagcatccgatatgatcttttctttttgtgagtgtattttgatggaagaattaacagtgttttttctcttttgtgag

SEQ ID NO: 67624 - DNA, 451 bp, Cucumis sativus
  Intron number 1 from transcript Cucsa.341890.1 (locus Cucs a.341890) derived from phytozome v7.0 (chr-ID scaffold0335 6; pos 4325495 to 4325945)
ggaatccatctacatctgaggtatgtttgagaatttctctgttttttatactctatatttcatctttttatttaccttaaattcttatatgggtggaaatcttcagtgcttgatttctttgattcttttggtttttgagcaaatttaagagctgggttttgtttaatttccatagatatatgagatgttggttattcatcttccttctctctttttatcaaacctcatctccatcactttttcctttctctcaccttttttcattctgatatacaaagaagaaggaaaactaaaacttgattttgttaaacaatattaattaatggcaaaacaaaagcaagaaaacgacagttgtacttgattgacttcacagcaccgataaatgattactcaccaactaaaattatctttttttaaagaaaagtagggtcgttcattcaaggctatcagt

SEQ ID NO: 67625 - DNA, 178 bp, Cucumis sativus
  Intron number 1 from transcript Cucsa.213290.1 (locus Cucs a.213290) derived from phytozome v7.0 (chr-ID scaffold0154 3; pos 1028469 to 1028646)
taaccttccaaggtccaccttattctcttagtctacttttttctttttaatgctgtttaatgatggggttgggaaaaagggatatacacacatatataactttttttttcttcctgaaattgggggaggaaaagaaggatttttgaatttggttttggggtacgtttgtgcagatttg

SEQ ID NO: 67626 - DNA, 421 bp, Cucumis sativus
  Intron number 2 from transcript Cucsa.365160.1 (locus Cucs a.365160) derived from phytozome v7.0 (chr-ID scaffold0361 1; pos 2687640 to 2688060)
cactggttttgcatcctctgaacttgctaaaagaggtacattcttcctaattttctgcatctttttgttgtttattgttttttttctattgaattttcatgtacttttctcagttgggaacatgaggcttctgtgcattataattaattttggtttaaacttcaacttgtttgtgaagaacagagagttctaccaagtgccattggaagtctttgctttccactttatatgtttaaagttttactaaacgttaagaacatatataaagtttcagcttaagtttttgaatttattgatattttaatagtttttgttttggattttatgagttaaattggaactcgatcccacacatcaagggacattctttaatataccataatgtattagttattaacattgtcctattgtgcaggaatta

SEQ ID NO: 67627 - DNA, 302 bp, Cucumis sativus
  Intron number 1 from transcript Cucsa.360950.1 (locus Cucs a.360950) derived from phytozome v7.0 (chr-ID scaffold0358 8; pos 1432141 to 1432442 reverse strand)
ctcttctgttataaaatcaaagtaacttctccacccttctcctcaactactcatttgggtttcctcttcttttccgaatctgtaatggggtttggttgattttttttttcctcctctcttacgaatctgaaatgggttttggctgatttttccaagtattctttctttctgcagcagttgatcgtttgattgccttttcttattgaatgggtttcgatagtttttgtgggttttatttgaaaaaaagcttctttatgtgcttttatgtttaatgggtcattgattctatttggttcatgcag

SEQ ID NO: 67628 - DNA, 656 bp, Cucumis sativus
  Intron number 1 from transcript Cucsa.328180.1 (locus Cucs a.328180) derived from phytozome v7.0 (chr-ID scaffold0315 9; pos 556307 to 556962)
tcgggctttggtgctagcaactctccaattgacaggtatggtcgatgtatgatgcttgaaaaactggcctgcattatgtcattggtaccagaaaaacatggtttaatttctgcttttggttgtgtgtatcgaacctaggaaaaaaattaagttcatttgttgtgtatttctagtttcttagagatgacaagcagcaattttagcttcatagtttcattcactttactgtaataattagtatctgaaacctgtcgttgataaactatctaactgagaatggaattgtattgtattgtatttttaatgaaagtacagactatctaactggaatgaaacagatgatatttcctctgcaattaataacatgataatctgacaacttatcttcaatcatatttgattatttacaatattgtgctgcaagagaaattctcttcgaaagggggaaactttttttaattgttgtagaatctattttctgcctgccccatgcgccctttttgccaaactcttgccatttggtgtttctacatgttttcgttgttgacttgatgtcttccatgcatgcactttctattcacgaatctctatttttctcctaaatttatatcgtacaattgaggcattctgtttttacttgtttgctcagagcaagc

SEQ ID NO: 67629 - DNA, 372 bp, Cucumis sativus
  Intron number 1 from transcript Cucsa.280290.3 (locus Cucs a.280290) derived from phytozome v7.0 (chr-ID scaffold0263 3; pos 234368 to 234739 reverse strand)
cgtactcggtcctagtttgcactgattttcttctggtatactcccaatctccatctattactttattttaccatatagtttagttatatcaaatgtgggctgtagttctgaaccttcaaccttttaaaaagacagggacgatttttctctctagtaatcgttttctactctgtccaatttgccgaattagcttcttttttttttttttttctctttaggtcatttctatgttgcattctagtatcttcatgcttgaatgaagaacttatatagccttcttatatcaccaagcgctttgtttaatttggttgctgtttcttaaatattaactttgtatcttagatattatttcctaattcgctagcgttaaag

SEQ ID NO: 67630 - DNA, 690 bp, Cucumis sativus
  Intron number 1 from transcript Cucsa.310800.2 (locus Cucs a.310800) derived from phytozome v7.0 (chr-ID scaffold0299 5; pos 554355 to 555044)
tttcgttctcctctttattcctttcacttctttgggtttgcttctaatttctcttcaatttgttctgttcgttgttatttgttaaatgttcttcctcaccctctgttcctgccaattttggttgtcggattctgttttgcagtagaaattagatgagaatttcgtgttttagggttttttttgtttttgtttttgaagttactttatgtttactgggatggaattgaattgaatcgttgttactgttgtattgtttattccgtatttacaaatcttgtttggattatttgattggaacttttgtttttgtttgcactccaaaaattttaatgtatttgccgtacggagttcttggtttacatgtggtgtgtttttcatcaagcttcatactatttcatcattgattttctttggagtgttggaatagaagaatatgtggtttagaggggaagcaattcaggagggtgtattttttccatttagtatactgttcttttgcgtatttgacctacattttgaattgtagagaaattgtatcatgtaaataagttcaattataacttatatttacagttctgcctagctttccctagtgtttggatactcatattggaataaccttctgtctctgttgtcggtactgaaaacttgttttgttccctataggtggtggcatttatctgcagaaca

SEQ ID NO: 67631 - DNA, 858 bp, Cucumis sativus
  Intron number 1 from transcript Cucsa.320860.1 (locus Cucs a.320860) derived from phytozome v7.0 (chr-ID scaffold0308 0; pos 718263 to 719120 reverse strand)
tcgttctcgggatccttattctggtttcggaggtagttgttatcttcgtccatgcttcacttttgttctcgtggtttcttcgttgattctcatgtttctgaattgttctgcaactttcaattagtttttgtgtttgatttttttttttttttttgagttatttcgtttcggtttgtggaaatggctcttggatcctctggtggaaatgaatgtttgagtttgtatgtgttgatttatatggaataaatctctatttcttttataatttagtagagtacaaacctatatacaaccaaagggaaataggaaatagtatcagaataataattattctaattacgttaataatatgtcttattgttagtttttgtggaatgttgcgatgatattgtctatgagctttgacgattctgttcggcgaatctcggcatgattttttgtaattgattggagataagtgaaaatttgtgttagctgttgttggtggatgttgagctgatcggtcttttcgatcttgtagctatggaactgtctaagttgagagtgaacttgcgtgtttgttgttttgatcactctgtttacgagtctttggcataaaatctttggaactcgtcatgattttgtgaggattttgtttaggaatatatgcttgatgaatgatctctttgaggaatctagttcattcgtcaattggatcacattccaagtcttgttatctggttcattgaggatccttgatctgatctggaaatcacgccgttgtagtgattagttcgttgtggtttagtgggaaatcttgattgttgtttgttaatgccggatgcttgcgctgaacagtgtttgtttgtcaatttacag

SEQ ID NO: 67632 - DNA, 787 bp, Cucumis sativus
  Intron number 1 from transcript Cucsa.278220.1 (locus Cucs a.278220) derived from phytozome v7.0 (chr-ID scaffold0260 9; pos 44918 to 45704 reverse strand)
gaattacaagtatgaatattattcaatttcttcttctcctctgctttcatatttcgagacgtaaatttgaatattggaccaatgattatatgatttctttcgtccatttttgtagcttgaaagttgaaaatttatatagatctcgttgattattggcatgagaatcgagaaataatagggagaacgtgttttacattcctttttccttctgtccatgtgatgaattagatgagtttttttttggtcaatattgaaatttcaaccaatagatgtgttcattcacgcctcctaaaattactcgtgaaagcttttcgattatccctgcgaaatattagacaaattttttcctcgttttcgttctgaagtttgtcatgaaactgggtagatatttccctcttggttaacaagtatatacagggcctttttggagagtgaagaaacattcaatctttacttatctcatcacccatttttccagttcattatccttgtttttgttcttgatcttattcttgaatttggaaccgtgctgtataatcgtcctatgcaccattttgttttggataattctggaaatatcaacatggtaacattctggttcgagttcaagtagtttagttttgattttttgaacagaattttgtgtgaagactgaatttctggatatttcttaatatatgggttttcattttttcttctattgtaaaagaatgaaaacaaatgtttgttaacttatcctctgattcttgtagaacactgggggaggtctctgttctgacaacattag

SEQ ID NO: 67633 - DNA, 819 bp, Cucumis sativus
  Intron number 2 from transcript Cucsa.395160.1 (locus Cucs a.395160) derived from phytozome v7.0 (chr-ID scaffold0410 0; pos 789225 to 790043 reverse strand)
acaaaagaaaacagcgtcgtcccagccttttcgacgtaaacttcctcctctcaaaactctctaatttttcacatattttatttctgttttttctctgtgccaattgccaaagattgaattttgaatgataacccaattttctaagtaagtgaatattcatataaataaaagacaaaagccaatattgtcaatatatacttaaatttaattagttcgtcactaatgttttatattcctcttccaatataaataataatacacactattctattacttttaaataacccatttgcatacgtataagactttccttttttattgactagtcattaattaaacacatataatactcaatgataataaatatatacgagaaggaagatgaagtttaacaactaattgtttaatataaataccagttcgtatctatataatatataatactaaactaaaactcactaaagtaaaatacaattcaatattaatcagaatttaagtaaatatggtttgataaaatcctaaaaactgaattataattataaactacagaaatgaaattctaaggttctccaataaccaaataataaacagaaaagctaattgagttgtttttttcaatttaatcctttcattgttgtgtgttttagaatgattcctttttgtagggttggtgtcaaattcaatgatgattaggttttgaatattgggattgtaaatgactttcactactctatatactacaaaagaaaaatgtgtgtttatggtttattatgaatgacaacagcgtgctgcagcaagggacaaattgacagtgcaagt

SEQ ID NO: 67634 - DNA, 679 bp, Cucumis sativus
  Intron number 1 from transcript Cucsa.313610.1 (locus Cucs a.313610) derived from phytozome v7.0 (chr-ID scaffold0299 5; pos 2789056 to 2789734)
caataaggaggctctgaagatcagtgtgtggcaaggttggattcatttcagtttctgcattacttgttgttttgtattcttcattttacttctgctatcaccatcgcatgagtgttggttttgaagttctgctaactttctaacagatattgagcttttagtcttaggtggtttgagtttaacttggtgcaatatgaaaaaaaaaaaatgtaattcacattcgtgcaagaagatagtattgagtttgctaggaagatgattagcgagttatagctgttattccactatggatatcacttgtaaggtgttgcatcccgctcgagtgaggatggatgatgttatgcaaatagaaacgagaactgacttgttgactacagtagtaggattaagtgtcattataatattaatcatagaaggtgggagaggaggtcagctccatgatttctgcctgcatcaggttatgggctccagtgagagcataatgaattctttatgagctggaaactcttatgggttgagttatttccacaaaatatgtgaatttgaatactatcaaaataattatagggcactgcattgtctagcatgtgttcaaattctatttgtacatatacatgtatttgaactcctttggttttgattgagctttcaacttgtttatgttattgtctcttaggtg

SEQ ID NO: 67635 - DNA, 976 bp, Cucumis sativus
  Intron number 1 from transcript Cucsa.365570.5 (locus Cucs a.365570) derived from phytozome v7.0 (chr-ID scaffold0361 1; pos 3410185 to 3411160)
gaggtgtgcgatttaacaaaatctgagctgccgaggtcaatttctcttctaaacctaatatctgatttgtaatttcccctcatcctcttgcccttgcccctctcattgcgatatgaaatttgatttatgttctttgtttgtaatcttctgattccaatcgccatgcctttctgatttccttcaaattttgtttcactttgtaaaaaaaaaaaaaggagtaaggagtgttctatgtctgctatactgaactaataaactcttcaataatgcttttggtggttttggggcttcaattctcagttctttgcattgggaggatgaggattttgtgtccttcgagatactttaatttttgtggcatggttatgtaatgatgagaatgcctgttcttctgttgtttttggagtctttcccccctgaatgttggtggaattaggcttcccctttttgaaattattttccaaggaagaattttgtatttgatttctttcactagtgaagttaaattgtttatttatttctgcattgactattatgatatgccttctggaaagaattttctgccgttatctgcatgtgggatacttgaaaatgattttgtgatcagtatttccttttctactttttttttttcaaatgcatttcttttccggtggtgctacccaatcatttctatcttgttccttgcttgaaattttcgattgttatattaatgtgttaatatgatgccttttaatgtgacgacattttgtattcagagtgaattttgtaatgtgataaatactgcatcttcagagctaaatagcatcacgtctctttaactcgaatgattctggtgatgccatctttcaggactctattccatgtaattgttctgacttctataagtttgagttcaagaaatgtttatgacattaatttggaatctccattcgttctagtgccccgattttcaacctgaatccaagaaactgaa

SEQ ID NO: 67636 - DNA, 867 bp, Cucumis sativus
  Intron number 5 from transcript Cucsa.240600.1 (locus Cucs a.240600) derived from phytozome v7.0 (chr-ID scaffold0204 7; pos 687387 to 688253 reverse strand)
gtgttaatagttgctcactttgtaaaggtgaaggaagaacctgacaatatttatcaattacactcttagactttcctttcaatggcatctttaagcaaaaaactgaaagctgatgattattcttgaagattttattctatggttcttaatctgctaacttgtttgattttaaaacttattgagagttcaatttttgagctacttctagtagagctttttgagagaaattccctatttattcttggcatccactaggtgttccttggttctgttggtcatctatttgttcattcattactcttagtccagctggtttttagtttttccttttttggaacttgaggagattcgggagatattttaaaggttatgaaagacgaattttgtggtaaacttaccattatggttgcttagcaagacatacttaactatctagcggacttgttaacggaaagttggtaaataattgagaagttctaagaatttctgtgttgtcaaaagaagttggttgattttagatttactatttaatattttttatgtgcccgttttccagttcctctctaaataatggtgttatatcactgaaaaggttgcaagcccttttaagttatgatattcttctactgttaattcatgatagccactcacttgacagtggatatttaattttacttttggtctcttttatgggctgtgtgatactcaggtgaacttcttgtccacctgttgttgcatttctgttcctttttaagttaatgacaatgaatgaaatatctgttggttttggaaggaaaaattgtttctatttaaatatgaaggagatccttggaataccatctctaataatattttatattttcagat

SEQ ID NO: 67637 - DNA, 987 bp, Cucumis sativus
  Intron number 1 from transcript Cucsa.238400.1 (locus Cucs a.238400) derived from phytozome v7.0 (chr-ID scaffold0202 3; pos 960920 to 961906 reverse strand)
ctcgatccatttccaccgtaattgagaatattcaggtttgatttcttctgggttttcattctactgtctaacttcattctgccctttatgtgtttgtttccttcaatgcggtttcttaccttttgttcgatttcaacgatgatttacaagttatagatggatgctaattcttatgctgttggtttgatccactgatctgcctttcattggcataagaggagattctagatcttgtgatttatggatattattgttataatcatggaagtttttcttgttgttctgcggtatatggttgttttattgtttgagtggtaaattgagcagattgtgaactttttgggttttatggtgaaagcatgaaatattaaatgtagagttgctgaaacaaaatagaggtttgtcagacctctttgtgaattcttaatggttaggctccatcttaagaggctaagtccaaaaatttaaggcagtcctttgttattgttacgaaggacaagaaataacagaagagttattttaactgaatcaagttggaaagaagtactgctacttcatgcttctttcaaaagcaggtcaaagtgctttaaagtttttttttttaatttattttttcctgaatcaaattaaactagtgatagaaagaagtgttttttaatgggttattataacatcaattttaaccattccaaaagttgcatcaaattcatacacagtgtgagtttaagaattttgggagttgtaattttaagttaatacttcttttaaggaaatgtgcactttgcatgttgtgtttgttttcgtaaggggtatttctttgacaaacgcagcaacgaccccttatgaaaactaaacaacggtggttggttttttcttgttcttcttacttggattttacagtaagttgttgtattcggatctatagcaaagtagatatctgtttttatccgacaccttacaaatcttgaatgtgccgcaggtaaaaac

SEQ ID NO: 67638 - DNA, 985 bp, Cucumis sativus
  Intron number 3 from transcript Cucsa.273810.1 (locus Cucs a.273810) derived from phytozome v7.0 (chr-ID scaffold0251 1; pos 838698 to 839682)
ttcgtcggttgcacaaacaattgcagtagttgaaggtatgctagtttagattgatatagcacaactgattctgcaataatttatgatggctgttgtatgagatacttggcaagaactttggctgcattacccttctatcacagcaccaagaacacaagtttttgcttaaatgaataggtctacactgatgaaagaggatctaacacaccagtaatcaatggcttccttatatgtaatttttgtcaaatttctcgaaattttttggtgtaaccttgctttaagtgcagcatagatgaccatcgttattggatgcttgaaatcatagttacaaccttctgttgttaagaaaaaggaaaggtctgttgataaaaaatgggcactgttgtctgagtccaaaattttaataagagaagaaaaacgaatttcattctttttatctctctttctcactgctcttatgtggcagtgtttctctacgagtatatgaggactcaatttcaaattgtttactagaaagatttatttttcgtaggaaaaactcttcgaacaaagttctgccatgaacatcttgtctctacattaatttttctcatgttctcttttatcctctttttgtggaaaaattgcaatttgtaactgcatcctcccacaattatactaaacggctcaaattttctatatccttatttgtctaatgtgcctgcactctgtcttcaattttgatgttaaaattagattaaatttctcttttttcctcttcttctttatgaagtcaagctgtttcatggtctgtcgtttgaagaaaatttgaaaacaagatctggtttcatgatgatgaagagataacaaatcatcaaaattagtcatattctctgggcactgaaattttttcatggccatatgatttgaactttttaaatgacgttgtttaagctctataattgatacagagatttcaaatattccgaacgttcggttgtactca

SEQ ID NO: 67639 - DNA, 320 bp, Cucumis sativus
  Intron number 1 from transcript Cucsa.319110.1 (locus Cucs a.319110) derived from phytozome v7.0 (chr-ID scaffold0307 7; pos 3566 to 3885 reverse strand)
cattagtggaggtacttttatgctttgcagtgtactgcctttaacttgcctaggtcagtttgcagtagctcgaaataaaatttttgggaagattaaacataaagacatctgttagaacataaccactctattactgcatatagttttgagtttcttcaaccataatccaatacaatgcgctttgctttttgttttttctttaatcaattttgtaaggcattgaatgttttgtttcatttgcatattctttaatttttctccatgcaagtatggtttttttaaaaaatggttgcactgtcaggtcacaaaatcatttggag

SEQ ID NO: 67640 - DNA, 575 bp, Cucumis sativus
  Intron number 3 from transcript Cucsa.363910.1 (locus Cucs a.363910) derived from phytozome v7.0 (chr-ID scaffold0361 1; pos 1488702 to 1489276 reverse strand)
acttggagcgtttgaagaagatcaggtgattcatatttgcaattatttgtttttgctttcgttgagcatgaaatgctagatttctataaactcttgatatactataactttattgccatttgacttcattagttgaacatgttaagaaatagtgtatcggtaatatgctattaggaaataggaactgattagttgtctgacttggtgaatcttatgaagtttcaagtacttgggtttttgagagtgtatagattgattctctctggtgctatatcctattcaacaggttgccaaatttctcgatttgtcagtggataacttaccaattcagtttgaagtagtgatttctcttttgtataatcttttctgttcttttcccatgtcagtttgctcttcttttgatctgtattcaagaaatactcagggattgcgttttctccatccctgttgtgatttgattgtcccactcaaactaaactttttgagtcactagaactaatatatccttattacataaattctgaaatgaatattttgcaggaaccaccgtggtctgaggcattactggggtctcc

SEQ ID NO: 67641 - DNA, 1042 bp, Cucumis sativus
  Intron number 1 from transcript Cucsa.327760.1 (locus Cucs a.327760) derived from phytozome v7.0 (chr-ID scaffold0315 9; pos 107293 to 108334 reverse strand)
gagcccctggacaaaccgcctgagatcattactccgtgagttctcaaataaatccatatatataatattcaattttctctttctatttgttgcgattattgaatagaaagttaattgaacgaactatattccaataatttcatgtggttctggtaaaacagagagagatgggagtgatcatagtgcatccggttgaacttcccccattctgtaaatttgtggaggtagttttgtaaattggattgaagcagggggctattcaatgtgaatgcattaaaatatagggactgttttgcagtttttggtaacttgtctttccaatcgccgttattgcggcgggaatgcccattttcctttcgttaaataattattagtttttattttttatttttgtggtgaatcaaaattaacgataagaataataatgcttcttgattacatttaaaatttgaatggttggcgttacttgttcgatgtgcttcatcaaatggaatgttacgtattctttttctttaaaaaaaaaaaaccaattttgttttaaatttttattactgcatgtacttaccattgatcatgatgtgattttacttgagaaaataaaaattaataaagatttttattttatttttcttttctggtccatacgggtctgtcgttacctaattctttgttgtttctttgaaatgattgatcgtttctgcccttgtctaattacatcataatccaaatgaaattaatggggttttattttcttcttctcttattttctgcttaatccaatgcaccttgttttcaattaatgtataactaattgcttaattaattaattaattaaattacctcaattatttcattttcaagtcacaccacctttaattaatttatatatatatcgctaggggaaatttaattaatttagtgtgaaattaaagaaaaaaaatggattgcattttggattttcaagattttgcttttacttttataaatgtaggtgaaatattttgtaggcggaaggtgaaaaagaaggggcaaaagcgaattc

SEQ ID NO: 67642 - DNA, 717 bp, Cucumis sativus
  Intron number 3 from transcript Cucsa.213560.1 (locus Cucs a.213560) derived from phytozome v7.0 (chr-ID scaffold0154 3; pos 1350854 to 1351570 reverse strand)
gcaagctttcagagtcagaagtaaaggaggttagaaaattagaattcaaatgttgatatcgatttggtttttcaaaattaagtttagggtaaatttctatgtttcgtaattatcaactctctacaaatgttttcaagaactaacataaattttgagaatatctaaaaaattaaggatgttttcattagatcacctgctctccatttacttttagaatttgactaagagttcaaggattttggttttttttaacaaatgtgaaaggttgggacaaagatccttcaactatctctacaataatatgaattattatctacgtgtagggtaggagattgactttggtaccactttgttgaggataaccaccctccaagtatctttacaatgacacgatgttgttcactttgaacataagcttcaattgctggattttggttttacggaaaagacatcataattgtcctttatatatttcttcttatatctagccaacctgaaaagttgacaatattcaccaaaatagaagaaagacataaaagatactaaacattttatcaaatgggacctacatatatctagttgatattatccctgggttgagtgaatcgaataggaatttaattcaaagtttataaacacattacaaatttacaattgtttaattatgtgtattgaaataaaggtgataatcttgagtgcatctgcaaacaagttagg

SEQ ID NO: 67643 - DNA, 930 bp, Cucumis sativus
  Intron number 2 from transcript Cucsa.288540.1 (locus Cucs a.288540) derived from phytozome v7.0 (chr-ID scaffold0269 8; pos 139710 to 140639 reverse strand)
ggatcagctgttccagtaaaagttacattcaacaagtaggattagttttaccacttgaatagatggattgtcaatcttttcattttattgaattaaccatgctcttgcttttccacctaacatttatttaggatttcaatcattttttaaacaaaaatgtttcaatatgttccattttactatgagaataaatccttaaacttctggtcctgaagtatctagcttggaaaaaacgacttgggatgtgttgcttaaatcattgatccggtactagatgtagcttttctccaggaaaaaaggccaaatatttactttgatagtaaaaggtcaagatattgacagtcaagtaattaatgtgacttgtaatctatatggatgaatgcatttgatttgactatgtctgaggcagtagaacagagaaccccaatgttggactatctatacagccacaatttcataaatgcatattgtttcttcttggtttccactagagtagggagctaaattctaatttaggaagaatttccgtagccaacaagcatataacttgtgtgtagcgattgcactacgaatagttttggtatagttctgataactgagaattttattgcttcttatatgctgaagcctgagtatatgaaccgttagaatacaagcatatttcctagttatattcctatgtacttagtatccattctctccttaatctctaaaacatattcagttgagaataaaaaaacttattacttttttgcgtgtcttttctttcttctatataatttatgtgaattatctgttgaagatgtatcttctggcttaattatgcattgaattctccccattccgttacatatattctctctttagtttggaattggacatatgagttctcaatgtttcttccagattcgatttctcaaactcgtatat

SEQ ID NO: 67644 - DNA, 753 bp, Cucumis sativus
  Intron number 1 from transcript Cucsa.340420.1 (locus Cucs a.340420) derived from phytozome v7.0 (chr-ID scaffold0335 6; pos 2878810 to 2879562 reverse strand)
cccaggtttgttagtttttttctttttttttttggggttcttacttgatttcttgatctgggtttggttttttttgtccattgatgtcccctatacatcagtattgatccttgatttgtttttttttcttgactggatagattagactcaatttcccttgtattgattggtgtgtgtgtgtgggattgatttgtatttctgggactggatttcgtttatgtttttctttggaattttggctgctttttcccgatctcttgatttgttgagggatttgagtctttatgagagatcaaaggaggaatatggaaatgggttttaattttcattttaattggatgtacctctatggatctccttcttgaacttgaaactaattgaaaactcgcgtcgagcaataacccaattgatttggtaatcctttgctccgggtgtttcaaatctaatggccaatgtttggtgtttgttaaggctagatagtttgtggtgatgtctctgttgaggaaatgaattgttggggtcttcttggaggaccttctcaatgaattaattaattaatgttgtttttttatgaaatttaagaatggatcttttgttttatgtagtttctttgatagtggcataagaagtcgtcgtttgattttatgttccctttcaagctattggtatggctaattgccgtgaatgatctcttattctaacgatgatttgttacctgtgtatgctgcagtgacacatccgtcggtgttgcac

SEQ ID NO: 67645 - DNA, 877 bp, Cucumis sativus
  Intron number 1 from transcript Cucsa.370580.1 (locus Cucs a.370580) derived from phytozome v7.0 (chr-ID scaffold0367 8; pos 274841 to 275717)
ttcaacccaataacgttgaggttagtgttcttttcgcttttgggttttccctccaatcagtggttcatttcacttggaaaagaaaatgttttgtactaattaatacatccggttctatataagcagagtttccatgaacctgatcttgtaccacttactaataagggctgattgattgtacacatttatattattagatctattcttcataaacaaacttgagatttgagattctaggtaaggatagttcaggatcgtgggatcatttattcttttccttcagataggtgcaacaacatgtacttctaataagttgctccatagatcatttattaggattatttggaatggatcttaagggtcaacataaatatcttgacaataaattgtagtaggatcatgaaaccatgattagatttggaaattgagttcaggttgtgaacaatgatctattgaattggttattgaagattttctttcaaggagatggtgaaggaagtttgtttgtatgcccaaatgtttactttgcctttgaaccaaccagtctcttgggaaatgattttgttttttggtcaagtcatttttagacagcatttgggataaggaggttgttaactccactcccccaaatccaactccttgagctaaacatgccattagagattcataatgtgatctccttgttattagttgcatcttgtgctgcaatcacaagtttagttcttctatgcaaatataattcaattgattgaccggataggctagaggtagaagttaagatggatggtcaacttttcagtgctttattctctttatactgtctctcctacatctatggattttgaagattttgtgctggaatggcctgtttaggatc

SEQ ID NO: 67646 - DNA, 953 bp, Cucumis sativus
  Intron number 1 from transcript Cucsa.360240.1 (locus Cucs a.360240) derived from phytozome v7.0 (chr-ID scaffold0358 8; pos 969650 to 970602 reverse strand)
ggctccgccgttctcagctaaattttggctttgaggtaaagatctattgtgttttagttggcttgaattaaacattaccaataatattttgatgctagatttgagttctttgagtatttagctaccgtctagccgagaagaaggagtgaattgtttgggtgttcgatccagaattgggtaaaatttaaagctttatggtttgggtcttgaatacccattcaagactgtaattctttcgtaactatccctagcttggatggaaactttgtttgagactctgaactagtttggacgactgtgtccacacactcatgttattttgagtttgaagtatatatatatattggtagaagtgaaaatttacactcctttcaggtttggcagacccatattttaggtgagatgttgaaattcccatagaattctatattacttggcttttagattgaaaaatattgtttttaaaaagctttttcatgccacaatctaggttagagggttaaactagaacagggtgtgacacctttcatgtatattgagcatatctaattctgtaattgttttgaatagcatgatgttcagtttatttgtggtttggtggctgtttaggtttgaccgtatgaattactaactagtattgttttgtattgacaccaccatttttcttaggtgatgctgagtttctataccttggtgatgctgaagtgggagctttagaaagattgaccattgaacgtgtttgttttgccacttcccttattcactcgtctttttaccctatcccagtctcacatattctctcatctcctttattcagtttttacaatatatgaacttctctaagctcaaaccgatggctgtggaacgcagtcttgcctaaacttgaacattggttccattattcacacatacaaatagtcaaggcaatccattctattgtgttcttagctaga

SEQ ID NO: 67647 - DNA, 551 bp, Cucumis sativus
  Intron number 1 from transcript Cucsa.292620.1 (locus Cucs a.292620) derived from phytozome v7.0 (chr-ID scaffold0277 9; pos 131534 to 132084 reverse strand)
gggtattatccccttccacatactaaatcagcaaggtaattgagcacattcttagaggtctataattgcaccagctacatattataatatgtcattgtacttttattgattgttcattaaaaaattgattttggaatgtgcaaaatggaaggtttcaacaaagaaaaggaaaaacaaaaccgtttttcctgggatcaattaagcatatggacaagactagtttgactaatctcactttctgttcatgcctactgtaatcttgaccatgaatcctttacaacctgaattgtgaatgtattactgttcattcagttaatttcaacttaatagactttgcatttgccgataattcttggttgaagtaggttattgggaaatttgtgcattcatgtgagggattacacagccaaacaaaatcaaggaatctttttcattgtgttgattatcatttgaatcctgtatttctcagtttcttccaaagtttacggcttttggtgagtttcacaggattgattcattttctaatttattcatgcaactcatattacagg

SEQ ID NO: 67648 - DNA, 971 bp, Cucumis sativus
  Intron number 1 from transcript Cucsa.287230.1 (locus Cucs a.287230) derived from phytozome v7.0 (chr-ID scaffold0266 9; pos 91152 to 92122)
ggcccgaggttagattcagtacatcctttcacccacagactgatgctaaaattgagtgtttgaaccaaattttggaggatatgttacaagcttgtgctttacagtttctagtgatttgggactctattttgcatataatagcagcttttaggctactattagcatgacactatttaaggccctgtatgataatgtgcagatcccctgtttgttcggctgaggttagtgagcaaagattgatgggtctactaatgaagctatacagaagattaaagcatgtatgcaaataacacagagtagacataaaagttatgctaatgtgaggtggaaagatcttgaatttgatatgggagatatgatgttcttgaaagtggcacctatgaaaagtgttctgcgatttgaaaaaaaggggaagttgagtcctcattttgttggaccgtttgagattattctagagcaaattggtcttgtggtgttgagaaattacgtggcaaatctgtctcacgtagtggactacaaaccattgaaaattgatgagaatgtgaactctgtaaagcagctagttgtaattttgactagagaggtaaagatgcttcatcagagatgaattgctttagtaaaagttttgtgtcaaaatcatcgagtggaagaggctacatggaagagagaagatgatatgagagctcgttacctatagttgttcaaggattagaacttttgatgacgaaaatttcttaaggagggaagaatgcaacaccctaaattttgaggtatttttctcaaccaaattgtcatattttagtaagattttaataatattaataataagatattatatatacttattattatcaatcataattaattttgcctttccctcactcggttcacgtgccccctcctttctcattctacttcacgatttgaatgtcctagctactgtcgcctacaacttcttctccgtcactatc

SEQ ID NO: 67649 - DNA, 896 bp, Cucumis sativus
  Intron number 1 from transcript Cucsa.335510.1 (locus Cucs a.335510) derived from phytozome v7.0 (chr-ID scaffold0332 4; pos 58905 to 59800 reverse strand)
aaataactcatcgagaaggcagtggcacctgcttggtaacagtaattttgatcattataataggcctgggaatagcagttacattcataatgtcaggcatttacctgatagaacacagccaaatattcacagaaacaaccaagatttgaaatatcagtatggcaagaggccaaaagacacagaatttgattactatgggaggtagggatcatggcaacattcctcccacagggggagggttttgatcatggtgtttcatgctggagggtattcaaatcttcgaagtgattattaatggctgttgaggagttgaatctccacatgaattttgattttgctcacaagtaaccgaccagcaaccttttctgtttttgctttgatactgcaggatcgtctatgtttttgttggtagctttttaactttatttcaacaagaatgatactgcaggatttttggtgtaaagaatcaaatatgaaagtcttggttcttttgcaagtcattaggtagattccttcccccctggagccttgtacaatcatgacacagtaagtttgtatcattttgatttgagaaacctcttttgggaggctttatagaggcaataacagctctactatcaatctaattctgttttgtaagtctgattgcttatccttagccaagaacatctcggagttccattgtacattgtcttggtgatcttcctgatttggaaccttccaagtgatctattctcctaattaatctttgataacttactttcattttctagcatattttttcttctcgttttcttcagaatcatattctaacagatgattgcttcgtaaatatatgttacacttgctgattggaaacgcagtttgttcttgttcttcagtccttgttctgagta

SEQ ID NO: 67650 - DNA, 726 bp, Cucumis sativus
  Intron number 1 from transcript Cucsa.271560.1 (locus Cucs a.271560) derived from phytozome v7.0 (chr-ID scaffold0250 0; pos 378142 to 378867)
cgacgggcttttagagatatccgaaagggtttgtatgtcctacttaggttaactgttgattgaagtttggtatttttggtttgaaagtaaaatgggagtgtggattttacaatgattgtttgctaatcattcttaattgttgttttcccaatgtatcttgcatggtgaaggggttattagttctggaaattgttatggttttggactaaacggaataccaagttacattatggtattttataggaaaatttgttactaaaagttactctagctgttgtttttgtgggcctttataatcattgagttgtccctatttggaatttataagatgaacccctttgctgtaatttcgtagaacttgctgttgtggactcttttgtttcctttcaaagctagacctcaagttatcttccttcttcctttaaagttacagtcattatcatgcattaactctttcattgtatgtgcattctttttcttaacttggattgtgtatgttcaagtttttccccttaaagatactgcaaattcaaaccttaactccccaaaacattccgtgcgttaaattgtgagtattgaatgaatatttcaagtttttaaatcctttcctctcaaacttgtgaatgcacgtgtagttttgcttgattgtagatgattgggaagtaggataaaccagtgaatgtatgtgcagttttcgactgctgctttacaacggaggtgttggaa

SEQ ID NO: 67651 - DNA, 374 bp, Cucumis sativus
  Intron number 1 from transcript Cucsa.340810.1 (locus Cucs a.340810) derived from phytozome v7.0 (chr-ID scaffold0335 6; pos 3188106 to 3188479)
ttcaacctccgcggatcctcgcgcagttgatcacagtgagtcaaattcaactaatttgcttccaccatttctttgtttttccggtttgatttgtagttttcttaattatccattaatatctgtagcttacggttcgttaaaccatatgattggactttaaacttgaattcgtaactatgctcttctctcttttatttttattttgttcttttggaaatttatctttcatctaagccaagactgttcgaaaattaatactccattcagacattcattgctgtcgaccaacttgcattgttttgtgttgttttcttgcaggtaaattctgttgaatcctgcttctattgtggttttgcagttgaagacgcagaaaa

SEQ ID NO: 67652 - DNA, 762 bp, Cucumis sativus
  Intron number 2 from transcript Cucsa.212360.1 (locus Cucs a.212360) derived from phytozome v7.0 (chr-ID scaffold0154 3; pos 160029 to 160790 reverse strand)
ttgttttgcaggtaaagcaactcccttcttcattcttcattctttatttcttctactaatttttttaaatatcttgtaactcagagaaagatgatgttttctttcgagatcataaaaatgcttaaaaggcaaccattttttgttttaaatttgatagaacataatcatgcccagcatgttgtatcatcatgatttctttgtttttattctggaattttctttagttttgctgattacaatttagtggcagagaagttacagaattcatacttgaatagcaagaaaaggattataattagtagtactcctcatgatccttctcattgtctccaatgagcacaaactgtttctctctctctttctaagagtaaattatgaatgttagtcttgtaagatattatctctagcttgtcaacattgttaattagtattgattggctagttaattatactgtaaaacaaatggttttttaaagcatacggatttgtgatatttgcatgagcattaaagtataaggatacaaaagggatttgcacttatcctcttgactttgttcttttggagtactttataggcctaattctgtttggctcctttcttttcttttttttgtatgcacttttttttttctcaatgacagctgaatttttaaattaaatatatatatatatagtgattctgaacttgatattctttgaaggatattgacttaatttcatttaacagacactatccctcctcttggccacagctggagctgt

SEQ ID NO: 67653 - DNA, 658 bp, Cucumis sativus
  Intron number 5 from transcript Cucsa.260310.1 (locus Cucs a.260310) derived from phytozome v7.0 (chr-ID scaffold0222 9; pos 6673517 to 6674174)
ttacctccttggttatcagctggtccatcacagaggcaagtacccaagaccccctagcttgtttgattccaaacttgatctattcaccctttattttagtacttaatgtgctcttgtaactttgagcattagtctattttattataacaatgaaaaatgtttgttgtttcctttcataaaaacaagagatctgtccaagatctttctgaaaaaatctttgccatcatctttttgcatttagatggtggatgtgtgatgtgcatatcatcttgaaaaatgtgctcattgtcagcttgttttttattgttaagtgtgccgccattcactgtgtattctttgtcataaagctatattagatagatggtcatttacttattcaacttagtagattcagattgagtttgacatgatttgtaggatagtaaaaactgcttttcttgaagtatttaaaacgagtgtagctctaaggacacaaatctcgaaatatatctccaagttaatcaagccatatagttttcaagaatgtaccatgaaggaaaatagcgaagtagtgactttagctttactggatagttttcatttatatttctgtctttccatccaaaagtcgaatggttcagttaaaaggagaagatgctctgcttgcagattatccgat

SEQ ID NO: 67654 - DNA, 659 bp, Cucumis sativus
  Intron number 1 from transcript Cucsa.302380.1 (locus Cucs a.302380) derived from phytozome v7.0 (chr-ID scaffold0295 1; pos 551952 to 552610 reverse strand)
aacactcccaggtttctttctttcaatctcttcagaatttctcttcctttcagtcgttaaccactcccaatcattcatttcactcttcttcttctttcctaatagcatgattttctggtcaacagtcgcctaatcttgtcctgtttttattagtttttggaatttatttctatttgtttccatcttttagttttagggtttcagttattgtccgatttgtaaatctgcggtttgccttatcagggaacactatttgcttattttcagcaccgtaatgtccccttcccttttcttagagatttcttttcccacacgttttcagattcgatccgactccgatctctgccttcacacaccttccactgaaaatagatttgaaattaccgaccagggattttttttctctcttcttcccctttgtacttttctaattgtctagaatattttgaaggtctctctgtttagacatagcatcggtctgcatcaagtatttattaatttatggtttgtttgactctgtctagcgggattgttcaaacatctttgcttgagacttttcaaagacccatgtggtttcttattttcaaatttcaaaactacgaattataatgtaattaaacttgacgtaaattgacccatttgcagggttgtgatagata

SEQ ID NO: 67655 - DNA, 636 bp, Cucumis sativus
  Intron number 1 from transcript Cucsa.360680.1 (locus Cucs a.360680) derived from phytozome v7.0 (chr-ID scaffold0358 8; pos 1280917 to 1281552 reverse strand)
attaaaggttcgaacactaccttctctctttcacttcttcttctttctcttttactttctttcatttattcttcttaatcaccccagatttgccgatcttcttgcggacaatgatctgggacaattcccattttcatcttcccctcttagcattaagctccttgtcaattgtttattgcttttttttctttgtcttttttttttctggggcaattgccaatgcctcgtttttctatcgccattacttctcatttgagatcacccctttcatacatcgtaattatcaatgggcaggatcttagttactgatgtacgcttttcttttttaatctgggtttgtggctggatgtagcttgtggttatggttaaaggaaagatatgattttgctaaagcccatctctgctaactttagtttattgtgttatcatgtcgtggtaagcagttacaattttaaatttgtcgaagtggcaaatgttgaatagtaacttgagtttgggtggaagaaccgattagaagttgtggaattcattaacttaatctagttcttactcttgcgggaattattttattttctgacaaatggattttgatatcttatagtgagtgtaaagtggcaaaaagagctgttccgtgat

SEQ ID NO: 67656 - DNA, 725 bp, Cucumis sativus
  Intron number 2 from transcript Cucsa.395010.1 (locus Cucs a.395010) derived from phytozome v7.0 (chr-ID scaffold0410 0; pos 711091 to 711815 reverse strand)
aagcagagatcacggagcaggattctctactcctggtcagttccttcgaaacctgctttgtttcgttgattcgttatcttgtgttctggaaatgtatttgaagttttcttcgcggattatcatggaacttatacctgaactcgaatctgtttgtttggcttgttatcgaatgtagcttgctatcttcgcgttaatctgatgcattttttatttcgtaatttctcaactcctgctagactgagatagcagttatttcactattttagtcatacttacaaacatgaatgtcggtttaaactatgtatagattatagtctcatagagaattttctgtagactggttacttatataagtcggaaatgaagacgagtgttgttatagaaaaggaactacacgtcctatttcagtgaatcgcttaagactgcaatgcataatcaattttggtggctgagcggatcgaaatcacacacgatgaagaaaattactcgaatctttttaaatcttttattttcgacgtgcgaaaatttcttccgtagtatttaacttcttaacttccaatcgatgctctgtttttcgtggccaaaaattaacaagatacgagcactctcattatgtaattcaaatattttaacaccgataattgtaagaaattggatttgatggaccttgtttgtgtttcctggcttcagacgaggaatttactgcgcatcgctatattcaatat

SEQ ID NO: 67657 - DNA, 394 bp, Cucumis sativus
  Intron number 2 from transcript Cucsa.337600.1 (locus Cucs a.337600) derived from phytozome v7.0 (chr-ID scaffold0335 6; pos 661363 to 661756)
ttcgttcttgctcttcttgggttagtatcaaaactttggcttttaatttcttaataattattattgttattgaggtcaccttccaatcatttctttctctttttttttgggtttttataagaaagtctattttctctctttttttttctaattttcaaaagttgggtgtgtggtttctgaaattattggtaaaaaacaaagcataaaattgagaggtggaacaagttcttctacatgtaattttcaaaagttaaaaataaaaaatcaaatggtcatgaagcaacaacttatcgttttcttcaagattacctttttactttacctctatatatatcttccatatgccattgatttctgtctcaacaggccattgcttgatcaaaacttatactac

SEQ ID NO: 67658 - DNA, 674 bp, Cucumis sativus
  Intron number 3 from transcript Cucsa.240150.1 (locus Cucs a.240150) derived from phytozome v7.0 (chr-ID scaffold0204 7; pos 20748 to 21421)
tgcgctcccgagctgacttcgctcgtcttacacaggtgatcactcctcactattgtctttgttaagaaactgattcactttagacatttggattttataattgatggattatattgccaacaagaccttaattcaactggcacctgtggacaagaggtcctgtgttcaaatccccacccccaattattataatacctttcaaaaaaaataattgatggattatctctatatgtgatcaagaatttagaagttgaaaaacgaacttccttccaggtatggggctttgttgtcacccttcatctttcatacccttctatccaagggtttatggcgatcccccttgggtatcatttcaacagcttcttggaactattatctgcttttgtgtttgtttgataggaaagtttttaaatttttttaatttgtcaaggacttgctgagcacaaaattgaaatttcagggacctattaggcactttcgaaagtttagggataggcacaacacaaccttaaagtagactaaaattgtaatttgaccttagttctgcgttttgattcttacatatttcttataacaaaatcgttcatatttattcctttattctaaagaaaaaaatccattcttctttattttgtgcaggaaaaagaacttatcgagaggcataacgtgtggct

SEQ ID NO: 67659 - DNA, 621 bp, Cucumis sativus
  Intron number 1 from transcript Cucsa.357220.2 (locus Cucs a.357220) derived from phytozome v7.0 (chr-ID scaffold0357 8; pos 103682 to 104302)
gcttcttcatttcctcagcttcttcttattcccaggttctctatttactcctccttaacttcgttcatctattatcttttcaaaatccccccccccccaaaaaaaaaaaaaaaagaagttaatctgggtttactttgtttggatattgttgtggatttgaaaatgtaggaatgttgaatttgtgcttacaatttaatcggcttaacttgctttgaattatcataatttgtttagtttaagtgggtttgatatgattttctttgggatggtgacagacatttgaaccgcattcaaactttttgttgcttccccaaagcttccactatcttttagttaccatgttcaaaacgattatgaatttttctaaaaagctcaggacaggtttggaacgtctttcgaagtacttatccaaccaggcttttagtaacattagttctacattcttaaaactgcttttaaaaggcttttcgttcaagcactttagacaaaagcactctacatgtgccttctcacaaagcatttaaggtgcttatgaattttcttaatgtactcttatgttactctccaacagccctgtaaaggcaaagaaagttttatgtacaagtttcttaaatgatacag

SEQ ID NO: 67660 - DNA, 814 bp, Cucumis sativus
  Intron number 1 from transcript Cucsa.198230.1 (locus Cucs a.198230) derived from phytozome v7.0 (chr-ID scaffold0135 7; pos 1331873 to 1332686 reverse strand)
cgccatcaagtcctctaattttcccttttgcattggtgagtttttcttcttcttttcttttggttgtttttaattttattactgttcatcaagaaaatgaaatataaaaaactcaacagttgaggttggggataatttgtttgcatcttcgtttattagtcaaactaaggtccgttcttcgttcttcttagttctcatttgattaccgtttgattttttgttttaaaaatcaagcctgtggacactctttctccctataatttaaaaaaccattttcaaaaactaaaaaaatggttttttatttttggaatggactaataattcaactattttagataaaacattataaaaaataatgagaaagtagatttcattttaaaaaaccaaagaaaaaaacaaaatagttatgaaacataaacgtaactctacctttagtaattatttgggttatgtttagtaacatttcatatttttgtttttggtttatgaaatgaagcatattcctcatcatttctacctttttttttaagaacaagactttgaatttttagctaatctacatgaaaaaaacaagttttttaaaaactaatttggttagttttcaaaatttagattagtttttgaaagatgggttaaaactgtcttaatttggttggaaagagtgtttgtaggattaatttaaaaaacacaaaccagaaatcaatgaggaaagcattcgaactgcattgaagtatttgaactgtttctcattaaaagtaatttttatttacaaattttaatatgcattaaccatttatctcttccccaagtagga

SEQ ID NO: 67661 - DNA, 402 bp, Cucumis sativus
  Intron number 2 from transcript Cucsa.379750.1 (locus Cucs a.379750) derived from phytozome v7.0 (chr-ID scaffold0383 7; pos 162119 to 162520 reverse strand)
atcccgattctagcttggaggattccattaccgaggtaagattgtgagaaatttcgttttaatccaatgctggggaatggactttatttacgaggttgctgaaatggttaaatctattcaatactcattttgctagcatttatgtggtctgcacgagttcttcacatatttgccatcttgattaggaggagttagttttgtaagcaagtgaatttcagttcgactcgaaatcctggtttgttttttctgtttaaggctcaaagcattgctccagtcgttggaaatttcccgctctgaagcgctgttatgtggatatggttttcagttttgctctttctgactttgctttaaatctttttgctcttagatttggaatcaacggcttcagacaaactcatcatt

SEQ ID NO: 67662 - DNA, 614 bp, Cucumis sativus
  Intron number 1 from transcript Cucsa.388140.1 (locus Cucs a.388140) derived from phytozome v7.0 (chr-ID scaffold0396 7; pos 588277 to 588890)
gattgtgcaggatatttcagcagcagaaattccaggtacctctacgctacatcgatagagttatttgagcacaaattaatccataatttatcgtctaactgaatatatttgagaaggactcttatcacctacaatgttgaggatttttgtttctttcttcaagatgctgttgtatatatggccacacccagtcctatagatatcctccaccgtaattggtatttttatatgtatgtttaaatggatttttcccttgatatcgttcaatattcatatcagattagtttagtttagtttatcttttttaattgatcaaactgttagctaaatatttcctttctgaatatgagttttggaacacggtgaagaaagcttttgacttatcaaacactcccctaaattcgtagggtgtttggttacatcatatgttatcaaaagtaagaataaaaattctgaaaaaatgcttagtttaagctcttgctacgttcttggctatcaaaaaagtcctctatttaggaccaaaggttctcgctgctaatgcttttagtttaataaaagtgttccatttggtgtttgcaggatctgaaagtgacagggaagggggattctctgac

SEQ ID NO: 67663 - DNA, 784 bp, Cucumis sativus
  Intron number 2 from transcript Cucsa.306770.1 (locus Cucs a.306770) derived from phytozome v7.0 (chr-ID scaffold0297 7; pos 202795 to 203578)
gttgcagattattgggtttcttgattccatctcaggtattttcagtgtagtgtacatattcgattcgcttgttgattttgtggagtttttttttttcacttgaccatgggtgtagttcgaaatcctaaatcgtttccgatgatctaataatggggtggagattattggagtagttgtcttcgattgctacttgtaatttggttaccgatcgttcttctgatttaatctagggttaaacgatttgagtttgttgcacattctcagctatctgccggtgatgaatttttagtctgaagtttaaccaattcctatattttactatgtagctgtaattttttattgggcaggactttgattgaattgctgcaattaggttttgttagtatttttgtgctgaaggatttggataaaaagggatgctagcgagtctgtctatatatgagaaatcttgattgctgttgcaatcagtatttatactttttctagtttattttatttgatgatctttgaattaacgaactcaagaagctactctttatgttcgacttttactttataattattgggagtatgtgaagcgccgtgaaagctttaccattgttatcagttttttggtgtttctcctgatggtatacgtgattatgattagattggataaagacattctgtttacaagtggcattctttttcgtataatttatcttctttcaaaaaagattctatatgaaaatcactgatttccctttgactttgaaatgatctccattgttgcagttggtatctg

SEQ ID NO: 67664 - DNA, 813 bp, Cucumis sativus
  Intron number 3 from transcript Cucsa.353290.1 (locus Cucs a.353290) derived from phytozome v7.0 (chr-ID scaffold0353 3; pos 860927 to 861739 reverse strand)
actgttttgattattttgaaagcttcagcatcgaggttgataacaaatttttttgttttctttatgttgggctattctcagtttttctattggggtaacacttgaattcctagttaactaaacaataaaaacaaaaacattttttaaacatgaatttacaaattatagaaacttgtctagtttttacaagtttgatttttaaaggactacttgttttagaagattgagaatgatttagttaggattctcccttttgtacatatgttcatcattcttctcttgcgatcgtgtttgcattcaaacaaaataatacaagtgttttcacacattggagtgtcactcatttctttattgtgtgcttgtgttctttatgttcaacgaacacaacgaatatactcatgatgtttaaatgcaacaatatccttatttagacactttttcattcatttcttaactaggggtctttgttcctaaaactctcttgtggtcacaactcccttatggtcaggcgcctttctttgttttgaatcttcaatgatgtattttatcacagtataaaaatggtaattgaaagtataatattaaatattaaattgcaattgaaagtataatattaaatataaaattagttttgagaaattaaataagcgaaaaatataagcgtggaatgtcaaatgcatagtccatagtctcgtggcaacagatgaccggtaactgtccgattggtcaccggcaaaaatgtcctatccctctgaccgattgaatatcccaattgcagctgatttcgcctcgaaaattccaaagaaaattctg

SEQ ID NO: 67665 - DNA, 909 bp, Cucumis sativus
  Intron number 1 from transcript Cucsa.242120.5 (locus Cucs a.242120) derived from phytozome v7.0 (chr-ID scaffold0204 7; pos 1930109 to 1931017)
cccaatttgtattgggacggttgcatattgattttgtaagtttttgtgctccttttcaagtgaattggattctgggtttttgttttttcttgaaaatttgttgatattctgctcctgttggggttaattcagtgcatggatagatgggttttgtgtttctcgatatgggttttttgtaaaattgtcatttctacttgcctcttcaatgccctcctcctgtttgatgaaagtccgcaccgaataattgttttttgaatcccctgtttggttgtgattaaatatgtcagaatcataggtgtggagagacaagtgtatcctagcgtaaatatttgcacatggaggctaaattgttttctttctatggtttgaggctttgaatcatgtcggacatggtaatttagagctttttgggctgtctcttttggaatgtactgccgtcaccgtagaggttgataagatggggatgctttttcattttagaagtatgtgtttttggggtaatttgtctcaatgctttttacacatcgaagggtcattcactcgtctcgtattcatcaatcggtgtcaattcgacctttggaagttgtatgtgactctgttacaccactgaaaagatgaatggcatgacatgttgagagatctgtgatctttgatatattctgcaagcctcattcacgttcaatctatagcttgttttttttctcttttgaagctagtgtaagagttgcaatactttatacattgacctataggcagcacaatacttagttatttattggtttttctttttccacctttgtattgatgtataagccaaatttgatcagagtccaacttgattttcttttattggattttcacaactgatgtgatgttgctaatgttaataatcttttcatttgtcaggtg

SEQ ID NO: 67666 - DNA, 322 bp, Cucumis sativus
  Intron number 4 from transcript Cucsa.379870.1 (locus Cucs a.379870) derived from phytozome v7.0 (chr-ID scaffold0383 7; pos 253817 to 254138 reverse strand)
aggttctttgtctttctcattatcttgcaattttctttaccagaaagacatagtttcttgctggatgttttcctcctagagagccggaagaaatagtggaaattttgtgtagttaattgtattgttaatgaatagaacacttggatatataatatataagcataagtgctccactaactactcaaacaaaatatttaacggattctattacaatcttgataacataaacagccataacgttcatgacaactacaagtaattcactgctctttctttttgtttgacagattcaacggttgccttctgtgttcatcactttcct

SEQ ID NO: 67667 - DNA, 958 bp, Cucumis sativus
  Intron number 1 from transcript Cucsa.310740.1 (locus Cucs a.310740) derived from phytozome v7.0 (chr-ID scaffold0299 5; pos 479523 to 480480)
ggaatctgaatcccagctctcagctctcattttcggtacgtttcttcgcttctctatccctttctctctaatgcacacattcaaaaggcacgcaaattaaggcgctaactactgcgctttctcacaatgaaatctgcctgcctgcctgacattgtatagcgaggttattagctagattttgttacacctactgtgaaaaatcggcattgttagtcgttttctacttatgcttatatggttgaagacgtaggaaatgctataacatcaaactctaggtagctgttcatatttcgtctcgattgcattctttaatgttgagcgtaggttcgattggaaacaccgattaggttaagtttcttcgcttctgaatctatgaattcgtgtaggacgaaagccgaaattgatagaggttgtttattttagacaatttttttttaacaaatcggcattgttaactatctgcagttcttaaaacgaggaatttgtattcttaaacttaagactctgatttctccaaatggtagtaatttgttgttaacaacacttgaatctcagtattcacgttttatgattctacctccatttatatgtgtaatccatctctatttggtaatcttgcttcacttatccgttatctgtgtaattctagaaggaattttattaactgtcttgcgagatggttgtactaggagaaagatcgttcctctgctaatttatatgcttataaatcatagccgaacacctatgaaaacttcagagacttgaaacaagcaatcagtactcaaacctagacgtgcttgcttctctcacaaaatcattttttcgtttttcgttttcttcttagcatgttggtgtttatcacgccctgatcttttttgatcggtctgccattcaattagataacgctggtttatatttttacatgcgcgcagatatatcacaacaggctcaaggggct

SEQ ID NO: 67668 - DNA, 619 bp, Cucumis sativus
  Intron number 1 from transcript Cucsa.303420.2 (locus Cucs a.303420) derived from phytozome v7.0 (chr-ID scaffold0295 1; pos 1366230 to 1366848 reverse strand)
aagttttggcgatcctcctcctgatctgcttcctggtagtttacttgtttggtgaacatatgttctgtttccagtttggtttgttaatgcttaatttgaatgaggaatatgtttttggggggtcttcagagtttgaatcacccagtaatgaatcgtattagatcatttctattggctcatttcagtgttgcttgtgataatttgaacatggttggcaacaacaagacgagggaattgaatctttaatctcttggtcgaaggtatagatatgttttgatgagttgagcttgtgctcaggttgatacatggttggctaagcttcgaaaccatgatttgatcaaacttagttaaattggagactcactaaaggaaactaactttgtggaaattagaagttcagtagaaggtgtagttctattaaggcttaccttttttcaatcacagtatgttgctgctacttataaatgttttctttcctgtggaacttacctatgaatcatggttgtaaattgttcattcagttggaagtttcgagtaatattgtaatgatttcaataaccaaactatgttctgtgtcgcataatttctctctgtagtgctgctgtaaattcagagaccc

SEQ ID NO: 67669 - DNA, 841 bp, Cucumis sativus
  Intron number 1 from transcript Cucsa.273640.1 (locus Cucs a.273640) derived from phytozome v7.0 (chr-ID scaffold0251 1; pos 709932 to 710772 reverse strand)
ctctctccctactctctcttctctttctacaacaggtacctctttctctttctctttctctttctagatttctcattttgatccctccatccaagtctatgtaagttgaatcatcttcctcattgtgatcacatatgttgtttttgttgtttgggaactggggatttcttattcactgccaaatgtgtattgagatctgcgtgtttcttgtttccgtttggatccgtgataatgggttcggtttttttttctttttcttttttagttttatgcttgatttcttgtttgttaagcattttcttgttctgactacgtctgttggatccaattgaggtgatttggatttagatcatgggatatattttggacgttcattttgaaattggattttaggtttgggaatattcagagatctgatctgatgtgatgggtggttgttgatcaggaatgttttcttttttgttgtttgtgaagggaattgaagttctattgattatgatgatctgcgtttttttttataaattagttggtttcagtttcttcagcaatgaagcttagtaatgaataataatgtacttctgggtttgttttttttcctcttttgctacttctttactactgtaactgccatggaactgcattgttgacttaagtttttttagatctgcaacttgtgaaactagtttccatctaatgaaagattttatttttgtttcttccactgtggctaagagtttccaattcactatatatatatatattatacacacagtttaagtttttgttcctgttagtgattttatgtttttatttttttacttgtgtagaagttggttttgac

SEQ ID NO: 67670 - DNA, 982 bp, Cucumis sativus
  Intron number 1 from transcript Cucsa.356310.1 (locus Cucs a.356310) derived from phytozome v7.0 (chr-ID scaffold0357 7; pos 1021142 to 1022123)
cgattgcagctactctgtcttgttttgctggtatcttcccattacaatttgtttcttttcttttttcaatacaatgggaattttatggtcgattatctcgtttttcatatttctcattggaaattcgtttaggattttttttttggtatttattgcttttatttgttgttttaagctattttgttcatgaagttgaacaaaccagttattggagtttaatcgcgtctcagagaaggaaattagtgaaagaaatgaaagagaaagacatagaccgagatacctgaattttacattagctttgatataaaagtaaatggtaaaacatactataattcacgagattggtatgtaagaacaacaattgaaatggaaactaacagaaaatacgtaaagaatgttgacaagttctaatcattcaaggcgctaggctttccccaaaattaatcccagaaccagattgccttcgactcttcatcgtgttgtactcgcaactacttttcccagaatcaaaactagtctttcctgttggtttctgttttggcctttttggatagttgattttatgtttggtagttgttaattttctcctactgggtggtcgtttccttgaaaattatgcattttttcatttacccatgaaaagtttgctggaaaaagaatctttttttattcggcaaaaaaagtatttaatcactccctctaaatgtttgacgaatatttatgttaatgcggattgtcacatattttattggataagtctgctctgcttgggattagtcagaaagtgaacagccttgaacgagtttccaatagctatctgcttcatcaagatcactgatggaccatatagttctcttaataatagatggataatgaactctgggaaatggttagcgtgataacttacaaatacatttgtattaacttctttcatgtgctctcatcagctattagcagcaagaccccttgcatcttcctctgg

SEQ ID NO: 67671 - DNA, 842 bp, Cucumis sativus
  Intron number 1 from transcript Cucsa.234800.3 (locus Cucs a.234800) derived from phytozome v7.0 (chr-ID scaffold0200 4; pos 10595 to 11436)
gtggaaaattggggataaaggggagaatctattgagtatgtgggtttttttctttttctttttttttttaatttttatgaaatttaaattgaaattgacctattcaattgtcctgttttgatcgttgagataagataaggtgggtgcaattccttttgtctttgggttttgggtgttcgttttcctttggtgtttaagtttcaagtcttggagtttgattttagtccgacaactttactagttttatttcaaaatttagtttctagcttctatatctacacttttaatcttgaatttttactgaaaacttattttggttgttattgttaatgtttattaattaatttgaaatataatatcaagtagataaatttggcttgtctcgaaggtaattgacaagattttcctctttattgattcctcatcttccaagttgctttaacgaaaaaaaattatgaagtggaaatctaaacttaattttaatagtgataaaaacaacagtgaaacttagttaagcataatttttttaattatttttacattaattaagaaataaaaacagtaaagatcgaaagtaaacatttagtgaaaagttgaggttggctaagagtacctttgaaatatgtaacattatgaaaccaagacactaaattgaaatgaaactcaagatttaaagacgaaaagtgtgaggttttgaaacatagggaccaaatagtaggagaccaacaatgtattttttttctcaaaagtaaagggtttagatgaaaattgaaatgagattgtggtgactgatgattttgttttggtattgattttatttgattcgtttttggaggttttgg

SEQ ID NO: 67672 - DNA, 963 bp, Cucumis sativus
  Intron number 1 from transcript Cucsa.234270.2 (locus Cucs a.234270) derived from phytozome v7.0 (chr-ID scaffold0199 9; pos 209056 to 210018 reverse strand)
tgcttatctcctacaccagcaacacttttcccacggtgagctaattcaagccttgacatgactcttttgttctttttcttgtttggttcctgagaaattttgggggatttagttaattccacgagggtttttctttttgagtaatgaacttcagtttctgcaccttttagactgagaatgcttgtttctttactgggttttgtgcactttgtgtttttttttctgttgccttccttaagcttttggtgcttgtgttcttggttttgggagaatacatctgttgtgtttttgtttgcatgcttttaccaattgaagcaaagataatttgtatctaaatgtttggtggaatacgaatctcttggagttgcagattctgttgagtaatttcagcctctatccagtctatttgttgttgtaggaagactcccaaaagagagcactaaaattttcgtcttttgaccaggtttacaagattaggagggaggggattatggtttcctttttatttgtgtatggatttcttgttctttattattatttgttttctgtttaattttgaagtacactttgctttgtgtattcatgtggcgatcctaatattttggtgtctaagtttaaatacaatatctatatcttcagctggaaacatttcctgatcctccataaaaccgtacttttgccccgtcttggatctccattcgtctctgttcatgcatgagttggggaatctttttgcattgtaggaatcttgatagtttatctggagcgcttgtcttccatttcaaaattttgtgaaataaagtgcctggtttgaagattgtaactatttacatacacaaggttttgtatgctttagattatgacattgatacacaaattttgtgagattgttatccatctttggtgactggtaaatgctctgaaacaggattacgtgccaactgttttcgacaattttagcgc

SEQ ID NO: 67673 - DNA, 824 bp, Cucumis sativus
  Intron number 2 from transcript Cucsa.394060.1 (locus Cucs a.394060) derived from phytozome v7.0 (chr-ID scaffold0410 0; pos 138577 to 139400)
gtgctcgttttctctccatttcatccacgtttcaggtaatctccgcttccctttctctgaaattgcatttctactcagttttcaacgtattgtctttctcaataggcagcggcttccacggcggctatggcggctgtgtatatgagggttttccttactgattctgcccctaattgcaatctttctgctcccttactatctggggagaacgtagaatctgtttcatctaaaaaggaaaaatatgctacagccttgccttcactgacggaccttttttcctttttgaagactaggtatgagttcattttgggcctccaaatgcaaactcttcacttcaattattttatctgcatctatatttgtaaataccgttggaacattacacgtttttatagtctaattagcatattttaactactacctcatcatttaattggtgaattttggccatcaagatttatttttaaaaactaaatagctatgagacgggaatcaactataaactaagtttaaatcctagaaatcagtaatgcgttttgccccagttttattttttctatctgtcatcagtttttgcaattttccttcttgtcatcccattttttggtgccttgtcggcggttcattgaataagagcaggatccaataatgattttatgtagtacttgaaccaatgatgaataagaatgtattagaagtttaagtcactcactatcacttttgagttatctcatagtcatggagtttggaccaaatagtttagtggctctaagagaagattttgatcagtttcttcttaaattctcaatcctttttcttttgta

SEQ ID NO: 67674 - DNA, 723 bp, Cucumis sativus
  Intron number 1 from transcript Cucsa.313190.2 (locus Cucs a.313190) derived from phytozome v7.0 (chr-ID scaffold0299 5; pos 2397477 to 2398199 reverse strand)
aggcgaattctttttcaggttctaaacgtttatgtgaactatagtacctttgattgccctccaagtctaaagttgtttccatcttattataaatatgaagaacatgttctggtttcttaaatttggattcgatttcagctttatggctaaccagttttctataagaatagctgtaactatttcgttgttaagaaaaaccttcaagtataatttgtatagaaagtttaaggctgcattatcttcactaatttcaagagaactcattgtgtgaaattaacttagccaacttcggatggcctaatatagctctttctgtaaaagactagtattttgagcagtctagctctccctctctctccctctctctttgggtctaactgcaattcaggatttcatgaatttctgtgcaagcatatgaccgaaggaaattgtttaactatctaaataataattaaataaataaaagacaacgtatacaagcctaatcttcagtgcttatggtgataatgatattccattttgatgttttgatacggattaagtggtcgtgccattcatccttcgatattataaagaaaatattttagtgctgtttcataatatctctgattccttctcgatttggaggtcaatgcttttctagtatttctttggtgagagatgtataattgttttaataacattacagattgttaaagaacttaaaagcgtgcacagtgttta

SEQ ID NO: 67675 - DNA, 772 bp, Cucumis sativus
  Intron number 1 from transcript Cucsa.377420.1 (locus Cucs a.377420) derived from phytozome v7.0 (chr-ID scaffold0380 5; pos 103031 to 103802 reverse strand)
acgaccgagcaatcttggaggagggtcttctgcaggtttattctctctccctctcaattttcggaatatgaatttttccggtactccaatggtcaacggctgctaatcatttgaatctcttcaacccctgatttcattttcaatttactctgcgccttgctgtttttatacaaaaatctcaaggagactatatgaaaagaacatgaaattaattgtttgctttattaaataatttaagcacatgaatgaccctactaagagctgttctgtaattaattctgatttgttcattgggtatgaaactgatgttcatagtttttgtattaatttctttctaaatgatagtattgttgaagccgtttacttcgttaaatacaggcaggtgttgttaatagtgtgtgttatttattttgaattgggtgtgtgaaggttgatcgccatctttttctccttcggctcctttcttcttccctcacggatcaagcttctttaatctagcatgattatggaaggcatcatttttccttgtgattgatttgcaattggtaatttgggtggttactcatatgtgagaccatatgaattccttttttgtgggcttggtttcttggatgctcttgtattctttcaatttttctttcttaataaaaaagaagttgaatttagtaggaagacaattggaacacataaaaggtgaattgtatgcgcacacccactacttgatttcattgtaacatttactaatgcttatattttgatttccttctgtaga

SEQ ID NO: 67676 - DNA, 917 bp, Cucumis sativus
  Intron number 1 from transcript Cucsa.349860.1 (locus Cucs a.349860) derived from phytozome v7.0 (chr-ID scaffold0348 7; pos 1066923 to 1067839 reverse strand)
tcttgctgagaaacctgatttcattgtttttactggtagttcgttcttctaatcattgtttctcttattctgttggtcttgtgggatttaatttatgttcttagtttgttttgtttttctctagtttatgtttgagattgcattcagtatcttgtttgttgatttgaaattgtaaaatgtagagtggttattatgttatggagattcaattttgtattggtgaaaagagatataaacatgctttgctgattgttaaggtccgtttgataagcgttttgttacatattaaattcggacccgtttgatagtttctgtttttgaaatttatgtttatttccttcgtgagtgttgtagaaacactggaaatcctagtcaaattttaaaaacaaaaggaagtattttgcaaactatttttttagttttctaatcttggtttagttttttaatatattagtagacagtgaatagctaaacatacacttttaggtgtgagtagtcttcataatctttcttttaaagaaaaaacaaatagttatcgaataggccaagtttttttagaaaatcagtagagagtgaataacgaaacaaggaaaacttatatgtacaagtgggtgttgggcagtttgttgaggatcccacgtcaaaacttttaatgcagctcatgttttttatatgatatatgggctactttgcagagatagaacctcatgttatctaatttggtattagagtcatacagattcaagaatgataaactcaaagggacatcttatttgagactttgtgttttttattactagtagtatctataagtttaatttccaagtggaaaaagacaaactgttatccaatgagaatcaataaagctgaaagtagttaaatgtgtgaaatgttaggggacaatatctttggatacg

SEQ ID NO: 67677 - DNA, 405 bp, Cucumis sativus
  Intron number 2 from transcript Cucsa.310490.1 (locus Cucs a.310490) derived from phytozome v7.0 (chr-ID scaffold0299 5; pos 284482 to 284886 reverse strand)
aagcatcagtatcttcccgataatcttcaggttttctttctactatggatgtttttctccctcgttagatcgggtttgagcctcgctgaaaagaaatggaaatgtgttgtatgtttattattaccgaatatctaaatgctacgttttgttgtcacggagtagtcagtattaattctatatccaacatggtcataatataattgttgagcgtgcgctattcttcaaatctgggatttattggatggttgtgattttgcatggtcaccgaggattaagaaataattatattgggtttaattattttcctccaagcatgtaaacctattggcaggtcaccgagcatgtaaaccgtagttagttggttaatagtttgaattttaattttttttaacctattggcaggcc

SEQ ID NO: 67678 - DNA, 664 bp, Cucumis sativus
  Intron number 1 from transcript Cucsa.338880.1 (locus Cucs a.338880) derived from phytozome v7.0 (chr-ID scaffold0335 6; pos 1567358 to 1568021 reverse strand)
aacaacaaacgacaattctccaatgtaagttcaaaccaaattccccttcacctctaatttctttttatgttctatttcatatataactaagttctttcaatcaaactaactgttgctaatttaaaaatgataatattcatgtagttatcattagatccctccttgcccttaaaaaaaaaaagcttacgtcctatttgataacttataaatactacctttacttgttattaacattacttttacttgttattatcatacacagcctttaacaacccaatatattagattaacaaatatttgcaagacaaacatattaccacatgaaaaatacttgggctcattcgtgatacacccattgtatgtagtctactcagttatccaattaagattcgacacatagcaaaccttcttttgtaaagaaacatataataaactgttttttgctatgtagattaaagaagatgcacgacaatatgtgaaaaaatattcaatacataaagagataaaaattattatatagacgaagtttttgtgtttcaaacacattaggtagagggactaaaacgtaaatatatttaaaccttttcttcaactttttgatgacgaaatttggtgttttgcttgtgcaggttctaactttctgcttcatcatttgtacattttg

SEQ ID NO: 67679 - DNA, 631 bp, Cucumis sativus
  Intron number 1 from transcript Cucsa.342930.1 (locus Cucs a.342930) derived from phytozome v7.0 (chr-ID scaffold0335 6; pos 5236404 to 5237034)
atcaactcgctgctcttcaactagctcaacaactcgtatgttttatccatctctcacctttaacctcttatagggttaccattaacttgatattctagatatatatcgatttcttcttcttcttcatattttttatactttcactacctgagatatgaactcaactggttttggggtttagagttactagttatattttgttttgatgggaattacttatggtgaaacctttttggagtttaaattagaaaataacaatcttccgatcattaagagaaaaaggttggagagagatgattaataatttagtgatgtttgctttcctagtaatatcatttcttttctcttttttcttttgttttttcttcaagttcaagttttttgacgtatgaataattaataatgtgttgatattaattacaaaaaaaacttagttgggtgtatttcaaactgttccggttaagtatttaatacaagttatgaagtggaaatttttttctttcttttattttatatagaaatagttataatattggttgcacttaaatattaattgctcctcaatttaaaaaaaaaggattgttaattgaagataaagtagtgcaggtggaaagaaacattgacttggttt

SEQ ID NO: 67680 - DNA, 721 bp, Cucumis sativus
  Intron number 1 from transcript Cucsa.277250.1 (locus Cucs a.277250) derived from phytozome v7.0 (chr-ID scaffold0260 1; pos 441871 to 442591 reverse strand)
tctgataataaccacctttggactcaagttttgctgtaagctctctttttttctttcttttacttccatataacaccttaaaagttttacgattttactcttttgtatgtgtgtatatatatatatatatttgtaatctcttaggttcatattctataagttcttatttcatatttgagaagttttttctaaagttatcaaactatttttcaaaaacatatttttgtttcataagaactaaccatttgatttttaataaattaaacgtattttcttccaattacttaccctcatttgcatttttcttcagtaaaatatttaaattttaggtcaaattctaatctcaataactattttttttggtttataaaaggtaacctagtttgaaaattatttgtaagaattagataacaaactaaaaagtttagaggcacgtatttttaaaatcttacacaaaaaaatgaaatggttagaaaaatcagaagaaaaaacttatgtaaacaaaaaaacaaaaacaattttaaaaatccataaacaaaatagagcttaacattatatagaacagaccttaatgaaaaaggaaatctttaacttgagctaattgagtggtctgagagtcaccatgcatatacctagacaatcttaattagaaaaagagtatatatataactttacgaaattcttgttattaattttgaacctatttgcaggaacataggaa

SEQ ID NO: 67681 - DNA, 819 bp, Cucumis sativus
  Intron number 1 from transcript Cucsa.278560.2 (locus Cucs a.278560) derived from phytozome v7.0 (chr-ID scaffold0261 5; pos 137380 to 138198 reverse strand)
acaccttggagcctctctgttgcgaggtgaagatcacgatccccatctttcctattcataaggatttttccttttcttttttttcttagatttgattgtgttgtttgtttgttgacctcatgtttttttaaccttgtggcatcttaatcgtggccttaatttatgtttaaacgttatagggattaactgattgcaaattccatcatattattatatttgagtgctatgcttaatatattggtttcttccatatcgggggtttattttattatcctcctttttaatatttatcttagttttatatctcgtgtgcttcaacctgagtattgatgatcatactcctttgttcttgataattttctagagtaatatgttccttcttcattttttgtgttcaacctaacgattttaatctcttctgttgtggagaagaattggcattagttcggctttcgaactgtttcctttgatgcatgtcctcctccctttacctcttttccaatctagatcgatcaattattaacttctgaacagaataatgtcttttccatgatcatagtcctttattcttgataattttctacagtaatatgttatttgttgaatttacatttcataaagttgctgatttgtgattgactactctgacttatttgagctctgtaaacctttgagaaacttcttgtccagttaacatgttgcgctactttctcgtttctgctgtcttacatcttaacctttcaaatctaattttagttttttgttggttttgctgaaacctcagtggatataatttattgcgagacccacggcacaaca

SEQ ID NO: 67682 - DNA, 669 bp, Cucumis sativus
  Intron number 1 from transcript Cucsa.285410.1 (locus Cucs a.285410) derived from phytozome v7.0 (chr-ID scaffold0265 3; pos 1805173 to 1805841)
ttcttacgatctcaatttaggtgcgtatttaaatggttttgctcgattctttcaataaatattttgttttttgaaatcaatgtattaacatttgtttatctaattttttcgttatatacatgtaatgagtttattgttttcaagtcgaggataaacaaatataaatctcaaaatctataaaaggaaaatcgttatgaaaacataacctttgtttttttttctctctctttaatttcatggatttttcttcttcctttagtataatatttgaattctaagtcaaattaaaaaataattagacaagaaagagtttctctttttagaaaaaagaactacatctttaaattttagaaacttggctaggattttagcaattcctaagatatagtttacaaacgatatgattatatcaaatagtttattatctaatgactcttctaacaaattctgatcataacatgatggattaaatttatatttatctttgataaactgtatcattctttttgtggtcatctctgaaaccccgctgaaaatttaaagaacagaaagacatatatatagaaatttagggcttaaatatgattaaagttgaaattgaataaaacatatatatgtatatatatgtttgtaggttgcccaaaagagctgcaagtagtggggggagag

SEQ ID NO: 67683 - DNA, 836 bp, Cucumis sativus
  Intron number 2 from transcript Cucsa.247830.1 (locus Cucs a.247830) derived from phytozome v7.0 (chr-ID scaffold0220 5; pos 164169 to 165004 reverse strand)
caccagatcctgccaagacacctcctgtaagatacattcataatctttttcctacttgggcgttggatggttgttgtagctatattgcattctatctctgttgataataattaataaagtagttggcatctaaacaatgcttcttctatacctctggacaattgtttggtctgttactgtcaatgaatttctgagagtgttgattctcagttctgacagtatatttattgtattccaaccaatagttgcaagcttttagatgttaaacacatgaaaaaaggaacaaacaaccttcaaaatctataattttaagaaaagaaaagaaatatcacggtaacgagatatagtcagtataaaagggtttaatagtcagggaagttgccatcttgcccttatctgttctaaagaatgctacttgtgttcctttgggcaattggttttgtctgttgcttgcttctgatagtgtgatgtgagtgtgtatagtaagtataactctgttgagctttgttcaaaatcttggaaagtatgaaactgaaacatgttgataaagtatctagaatttagttagaaggagagacgatatcacatcatttaatgtattaacatcagaatgtctttcagtttatatgccttgttaggaactttaagttatgaaacatgaattttctagttttgttcatctttgagagggctatgattcttcttgcataaatgtcggcctttgaaataaatggtttgatcccggtgctgcatttaccccttttctttactgtatatattgtatttacaagttttctttgggtttttttctttcatgtggatgaatatcagaagaa

SEQ ID NO: 67684 - DNA, 620 bp, Cucumis sativus
  Intron number 1 from transcript Cucsa.247830.1 (locus Cucs a.247830) derived from phytozome v7.0 (chr-ID scaffold0220 5; pos 165127 to 165746 reverse strand)
acggtatgctttctctttcatttctgcctcttcaacatattattacaatttttattttttcttcttcgctttcttgctttgatgtgttttttcgatcggtttcattattacttccttctcaatttcccttttcttgattccttcccccactttgatttccctattgattcttcaattcttttgtttcccactttcatttctttattcctcttcctgggattcaagtttatcgattgatagattctatgcttgttctattggacccccataaatctggattttctaccagatttatttagttgttggagctcgtttttcaatcaataaatctctcacctgcatttaaatacggatttaactagtgttggattggaggaaaaaacctcttgattgttttattttgtttgattgattagtatcggttttggaggtatttacaaaatctgttgctataaagcacgttgtgtggtaatagatgatggtttttagatggtagattctttgtccgattagtaaggtaacgcataagattcacagagggtacatcttgtttatttattacttttttttcccctcttcttgtaggacaaaggtcggccattgccaaaatttggtgagtg

SEQ ID NO: 67685 - DNA, 577 bp, Cucumis sativus
  Intron number 2 from transcript Cucsa.313960.1 (locus Cucs a.313960) derived from phytozome v7.0 (chr-ID scaffold0299 5; pos 3100672 to 3101248 reverse strand)
tgaccccaaaaccactgaaggctctgtaaacagaggtctatttaggaaaattaaaaaaaccacccctatctatttctttttcatttctattatttccaaaaattcttaaatttaattgtatatttgattctttccatagattagaattatagttagaattttctcttttaagaaatttttttaaaaaaattctataagcataaggatcaaacatgaaatttaatttattcctacatattttgacatagatcttgtggaatacttaaacaattaaaaggaatattttagggtaaaataggaagatgattttataataaacttagctttgtagtccgttattaatagtaattttctttttatttctggaatctgagtgatgcaaatattgtattacatataaagtttaggttaaataaagagaaaaagaaagaagagagtggttgggattgggaaacagagaggtggaatttatattaatataaaaagaaaataggatttaaaagtaaagttatgttatttagagtgaaaggtaagagtgagtttatatgaatataatttgctgagatacgccacacag

SEQ ID NO: 67686 - DNA, 290 bp, Cucumis sativus
  Intron number 1 from transcript Cucsa.313960.1 (locus Cucs a.313960) derived from phytozome v7.0 (chr-ID scaffold0299 5; pos 3101230 to 3101519 reverse strand)
actctaaagccctcgttctcgttgaaagtaactcaattcttcattaccacagccccctccctcttttctcctcttctcttcttctttttttattcattttttcagctcacactcttcttcccatcaaatttattcaattttactgcgtgctctcaattgggaaattttgagttttttgtttggctgctggaatggaaatcaccggactcataaattatctttacttacttaatctctcttgttgttttcttgcagaggttccagaagttgctgaccccaaaaccactgaa

SEQ ID NO: 67687 - DNA, 620 bp, Cucumis sativus
  Intron number 1 from transcript Cucsa.368720.1 (locus Cucs a.368720) derived from phytozome v7.0 (chr-ID scaffold0363 9; pos 633901 to 634520)
gattattccatattggacgctcttgcaggtatctgatttcgtaacttgatgttttgtttaagatgaaatttctgggcgttgaaaaattttgagatacagagaacgaattaatgttttggatttgattcttggttttccattttctggttcattgttattattatttcattcttgtcattgtgcggctttttttaataccttttctggttcattgatatgattttctgatgcttctgcactttttaaacgtaagaaataagaagctgaaacagagtcaaagtatacgctaacatacaatattcttaaagaaggtttaacattttgggaactggtgggtaaagaaggaaactgttctaagttatcttaaatgaagtttaatttggattgatagtgcaatttcagcaattatgtcagattgcaaatttagtaattctgtgaactaataataataacagcatgtttcccatgtagaaattacatttaaaataattttttggaaaaaaaacaaaaaaaaaaggagttctgatatttgaatggcgttgctcatgatgattttatcatctttaatattggttgtcgtttcaggaatttaaaaacattgtttttggaagagagctcaa

SEQ ID NO: 67688 - DNA, 602 bp, Cucumis sativus
  Intron number 1 from transcript Cucsa.387780.1 (locus Cucs a.387780) derived from phytozome v7.0 (chr-ID scaffold0396 7; pos 138118 to 138719)
ggtcttgtgttgcaagccttcaggtacctcttttttgttatgcacgcaaactctttgctactttgttttgcgtataggatgtgactaacttaaaagtttggcgtatttcactatcaaaactttattattttgtatacaatggtactatttcttttgtcttttgtctttttgttgagaaattattctgtgatcctgccacagttttccatcattgtatattctatgacatatctgatggttgttagaggcatacaaattttgaattcacatccaatggttcttgcgagacagctacactattgaataatttgacctttttatgattaaaatgacttttaatgtttttcccctgtatctgttttaaaaaaaaaattgtgtcgcatatggatgaatatatgttcttccctaaccaaacaagaaatatggaacttttaacagaatttaaagttgatgcagagttaaggaaggtctgatattttttattacaatgtgttggaggatagtcggttgcttaagctttggttgtgcttggttttttgcattctcacagtaataagaaacttgtaggttgtcgttgagtcctcattacatcatcccaccca

SEQ ID NO: 67689 - DNA, 593 bp, Cucumis sativus
  Intron number 1 from transcript Cucsa.256650.1 (locus Cucs a.256650) derived from phytozome v7.0 (chr-ID scaffold0222 9; pos 4214266 to 4214858 reverse strand)
aagctaggatagaggatctagacctattgaaaaaggttgagcaaacttcccttcagatcatacaaagcatgattgtgtaggcctcatcataggcatatatagtgaggaaaaagaagaatttggttctacatgcttgttaattgatttgaagcatttgttctgatttatgtaataaactgtttgaattgaatctcatgagagctttatgacttgctcttttctagcatgtgctaatcatgaatcataagactgaaagtgactgttcttacatattttgctgtggcctgtgtttgtactggtttgctattaggttctttcttgatttttttttttttttaatatatggtatgagtgcatagattcgacatggcgttttttctattaaaatttagcaaaacatcttcttgtcagtctgtgggatctcattaaaagttttcacttaccaacttttgtttgtcttaccgattatcatccattcctgaaaataagacattaaaggttttcagttttgtatgtagttttctcttatgctaattgatttattcttttgaaaaaaaggataagcataaaaagaagaggaaaaaggagaatag

SEQ ID NO: 67690 - DNA, 696 bp, Cucumis sativus
  Intron number 1 from transcript Cucsa.386150.1 (locus Cucs a.386150) derived from phytozome v7.0 (chr-ID scaffold0390 4; pos 1348120 to 1348815 reverse strand)
aatcaatagatccctcttactttccccaatttcaggtttgcctttttttaaaaaaaaaaaaaattatctctttctaatatgcttaattaatttccctgtttctttctttcttttattttcgatccatttccatgcaatatccttcacaaatatatggttttaggaacttgtggatcttttctgattgttttctttctgggttttggatttctcgctaatttgtctttttaaaataaaatttccagatcgttctatttggcggttggaatgatattcagatcgttcgtggtggttattggtgatttgattactattgggtttctgtgaattgggtttattggttttcttaatctgtttgctgagaactgcgagaacttctctaatttggtataagttcgagcgcggaatatcttataaatggaatattatgagtatatatgcttcacagattcacactctgttttaataaattaatgggagaaggaaataaatgtttattgattgctgcgttcaaggatcggaatttgttccctgggtattgggaagataatcagaggccgccgggatattgcattttgagattggtggtctttattggtacagcttgttgattattcttttgtttaaaatttaaaaatatcaatttttgctgacattgacaaacaaagtttctttgtaatacctcatttggaggag

SEQ ID NO: 67691 - DNA, 763 bp, Cucumis sativus
  Intron number 1 from transcript Cucsa.241510.1 (locus Cucs a.241510) derived from phytozome v7.0 (chr-ID scaffold0204 7; pos 1495959 to 1496721)
agattatttctacaactacttggcaaaggaggtaaaccaaacaacaatatttgatttcatttccctaacctttttatccttaattttcaaactctttccttcattcttccctgtctttcaccaatttagtatatatattcatatatactcatcttcttcgacttcttctcatcatcgatcacctcgacttgaaaaagaaaactagtccttgagttttgtacctttcttttaatcttattatatctaagcaaaacataaagcacgtcctcatcatcttattatttccataagatgattgggttttaatacaaaaattttagtttaaacaaagtaaacattttaatgcatttttatagcatacttatcgataaaccaatgaccaagcacacaaattttatccagaaaaaaaagtcaaggagaaaaaacatccttagctagctaggccccccaatgtgatcagttttcattagcttatttatattatatttaatatatgaatgtaccaactcaaggctaatgaaaattacttcagcttatatttatctttaaattacaagttgagttcaagttgtacatgaactcttacacgagtgcttgtttgatcaggttgaagagtgtatactttagttcttcaccttcccatgttcaattttcgcatttagcagatctctaaaatttaatgatagattcttaaattttttattttgtcctgttttctgatccaataggttagaaggaaaggtggccctaataaccggtggcg

SEQ ID NO: 67692 - DNA, 533 bp, Cucumis sativus
  Intron number 1 from transcript Cucsa.367020.1 (locus Cucs a.367020) derived from phytozome v7.0 (chr-ID scaffold0362 5; pos 481284 to 481816 reverse strand)
gaggcgtcaatataaggttccttttaatttctctttttattagtagattattacaaatgtttaagtctgtgtgtattagattattacaaaatgacttaataatcacgttcaaatgtatattaagacaatataaataattagaattgaaacatcactaattttcaatagtacaaatgaggagtagaaaaattgaacaacgaatctcttagtcttcaatacacacaaattctaattgagttaagtctttgttgggtttgtcactaaatccctaaaccttcttcatagtcatgttgtgtattttcttaaaatttggtttctggacaattttctactaaatatatatatagaggccgcatttaaactataactttgcttataggttatttgttattttaatttactaatttatttttgtggcatttaagttataattaatttaacctgaaatataaatgcaaaaaaaagccataattaatgaactaatttaactatttttccaaatgaaaacatccacaggtacgtagctgtgggca

SEQ ID NO: 67693 - DNA, 842 bp, Cucumis sativus
  Intron number 1 from transcript Cucsa.213170.1 (locus Cucs a.213170) derived from phytozome v7.0 (chr-ID scaffold0154 3; pos 942220 to 943061 reverse strand)
gaaacaagtgaggaaggccctccaaaatctagaaggtaaggcaacacacatataactatagaataacatgtaaaatggtaaagaactgcgtgttaaaaaacatttttggtccttgtacttttgttaaaatgaagtgtaatcttcacaaggtaagtttataaacatgtcattttctttgttttgttaattcaactttttactcatcttttcaaaaaccaaagtaagtgctgaaagttatatattaaaagaatcgacaacttgtttttggtattggactaaaaattaaatatttatttgatgaaagggaaactctatggtaagagaatttttttaacctactatgaaactttgttgttcaaaacccatgtttttttaactcaagttaagttttgaaaattacaaaaaagaaaattaattgaagatttgtttttgttttggaatttgataaagagtttaaatattcttggagaaaagtgaaaactaggtcagaaatcaagagaaaacaaacataaaactaaacaaacaacatatttattaaacagtgtcatagttattttaagtatacataaacgtatgatcctaattagtttacatctacatgggtaagggaacctcattaagttttagtaacatatttttactatagagactagctaactcatcactcacttgaaacagtttaggacttagtcaatacttttggttaaagtaggaccaagattgtttttggtaatatattctaaattatagtattcagagcattatgaaaatttcaatatcttgagattctttggggagtagtaaaattcacctacaatgtatttggttatgttcaggtgtgg

SEQ ID NO: 67694 - DNA, 208 bp, Cucumis sativus
  Intron number 1 from transcript Cucsa.378180.1 (locus Cucs a.378180) derived from phytozome v7.0 (chr-ID scaffold0380 7; pos 568 to 775)
aggtaaggacttttcttattatttcttctttacaggtctagagtacttaggaaaaccatgtttgttttttaaaatcaaacctatcaatactacttctaccttcaatcttatttctttgttaactaaaaataatagcttttaggaagttggtttgatctcaaaaccgaaaaagtattaaatattttcttttgtttttattagcattttg

SEQ ID NO: 67695 - DNA, 855 bp, Cucumis sativus
  Intron number 1 from transcript Cucsa.197550.1 (locus Cucs a.197550) derived from phytozome v7.0 (chr-ID scaffold0135 7; pos 915691 to 916545)
cttctcctaatcctaaacaacatattcatcttaaggtaaatttatatttactagggtttcttttggtgtatatgagtacgatcagatccaacctctcactttcttaatgatgttaattacggttgaattattagtctttgtttttggaattgaagaaaaaaattcaagaaactttgtgtggttctgctgctgttttctgaactttcttggtgatgattttaccaattttctcttttccaatcaaagtctcttcatgttaattaggaatttttttgtgttatgaaatgacatattctactttgtgaagatcaatttacatgtagtttagctgttctcacttttttttttccaaacgttaaaatcgaaccaatattctgacaacaaaataaataaataaatatgtggacctattaaaaatgtattcatatagatgatcaatttgtctgtattacaataattgggttcaattttgttgttaattaacctcaactttcaagtgatattattccataaaattaaacacttatatttaatttcaataccaaattgtcctagctctttaattatagttattgaaacttagtttagttgaacaagatgtatcaagtatatatacaattctatcataaatttactgtcttgactaagttgaggtaagttcgagtttacatctcgattaaagactttcgggttgactgagagcacgataaaccctagctagctggatttgtctttctcctttaattatactgtgtgtattgtcatattatttgaattttcatcttttgtgtacttagttaatgggaaattggggttaatgaattggatatatatatatatatataggtcccttct

SEQ ID NO: 67696 - DNA, 575 bp, Cucumis sativus
  Intron number 2 from transcript Cucsa.212430.2 (locus Cucs a.212430) derived from phytozome v7.0 (chr-ID scaffold0154 3; pos 249986 to 250560)
agagactgtgactcttggtcctgcagtgagggaaggcgagcatgtgttcggtgtggctcacatttttgcctcatttaacgatacatttattgtaagtggaaaaatttatataattttggtttctcgttcggtaacagaatgatgactttgttgtttcaacaacagcatgtgactgatctttctgggagggaaactcttgtccgcattacaggtgaaacaattgaatagtttcttccttctttaaatacttgaaacctggaatttttgaaactttgaatttgggatctctctatttcttagattttgttccttccgttgtgtaatttcattgattggtccatatatgtatgtaagtaaatttaatacaagctgtagagaatcattaaaattcattgtctagagtagatgagtatgaaaaccttctgcatttatgaataagaagtgttatgctttatggaacactactaaaagaagtgttatgctttatttcttcttcttattatttatttatgttatattatttttcatgtggggtttggaaagtttaattatgcattttgatgaacgcaggtggt

SEQ ID NO: 67697 - DNA, 295 bp, Cucumis sativus
  Intron number 2 from transcript Cucsa.302080.1 (locus Cucs a.302080) derived from phytozome v7.0 (chr-ID scaffold0295 1; pos 298400 to 298694)
agtattcttattctttccctttttctttgaggaattaaatctcttcttgtttataattacgtgggtttgatatggtggaacgtttatgaatcttcaaatgaaagaaacaaacaaaaagtggaatggaaagtcattcattacctttttgacttttcaaagcaagaaaaaaacaatgttcatcctatataccactataacatgttctataatgtgtgtttttgttttgttttctgcttctttgcaacttctgattgtgcttcttgggggaatctacttgtttctggttcagatccta

SEQ ID NO: 67698 - DNA, 334 bp, Cucumis sativus
  Intron number 1 from transcript Cucsa.237870.1 (locus Cucs a.237870) derived from phytozome v7.0 (chr-ID scaffold0202 3; pos 576102 to 576435 reverse strand)
ctctcccgtcaacgacgagctcgccaagtggtgtaagtccacttccacccatttacatctttccactccaataaaaatggttcgctcgaaattaattatataccaagtttatcgagttttctttttgtaatattgaattattttaagtattttgtttgaatttaattacttctttttcaagttcaacataactgccagagcaagaaatgggatgatttcttttacaacaagtctctaatggtcatatcttttgtttgtacatgttttctcaacttgatgttaactatgctcttcgacactaatttagggccggatagaaggattttcttgccag

SEQ ID NO: 67699 - DNA, 618 bp, Cucumis sativus
  Intron number 1 from transcript Cucsa.200860.1 (locus Cucs a.200860) derived from phytozome v7.0 (chr-ID scaffold0136 7; pos 4271 to 4888 reverse strand)
ggattcttagaagtcttgttcctggtgggaagaaggtggggtctttttttcctgccatttttagttattaggggttttgattgagctttgtttcaatttggggttttagttttgtctttaataatataacaaaggagagattagtccaagacactgtttatggtaaggacgtattaaatgttctaattaggatatgcttgttgggtcatttatgtcttgtttgctctaaaatgataagataattgagaatttttggaatgggtaaacttattctagtttaagaaaacttctgtcatgacttttgttcattcattcacagcatctacttgttttggtgttagctgacatgatgtcattcatttgactttaaattgtatgaatgaatattcatgttgacgaatggtgaagacatcatctatctaaaggcttctgttaagttacttctcaattttccatatttaatgcaccaaccagatttatttatggatataagacaatttctagtatctctttcagtatgttctttatctttgttcaagcgaactcttatgagatatggtcttgttttatgcttgccatgattatcattctgactttctgtgtttattcaatcatcag

SEQ ID NO: 67700 - DNA, 528 bp, Cucumis sativus
  Intron number 1 from transcript Cucsa.257680.2 (locus Cucs a.257680) derived from phytozome v7.0 (chr-ID scaffold0222 9; pos 4890358 to 4890885 reverse strand)
tgcagcactgtgaaaggaagttatttctgtcataggtcgtaatctcttagtccttcgtcgcaatttttcttgattcttccattttttgtttgttcattttattgccttttgatttctttattttctataaaatgtcgagtgataactaactctttttttttgtttgttgggtgtgtgtttgtttttgaatttctgtttgtttggtaattttgtggttgagtgtaataagagtttagatcgttcgacggcggcggaaagttctggtcggaattggcggtggatttttctttcattttcttcgcaatattctgcatgatcatgtattgttgagtgactttgttttcttaggtttgatggattgtttgattttactttacttccttgttcgtgttattcatcgtagagtgaaggggattttttggtttcttctattattgttcttgttaagtcttaaaaaatgaggtaagaactgtttgtttaattttgtcatggtattgactaatcttcttcttcttcttcaaagcagga

SEQ ID NO: 67701 - DNA, 726 bp, Cucumis sativus
  Intron number 1 from transcript Cucsa.237920.3 (locus Cucs a.237920) derived from phytozome v7.0 (chr-ID scaffold0202 3; pos 606829 to 607554 reverse strand)
tctcaacctcctccatccacgtccaacttcatcaggtactccatcctctcatttccctttttccattttcttctaacgatttgctcgtttctatgtgttgttttggttttgagatgtgtagatttccttgatgaaattcatttctggttgtggttttgttgatgtgctttattttttgtaatttcttccaaggattggttgaggttcgccttctgtgttgtttttggagttaatggttttgtaattgttttaagctgcgaaagtttttttttatttggatcttcttgatggaattcatttcagatgtatgatcttgttgatgggtctacttatttgattctactgtcttctctactttataatttgtttccgaggattgattcgccttgtgcgttattttcgagtagatacttcgatgattgttttaagttgtggagattgtttttagttttgttattcttgatgaaattcatttcagacgtgtgattttgttgatgtgctttcttctttatactttgcttcaaggattggtttgcctcgtgtgttggttttgactaaatgcttcgatgtctgctttaagctgcgaagttttcttttggtttagatcttcttgtcgaaactcatttcatatgtgtggtagtagtacctctgaatttctagctgtattgattagtttgtactatacatctagaaagaaatcgttggagcagatttttggatcggtgc

SEQ ID NO: 67702 - DNA, 475 bp, Cucumis sativus
  Intron number 4 from transcript Cucsa.383600.1 (locus Cucs a.383600) derived from phytozome v7.0 (chr-ID scaffold0388 2; pos 603090 to 603564)
ttgttcgtgccattgaggttagagaatatgcttatatactatcaatgctccctgcatttaggctcaaatattaatttgtttcaacatgtaaattcttaatatcaattggagagaaaaatgacattagatgggtgaaattttctattctagtacatgttaaattatcattaggcttggaggcttaaataaacttattggtttatgtacattttaacacgtaaatgtcatcttaatatatcaggttgagcataacttaattgatttacaaatttgcccttgaccaagaggtcagaggttcggagcttgtcacctaccatgtcgttgaattcaaaagaaaaatgaaaatacttcttcattgtgttgaagcagtctctaaactatacaactggcaacttcattttgatactatttctgttctcaaaaggatgtcttttatgatgttttgtagaatcatattagtctcttctctggttgg

SEQ ID NO: 67703 - DNA, 364 bp, Cucumis sativus
  Intron number 1 from transcript Cucsa.289240.3 (locus Cucs a.289240) derived from phytozome v7.0 (chr-ID scaffold0269 8; pos 682012 to 682375 reverse strand)
tgtgtgatcgttgtcagaatactgaaataagcattgtgagaaatttcttgttgattgtaatttgtgagtttttttttatacattaagctttatagagctgtatttcgattattatattaccgattgtttattgtagaagtcgttgggatgggtttgaataatttaattgggtttttctttgtttgtatatggattcatgtcttctgttattttgtttaaatcttggtttctttgattacgtttgatttgttttcttttcttttatgcactagtccccagaagtctctgcttcaatctttcttgttctcttttgtatttcgattgtgcaggacaactcttcgataaaatagctgagtgaattagt

SEQ ID NO: 67704 - DNA, 370 bp, Cucumis sativus
  Intron number 1 from transcript Cucsa.237930.1 (locus Cucs a.237930) derived from phytozome v7.0 (chr-ID scaffold0202 3; pos 622249 to 622618)
tcgatttcatttctactttgccggaaaacgaacaggtaattaatgtttttattatacgttcgtcgttttcttttttttttgttaatctctgtgtggaatccatcgttccgatctgatttccgtcgttagattagacaattactataagcctctgctcgatttcatctctagtttaatagaaaatgagcaggtaattatattattattattattattattattatacattcgttgcttcttgtaatttcattttcgtcttcggatgtgtcgttcttcaatcgattgcgatcgagtgaagttctgtttgatttagagatcgttgaaaacttttgcagatcattctggttggacatagcgctggaggattaag

SEQ ID NO: 67705 - DNA, 671 bp, Cucumis sativus
  Intron number 1 from transcript Cucsa.339300.1 (locus Cucs a.339300) derived from phytozome v7.0 (chr-ID scaffold0335 6; pos 1945571 to 1946241 reverse strand)
tttgcagctttacaacccgtcctatcatctcaaaggtaattcaaatcccctcttccacttgctgctgaattttgctctaatctgtttgatttttcgtcgatagccaaattccagatctacttctgttttgatatccgcagtgtttaaagccttttagtttattcgtttcgtttacccttttgctcaaattgaggtgggtctgtctttattcgtgtcaataaatctcgatctagtagtgaatttgtgttttgagtgagcgcgtagagtttatgttattgtttgcctgtagatattgagaggagcgtttattttgcaactgagtgcaggataattcatttttagcgtttgattggaagtattatgcttcatatgcgttgttgttttgttagatctgcaatgggtacctttaaccaccgaagttgtaaatgaagaatgtgaaaagaatcaaccttttaattgttgtcgtctatagttgtgaaatattgattatattggctttccttttataactatggaattttccttttaattaattttgtgaagttgcatagactttgcatagtgttttgatatagattattttctatcagagataaatatataaggatacttgctagagattggaggagaagggttaaaggaattggtagagtgaaaagaaatcctgtaca

SEQ ID NO: 67706 - DNA, 394 bp, Cucumis sativus
  Intron number 1 from transcript Cucsa.237610.1 (locus Cucs a.237610) derived from phytozome v7.0 (chr-ID scaffold0202 3; pos 419129 to 419522)
gtctcagcttcttctgatactgattttgaaactaggttggttattggatattttgtttttgtttacttgtaattagatagatgtctgtgatttttacaatctgggtttgtctatattgatttttcctttattttgggatggatctggtatttgggtatttgggtatttgggtgtagctttgatcgtgggagttttagtgggatctgctccttcgtttgctttttgtttcttttctgtgggtgtgaatttgggtgctctgatttgtgtagaaagcaagagttgctctttcttaatgtgaattattgtattctatttggtatttggagtttggtcgtaacgaagatttgttcctgatgcagggtggtatcattttctagttgttgatcaatcagtg

SEQ ID NO: 67707 - DNA, 864 bp, Cucumis sativus
  Intron number 2 from transcript Cucsa.237610.1 (locus Cucs a.237610) derived from phytozome v7.0 (chr-ID scaffold0202 3; pos 419688 to 420551)
gagttggctgccaaggtacgcatgctttaaacaaattattttgatgaacttaatgaagatttgtttgaatttagaagtgtgttgaaactgattgcactattctcttctgattttctgattctgactgagcttttttatcaatttctttttatcggttcgctgctttcgtgtttcctatatataatggatttcttcaaaacgttatgagtaattgtgtcattctattatcacttcttttattttccaatgcgttggttttataagattcaaaattgtttaagttcccttgtattgcaagaagtttctggtgatggttttagtctcgcaatattgggttgtgaattttattaatgctgattagtgatgaggtgaagattttgatttatttaaatttccgattttgattttgatgctcaattttcttacattcaaataaagaaacaatacagattgtgttttcatgcttgaatgtttcaatatattgcaacaagagtaataaaattagtggggaatataatcatataattgattgtttttgtagttatttattacagaacaattaaaagcataattgtcaatccttctctaatgaagttcaagcataatctttttcttttttttggttaatactcgtgtaagttagttttgagcggttgaactgatttgcctttgttattaatcaccatactggctaagttaaagacttaaaagttttttccacattagtagaataacctatatggcttgccatttttttcttgcaatccatgatttatgtaccaaacttgatattgatagtatcactaattgattatctatgctcttctttcttttgggattcagaagaatcaattttacttcctg

SEQ ID NO: 67708 - DNA, 569 bp, Cucumis sativus
  Intron number 1 from transcript Cucsa.251530.5 (locus Cucs a.251530) derived from phytozome v7.0 (chr-ID scaffold0222 9; pos 585818 to 586386)
ggagaaaaggttttagtaaggtggagtttcaccacattttcagaaaatttaatcttgttgctcattgcttgcgaaatggagtgtgggaaaggggtcttgtacttggttttcttgaatactttcttggattaagagggcctctttcaaagattttgattctttgtggtatagccatggtggcttttctgtttaattgaatttacccgttatctcaaaaaaaaaaaagaaaagaaaaagaaagaacaagaaaaagaaaagaaaagaaaatatgcctaggagtggaaacatagacggtatttatataatataggtatgtaaaaaactaaccaataaccactataataccactaaccttaaagatactttccactaagccaccccgctacattcctcctaattgggagccactaacattaatttaaggaaaaatatttgcattaatttttaactgaaaagatagaagaaaagactaattttccatgatatgacctatatgcttttatataaggcctgcatatactaaaagttgcaatgttttcaggtgggcctggaagtggtaaaggtacaca

SEQ ID NO: 67709 - DNA, 910 bp, Cucumis sativus
  Intron number 1 from transcript Cucsa.197640.2 (locus Cucs a.197640) derived from phytozome v7.0 (chr-ID scaffold0135 7; pos 965844 to 966753 reverse strand)
gccctccacaactctacttcttcctcaggtattcttctccttcctatcatggggtgttttgctttgttaattttttgaatattggcgatctcgatttgggaatttaggtttcaattgatcgtaacaagatttgtatagtgagagttcgatcgaatcgattcatatgctctaagttacttttttttttttccatttttatacggttataagttaaaagcaactaaattaattaagtagaattcttctcttgttcagattttaatgtacacctgaacgcttagcggcacttaagatatttgatctgatacaatgtaatagaaggataacagcacattcataagaaatctgagcttacactttgatctgatatcgtgttgttaggaattgttgttaaaaaagaaaaattaaagttataaaatatttgattaaaaaattaggttgttaggtgatggtgaatttagtcaaattcattaccaatatctaacaatacttaaaatgtttttttggttgtagggtttttctactaattacttttttcaatcttgatttttttaggcgtttttatgtcgaaatacaaagtttccttttataaattgctcttgaatttactttaaaagtttcaggaaattggtttggactgtggctaatttgaattcctaatctctacatgaccaaaaaagctaacaaaactgctttgtacttgccattttttcgaagcttttgtgcttgttgcaaccatgtgtcatgtcatccgaagaatctaatattactacttgcaattctataaatgcgtttaattttacttgggtttaatttagcaaggtatatgaaatgaagtctatccctttcctgataacgtctatcagattcttcagtatcaaattctgagttaagatcaaagttatacgat

SEQ ID NO: 67710 - DNA, 543 bp, Cucumis sativus
  Intron number 1 from transcript Cucsa.366860.10 (locus Cuc sa.366860) derived from phytozome v7.0 (chr-ID scaffold036 25; pos 356032 to 356574 reverse strand)
ggttttgttgaaatctcagaaattttgataaaaaggttagttgagcgcgttatccacgaatatctactgtttttgtctgtttgatttgttattttgagctttattcgcaaagaagaatttgaaacagggaaaaagaaatgataaatttggtgagattgctctggtatttagctattgtgtgtgagaaagagatgtgcctcttcttgttatcatgtgcagggagcgagtgcgagagatttggggagagtgagcgagcgtgggtctttgagcgagcgagcgagggagcgaggaagaagaggaggagagagtgatatactttttcacttttagggttcaatttctctgccttacctgcgcccattcatcatggatcggaagctggtggttagtattttcttttcccctattcagccacgtctttgtgatttttcagccgtttcttctattaagtaatctggtttccccattaggtgtttttttttttattaccgatttgatttgctctgtttatttcttttatgaaatttaggttcttggcattcc

SEQ ID NO: 67711 - DNA, 979 bp, Cucumis sativus
  Intron number 1 from transcript Cucsa.253920.1 (locus Cucs a.253920) derived from phytozome v7.0 (chr-ID scaffold0222 9; pos 2375968 to 2376946)
tggtaattattttgcttattgatttggattgttctttaatgattgtgttttgctcaatttgttcttagcacttatcatccgctagtaagttggggaagttagaaaacagcgttgattgagttggttctagactctacacttagaaaggttatgtgatccaatcgtttgttggtacttatttatttgttcaactggatagtttgtttttatttaaattccatgaacatatggttgcgagaagtttttctttttccactgaaacaaaagagaaattggactagaggagcatgtccccttggatggtataactaggattgagtttccaattgcctatcatccagttaaagaattcaagcatcctatttatttttatttacaaattgtacggaaagaagttgaataagctattagacttgatgatgccaatttataatgtaatggacttcgaacaaaaaccccaaggtatcaattctctacttttaattgctgtgagtttggcttactagttaaagaggcaagttgtacctagatctgtttgaattcatagtacctaataagaatgtttacatcgaactgccatagggttctatggaagaattagtcaaggaccaaggatgtacgtggacctgcacactcatgcttatcatagaagaaatgagatagttagacagcaatcctttggacaaattttatttagagtttgatgtatgtaaatgtgtttgtggatttgggaattctctctcattttccccttatgttacattcagtttgtactgttttattaagtccccttcaattgcaacctttacatttgtatgatgttctcactctctttttccaacaaaaaatttggcacttattgtgtgttttattttaagttgtgtctattattttcttaatgattgtatgatggctaaaaagatatattacgtatgaattttcaggggttataagcgttatttcaaaagaactcttttag

SEQ ID NO: 67712 - DNA, 912 bp, Cucumis sativus
  Intron number 2 from transcript Cucsa.240310.1 (locus Cucs a.240310) derived from phytozome v7.0 (chr-ID scaffold0204 7; pos 260170 to 261081 reverse strand)
tttccgccgttcctaggtcaaccactccgggcaaggtaatttactgattgctatttaaattcgaattgtctcacgcttcgggaaattattggtggaggttggaattatttattacaccagtctattttgaaagagtatatactttttattaggacatattgattttgaattgtcatccaactatcgtagatggggttggttgctgacttacttcagctgtaatgcttaaacgtttctaacattaaattttgagggattagaaggttcccctagaagaagctggttctaatagttttataaatcacaattactgtaaactgccttgtgttcaagtaggtgagttatcttgtgcttgttcagtttttctttcttctttttgttctattagtaaggactaaaactactagaaaacgtggcaaatggattgaactatgaaacatattctttattttaatataatgaacgtgttcaattttctattgaagtaaaaaatactagaaattaatcgatgttgttttcgattgcctttcttagtgatcatatatttagtttacgatatacttatgatacccattttagcttgaaaattatgtttaaaagattcagataaattactaataacgatgatgtggatgaaaatataacaataaatttatatatttttgggttcaatccagtaactgatagcacaccatgactgccggattcattttcattggattgtttgtatttgctgttttgttctttctctagtgtttatagttttctaataggttgaactcattgataacctgtaacgtcatgatgacggtgttatcttagtaaacctattgctcagtttctatatttcaaatcttatctttaataatatgctgttttagatcaactatatattaggaggtgtagcacgga

SEQ ID NO: 67713 - DNA, 762 bp, Cucumis sativus
  Intron number 2 from transcript Cucsa.343000.2 (locus Cucs a.343000) derived from phytozome v7.0 (chr-ID scaffold0335 6; pos 5293602 to 5294363)
tttgccacatctcaggttcattacttcttcaattactctggatcaaaatcttacaatataatatggttagctaatatggaatttaaaatacttaagttaaggtcactcgtgaacttgaaaattagcgtaggattcttgaaggggctgtcaatactaatcgtagagaaaaatgacattattagaggtcaaataactctttaagctaccaccgaatcaagaaactttaagtagatagattgttgtcacttttgaacgttaaaagtagcatatgactcaagaggagattgtcgataccatctgatcgaaaaaatctttaagtagataggttgcagtctctcgtgaacttgaatattagcacaagactcaactgtcaatactaattggataggaaaaggacattacaagagattgtgtacaatctttaactctgagatcatgttcattttaagctaccactaaatcaaaaaaagagactgtcaatactgatgagagagaaaaatgacattatgagaggttgaatacgatctttaactccaagatcatgttcaatttaagctaccactgaatcaaaagactacaagtaggtaggttacggttagtcgtaagcttaaagaactcaatcaatattaatttggtttggagagaatatcatgttaaactggatttagcaacttattgatatccttagcatcatctgttaactatgaacttccttgttgttctgaaggagctctttgatttcattgcttctggtctggaaaa

SEQ ID NO: 67714 - DNA, 672 bp, Cucumis sativus
  Intron number 3 from transcript Cucsa.312510.2 (locus Cucs a.312510) derived from phytozome v7.0 (chr-ID scaffold0299 5; pos 1909135 to 1909806 reverse strand)
aaggttacttcttctttttgctttattctttaatctgcaattaaaaatgaatctttttttactgccataataattaaacgacaaaaactttgctaatcttttaagcaacataccaaagtctattatcttgatgacccgatcatcgagaccttttgaaaattttgctctgttgtctgttactttcatctctgctaatgtcacatctattctgatctgtattttcccttctcgaggaatgcaaaagagcaagatttattaagtttgagaatcatggagttgtaaatttaatatgactactcaacaaagatcatgcattattatttctttaaatgataacaagaggacagggaacatgagaaaacaaatattaatttcttttggaaggcagattttttgtaggacagttcaaagcgtcctggaatagagatgaatatagaatttgatttttgaaaattatgtttctatttcaagcaaagttttgaaaccaaagaattagtttttgtttttaaattttgctaataattaaatcatagatgtaaaccaaaacaaacattattttagaaaataaaaggcgaaaaaaatttcaaaattgttattctcaaaatttctgatttttatcaatgtctgttgtgagcagcctggtccggattccattggaatcgttgctatttc

SEQ ID NO: 67715 - DNA, 742 bp, Cucumis sativus
  Intron number 1 from transcript Cucsa.242190.1 (locus Cucs a.242190) derived from phytozome v7.0 (chr-ID scaffold0204 7; pos 1978472 to 1979213 reverse strand)
gccagtgatagcattgagagaaatatatatatagtttgtttggacatatgcgtttattataatcaaatttcatcattcaaggggaaaaatgcaatttcgtatagtttaggcattagatattaaaaactataaatagctctacatatttaaattgaaattgtggtgtatgatattgtaccaaaggcaatgtactacattagttcaatgaaaattgcttgaaaatgaaatagatctcttaggatacgaaaaatacgaaacacgtgtacggttacgatggtagggttgtttgagaatgattgatgattgatgcttgatgagatggtacaaaatgtttctccttttaaaaacttaccatttcaaaagtctattaatatcatggacacaaaagatgggataaaggcaaaattgtcatatgccatataacataagggtgtttttggtactaaaaaacaaactgtttcttcctcttattgctctttatataagaagtgaatgtgcaccattgaaggtgcaatatagattgaaccacttctctctctctctctctaacttcttcacttctgaatttccactctccttcaacatcataaaaaaggtaaggtcaatatgaactaaataaatatttcttctttcacaatgatgaatgtcaacaaaccaatactttatgtcaacactctcttcatgttatgtatatatatgtatatctatatatcataactagctagggaagttggagagcaat

SEQ ID NO: 67716 - DNA, 871 bp, Cucumis sativus
  Intron number 1 from transcript Cucsa.257020.2 (locus Cucs a.257020) derived from phytozome v7.0 (chr-ID scaffold0222 9; pos 4428048 to 4428918)
tcccctccctcttcgcgcgcgctccattttcaactgtaagatttcatgatctcaaatccttcgtttcatacctttcttcattgcattacttcttcgttgatctctgcattgcctttcctgtttccgctttaattttgctcctgatttgtctggatccagttctgtctttcttctgccgttgttaattcgtatggaggattaagaaattttatagttactgaggtgttacttgtgttttttgacttcgtttcatgtttactttattagatctggctttgaaatttttttaccgccattttttggtaggcaaattgagattgaactgataagtttttgcttgttcgcttgcatttcctttgttctgtttgttctctaaatgatgattatgttctattatttgttggcttgttttgacctaatcttcattgacgagagtacgattagtgttttgaatgttgtgaagtagtgcatgcctttatttctggatcctaaatgttgatcttatactgttttatttgtttatatggataaccacgtcaggcaagttggatctgtaagaaatcggttaaagctgatatgatattcatattaacgtttggaagatttcgatcggtgtttttttcttcagtgtttgaggatttagagaataagtagattgaggatatatgattttatgtcattcacgttttaacgatttatgtactgtgcctattgttcttccgacttatctttttaatttcagcatgaaagtcatatatcgttttgattcaatttcctgttctcttcttcttgcttgagtgctcaaacctgattttgaattatttatatctggtttctgtgtagatagttagttctgtttagaatcagtgtc

SEQ ID NO: 67717 - DNA, 619 bp, Cucumis sativus
  Intron number 3 from transcript Cucsa.391610.1 (locus Cucs a.391610) derived from phytozome v7.0 (chr-ID scaffold0406 2; pos 56291 to 56909 reverse strand)
aaacggaatcggtaaacatcatttctcccttatgttcattatttattattgtttttgtttctgttcttggatagatcgatgaaattatattggcgaaatttgcaatatgagtttggattttataatatagaataattaggtgaaaattattgtttatcaaacggctaacctgtttttgatcgctaaagtttatttgttcttattaggttttgttttttcttctcctttcaaaattattgttgcgttgttggttggtttccttcctcacgttttgcttgacttaggaatcatatcgttttactcgaaatataataacatactatttttgcacataaaatctttttacattaaaataattggatttttgtaacatggtattattattattgatttaaattataagtttagacaaaacttttcttttgggtcctgaattatttaaaaaagaattgacctttatgaactaaactttaagttgttcaatgatgaatgtgaaataaaaacataacaaaaactagtatagtcgttgattaaagatataatgtatattaaccataagttattgtttaaattgaaaaatgtagaggaaactgaggaacaggaggataagaaaagagag

SEQ ID NO: 67718 - DNA, 779 bp, Cucumis sativus
  Intron number 5 from transcript Cucsa.348940.1 (locus Cucs a.348940) derived from phytozome v7.0 (chr-ID scaffold0348 7; pos 336637 to 337415)
actacttgtaagcaaattcaatcctcttttcattcttcattatttttatttccttacctatttagtgtttaatataacgttcaatctcaaaagagcgtttgaaatttgatattataatttaaggttataataatctgtgttccttacctttattattttagtttgagttctactgttttgtatttagaaattgtatggatgactcgtatttagggttgatttattttagtctaagttattgataacctgtatttaggtgaaaatcattttaacctatatcgataaatagtaaatcagataacaaagaaaagtaaagaaagtgctaagaaacacatttgaaatgacaattttataacaaagcatcaaatattataattagagcttcaaacataaaatgagatacctcaattcaattttgcatcgaataggttgttctttaataaatttgtaatattgtataacgtgtaaatatcacgtttgacatttttttaaatcgaccattctattagacaaattgagtttacatgcttttatcataaatatttttaaacaacaattcttgggtaagtgactctaaactcattttagattccaattttcacctaagatttttttaaaaaattgttcttatgataatgattataaaaagttatgtagaatattataaagttcttaaaagaataattttgttaactttgtttgcaatttagccattaattttatatgtaattatgaaagaatgtgagtcgtggcagattggcggaggcccggcagccatt

SEQ ID NO: 67719 - DNA, 976 bp, Cucumis sativus
  Intron number 1 from transcript Cucsa.311140.2 (locus Cucs a.311140) derived from phytozome v7.0 (chr-ID scaffold0299 5; pos 794303 to 795278)
tttcctcctccagactccgtcatttcaccaccaaggttctcatattctacctattattcgttctatccacatttcttttatgttcaataaatgtttaaactgttgcgtttttattcatagaatcatctggcagcaagtattttgaaagcttatccggtaatgatcaataatatgtttttgttgcgtttgaagagttacaattgctgtagcgtttgatgttcgacttcttggttacttccgcttatttgttcgttttctaattgttttagagtgaatttatatatttgtcgcgttcgtagtgtgtttgtctaccgatttttatttgctgtttagtatgttgttttttgaattatttaagttatattcttactttagagctctgtctcgcgcatatactactcttagaaacttaagtcacaacggtcgatacaatctccctagagaaaagctggaagagttgcaattttcatattggcttgtgtttggaattattcaagttacactcttacatgctgattccgaagtataaatttctggtatttgactttttggttacttccgctcacttgtattttttctgaatgtgttggagtggcttagtgaatttatgtttatatggcagtgtgataatttgttttctatcgttggttgtgtttgagttttttaattttcagactaatacactcctgtttatggattcgtttcggacttttgcagcaaatgttagaaatggaattttatgaacattttaaaaacttatccggtaatggtcaatcatatgtcagaaggaaaactattcaaagagttgcagcgtgaatgtctgtcaatgctttctgccatttgacaattttagttactccagttaatttctcttttttctaagtattgagcagtcgcctggtggtgatattgtgttattttgtttggcgtttgtgttacagttgcagggcagcactcttcaaaattatactagcaa

SEQ ID NO: 67720 - DNA, 625 bp, Cucumis sativus
  Intron number 1 from transcript Cucsa.374640.1 (locus Cucs a.374640) derived from phytozome v7.0 (chr-ID scaffold0373 5; pos 92316 to 92940)
ccttacagcacccctttcctcagaaatctctccaggtaatacacttcaatgctctccaattttgttcatgcttactgggtctttcttaatttcatctgttttttgatccccactttttgttttttgtttttttggggatttgattttgttgattctggctctagtttcgcctctttgtcgcatttgtttttgtgtttctgaatgtgaggtgtggattttgggagatcctaaactatggatttgtgtttcttgtctgtattttcccttttgctttttgttgttcccctttgcttttctttatggtttttgtttttcactttcccattgacagcattgatagtgcttcttctgggaatttcacttttggagtttattctggttttggagggttcaagttgtgaaccccggttctttcatgtcggttttatgtcttgtaattttattattatgtggaatttcttgtttctctctccttctctttctctctttctctatttttgttgttctttatgattgaatgtttcagcttcttcttgaatcctgaaatttatggtttgaatctcatctctcattccatctgtcttgatcagggtaatctagaacttggaggattaaatttctccat

SEQ ID NO: 67721 - DNA, 917 bp, Cucumis sativus
  Intron number 2 from transcript Cucsa.242960.2 (locus Cucs a.242960.2) derived from phytozome v7.0 (chr-ID scaffold02 047; pos 2566104 to 2567020 reverse strand)
cccaatcttccaccaatccgaatagcctctaccaggtatggtttgtttctttgtgttatagctgttctggaaatttttgttgtctttatatctgttgctcgattagccattttatctcgtgattcttttgccctaaatatagaaggggctttttttttgtttcttttgcgaagggaagggacgggggtttagggtttgtttatttacggtttgagttttcgtataatcgtgataggtgttttcgtctcgtgatgtgtagctgttggtgtttaagccctaattttaggaggaggaaatggttcgtgctcaaattcctaaccttgaatttggtgagaattggatggttttgaggtaaaagcagagttaattggaccacttaatggcgtttaaatgaaaagaaaaggggagttagaggttcgctagagaaggatatggagggggggaaaactactctaaccactcgttcattgtctaagaagttgaactacgcttagaaaatgagagacagagtaaatgattagctttctggttctgttaagagtgaggaattcagttgcccagatcaatgaaactggagaggatcctagttttcgtttcggctttatgttctggtagtttgtttggattgtgaattaagaatatttcctgcacaaatttagttgttcaaatttttttttttttttactgatacttgttatttgaccaccgggattttgaacttttaactttcgtgtactttctactttaataatgagttacaacaatttattattctgaacgtagagggtcaaagaatatattattaactaagtgcaacactacaatgtagtttccagttgttgtccttcacttcctaagtttgattaatgataatgcctgcagattcttggagtggagaggacagcttctcagccgga

SEQ ID NO: 67722 - DNA, 885 bp, Cucumis sativus
  Intron number 1 from transcript Cucsa.357620.1 (locus Cucs a.357620) derived from phytozome v7.0 (chr-ID scaffold0357 8; pos 847009 to 847893 reverse strand)
aaagctgagctaccattacaattaacaaaattatagtacgtttctttctttaatctctctctctctttcttcttactgatgcatgattatgatgactttgattatggtttatttgctttatttgttgcttcattaatttactcttacttcctcactcttagatctgtgtttcccactgttccaagaagatccccctgctcaaatttccccctttttgcttgaaaagctcgattcgacccgtgcaatgcttctctgattttgcttccttccaggtagtttactttcttgaggcttatcctattgggtttagctgaaatgggttggggtccaaaggggaaaagggtgtgttctgattgagcttcaggagaaagtagtagggaaaattcgcctttgaacggcctttcttggctggttttcttattcgcttttcacttcgtcttcccctttgctttggggttgttgataaaatgttatgttgactggtttaattcaaccctactggcggggttttaaagttcggtgagcttgaaatttggctttgcaatgagaacccacacgtatgcaaattttccttcaagatttttagaaacggaaattggggcgttaccgttctttattgagtgcattgtttatcctagcgagcttattcaatttttagactgtttgcgaagttattatacgttctcaacgcgctgaaggatggccttgaattaggaatttatgattcccattttttgctgattaaccttctaggttttctctccatctgaccccacgtttaaggaattgcatttgcgattcttacgagattgagataccgaaattgttactaaaaaatctttgatgttgttttacatcacattttaggatccattggaggtggta

SEQ ID NO: 67723 - DNA, 1055 bp, Cucumis sativus
  Intron number 2 from transcript Cucsa.363800.1 (locus Cucs a.363800) derived from phytozome v7.0 (chr-ID scaffold0361 1; pos 1395387 to 1396441)
tcctcaaaagggtgtgaggcttcttacgcttacgggtcagttctgctgatacttttagattagcatcttctgtcatatactatatcattaagagactatgtttcaagttgatgaattcgaatattcaatgctagtgaacattcaatgattttaaggtcaaattgcaagttcagtctttgaacttgtgcctaaccgttaatgaactttcaactgtgtcaacaggttattgaactttaaaaaccgtttaatagatctttgcaatttcagttttgtatctaatatatcattgaactgctggatactttgagtctactggacacaaaattgaaagtttagtattctatggtacactaaatttaaattcatatctaatagatcattatttttttgaatttatcccggacctattcgacaaaaaattaaaattttttggacctattaaacaattttaaattttagtgatttgttatatataaaattggaaatttaagaacctattaaacatttttcaaagtttaaaggccaaatacacacaaacctaaaagttcagggagtaaacttggaatttagacttatgttttctttcttttcttgaagagaattttgtctatacatgattccacatctatgtacctatatctgcaaaaatatgattaatgattggtaaataaacgttcaagtagtacttatcaagaagagagttcacccaaggatgttaaaccttacaaagtctatgtgcaaaactgtacggcaaaaggaaaattcaagatatgtcaactggtgatggcttagtttataactaaaacttggaaatacaagatctactgaaattatgaatttccatggaaaatctggtggttggaagtgtagacaatgacgttgtgacttggttatttctggtggttgaacaatactgtgtaagctttgactgagttgtatatatcgtctttgactgtgaataagcgagaaagctttcttcatgttaaatcataaaccaaatgacgttttgattatgatcaggtggcaaaaaattgttaacacctcagcctcggttg

SEQ ID NO: 67724 - DNA, 1000 bp, Cucumis sativus
  Intron number 1 from transcript Cucsa.338180.1 (locus Cucs a.338180) derived from phytozome v7.0 (chr-ID scaffold0335 6; pos 1166536 to 1167535 reverse strand)
acttctcaagctttgttcgccaacttaacacctatgtaagttgaatattgttgtgtttatacatgtaattcattcttttctcaaaattattgtcttcaattacttgaggagtgaatctatttatctacttgtttcgatttcgattttggtaggtttgatttagagttcgtttgattacgattttgttataataatattgcaaattggtaggtttgatttagaactctttcattacgattttgttataataatataacaaattttttatatagttttaagttttgaaattatagggaaaaaaaataaaaacgaagagaaatcacaagaggatttaaatttagaaagtgagaaaccaatagagatattggtagatattgcaaagtttgacttgaaataaaaaatttgcatattttagctatgaagaaaaatattattctttaatggttacaagtgctatcctattttaaatatttattcttgactataagttattttaccatagtaataaaatatttttcaacatttaatgacgttacattacatctcttgcacagtttgaaatgtttctgaatttctacccatctaattgtaaaactatatactaaaaataataaaaagaaaaggtcaagatatattaaaaaaataataatgataattaaacatgatgactgtttttactgctgacagaaaagtttgtatcatgcttacatggatttttttttttctatttggataatctagaagtttttcaaagatacttaaattaatatagaactttgaaatcgtaatcttttatttttttaaaatagacaacgtggcttcaaacaataatcttgtgttaaaagtatgaacttttgagtttggtagaaatttcaaattatatgaaaatagaggtctaataatcaagagtaatttctccactatttatattgatcaaaattatacgtaaccaaactttgatgtagggatttcgcaagattgcaacaagcaggtgggagtt

SEQ ID NO: 67725 - DNA, 421 bp, Cucumis sativus
  Intron number 2 from transcript Cucsa.356070.1 (locus Cucs a.356070) derived from phytozome v7.0 (chr-ID scaffold0357 7; pos 795053 to 795473 reverse strand)
aagcgggtgattctaaattgttgaactgaggttaggtgccttgtctcattaactttgaatattttcttttttttaaaaatatttttatttggtcattgtgagaggagtgcacagataaatgtccacaatattgaatctcacaattgttcttctttgcttgctgctatttccatttgttcatttggcacatcagttcttcgattctattccagaaatttgacaatcacaactcgcttaatgcaccttggctatattttttgagtctgcttgctggatttttttttcaaaagatatctttccttttagtaaaattattcatgtgtgaacaaattatttttctttctggtttttttcctgacacgttctctttgatgaacagtttctagctgttgttctgttctcaacactgttgaatacacca

SEQ ID NO: 67726 - DNA, 650 bp, Cucumis sativus
  Intron number 1 from transcript Cucsa.302720.1 (locus Cucs a.302720) derived from phytozome v7.0 (chr-ID scaffold0295 1; pos 830319 to 830968 reverse strand)
tatcagactcgattcccgacacttacgattctgtggtattttcctttttcttcttcaaacctgattcgttcttcctcatatcctacttttgatttttctatatatatatatatatattttacagcttcaatgatgattatttaattttttttttttattttgtgtgtgtgtgtgtacatgaattggtatagactctgctttgcttcattgatttttttttttttacttcctctgtttagttaggattgagcatttccccaatatttagaatctaactagcagaatagttccgtctagttgaactccgttgggttaattagtttcatttagtcggtgctttttgtctgcttatagtaatcttagctttctttgagtgtttggaaatcttcctttaagtcataaggttggcgcgtttttactttattgaattattcattcagttctatttggggttattttttatcgaattttctacaaaataactggaagtcaattaattacgggtttgttgctaattgataaagcactccctgattgaagaatgaatcacatgatgtctggaaggctttactattgtaattttctctctctctcttattcgcaaatttaatgcagtttggtaacaaaagaatattggcgggatcctcatt

SEQ ID NO: 67727 - DNA, 811 bp, Cucumis sativus
  Intron number 1 from transcript Cucsa.255910.1 (locus Cucs a.255910) derived from phytozome v7.0 (chr-ID scaffold0222 9; pos 3700741 to 3701551 reverse strand)
tggagctcgtagagttccttacatttcaattggaggtatgttgagtttctctttggatttaaactatgttcttgtttttcttgtctgtagcttttttctgtcttttcttagtcgtgcttcattcttaactcttgcattatttattcgtttcttcgccagaatttcatcctgcattagattcctttctgcgttcggtttaatgaacgatgtaattattacttaattatattccaaagtaaagataatatgaactaattgatggtgatgttttttttttaaaaaaaaaaattctcagtttcagttttgaagtcctctatggccatccaaccattttgtttatagtttttggtttttttctttgaggattaagcctattttcttttattttcttacaactctttgcaaatgcagagtctgaattcttagcccaactacagaaacattaaaaaaaagaagaaaattattagcgtctgaactcttagcgtaattacaagaacataaataggttctaaaaaatattttttctaagttaaaaagataagatagcaagaaatttagaggtttggaggtgggaggagggtttataggcttaatttgtaaactaaaaaccaaaagccaagtgcttaccagaccggccaaagcaattgttttgattatcatcatgtagaaataagataggaatttgatttccatttttggaagttgaatgaaattacacatagagattatgaatgtgtcatactcactgatcaaagcctaactgaaaagcttctcagtgctcttgcaggttctatcttggggatctctggca

SEQ ID NO: 67728 - DNA, 886 bp, Cucumis sativus
  Intron number 2 from transcript Cucsa.383430.1 (locus Cucs a.383430) derived from phytozome v7.0 (chr-ID scaffold0388 2; pos 414936 to 415821)
agaattaggaggtactgcagactcacgggctttaaggctctttaagcacgtacgagactgtttattatgctttcatcttatacgtttattttctatttgattccggtcgaatcccctgcttataatacttaacttgctggtttaggctgcttgatgtcttgtggtatttcttaatagtagtgctctttgctaagttagacattttattatatcgtgaaatctacgatttttgaatgtttattaaagaaaatagattaccatccctcgattagaactcttgggtagttaattatgagaaatccaaaaagttttgaaattggtcctctacaagtctctccagaagatttgtagaatgatacgtggcgttactctcatttttatatccaatgtatgaggtgtttctctatacacttttatttcaaattgtaatcttgttatatcaatgtagtgactacattttgtgagatagatgaggatcctatggatgtgtcaatctagttgggatatttgagtgtacttactaaactcttttctcgtgcttctgttgattagcattaactttgattatattttgagcaataacctcttttcattatataaacgagtcttgtttccattttagaaaaagtattgagtcgaccgatcaatatgatggaaaaacagttgtctactcatattcagccgtgagaaagggtttatgcggctagctatctatggtccttcctttatgaataaagactgtaatcagatgtcatttcctgaaagtcgttacttttcttgtagtttccaccttccatattatttcattgtagctctatctacctttatagtttatttattttttcatgtagagagcgtgagcttggcattgtacaaaaagttagaa

SEQ ID NO: 67729 - DNA, 571 bp, Cucumis sativus
  Intron number 4 from transcript Cucsa.213340.1 (locus Cucs a.213340) derived from phytozome v7.0 (chr-ID scaffold0154 3; pos 1116958 to 1117528)
gaggacccgacgttcctttccaccctggtagagaggtcagtgaagatgattaacgaatctgttttaatcgtttggtgtgattcttgtaagtggagaatgtattatgtatatgtttctggatacgtatgctctggtttgttacctcttttgccaatgtttgtttgtgtattatacttcggctttttctcagtgttgcttcttgttcacttcttgtatcttggaaagctatttttctggttttgagactctgtttataggtgttgttgagtttcatttgacttgtttaaaggattgatttggtaaatcttccaaaatgtctttgcctttgcctaatagttttcacggggatgtccttttctcttctattttttatcagattaaatttttttgaaatcccacttgattcttaaacaccaatacagccagcttggtagatttagtcaaatcattggggatattatgaaacttataaagtgagaccccgtttttaatttacaaaatgatcaaatgttgataattgggtttctgttctacaggacaaacccgagccaccaccagaaggccgcttgcc

SEQ ID NO: 67730 - DNA, 700 bp, Cucumis sativus
  Intron number 2 from transcript Cucsa.212590.1 (locus Cucs a.212590) derived from phytozome v7.0 (chr-ID scaffold0154 3; pos 383197 to 383896)
gggtatgccttctattctttttcatgatatttcattttatacttttcagttcaacaagttaaggtgagggtatttcaatcttcaatcctgtgatataatcaattgatcatatatgatattctgtcttattttcgaatcgtgacccaatttacaaaatatgaatgttatttaaatctttgcaaggaggttgattttccaaggcaccattttataattgtttgatttttttttcccgaacattatgtctattttctctcaatttcttacaatgatttacatttttcttaaacaaatttttaaaaacaaaactacgttttattagtttttaaaactttctttccattaattttgaaacatcggtaaaaagtagataacaaaacaaaaaaagtttggacatcgaagatatgtttattgacttaaattcaagatagtaaagtcatgtttggtatgcatttcatttttcaattattttactaattttctaaaaaattcttacctgttgttttcctcctccatgtgacattgaacttcttatctaatttcctaatttccaaaaacagaaacaaaaataaatcaagtttttagaaagaaaaaaaaagttactgaacgaacgagacataaataacttaacaaaacatgacactgaggttttgttctttgtgcagctttgcttggaaagagattgcactggatttcagaa

SEQ ID NO: 67731 - DNA, 895 bp, Cucumis sativus
  Intron number 1 from transcript Cucsa.241630.1 (locus Cucs a.241630) derived from phytozome v7.0 (chr-ID scaffold0204 7; pos 1572491 to 1573385)
ctcgttctagaccgagcttttctgtccgggcttctgtaagtgatgcctccctctctctaactgtgttttcccccgctcgactctttcttgttaatttcgaagttcgcgaattgcgtcttcctgtttgctctcctgcgttggattgtatttaaggattggttaattttcttttctataggatattagcaatggggcatatgcgatttcgttgttctatttgaatattgactcacgatgtacaattacctcttttttctcctttttgtcctttgatttcgttgggttaaaattttggaaattgaacttattcccgttgtcattcccccaggaatgttgcatttttaaagacacttttctcagaggttattctctgtcttcattatgttcttttagtttctttcacgttttttaaattattgctgcagtcctgtgagggtgagttggagattgagattacttttggactgatgaaaagtgtgtttaaataattagaatattcatggtgttttggctatgttaagtgattatttgaaaatatatatatatatatatatatatatagacgagaacgcattttatggtgcttttggagtactttaggcgagtactttggcttgtactttccttagaagtgtttgcaggaaatttttaacataaattgtaacagtcattctaagtctcacttatatcttatatgcttcaattacttggagattttgatattctacattttgcatattagcttattgcaactcatgatgtttactcgtgcatggcagaaatcaggatcttttgactcaaaatatgaccatgtgaattatttactatgagggttccacttcttattttgtgttccattgtttctctttacagagtgaacttccattggttggaa

SEQ ID NO: 67732 - DNA, 716 bp, Cucumis sativus
  Intron number 1 from transcript Cucsa.242100.1 (locus Cucs a.242100) derived from phytozome v7.0 (chr-ID scaffold0204 7; pos 1912637 to 1913352)
ttgctcagcatttttacaaacatctggggcgccaggtaagtgttcttccccattcaaaaactccccttctggacttcctttcaaccccaaatcccgaaaggatatcttatcatgaacacaactttcagaacccaaaatctcagtaatctcattgaagagcgacctgaagcttgaagaagcatcaaccgcttccgggtactgagatttttgggttccacctgaagaagaagaagaagaagaagaaccttttcgtttccttataaaagtcgaaaaacgaagaaaattaagagttgaatttgaatatggagaacggagacgaattagcctccgcattcttacggggatcatctcttcgaattcgtttccagtgaatcaatgaaattgttcgagtattatgaaaaagattgatttatattaaatataatcaaaagggacccaatcgtccacagtggcgctcgtggcctaatggataaggcgtctgacttctaatcagacgattgtgggttcgagtcccaccgagcgtgacctcatcaaattcacgcattaatttcaattttacaatttagaaatttgatctcttatgattgcaatattacatttttaaccctttctatttttatgagccattttcaaagctataaaaactcaagccgtggcgctcaagaaaaactccactctaagagagaatcttgtggcgttgaggaaggttcgcgata

SEQ ID NO: 67733 - DNA, 709 bp, Cucumis sativus
  Intron number 2 from transcript Cucsa.381290.1 (locus Cucs a.381290) derived from phytozome v7.0 (chr-ID scaffold0385 0; pos 20728 to 21436 reverse strand)
cccaagaaagaatctgtaagttccaattgccatcagtgaggattaaaatatttttactttcctaaagtataggtaattgtcatgtttttagaatgaaagttctgaaaacttcaactaggttagtaggtatttagccacaatctgacgcgagtgcttaaacatggagatgttgcttgaggaggcctagtaaaagagttattcctaatatgttggatttcttttgtagtcattcaggaggtcgatctctgaggtgacattggagcgaatgtctagcgtttggggttccttttccattcttcctacaagtggaaatactgggggtaagaaaaacatatgttttccttttccaagataaatgttcctcctacacttgacaagtttattctgtcttatctaaatatacgagttctgtgtttttatttcttatcaacaaaatgaaattaatggttgattttaaggttattctgattgatttgtaatatcaataaagatgaacaacaaaatattcctttataattgttctttcgaagttcaacaaaaagattcatagttattaatcaacaaaagaggtatgcaccaaattccgagttaggatttttatcccaaccaatctcccactcaacaagaagagagaaaataatagagcccccatgaatgggcctctattaatatattttaataaaattttggttttggagcagtttatccc

SEQ ID NO: 67734 - DNA, 874 bp, Cucumis sativus
  Intron number 2 from transcript Cucsa.382150.1 (locus Cucs a.382150) derived from phytozome v7.0 (chr-ID scaffold0386 6; pos 235220 to 236093 reverse strand)
ttgtctacgggagcctcaagctcaagtaccttcaggtttgttcatctgggatctatttctgtttgcttgtttttctcgacaatcttggatttgtttcgattacagatgtagatgcaggacatatttttagggccaatctgaatgtctctgtgctttgagattagtttcaagtgtattcttcaagaatttttatttctatttataagacccgaagtctttagattgattcaaatatgccgtttgagaattttacctttaaaaagagttatgaaaattgatgcggtctggctgcttagttgttagagtaaattcgcagacatggcttttataaaaatgaagggccacaatgtagtttgaacaaatgatggtcttggttaatttatcattttgaaatttatattttgaacttttttttttcttgaagcacaattcgtctatttatgtttacataatatttgataactatattaaaatagattatttggtctaaatgtctaatgccgtgaaaggatcaattgtttttaatgggctgtcaaacttctttgaacttggagatcatggaatgaaattattttcaaagttcgaacatagagtttggtttgtgaaccatggtaaatatgcttggtctaggacttcatttgtgaaattccattaatatactcaatgacgaccaatggtttagtcttctacttctagtttcattccttttcaatttcagtttgacttataggaattgtgctcttacaatctcatgttatttctagctgtcttttgaggccattctaaatgcacctgtctgattttagaattttatttccgttactattctatcaccacaggcgaaggcaaaatctcacaagaaagctgaagcaaa

SEQ ID NO: 67735 - DNA, 256 bp, Cucumis sativus
  Intron number 1 from transcript Cucsa.337520.4 (locus Cucs a.337520) derived from phytozome v7.0 (chr-ID scaffold0335 6; pos 597479 to 597734)
tgaggctctccagaatcctcgacatcgtcttaccagtgagttctctttatttttcccccccaattgacttttcctttttgctaatcttgaatctgcttttgggattaattgtttatttgctttgttttttatttggggttttggttgtttgtttgatttggatttggttgtgccataagcttgtagttgggtaagatctgttttttcttcccttttctgaggtttctgtttttttttgtttgtggaggaaatctgg

SEQ ID NO: 67736 - DNA, 430 bp, Cucumis sativus
  Intron number 1 from transcript Cucsa.359800.1 (locus Cucs a.359800) derived from phytozome v7.0 (chr-ID scaffold0358 8; pos 616994 to 617423)
aagaacaaggtcaacttcttctcttttttcctgttttctgtttgattttcttcatcatcttttctctctctttcacattcttctttcctatctatatctactggagattaaccgtctatacttgacaaagtactttaaagtttgaacctgagtctagagggactaaacgatagttttaccattggactagctacagtatgaagaacatgttgaggggagcttgagctgttctaggtttatactatatctgtcaatgcgtgcatacatacacgattcgagctaatatattcactattagcgaatcaacttgttatagttattacaatgtttatgcttgtatgaatcattaaattctagaaatgttagaattactaagtttaacgataaactaacaggttttcgaggatcagtcggaaggggtgatctgtta

SEQ ID NO: 67737 - DNA, 981 bp, Cucumis sativus
  Intron number 2 from transcript Cucsa.257590.3 (locus Cucs a.257590) derived from phytozome v7.0 (chr-ID scaffold0222 9; pos 4825932 to 4826912 reverse strand)
aacgagagggcgtggtggaggaggcggtggctctggtaaagataaaattgacgctcttggtagactcttgtaagcatatttcgtctattggtatcttgtttgggtgccatttgtcttacattatttgttaaacttattgtttattaagcttatggaagattgtgtgaatgctcttttattttgagttattttttttatctatggtgaaaaatatatctacaaatagtgattcatgaggttgaaggttaatgttagattatatagttgccttccccctcagcttattgggtatttaacaaggtattagagaagatggtataggaggtcttgtgttcaaactcctgtagtgttatttactctccatttgatattattgatttctacttgctgggacttctctaaatttcaagaccatgatcaggggagtgttagatgatatattattaatttttccatcatcaacttaaacttttaggttagttggtgatttaactcttgattttctagaattttgatattttcttctttttctcttcacttcgtgttggccacgatcattttgtggggaaacatataaaggtacgcagaacacgatgatcaaactttaaaacggaaacctttaatcaattacgcatatataggcttgagaaaaatttcacagagagtataatttagtctcatggctttcaaatgttctattccctttttgtagtgctaccacttgacactatatctttataatttggggtggtttattaacaatttttaactaagttgttgtgagggtccaggttcctttatataactgtttatgattggttggtgaagattgagtaagccaaagtggatgtttgagaggaattcaaaagttatgcataatgcatgtaggatttgtttttaacagcagtgtgatatggttgatcttttatcgattgatgtttgctcgttttaatgaacttcaggacacgagtcttgcgtcat

SEQ ID NO: 67738 - DNA, 624 bp, Cucumis sativus
  Intron number 3 from transcript Cucsa.391790.1 (locus Cucs a.391790) derived from phytozome v7.0 (chr-ID scaffold0406 2; pos 177232 to 177855)
atcctgaccctcttggttcggcttcgattgctcaggtctctatttaaattttattaaatccgattcattgtgattgtttattaaagcatgactcttgctattaaaagattagacaactcagattcggagtaatttacttataatacttagttgagatttataaaggatatctaaggaattatcagttcaatacacttgtttagtagaaagagaaatatttttttgctcattattagacaatcatttattcactaattttgtgtgaggctaaatttagtgtgaagctgttgattactttgtattttccaatcacatggactcctacaaagaaatagaaatatttagacatccaaaaaagaaaaaaattatgtatagtttggtttgtttgacatgaaaactgatgcatccattgtcctttcaaaacatggctttgactgctgtgtttgtctgcttataataatctcttcttaaacaatctatcccttttaagaatagcttccatgtggttgaaaggattttttgactgtgtgtatttggtgtttctaaaagacttttaaagtttatccttgagatattttttgtgctcaatttaggttcacagagctaggctaaagggtgacaggg

SEQ ID NO: 67739 - DNA, 101 bp, Cucumis sativus
  Intron number 1 from transcript Cucsa.284190.1 (locus Cucs a.284190) derived from phytozome v7.0 (chr-ID scaffold0265 3; pos 1043525 to 1043625)
aaggtatttgttaatggaagtctttgattaagttcttattgtatcttcttgttcatctctaaaagattgttttttttttttctttttcagttcaagctttg

SEQ ID NO: 67740 - DNA, 833 bp, Cucumis sativus
  Intron number 1 from transcript Cucsa.255200.1 (locus Cucs a.255200) derived from phytozome v7.0 (chr-ID scaffold0222 9; pos 3300073 to 3300905 reverse strand)
tttgcctccttcttcatcctctctgcttgtcagatgtaagttcacttgtattcctcactcaattctcatatttattggatctagactattgttgctattttggcttgtattccactccttttcatttcccaaatagctattttggctatttgggttttgcttccatttccaaagaaacgaaaactcaaatgaaaatggctatgctagttgttcttatgtgataatttttacttttaatgggccagatttattatgttcccatttattggtcttttatttggttattttcattgagagtggagggctcaaagcattttcactgccctaattttattatctataggccttcatttgtatatgtatctatattttacacagatatttatttattgtttttttaatatctgtgtgtttttcttaggttcagctcttttttaggtatgggtgttatatcaaggggatgaaattgcattgaaaatttccaattttcaaatttccattagctaatcctgggataacaaaaccaaggactcaatcaccagctgccttacctcattgaactaataaatgaaagtttaattatgagtgatctgtttttcaccaatttggtttcataaataaatagaagaaaagtaatctttaatctatctctgttggatgcacaatcttcctgaaaatcattttttttggctaaaaaccaatttttgaaagttttatttagtttgaacacaggccaatctcacctgcactatgtttacatttaccttgttaggtttaacaataatggtgggccagcagctgtggaattgtcttcaaaggtagctgttctgagg

SEQ ID NO: 67741 - DNA, 437 bp, Cucumis sativus
  Intron number 1 from transcript Cucsa.253790.1 (locus Cucs a.253790) derived from phytozome v7.0 (chr-ID scaffold0222 9; pos 2300783 to 2301219 reverse strand)
attttttgaagtttctacaacattgtattttgaaggttgcagcatcttgttcctgttcttcttctctttgtttttggaagttccaagagttttctatagtgaatacttgattctattgctttagagtctattattttaaattaagattgactcttctttgctgatgcgtcttatgaatttgatagcccaccatgtcctgttcttaatgctctagagatcattgagtttttaacttgtgagtgaccataataggaaatctggctttcaggtttgatttttcaatgatttgggtaactgcataactggtttgaaaagtttcagtttggggtgttgttttagtgggagtttgctaaaagaaaatgtgtggcacctactaactgtctgtgttatttcattttcttgtctgatacatggcagggttgattggagaggaaata

SEQ ID NO: 67742 - DNA, 716 bp, Cucumis sativus
  Intron number 1 from transcript Cucsa.242000.1 (locus Cucs a.242000) derived from phytozome v7.0 (chr-ID scaffold0204 7; pos 1848344 to 1849059 reverse strand)
tcaacacttctcgctctgtgtcctccttcgatccggttagttcttcaaactctgcgttctttgttgatgttgaatttttgggttttctgttttctattcgtttgaagatgaaactagttttacttaggatttgtgcgagtatttgtctaatgcaacgatcaatctgttttgtgggataagagtgataggctttgttaactctccaactagggcttaggaggcaaaaagagcagatccttatgaaatcacttcgcctactttgattgcctgatgctagttcgatttgatttgggatttttcggtgtgttatttgatcattgagggaaattagtaatcaatctccgttttttgatagtctgcacgattcagttttattgagaaactcaaatctcaaactttaatagggaaaaaagaaggaacttagttggtgtttgagagagtagaaccatattagaaggaagaaatttatatctctgctagtttgatttctattgctcacataattatgaatttctttctactagtttatctacgttaccatcctagttttgggttcttgttacaagtaaaggaaactgggaaattgaagttggaacctcttggttcttgggacatacaagtgtcaatcgagctaagctcttgatgacattttgagttcttattaccaatcatggactcatgatttctttttctcttctttcattatcagtcttcaa

SEQ ID NO: 67743 - DNA, 609 bp, Cucumis sativus
  Intron number 2 from transcript Cucsa.320120.1 (locus Cucs a.320120) derived from phytozome v7.0 (chr-ID scaffold0308 0; pos 28788 to 29396 reverse strand)
agaggaagctacttgaatctgcttacccgacagtaagtatatatgattgtgagaagttatttgaatttgtattctctctttgtgattaatattctgctgcgttgttgttctactgaaaggagatatacccttctaatgcttccgaatatctctctactttatttatttaattaaattttctgaagcggactgtttagtttatgcactatctgaaaatgctggattgaaacttaagctccgccgaagtctttctggtgatttcttttctatttgacgattaccaaacattttctcccgggctatctccgtcgcatttcattgtctgtgcaccagagtgagcgtctttactttgtttgggtagtttgatcatatacctaacgaagaggcgactttcacaaatttgactttcgggttttacctaaaaaaaatcgatttttggacgtttttttctttgcgaagatttaactgtaattaggagtctggtgactttgtttcaggaagttttatttcattagaatttataaaaagtttgaatgcatttttatttactaactaatttgatgtatgaatgcagatacaatcacgtttccggactacttattttctacg

SEQ ID NO: 67744 - DNA, 832 bp, Cucumis sativus
  Intron number 2 from transcript Cucsa.302440.1 (locus Cucs a.302440) derived from phytozome v7.0 (chr-ID scaffold0295 1; pos 617750 to 618581 reverse strand)
gattgaaggatttgaaactggtaatcaattttatttgtcttctttctgtaattgatgttttgaatcatttgggtttgcacttgtctgtatgaattcatttttaagatggagaaattgaattgcttgaccagctctgttttttgtatgttgcatgtgcttggacttgtgttctgtgctaacatagagtataaggatattaaatttctaagctttttcaaatgctgatgactttatttgaatatgtgcttcactcctgtaaggaccttcttcctctgtttgtttacgctcttgattattattttagtttgatatggatatcgcttttgcttttggagactggagaagatttcaacatatgaatgaatgcattgtaaaacatatagtgaatgaagtgagatttcaatttatgaagcgcagagttgactccaattaatatactggttagcatggtctattgttgcaattaagtgcctcctttcattttctatcgaggaaattaagaatcattttcaaaccctcgatgttaatgtttgattccaatatttatatctgctcaaagtattccctttttcatatttctaactttattgctaccttttctttgttaacatgttagagaagacgtttaaactttctccattatttataggtattggcttttttattacttatgtcctagttccagcttgtgagctgtgttgcctttagtattacctttttatttatactgcatttaattggtaactttcatatggagtttcttataatggatgtacttttgcccaaaagatttatctagtcaagcatcttctcacaggctgtagcaagtttc

SEQ ID NO: 67745 - DNA, 727 bp, Cucumis sativus
  Intron number 5 from transcript Cucsa.356410.1 (locus Cucs a.356410) derived from phytozome v7.0 (chr-ID scaffold0357 7; pos 1209601 to 1210327 reverse strand)
cacaggtttcatattctaatttaaaagcacttatagccaccatataaacttgatgtatattctgttagtaagactacggttaacaggacagcatccccaactttcataaaaaattgttcaaagtgatcctcacttagagcagaatcatttcacttttgtgataaaaccaattgattgacatgtaaagtgtggttcgggcgttgatttgggttataaggtttgtagttaatatattcgagttaggaagtttgtgtctagggtgcgtagttgtgagtatggagtttttcgataaatatacaaaagagagataaaggtagacaaagttcttcgataaatgtacaaacttcaatatggaacactattagagttggtagagttgagttatttaatatagacttatgaagtgggtgggtcaaacaaccagtcatgttattgtgttaagtatcacttttctttgagaaaacatttaagcaaaatagttcttggaaatgtttgacgttttgagtgttgtccttcaattcttcttgtttgaaacctggaaccattcatactgaatgaagcaaacctttcagactgtgacatgttttgatagattcgaatatttcttcgcaaagtcactcgtatgtttctttacaacaagttataaaaaatctctgaattaacggcatttcatcttctgaactataatgcagaggagagatcgcagctggcaaacaagatcaaggca

SEQ ID NO: 67746 - DNA, 559 bp, Cucumis sativus
  Intron number 2 from transcript Cucsa.286010.2 (locus Cucs a.286010) derived from phytozome v7.0 (chr-ID scaffold0265 3; pos 2200203 to 2200761 reverse strand)
gcacctgagtgttcttcgttcgccttgtttctaaggtatcaaattctcttaattaattttttttcctgatattttctttgattccttttactacaccatcaaagatctaacaattggaaacttgagagtgaattttgagaacatgatttttttttcaatcgattatctgtgtgtatgagttgcccaaagcgttgtgcttcttaaatcataaaattctgcttttgatggactggattttgagaaggctgcagttcaagagtaaggtaagactaatttacgtaacagttcaaggaatttggtgctatcatttgaatgttttcatcaggttatctatgcattcagctgctgatagtttcaattcctatcctgccatcgtttatatgctttggattttggtaatggcatttatgaatcctcatcgattattcttctatatattttaaacaccattatggttagatgtgagtagtttgccaacactttctgatgcatatttgcaagatgtgtttctttttttttttgtgcaggagttccacgtttcccttctccatatcctggt

SEQ ID NO: 67747 - DNA, 755 bp, Cucumis sativus
  Intron number 1 from transcript Cucsa.260380.1 (locus Cucs a.260380) derived from phytozome v7.0 (chr-ID scaffold0222 9; pos 6738191 to 6738945 reverse strand)
tcaagccacccaacaatcccctttcggaatcactggtaccttctctaacactcatcttctttttcctttttattttttttaaaaactttttaagcgatattgttgttctagttttaggaatttttgtatccacacaataataattgagtgattgagtgaacgaccataaactaaagggattcagatgagctaatgtttgcagaaaagtgaaatgttctcttctattttaaataattgaagggttttatttgtttttttattatcatattttagtaaaataatgaaaataaaatgtggaggagaggggaaaatgaaggtaaaaagaaattagaggtggaaatgatggatgaggaagaataaaaaaaagaagaaaatttgtggttttgcaattttcttaaataaaaagccaaacactttggtgacggaatggcctttttctttctatttggctaaactacgtatatttacaattataccttaattataccttaaacatttttaatactataattgagtccttatttaaaaagaaaagctttagttcagcaatgaaattgaaacattaatattatatatatttttgaatgaggagaattatttattgtaaatgatagaagtatttaaagaattatttcaagttttgggttgattttgttatatttggaatgatctattttacttatcttttcattcattttcttgaattgaatcaacttgtaggcgccatcttcctaactttcagtgctccacttctc

SEQ ID NO: 67748 - DNA, 289 bp, Cucumis sativus
  Intron number 1 from transcript Cucsa.201710.1 (locus Cucs a.201710) derived from phytozome v7.0 (chr-ID scaffold0137 6; pos 1680 to 1968)
acgcattctctcatacctaaatcgagaaaaaggcaagtgattatttgattaattaattaaaatcttcattctacccacttttctgtaatataataataataaaattaaatggttaaatttcgaaaatttaaagggtatataaacacattgttttgaaaaattagaagagtaaatgagtgattttagatggaataaagtattggaaataaaaaattgaaagttgcattatataataaatgataataaagttaggtttaaattacagaaagaaccaacagaagagaagggt

SEQ ID NO: 67749 - DNA, 872 bp, Cucumis sativus
  Intron number 2 from transcript Cucsa.327120.1 (locus Cucs a.327120) derived from phytozome v7.0 (chr-ID scaffold0315 7; pos 30432 to 31303)
caagaagagctgtccggttgttaagactggtattttatgttccctttttttttctttaccttcttgttctgttggaatttgattgtctgattgtgatgaatttgatatcgtttcgttgatatgatcttctttcggatgcgaataggaagtagtagtgtttcagttaggcggatgctgagtttgttgttctaatggagttgtggattcatgtattacggtttgtctttgatgactgttgaggttttcaccgagctagagagttctagtgatccgatggcaactttattctgaaacctaatttacgtttgtcgaaaaatgtagaattatctttcaagacagtcgccaactacccagcgacttggatttgaatttcttattcatttctgattgtaattctatatccacaagagtttgattgcggaaaatttcgtaaaacagccgtctgtctacgtgcatgttttggatatttgttttggcctgtaattaatttttaattggctcgaattgcgactttatttttatcagtagtcagtactatggtggctctgccgtaattacttaattgcttacctattttttctcctggaaaatgcatgattgtttggtcttttcgtgagagttcaattttttaatctcattgatatatgataagcaggtttagccatttgaatatttagttaatatgaatgattcataagcaacttctttttttaattgtgattttttttaaataataagaatccgactagcaacaataatcatcatggactcatgcaacaagtttctttatcagagtttatgtatttgctacttcattaaattttgatttctcttcaggtaaactgtgtattgaggttaccccagctgctaag

SEQ ID NO: 67750 - DNA, 708 bp, Cucumis sativus
  Intron number 1 from transcript Cucsa.322620.1 (locus Cucs a.322620) derived from phytozome v7.0 (chr-ID scaffold0308 0; pos 2324408 to 2325115)
aaagggggggattcaacgtctctagtcatctcaaggtctctctctctatatatataaagatgaactaagtatatatataactttatgtacaatgaaaaataagaacaaactttgattaaacacaatctaagtacagtttaaattattcagctttttcatatttgaaattaaacaaaaacacatcttttaatcactctttgaatgattaaagagaatgttttacatatgtatagaaaatatcaaactatttagaagaaatagcaaagaaatcacttgtgggtttctatcaatctctatgataagacttttatccatggtttttctttttttcaaaatataaaaaattgtaatgaaacatgaaaagagaattttataattgtttttaatgctttataattacgatataaatgtgttaagaattactaaatggatttggtcaacttaatagcaacaaccaaaaaagtatattaagctattgaattacaaatcctaaaactttaattaacctaattatttaaggtgggatttgaatatagttttgatttcgtcaatgagaattaatttttgtttactcataaactctaagcaatgatctttttcctatacaaaaactgcattaacgaacgaaggcattatcatgtgtactcttaagttgagattgtttacattacagggagagattgttaaagattggcgtgagttagtaac

SEQ ID NO: 67751 - DNA, 855 bp, Cucumis sativus
  Intron number 1 from transcript Cucsa.295080.1 (locus Cucs a.295080) derived from phytozome v7.0 (chr-ID scaffold0285 2; pos 60584 to 61438)
acatcccttgcaatttttgcaatattgttcttgcggtacacacatatatatataatcatctctcctttcttttaatttcttttctttttttggttaattttggctaatttgtgtgttttctagatcttgatggaaatttgaaaaatggggtctttttttttttgtaaatttctctattgatgttttgtttaatttgattttcaattcagtcaagtctccatcatttttagacttttttcttcttcttcttcttgttttgcagtcaaaataaagtcatatgtgcctgagagaaagattaatttgtgtgtgtgtgtgtgcttttttttagaaaatttaaaatttaggaaaactattgggattgaaatgttagggaagaagagatatgatagagttgaaaaagttgaaaaatgaaaataaaaataagaggatttggatgacaaggatgatgaagacaagtcatgtataatgccccttttcttttctttaaaaatgccactctctatgccctcgaaaacccacctgctttacctcaatggggaaatcacttatgaagatctcactccaaacttctaacccatctaacccaaaaaaaaaaaaaaaaaaatacaaatccttttttccaacccattaaagaaaaaccctaaccaaatacagtacccttctaggtttttccatcctaaaaataaaaaatttagactcgtaatccatcggcttaaaacctttgagcttttgaatctaattctagcttgcgcaaatgattttcattgctgtcaactaaacatagattttacttataaatattggtttaacaaacgaatgttatgatgacgatgatgatgagcaggtgagtgttcc

SEQ ID NO: 67752 - DNA, 321 bp, Cucumis sativus
  Intron number 1 from transcript Cucsa.252600.1 (locus Cucs a.252600) derived from phytozome v7.0 (chr-ID scaffold0222 9; pos 1502272 to 1502592)
tcatttccattaagttaccaacacttagtggagaggtatgctcttcttgctaaacacttgtgccttccttcttttgtagcttttctttgggggtggggtggtggtggtatttttgcctcaagattactaatgaaaatcctattacataactgagaaacaaaagggaagaaaaatctgtgcatttggtacttgcttcttccgttgttcattattcaatttgattcaacacatacaaaagtaaatctatcttgtaatgttactttttgtagccttccgtggtataattattattatgttgttgttacccttaaaggtatcccc

SEQ ID NO: 67753 - DNA, 597 bp, Cucumis sativus
  Intron number 4 from transcript Cucsa.282770.1 (locus Cucs a.282770) derived from phytozome v7.0 (chr-ID scaffold0265 3; pos 128024 to 128620)
ctcagcaaacggtaacatctgctgaatatttttgtgataattggtcttctcatttttcagccatccaaaaaagtaataataattaataataaaatgtgagtcttccatggcagatttggacttaaagatttaatgttagatcaaggaaatcataggtttggaaaggggaaataacttacttgcgtacttaataattgtttgactagatatcgcgtgtattagtttgtgtttattacgtgagtcagatgaccaagaaatctgggttgcggtaattcctattaatccatcagttaattcttgccaaaaatttgttttcttggtacaagtacagagttcagggcagttcaggtggagctttgtctgtctaattggaacctgctgcctacctcgtgagagaacgaggtaggggacaaacatctgtcattaggaaggcatttcttgaagttcaataaaattctatctagattctctcttatggttcttcttaatatcagtttagctcggattgtggattgatatcctgtttttatttatctatttaatcaaataggagagtcactttatctgtcaaactaacgttggttttgtattttccag

SEQ ID NO: 67754 - DNA, 896 bp, Cucumis sativus
  Intron number 1 from transcript Cucsa.288970.2 (locus Cucs a.288970) derived from phytozome v7.0 (chr-ID scaffold0269 8; pos 464630 to 465525)
tggccgttactcttctttcttttgttccattttgggtatgctgctttgtttttgctttttttggttaaattttgatgttgttggatttctgttgatatgagtttgtgaagttttgtttttctatggtttggacaatttgtcatctgggtttttgatttctctgtttctttgtatggattatcaatgatgatggtttcagatggtggttttaatttattttttttagctatttggtggtcgagaatgtattgtgttgacttcatcaactcaaaaaatgtttgctccccttttgttgctgctcatatcgtttatatgccactttgttctttattatttcatgggagctttctatgtttttgttcattttcccattgctcatcgctttcccctcatatccttgaaaattcttcatcttacgtcaaagcctgccttcctccaaattgttggaaggctttgcctcgctcaaagtcaactccagattttccgagtccctaccatcttggaggttctttggagtctgttctcctcacagtcatatgtatttttgatttatgagtgtggaaggcatcttgttggtggatgaccgctatggttgagtttggagtcttgttattttcacgtaatgtttgagttctaggtggatgacagctaccacttgaactcatttcttctaagttccttgctatttacattgttccttattcatcaccaggccaacaaatttatttatttagcttttggttaaattacccatataagaaaattgtaggtagtgggtcttacttctatgttattttgtgtgagttcttactgtttttttttgttgttctgattttctacctagcttttcacttgtttcgcttgtactttatgcagaaaggaacttaactatactc

SEQ ID NO: 67755 - DNA, 791 bp, Cucumis sativus
  Intron number 1 from transcript Cucsa.327680.1 (locus Cucs a.327680) derived from phytozome v7.0 (chr-ID scaffold0315 9; pos 41611 to 42401)
ttttcatcaacacttttgatcgcctcgagtccaaggtacgcgatgcttcttaattgatttttttagaatccacgacacttctaagttaaatctgttctaaaaaactcgatagctaattaaaaagttgaaaaccaaaaaaagaaacatgatttctttagttacaagtaattcaaattacacacctcaccaacaccctatttcgtgtatggactttgcttgtttttgtatgaaaattaacctcttacttcaaagtagatatgtgcgtcatttatcacacttctgatcgagaattataaacttgtttttacttaaaataagaggttgatttagcaaaagttgaacaagaaaaatggtaacatttatccaagtttatcctgaaattttagagtaaaatggttctttttttagaaagtatggtaaacagtcccaatatttatacatgtaataaaattttaattttagagtatccatgaccaacattgaaattttgcaaataaaacagatatggtactaccataacattataattttattcaaagttctcaagtattatggaataaatatcacagcacgaagatttgttttttcttcataaatagtaatggaaagaagcatatgcatgaatcaaccaaaacataaactcaaccagttgtatatatacttttctatgtatcccgttctaaattgtgttatatccacaactgttttttatgctacttttgcaatgttttatgtaaactatgctacaataatttcaatatcaaacaaaatcatgtcaggttgttaattgg

SEQ ID NO: 67756 - DNA, 688 bp, Cucumis sativus
  Intron number 1 from transcript Cucsa.379900.2 (locus Cucs a.379900) derived from phytozome v7.0 (chr-ID scaffold0383 7; pos 283989 to 284676)
caatactacttcggactagaagaagaatcagagtatgctttgaagttctagaagtatgaatttctaggtttgttgcttcaaatcgtttgcgtctgagcttagaagagtactatgtttgattaatggctatgttctaagaatttgagctgcatctcatgggatgcacgattgaattttttaatagaaacagtacccctcttttaatttgtatattaccatattcaaaaattaaattggggcatattttagggtttgaatcgtggtttttgtatgcttgcttttgattttcaaatttttgagtgggctttagcgaccttgatggcctggatattcaattggctttcctcttttcatttctcaaatgataagtgtttatgattgcaaaatgaaatcaatgtttttaggatttgagactagcacaatttactggagcataaattcaatgtttaccacctcgcaataggccttttggatagagaaatccttttgaaacaccatcaagatgagtggtctaagacttagagaggaaaaccgaaagtgtgacagtaaatagcctcttcgcattaattcttttctgatttcttctctgaataatcatttcttggtggacctatgattttggaaaagacagaaagaatccacttgctctgattatttgtgattttctgtccagaacaagggtttttgg

SEQ ID NO: 67757 - DNA, 681 bp, Cucumis sativus
  Intron number 2 from transcript Cucsa.362910.4 (locus Cucs a.362910) derived from phytozome v7.0 (chr-ID scaffold0361 1; pos 600585 to 601265)
aggcacagaagcaccaaaagagttgcgaaggtagttaagtcgtctcttctgcgtcttttagggtgtttctttttggagtttcctcagcttatcttgctcaaactcgtgttattaattttggttcattatgtaggtctctttttgttgattatttttctctgatttgatatttgcgtacggttattatatattttgcggatacatagaattctggctggctaaatttgtctcttatttgccgaatttcttggcatacacagttattagttcataatgattgttatgaagggaccgggaacttccttcctttatagtttataggctggacttgattggatctttgttgcaagggtactcttcatttctttttcttcaatagctcttgtgcaaattttgcagcgaaaatgattgtttggggctttttgggatgttgtagttctctacgaatttttaagaaaagactgataggtttttttagaaaactctctgtaagtttataaatgtggttagtgaaagacaatgcaatttgattggcaatgatatgttttgagtatttgactgtagattctggactaattttgtcttttatacgagttattgtatatagtatatgaagtctggccactacgttgttttctgagaacatgtttgcttgtttatttcattgtgcaggctgctgat

SEQ ID NO: 67758 - DNA, 1007 bp, Cucumis sativus
  Intron number 1 from transcript Cucsa.340500.1 (locus Cucs a.340500) derived from phytozome v7.0 (chr-ID scaffold0335 6; pos 2929695 to 2930701)
agatcaagaaagcttttcgtctgctcgctcgcaaggttactttaattttatgctctcatcagtcccttggcattcaattacaaggatgttggatggaaaatttcatgctagagtcttgatagccatgatgtttctttgaaccaccagattttgtgccatttcacttgcactttgagttaattagtattttgtaattaattaagtatttttttttcttgtaactctacaaatagccaatgtagatttgtaataggaagcttttgaaatcatttttaatatagaacatttggttctcttggagaatgttctctagttttcttgggatggactttccttgcttggccattttccactgtatctcatcattttgtttgaatattagtttagctcgaaatgccggaattctttttttaacataatgaatatagggtgagtggtcaacaattcattcaaaaacgactttgaacagactacttctcttgaaaagctttgttctttagtttgtacaactgtgcccttgacttctcagaaaacaaccttgaatagttggctggactatactagaaaaagaagcagctggaggttgtgtgggaaaaccctatttaagttttactacgggaagtctgtgttgaaatgccaaattttttatacgttagaaaagaaactgagaagattactcgaaaaggctaaagttaaggctacttttggagtttttacatttttaattgggtttagttctggctgatgatcttattcgtcttctaatctcgttttctttttatctcatgatcttaacttcagatttagggaaaacttcaacgatagaggactttcttgtgcttactatcttgcatcacttctatctgtgaattgttttagaggatcgggctgcacaatttttttcaatatatcttccttaatgctattgttgcgataatattttgtgattcctgctaatgatagccactcacacgatgtattttactctgaactgcagtatcatcctg

SEQ ID NO: 67759 - DNA, 700 bp, Cucumis sativus
  Intron number 2 from transcript Cucsa.257640.1 (locus Cucs a.257640) derived from phytozome v7.0 (chr-ID scaffold0222 9; pos 4859918 to 4860617)
ctcactccaaacctcactctcactcctccgagaaggtctgtttgattcctgataaactgcataaagtgacgacagaattctcgcaattttgttttgtgttatctagtgcacgattttcgtattagattatctaggttagcttcttcttcgtctgctgagtttcgaagctgcgagtacggccttgtgattgaattcttcatcgatcatcgtctgaattgcgaatgtggtctaattatacgttgctggttaatttttcggtggacgtatgctagttattgaaatgatcgccatctaatttatttttagccatatcttctttgtttttcatgatttttttgctgtttgttcatcctaacctcctgaaaatgctattcctgtcttgttactggttcatcactgtattttgctaacttttcagttaaacattcattaatagcttcatacgaactacttcgagctttgtgctgcatttgcttttctttttttaaaattcataaggtgtatgcggtcagaatgttgtcgtgttattctagtctgatctgcagaggaaaatagttgtattaggatccaaatgttggaaatccatatattgtttgcttaatgcattgaatagctttgatatttctcttatacttaatttttcctctttttattttcaaatgtaggatcaaaacaagaaacatcacccgttagatttgaa

SEQ ID NO: 67760 - DNA, 735 bp, Cucumis sativus
  Intron number 2 from transcript Cucsa.259420.2 (locus Cucs a.259420) derived from phytozome v7.0 (chr-ID scaffold0222 9; pos 5931331 to 5932065 reverse strand)
aaggttttcttcttttctctttcttcctgtttttatttcatgatcgtttgatctgctactaacactttatagacattcgtgccatgagaatatttgtgatgccatgggtactaggagaattactggtcatcttttccttttgcgttctttttccttttaagtttgaatacttgttgaattttttcaatatgcatttgactttccatagagaagggagaagaaaaatggttcaagttgctaattcggaactctatgaccatcaaatcatagattagcccagattgcccagattgcccagtggtccttaagagtcacgagttgggtataataaggagcttataggaagtgagttcaattcatattgatcatttacctagtattttagtatgtatgagtttccttgacattcaaatgttgtagggtcagatagattgtcttatgaaattagccaaggtgtatgcaagccagtctcactcataggcgaaaaaatagttactttgagctatcgttttgaaaaagaaaattaaggttttatggcttcatattttgaggatttttttatggctataatgaaatgggagaatatactaaggggcttttggcgggtatcatgctcagggtacttaaaagaggatatgtaaaatagtaattttttttaccaagttatgtttcttccttccaattcttgttcaatggggctgattggttgaagtcactgcaggaggaatacttaca

SEQ ID NO: 67761 - DNA, 468 bp, Cucumis sativus
  Intron number 1 from transcript Cucsa.259420.2 (locus Cucs a.259420) derived from phytozome v7.0 (chr-ID scaffold0222 9; pos 5932233 to 5932700 reverse strand)
attatcataacctcggcctggttcatagtactgaggtaagtttcatttcagctcgttcgaaacctcgtttttgagcctcggcattgctctggttgtggttcttttctaattcttacttccccttcatcagcaacgcgatgttggattgcgtgaattaaaattactagaagttccaactccaatgttagtcctgtttttagcttgccattgaaggatgtatgagagtgctgttttctatattggttttattttagttcaagtttaatggatttaagaattctgctattctaggtttatctgacatcattttgtttttgggtacatcgtattatcgatcatgttataggtggattctataggcaatggatgtggtgagtctgatctgctgctgcctaacttgtcaaacaataacaatggagtttctctctcacagcttgctagcttcacatctaaaaaacatatcctatt

SEQ ID NO: 67762 - DNA, 675 bp, Cucumis sativus; identical to SEQ ID NO: 65743
  Intron number 4 from transcript Cucsa.361080.1 (locus Cucs a.361080) derived from phytozome v7.0 (chr-ID scaffold0358 8; pos 1518812 to 1519486)

SEQ ID NO: 67763 - DNA, 810 bp, Cucumis sativus; identical to SEQ ID NO: 65441
  Intron number 2 from transcript Cucsa.311950.3 (locus Cucs a.311950) derived from phytozome v7.0 (chr-ID scaffold0299 5; pos 1438966 to 1439775 reverse strand)

SEQ ID NO: 67764 - DNA, 805 bp, Cucumis sativus
  Intron number 1 from transcript Cucsa.353780.1 (locus Cucs a.353780) derived from phytozome v7.0 (chr-ID scaffold0353 7; pos 68936 to 69740)
acttaaagtcaagaaagccctctcttccttacgaggtttttttttctctctttatcttttctatcatttctttatcttttcaattgtttctaccagaatttgaatcttcaacatctaaattatacagatatataaactacatcctcacattttcaagttgtgttatgaaaacattgcaagttttatatcagtaaacatcctgtgcaataatgtttttataattagtctctgaagtgattttatgaggtttttgtttctgattgtactatttgttgttacatcttagaaagccatttctcttttctctctttatttttatatgtaacaaatatgtgtttacaattttaatgggtaacaatcactccaaaaatataacacaatccaaaagaattaataaatataccaaaatttagatctaactctatcacatatatagattcttttatatttgcaattttttttaaaaaaatgttgttatatattaattataattagtatagaaatacctatttattgaaattatctatttttttcaatgcaacaacttacaagtattgtaggtagctaatacgagaatacgatagattaggttacaagaatgataaagttctgttgaagataaaagtctaataacgtagatagactagttacaagtgcacgcagttcctcttcctgttgaaaagtgaaactaaggttttcataaggttatgttataagaaatgtaaggaagatgttatatatatatatatatcttggtgttttatatgtaggagtgaaatctgtgaagataaatagaaagcaacta

SEQ ID NO: 67765 - DNA, 978 bp, Cucumis sativus
  Intron number 2 from transcript Cucsa.256530.1 (locus Cucs a.256530) derived from phytozome v7.0 (chr-ID scaffold0222 9; pos 4134705 to 4135682 reverse strand)
ttgtatcacgccaccttgcaacgagtgtaagttttcttcctttatattgaagaataaaagagtgaagatgacttatgtggcagtcctatttttggcttggaatttctttttaattgcttagttgatattctaaatttgtatatggaagttatggtttgtgaatcaaaaagtctaaaaagaaaatttggtgaaccgtagctctatccttgtccatctcaatagatttctccttttagagacttgtcagctaaaggaaaggtaggaggaaattgttaagcaaatgataaactagaattattgggaaacttttgaacgttttttcaattgcccaataaaaattaggactatgctgtttggtttgctttgtgcttgcacgtcaggatgggaaaagattgatttagccatttagggttacaagtaagttgaaacgattgtatcctggctgtagaaattgtattttcttaaagtaatggtttttaaatttttttttttatgatctcgttatatcttattcacacacaaggatagcaaaaagaaaaaagaaagaacaagttaaaactgtctcagtatttcatcaattattggaattcattctctcgtggatgaattttctggttcttctatcaaccatcatctctgtcctctgattttctcttattctagtgcgttaggagttgcaaattttacatttcctgccctctttaggggaagtttggtgcatgtaatgatgagtgccctgtgaaattctttttcctggaactttattggtttatttcataaatagatggtgtagttttcataaacactctcgtgaacgttaagtatagctagtggatgcataacttattatgccatgaaatttgtgaatgttttgtacagcatttagggggttgcatgttctgtcaaatcttcttcatccattgttaacctatcaaattggattcaatgctaaatttcttttcagacaacagcaaggtg

SEQ ID NO: 67766 - DNA, 759 bp, Cucumis sativus
  Intron number 1 from transcript Cucsa.256530.1 (locus Cucs a.256530) derived from phytozome v7.0 (chr-ID scaffold0222 9; pos 4135909 to 4136667 reverse strand)
gttcttctctagctttgatctgtttcataacggtcagtagtttcttcaattcgtagactttgtttttctcttgcaattttgatttttattctacatgtttcgttgtattgctccgtgattgttgcgtttgaaggtttgaactgttcgtcagtttcatgaattccacgaggaagtaaaatcacgatggaaaaatggaaaaaatgaaaagagttcgtacagaagtcagggtcagcgtgttattttggttctaaatttgcttcagaaaacattgctatggttattagtgtcgttgtgttggagtcggtttactcttgacgtttcttatttgcacgataaagaattttaaggaatggtgtatgaaagttgcaattacgttttcttagcttagtgcgattctaggtttggcggtttctgtcgttttggatttgttaacttgaccaagaagtttagaaagatggaaagcctctttctgtctagacatttcacatcttcgggttgtttttgttaacgaatttggtcaattggatccttcagttctaagaattcatgatgattcagaaaagtttcctcatcaaatacatatttccttaagatgttgcagtatttgcttgggtcaaaaatggaagttgtttttactttgacttgtatctgtgttatttttttcatttacttattacttattaaagaatatgattacaggtttgtaaatcctgaacggtagcaggcaatttgagtgttgtcgagcatacttatttttag

SEQ ID NO: 67767 - DNA, 466 bp, Cucumis sativus
  Intron number 3 from transcript Cucsa.361180.2 (locus Cucs a.361180) derived from phytozome v7.0 (chr-ID scaffold0358 8; pos 1601624 to 1602089)
acaaggtaaagttgctacttcctaacagggatgttttattatcattttcttaaagaaaaaaaaacacatatctagtcttcatggatgtaccattcttgtcctccttttatatggtatgaaacatctacttaataaaaagttgtagttcgttgtcaaaactattacaaaacatgtttggaacgccatggtgtatgaattactattaactagagctatcttttggttagtttgaaatttgattttgagtagaaagaaataatagaattttcaaagagaagaatatagagagatataaaaaagtgcggagagtatggttaaagatatggacagacacaaacacaataaggcaaggatacatctctaatttctttgttaagtgttcataaatatatgtatctaatgtgcttaatgcgtccaacataggatagatttttaaaggattgtttcttgttgaagttataggatt

SEQ ID NO: 67768 - DNA, 775 bp, Cucumis sativus
  Intron number 3 from transcript Cucsa.364850.2 (locus Cucs a.364850) derived from phytozome v7.0 (chr-ID scaffold0361 1; pos 2205363 to 2206137 reverse strand)
tttgacttatcacctttacctctgcctaagtcctggtaagcttttcttccatggttacatctgtttgtttttctttcattgtacatcatatggatttaaatacttttgcccaaagttgttcattaggatctaatcattgagagacatggggttcattctctgtttgtatgggcctgtgactcatttggtatgatgttgccataatgcgtgtctatgggctcttccccaccatatgccgaaagatttctgattttttggatagtgctgcattgtttcgtcatcatatcatctcgtgtattttaacatttgcttttattttaaatgaatcacatgaaccttttacacacgcagctgttatctaaaatgggataactacaagtaatttatatgtaatatcggttttgttttgagatgtgaatcttctttttttgtgttcatggtcgttacatatcagtccttggatatttagcaaagtagttccaccattagatgatgaagtccgaatatatgtccagatattttacaatggagtttgtattggataatgaactgtgattcctaaaactggatatttgacaaagtactccttttggatgatgaattctgaaaatattaaatattacgatatggaacatgcatgcatgcatacacacacatgttcatgaatctgtctgataagggttcagcctcaattttatttatcaataatgggtgagttcaagagtttcccacaatctcttaacatttatccttattgcagctttacttgttgata

SEQ ID NO: 67769 - DNA, 651 bp, Cucumis sativus
  Intron number 1 from transcript Cucsa.364850.2 (locus Cucs a.364850) derived from phytozome v7.0 (chr-ID scaffold0361 1; pos 2206748 to 2207398 reverse strand)
ttctgtgtttggtattccttgtggaagcacacttggtgaggaaatggattattgacctatttgactaatggggtttttgtgtttggacctttttcttgtgttctcctttttgtttcttctgttttcctggagtaccatttagttgtaacttgcttttgaatttgataatgcggtttcagttttttttcttttttgttttttaatccactgatcagctgattcatagcctattaacctatgttctgtttgcttgaatgattttgttggtgtctgaaatttatgttcagctgtttcggaaattcactaggccagaaaagaaatccattcttcagaaatgtcagaaacttaaaatttttgcacagtttttttcgtttggcttgatgagttttgcaagaggagctctttgcttactaagtttatcaaatcaaatgattcggattgataaattatatttgaacacacacaaaatttggttcacatcaggtctaaaattcatcattttgtgtctttgggaaacccagtatttaggctggttcttgtctttgtagagaacataatagaatatcttttatatgtttttgtgttccttgtttcattattttttcagtgtgatgaataacatttgaatgttgtctcttttatatgcagttg

SEQ ID NO: 67770 - DNA, 636 bp, Cucumis sativus
  Intron number 1 from transcript Cucsa.368630.1 (locus Cucs a.368630) derived from phytozome v7.0 (chr-ID scaffold0363 9; pos 442510 to 443145 reverse strand)
gaagaagctaaaaaggtacacaaaacattgtttcttcttttttttttttattatcattattattattttcttttctttactgttgaattgagcaattggccaccaccacttgagtcccaaaaaaaatcccattaaatagaaaaataaatttactcacaacttctccaaatttgaaagtataactcaacatattaaacatctactaggttgagtaaatgtataactcaaatacttaaaacaatggttcaaatttgtagtctcattgacataatgaaagccgagttggcagtcggaaaatggacaaaaggtgcatgttagcagatttattgtgactcaaaacgggcctttccttcaaactcccctggcgcatgttagtaacaatagaaaaacaaaaaagaaaaagggcaaaaaaaaagcctataattctgtttgcagtacagatcatgcaaacttttattttaattattctttcggccgttccttttattattatgtttttcttattctattgcatattaatatacatttcattattattgttattgttattattttaatttaaaatttttattatttttttctttttgacaaaaaaaaaaaattcagataacatttgagttagcagtgaagcaattg

SEQ ID NO: 67771 - DNA, 976 bp, Cucumis sativus
  Intron number 2 from transcript Cucsa.367260.1 (locus Cucs a.367260) derived from phytozome v7.0 (chr-ID scaffold0362 5; pos 676084 to 677059)
cttaagactagaggtgcgttgctgctctagcgctccaatcattcacattatgaatcttatactaattcctgattgaatctatcaatttcttaccaggtttttgttgttctttgtcttttgaagttgttggttatgaaatttatgaccaatagtgtgaagaagcctagcattcgaattagaagtgaaagaataatctcttggtgaatagattttgttttggaaatttgtagacctatatcgcaacattcttgttaaagagttgataatctagggttttagcttagttatagtttgtgacatatgtttttagtattgtacgcttgatgtgtggttttgtatccgttttctgcaatgtaatgggtcatgtttattctttttttttttttttttttctatatattgaaattcatttcatactccattttctgcaaactagatgctgaataaattttgccgatttgctttcctgtcttcaaaagaatatgtggttttccatagtctccatcaatttctttccgttttcatctgctacctgtgctcttttgtggtatctttcgaaagaaagaaacagtaggatgtttgaagataagtttgcttcttttgattctttttgtacctttgtttagcatacaacctcaaagtatactaaattcttttgtaattatacccttctaattattaacaactggaaggctcttctttactagttttttggaatggggttccctcaacccccttaggctgtctcttttatgtctcaatattcatgttcttactaggaaaaagtagtggttttgatatgcttcttttaagaagtaaatgctcaagataacactagaacttaaaaaccaattataggcctgaacaaccacatgatatgaacctgcagacatatttttatctacatgggaatcccctgtaaaattgctggttttgagcaggtgcatccataatttctcctggagccaaacaaggg

SEQ ID NO: 67772 - DNA, 929 bp, Cucumis sativus
  Intron number 2 from transcript Cucsa.321680.1 (locus Cucs a.321680) derived from phytozome v7.0 (chr-ID scaffold0308 0; pos 1518095 to 1519023)
gcggtatatttgcggtattctgctgattgcgtgattttgcgttctgttgtatcttttgcgtatgaattacctttttatcttttgggattacaatagtacttgaagttttgtattctgattctttgaatagaaaaaaaattaagtcttttcgggttcgggatgcctaaaactaaatcccacaacttagacttagattaaccgtttttttttttttttctgtatttgaaatttttgctcgtctcttttcaatttctttaccatgattttcacttcttctaaggataaaagatttgaattgtaagtcaaaatctaaaagtaaatactacttcataattatcaaaacttagcttagttatttaaaacctcggtagaaagtgaacaacataacaaaaaatgaaaaagaacttagaggtgaaagtcagcttaattttcaactggatggttatcaaataggatactagttttacgatttttgggacttcttgtggtgatggtagttgtttcaatgattatacatgcttaaggttcgaaaatgcctttgtgatacaagtttctcgataatgtatattattcgtcgtccaggtttttggacttacatttgtcagatgcttgtgattgtttttttgtaattcaactttgttgttattcttgagtatcgttggttagtccttgacttttcaaatcgagtttcttttttacagttgaaaaacactagagttcttggataacagtcagtggtattagtttctgaactgtctggtatcaactgaggcttttgtttgttgtttcatacatgtttttctactgtattctaaatgttttgactttcaatggccttctcatttgacaagttagtttgaaatcagtaattggacacctcttttcactctgtagattcattgactgttgctgtgaagccaaagcctcca

SEQ ID NO: 67773 - DNA, 531 bp, Cucumis sativus
  Intron number 1 from transcript Cucsa.395430.1 (locus Cucs a.395430) derived from phytozome v7.0 (chr-ID scaffold0410 0; pos 997962 to 998492 reverse strand)
caggtactttccaattctaactcgactctcaactcccatattgggtttttttttctacttagtttttgtgggtcttttcattctcagtgccccttagcttcagtcttgtcttataaagttaaaaaaaaaaagttctttcttttttttcttttgtgtttttttcccacccacttcttcattctgaataattcgtcttcctggtttgatggacgttttatttatttatctagtacagtagagtctaaggaaaaaggaattagttgtaaaaatggagcgggatgctgtaacaaacaacagaaaggtttttggttttcttttttattttgcttttcttctctacgcaccaactcagtgtttaacgaatatttttgctcccctaagtgtggtagacatgtttgagattttgaggttttacatttgatgacaccaatttttgagccattttatgctctaattttctgcttcattttttgtgttttttttatataatgtttggttggttgttgattttgtgtcccacaggctgcaatt

SEQ ID NO: 67774 - DNA, 557 bp, Cucumis sativus
  Intron number 1 from transcript Cucsa.219760.1 (locus Cucs a.219760) derived from phytozome v7.0 (chr-ID scaffold0165 8; pos 1398915 to 1399471 reverse strand)
aaagcggtgaagaaaggagttcctaacgcggtaagttggacttcttagcgtcaccttttccctaaactaaatttattcattttcatactctaaaatagaattttctctcgtaaatagatatatatccaaaagcaatacaattttaactaaaatgttcaaaggtaaacattcataaataataatggaaccaacatttcccataactataacatatataattatttccccagggggacctatgttcaaaatgaagaaagaaatagataaaaaagaggcaatcctttttttcttttctttattatgtaatttttgttcttactattttcttttagcaaaatttgttttgttacaaaaaggagggagaacgtgttgaagtcatcaaaaccaaagacacgtttagaaataagctttttttcttctatccaaaaataattttggttagtttctaaataaatgtgtgtagcattacaaaagaattattgaagaatttatttaaaaatgtagaacgtagctaattgtgattggatcaaacatttatgattggttgcagaccataa

SEQ ID NO: 67775 - DNA, 776 bp, Cucumis sativus
  Intron number 1 from transcript Cucsa.265660.1 (locus Cucs a.265660) derived from phytozome v7.0 (chr-ID scaffold0235 2; pos 76085 to 76860)
ctacctccatcccctccttgtttggctacacggcagtattgccaaaggaaacaaaatacattatggcatctagggctccttttctttcatattgccatgatgagtcttgttcaaagtgaaaatgagaaaatgggtttagttcatgttcttttgtccagggctccattctctaaatttttgccccaaaagacccactcactgctacctttctttttgccttgacggaaaatgggctccatcccctctgatgacaaataacccaaatccatactcacgaagcccattgtgtattccaccgatttctatctttgacaacaagtgagtctaacccttcttatccacatgtggctcattagaactcagcttcttcaacctatgagaaatgagtccacgatccatggtctctcctacccagttagttgacacgtggctgacattagggttaattttgatatcttccacacattttcgtcattgctcattttctcttcatcgcttagagacatgtcactggtctccatctatcacgcaattgctccctttcctccatcgccacgactacttcagccattaaccaccaactgacactcaccaccagccaccttctcctttgccattgacatcgatcgtcgtcttctttgcttccatattcaacttggacatacgtcgtcattcggacacgtccccactaccttctccaatccttcattcgcaatcgtcctctatcatctttgatcttagatttttccaccatttgttcttcgaatagcactcct

SEQ ID NO: 67776 - DNA, 462 bp, Cucumis sativus
  Intron number 3 from transcript Cucsa.358510.2 (locus Cucs a.358510) derived from phytozome v7.0 (chr-ID scaffold0358 6; pos 104703 to 105164)
tggagaaagctatctccgttcgtttctcacgccttctcatgtcagtctgttgatttagatcaagttgaacattagtattgaaagcattactcacaccatttcctctgtcacaggggtgaagtttattttctcttgatgaatattttttatttgttcaaattgttacataaaacctgttccattttcatgcattttgtaccagtgagtttgttgaccactttgatgacggttaaacttgtgaaagttgtagaccgtgactaatattagcaatctctctccccacaccataatctgttgttcattttgagttctagatcttcttcttcatttttatcctctccgtttttgcaacattaggttttgttgttcgtttctttgttgcaagtgcacttaatattttgtattcttgccatccaaaatcatctaggtggaagctttagctgttaagttaactcaaaaaga

SEQ ID NO: 67777 - DNA, 444 bp, Cucumis sativus
  Intron number 1 from transcript Cucsa.322930.1 (locus Cucs a.322930) derived from phytozome v7.0 (chr-ID scaffold0308 0; pos 2506420 to 2506863 reverse strand)
ccatcaaaatccaagcttgtttcagaggccatcttgtaattatatctcaccatgttttctttcttttcactatctaaatctctatatacattttacctttgaaggatgtttttttttttagttttagaatagtatttcttaatcaacgataattttgaaaaatatagtttttaaaatttactcaacgtcttaaaattttataaataccttttaaattgagttagatatcgaaaatatgtaaaaaaaaaaacaatacagtgaataatgaatgaattcatgtctttgacacgataactagaagactcaaaagtattcattaacaaatggaagggaatttttcttttttgaatttttgattggtacaattaatcatttgatatatcacctaacagtcacgcttattgttcaggcaagacgagcatttcaagccctaagaagtttggt

SEQ ID NO: 67778 - DNA, 955 bp, Cucumis sativus
  Intron number 1 from transcript Cucsa.358980.1 (locus Cucs a.358980) derived from phytozome v7.0 (chr-ID scaffold0358 8; pos 101709 to 102663 reverse strand)
attcaaggctcaagctcttgacggttcggctacaggttaattagtccttttgctttttgttattgcaatgtggttgttttggaatttaaaaagatgggttgcggtttgattgggttaattttcaataattagtgaacataataatccaatgaattgaagtgcgtttagttagttaacgatatcatgattatggtgacagtttgcatatcaaacgaagaaatttaatttctgatagacagttctgtcaatggagattctgttgtatatgggaaatagctggagttttcttctatatatgacagatttctatagtggtacttgtaattcacctgatatatgaagttttagaacaatgactcaactagatagccgtatgaatatagttgtttttcttattgtgtatattacttgatttctttggagtttggagtgtggtttcttgtaattaattcttccttctgaaaacttggtgtttagttcttagatgaagtttttatccttttcgaactcagtaagtaaatgtgaactagacatttccctgttgagttcatgagttcatatataccaaccgcggacaattataatttatagtctatgatctttttctggaagaaggttgatagtttatttgcaatgactgcttcttgttttttattgctcaattgggcctcatatagcaacccctggtgcaaagttgtagacagcaagtatgtccatattttgtggttgatctgttagtcaagtcgatttaatgaatttttgtgaatttgatgtcagttgttaattacttagctatcgtttaaaagtctgtgtgaatatatcttatagctgcgatgaggtttgtcacgatattttgttccagatccattgtctttaaaacattggtgccaattgatgttctaatctttagttgtgtaatcttcacacatctatttgatatgttcagagaaaactg

SEQ ID NO: 67779 - DNA, 900 bp, Cucumis sativus
  Intron number 1 from transcript Cucsa.258180.1 (locus Cucs a.258180) derived from phytozome v7.0 (chr-ID scaffold0222 9; pos 5224628 to 5225527)
gcgcttgtttagctgccgctgtagttcttcgaaaggtttgtttcgctctcgtttttcccaaagaccgacgcattttgaattttctctccatagaaattgaaactataactgccgaatccgtagcttttctcaatccaattgaatgtgctaagcgaattagattcattgttcgacgtgatcatagaaatgtgtttctttttaatgtgttgttggaatgtatagagttttggagaagttcatgggattacagtcatttactgttttattttcgagtagtttctatttgaagttcgttgtagccttgtgaaattcttatggtgttgttgttttgttttagggttcaggcggctgtttagatgctgtttccgctgctataaaagttctagaggtagctttccctttcaaatatctccttcattttatttctttctagtattttagtgtaattttaccaccggaaatttatggtttgcaacataaaaatagctattcaaaagtggttgttgtacaataacatgaaaatcacttttgtcaatttcaaaatcactcaaaaaatgtttttaaacattcaagatctagaaggactgtgcctttgtttttcttgagcaaaacaaatttgaatagtatagaaaatgatcttgaaaagtgttgagtgattaaaagtatgtttacagagtgatttcaaaaacatgacaaagtgatccatacaagattatctagtgagaaaaaaaatgtttgtaccagtcttactaggattgtgtcttttggtggtacagctttcatattttgtaggtgttaattctccaattgttttctctaacatgggtaccggttgttcatcttctgctggataaacatgcctttgaattcctgaatttacaaagaaaattttattgtagg

SEQ ID NO: 67780 - DNA, 811 bp, Cucumis sativus
  Intron number 1 from transcript Cucsa.307040.2 (locus Cucs a.307040) derived from phytozome v7.0 (chr-ID scaffold0297 7; pos 366389 to 367199)
gcaaggtatgattgtcgaacggctcttgggttcttgcttttttgcgttcaatttcacgagatctgtgcgttgttttttttttttctcttttaatttgatttctgattccgtgttcgaatgcctgtatattcgatttgattgtctggatcgatcagtgtacgtggagattcgtcttttttctttattctgaaagcttgatttcacctggttgggcggtgatttggttagggagtgctggtatggattgaaattttgttttgttttgttggctgaaattgtaaaggataaaaattcagcttctggttgtttggcgtacccattgtatgtgttgtgagagcttggtcttagagatggaatttgtcaatgggggaaaaatctagggaaagatgaatcctgctggcgaattgttgtttgaaaatggggaatttcaagctattgggttggaaacttgtgattaaggtgctttgcaatttctcaatcatcataaggtttggtggatatttaaaatgatttttgattttgtagagaactaatttgagatcataaatggtttatctatgtttgatatacatagcgaagaagcgatgctattttggtttatgccctagtgttaaaatccagtcatagttgaactgtgacttaacattatgaaaaatgtatctccattagtaattgaagaattccctcacgagatcattgatcagtcattacttatgaaaagtatgagatagagggtgattttgttacttggaaacatcaaaatttgatgttgatggttaattaattttttgttctacaagtgaacagggaa

SEQ ID NO: 67781 - DNA, 525 bp, Cucumis sativus
  Intron number 1 from transcript Cucsa.237520.1 (locus Cucs a.237520) derived from phytozome v7.0 (chr-ID scaffold0202 3; pos 376215 to 376739)
ttgggtcataatttctttcacactctaaatcattttatttttacgtataatcagtttctgatttgaatcaatttgataatgataggttgtttgagaaactccaatcttactgcatcacacaccaatttcaaacctaggactcaaaagtgtattttgccgcaaaaaggattccgacttataaaatgatacataatgtagtgatcagattataatattcatatatactaataaaagtgtgacattattaatgtcattcataatttaaaatggttaacaaatacgagggatttgttatgagagaagagagaaaaaaaggcgttgactgctaaatgctcataactttgaagttaaaaattatcattaatgatgaaacctttcatattgttaacaattccatcgcccacaaattgtcttctattttgtaggattgtttttctatatatatttagttactgacaattaacttgacggagtttgcatgcacatgcagctatacaaagttcaaaatccaatccatcgcaaatt

SEQ ID NO: 67782 - DNA, 889 bp, Cucumis sativus
  Intron number 1 from transcript Cucsa.273630.1 (locus Cucs a.273630) derived from phytozome v7.0 (chr-ID scaffold0251 1; pos 698204 to 699092 reverse strand)
ccttttctcgcgtcaccaccccacaggttaatcctcattcgacttttattctcatccaaaccttctatagttgtgtggaagttcatttattgatgcttctgatacccatcttctttcttgatgggtttttgcgtttacttttgatggtcatttgcaattatgtgtgggaatacttcgaacttgcattggatttttgttccttttaactctacttcacgtcggatttcatagtgatgctttagatagtgaaaagaaaaaacaagtaatgaaactttgaagtatgggttcaaagttccacataaattccaatgctcattggattaatcaaggtgcttgccttaatatgggaaaaatgtacatagagtattattgactgttttagtttttgttatcaatttgttgtaatttacctaacaataatgtggtttatgcatgtatgtattttgatttcatctatctcatgtgtagacatatctatggacaattattgagaactatcatattttgaaattaattcaaaatttgatagaagattgatggcaatgactaaaatggggattttcttcaaatgggcattattaatttttgaggaaatgtgactagtgtctatttctgccttctttgtgagcattcaattcttctttgttctgttcaagtttaaagttagaccatttggaattaaattatatatgttgagagcagctagtttggttgtaaaattaacagatttgtgtgaggccgttctctttgtttatttcttcttttggctcccatatcggaaaattttagttatttttattatgttcttagttgattcatgttttgctttatgttggatgtttgtgtcattgcagatcttacgccacctcgagaacaggcaggaggtaca

SEQ ID NO: 67783 - DNA, 834 bp, Cucumis sativus
  Intron number 1 from transcript Cucsa.310550.1 (locus Cucs a.310550) derived from phytozome v7.0 (chr-ID scaffold0299 5; pos 322509 to 323342 reverse strand)
tggactcatctccgctgcctccgatcttgcgtctggtctgtttaattaacattcactatcttcaatttgcgtttttctaggttatttagtttttattgcctttgtttaattgcttctccttttggcctgaatgacttcgattttttctgttttccttttgttttgatgaatattccgatcgttatcgtcttctgatagtttctcgattctcattgagcgtgattcttcattttttgttacattttttttattaggcagcttttgattataaaatattgattattatgtgtgaactcgtcttttctgtataaagttgacttcggtagttttattcaaattttcttcctgcaacgtagaatttctgtctgcaacgctctttccttttgctctttatgtcactgtaaagtgtaatggtttgttttctttgaggtcaccattggtttgaagctttctgaaagacctcttttccatttggttatctcttttagttctgtttttttaaaactatatgctattctgaaatggaaactacacttattttttcctagaatcttcctttccctttgttaatttcttcctactcaggccaaaagtctcattcagcttgtatatctctccttgaactgagtgttgtgacgtgcatttctattccttattttgtttcatctgtgaagtttgaactgaacttactgatgtatataattttgaatccttactgtggccttttgctttattttcaagtgtcatctcacatctgtctgatttgaaatttactctgttctttcctcacttttgatagaaaatcaggtttgtgattaccttgaaggggttcca

SEQ ID NO: 67784 - DNA, 627 bp, Cucumis sativus
  Intron number 2 from transcript Cucsa.335560.1 (locus Cucs a.335560) derived from phytozome v7.0 (chr-ID scaffold0332 4; pos 89401 to 90027 reverse strand)
tgcagtgagttctccttttccattaatctcctaatttcaacacttttgttttcaatttttcttttaagaaaataattttatttcaacaattaattaactctctaactttatagttaaaactgtgtataatttctaagtcacttagcttttaatcatatattaccatccaagggtgtataaattttatgccaattgttgtcatcattttacaatctttacatcccatggtgtacaaagaaaagttcttgacttgtcccataccaactagaagagattataatgtttgatcatagtgtcaaattgtaatcaatgcttttgtaataattagaatcttttccctaattattgggctgcctttctttaactttatcattagatttatctctagccctctcttgactttctgtagtagttttttttaccttaatgaagtgagagtgatgaaggcgttatggagtgttcacaaaaaatgcaatcaacgcatgttgatacttttattgatatttccatgtctaatttctatgagttcgacattgatgtaatgggtgaatcgataatttgatattattgtggacattgacatatattaaactttgttgataatatatatgggtgtgtatgatatag

SEQ ID NO: 67785 - DNA, 372 bp, Cucumis sativus
  Intron number 1 from transcript Cucsa.360570.1 (locus Cucs a.360570) derived from phytozome v7.0 (chr-ID scaffold0358 8; pos 1195913 to 1196284 reverse strand)
cttcactctcttacacctcctctcttcttgtcaaggttggttcttctgataccttccattataatgcagctacttcatacaaaattctgtttccattcatttctaatagaaaaaaaaaaaaaaacaagaacgacatctattgtagttgaggttcaactttctaggattagagagcatcgaatcactggtttctgagttcatctcatcttctttgccctacaacatccacacacaagaaataaacacagaattttgatctatttctcttcagcaaaataacctggttattcttcccattattaacaagcaaaagaactcaaaaactgtgcaagtgcaggtagggaaaattggataaaatcgcggtacccgttc

SEQ ID NO: 67786 - DNA, 579 bp, Cucumis sativus
  Intron number 1 from transcript Cucsa.242930.1 (locus Cucs a.242930) derived from phytozome v7.0 (chr-ID scaffold0204 7; pos 2543288 to 2543866)
tgattcttggttttgccatttttctttagtctgtggtaatggggtctcttactatctcttttattgttgtttctctttttcctcctttcattccttgttaattttcttttgggtttgtgcatttatacccgcttgctggaactttggtttgtatttcgtaaattgtaacattatgcaaatacgtaatgccaaaaatgttttttttttttttttgaataattggagctgaactttaattcttagtcattggatatttgaggttttatgagctgtggtaggttgaaaattgaagtcatattctatagggttgtttattataattttgattttcatggataataaaattgtttagtatgttgatcaaatcattattaaatgtaatgcttgaaccaattacagtgttattttcaagattgaaaattgaaggggagacaatgactgatatggaacacattgtgtattagttttttttagtgaaacaagtaatttgcctgttaaagacttctaagaaaaggcttatacctgctaagaatgtattctacagatactaataactgtaaggcgaattgggttgtgcta

SEQ ID NO: 67787 - DNA, 804 bp, Cucumis sativus
  Intron number 1 from transcript Cucsa.359370.1 (locus Cucs a.359370) derived from phytozome v7.0 (chr-ID scaffold0358 8; pos 306635 to 307438 reverse strand)
agtgcaggtactttgcgaatcccgagggcaagagtgatagcatgatttttttttccccatttttttgtgggtgaatttatgttagtttcgaggaaggtagggatttgaatggttgagtgagttaaggttttcgattgttgtaggtaaatttgtaaggtccggatcagggatccattcttttatgagctcgtgtttagtgtttttcggataccttggaaaataaatagatctgaatatagctgcatatgctggtgttagaggggcctaggagaggagactgttttatggctagcttctggtatttttcttttctttcaaatttatatatatattatataaagagcatagagtcgagtggctctgagcccgggtgtatactaaatctttcggttatccatagtatttattctttcatttttgtggttatgatggcggttagtagccgtacactgcacagtatacacaaccggtagaagtggaatttagttgtaagacaatcaatggcaatgtgatttggattgtaaatttgatggcttgtgttttcccataaatgaatcatgatgaaccattctcataccaagcataggtattagatgaaaatgtagagctagaatgcttcggtggtgccaagcaagataaccattttgtttctaatataaaataattttttgatttacaaattacaattttatggacgtgcatagaatggatgtatatattccttttcggctactttgatttggtgagagctattgtgatctttatgcaggtggttcatttggagggaatagaggactgagacca

SEQ ID NO: 67788 - DNA, 542 bp, Cucumis sativus
  Intron number 1 from transcript Cucsa.349380.1 (locus Cucs a.349380) derived from phytozome v7.0 (chr-ID scaffold0348 7; pos 660412 to 660953)
tcctcatctcttagttttcacatttggccttcttggtaatcattaacgtctatttacattttttcctcattatcatgatatacctctcaaattcaattcaactaattaaaatatatgttttaaattatcaagagatctcgttcgaatccttttacttttccttgtcatttgatttattgaaaattaatatctaacattagctaagtaagcaaaccaattcatcccattcaaggaatggtctcttctcatgactttctttgaagacccttttgatgaaaattcttaaaattaaatctcaaaaaaaaaaagaagaaaaaaaccaaataaatcttcttcctttattattattgtgttatgattgttaaagaacaaaatatagcattggtgagaatgaaattaaagaaattaaaaaaatagatacatgcatttaatgaatgaattaattattgggggccgtgacatgcattaatgatttctcaactaacttataaaaattttgtcttgcaggtaacatcatttccttctttgtctacttagctcct

SEQ ID NO: 67789 - DNA, 273 bp, Cucumis sativus
  Intron number 2 from transcript Cucsa.349380.1 (locus Cucs a.349380) derived from phytozome v7.0 (chr-ID scaffold0348 7; pos 660921 to 661193)
aacatcatttccttctttgtctacttagctcctttgtgagtttcttctctctcctatctctcacttcccatttcccccttctctcttttaacaacgattaatttggcttaacacacattaatcaatcaaatgtttaattacaagtttcctacatctaacccttcatcaattcaaaccctacgttaacatcagacgaaaagtaaaacaaattaataaactgaactgtgtttttcgattattgatctctcctctcaggccaacgttttaccgaat

SEQ ID NO: 67790 - DNA, 427 bp, Cucumis sativus
  Intron number 1 from transcript Cucsa.349710.1 (locus Cucs a.349710) derived from phytozome v7.0 (chr-ID scaffold0348 7; pos 930803 to 931229 reverse strand)
gcaagaacccatctgctatagatcaggtacaaatatattttttgttctctccatctctctttccctaaacaagaggaactgagagggaagaaagattcaaagatgttctaattagtttttaagttatctcttgtttatttcatccatctaaagtttggttttgtatgatgttaataatctaagcattgaaatctgaagttagatcagaattttctaaccacgagacgctgtgctgaaaaggaagtttgaaattgtgttttttttcttttggattatagcaccctagctttcattttcaagtgttttttcttgtttcatgggattgaattgtattcttttgaaatatggtttgtgttgtccattcaacaaaaactaacttccatatattgtagaggacctttgcgaggtacacggaaagaactgcttt

SEQ ID NO: 67791 - DNA, 801 bp, Cucumis sativus
  Intron number 1 from transcript Cucsa.259790.1 (locus Cucs a.259790) derived from phytozome v7.0 (chr-ID scaffold0222 9; pos 6143084 to 6143884)
ctctgtcctgattttggttttctatttattttattgttagttgtattccctcagcctctatccatatatatctatttcgtcttcctgaaagggattctgaatttctaatttttccttcttcccttcttctttatttctttacaatcagtaatctatgccttattctcaactctctttgatgcatagtttatactaattcttttgattgtcccaacaaccttaaccttgtttgtatttttgggttttagttgaacgaagacaattagtatttttttttgtgtaaaaatcttctccaatacaattattcaaataccattgatactttgaatttattggagttaaagaacattctattctttgtacttcatggacttcatatagaaagtttagaaaatatctagaagggcaggggtgaaagggacggcctaaaatttcatcgtttatagccatttttattgatagtatagatgttgtagatatggatgtagattacaaatatagtcatagagaaagaacgatcttctcaatacacaattgaagagaaaaccgaactgatttacattcagtaattggttaactttatcacagaaaattattgtttgaaccctttctaggtttctcagcacttccttcaatagtaaataatattgtttgctggaacttgacaatctcactttctcttagtaataacgtttatgtttttcatatttattttgggaggctgaaagatgacgatctctttgtattacatgtttggatgttatggatgatggctcaacgtgaattttaggttggaataaa

SEQ ID NO: 67792 - DNA, 612 bp, Cucumis sativus
  Intron number 2 from transcript Cucsa.275800.1 (locus Cucs a.275800) derived from phytozome v7.0 (chr-ID scaffold0258 1; pos 723517 to 724128 reverse strand)
ctaacaaaaacaacgaacatttttggttgaacgaggtaatatccttaatgatttttgtaactactgtttctcccttattctctagctttttgttactctgtttgtaggtttgtccttttgtacatgctgtttgtagtggtttttctcttctgtattctttcaatcttcctatggagagcttggttttcattttaaaaaaagtttgagctatctgatttttttttacactctcttctagtgtgtttttgtgtgagaaggtgggggtgtgtaataagccttcttaagtttagataaatggattaattatagacgatgaaattcttcactgtcttgcattttttagcaatgaagattcagtgtaatatagtcaagctctattagttgatgcaaactcaaatttgttcttgtgatggtcggaatgattagaagatcctagttttggctgtttatgattatgataaaagaatacaactctccccataaggttaagacgactcaatcatgatgtattgactagaagagacctctttgttctttcaattgcctttatttcttttacttcttctaatgctattctattttgtcaccgatggctgtagggttttacaactt

SEQ ID NO: 67793 - DNA, 578 bp, Cucumis sativus
  Intron number 1 from transcript Cucsa.275800.1 (locus Cucs a.275800) derived from phytozome v7.0 (chr-ID scaffold0258 1; pos 725180 to 725757 reverse strand)
gctcgcttcgttagtagggtatgtcttttgttcttccttcccaacatatgtttgcttggaatacatgagtgactcaatttcaacttcctcactaaggttgccttcttttaccctatatgatcgctacgttccatatgatcaggacgaagaaaacaattcatccccaacaaatttcaaaagtgttcctcttcaaaaataaagaattcttgtcgaattctgtttcattttccaatctcaaaagcctagtttcctctccatgtcacagttttcttttcactttccagatatttaaatagtaggtagcagaaaccatctccaacatcttctatgttacagttttcgtttttgttttctttctcccacaccaagtgattgggtttctcttgtcggttctgctccttttcaaccaaaataattctttcccttcttctttttaggagttttgaaaaatgtagtatccttgtaaatgaaaacaaaaaatgtgctactttgtcaatttcacgtgttaggtgttatgtagaacggtaattctaacctctttttaatgtgtggatagtctgttttgtaggggaggctcg

SEQ ID NO: 67794 - DNA, 806 bp, Cucumis sativus
  Intron number 1 from transcript Cucsa.350610.1 (locus Cucs a.350610) derived from phytozome v7.0 (chr-ID scaffold0350 4; pos 111056 to 111861)
acggtaactcctcaaatttctgctgtttcaatttctgaatttgatttgtacccatttcgatttatgcattcccgaattagtttaaatgaattgtgaaggttggggaatttttttggtttctatccatttccattgaatgaaattgtttatgtcgactttttgtagttagtcattcaaagagaattgctctcttcttgatgaataatgaaattcaagttcattgctgtattttggagaaatagagaacatataccgttagggaagattttactgatgttatctagttctttctttcccttgaaatgttatggaaaccaaagaaaaggaagaacgattgtgggggttatatatatgtgggtgtgtatatatattatatgtatatgtagggagtgtttagatgatatgatattcaacttgcatgcacccattagattaaacttttggtcaaccattgtttacaatggtatcgtagcttctccaactaatattgatatctaactattgtgtcttcagtcctgtttcaaactcacaaatgattggagttttaaatgatacaatatttgttaaatttgataatatgggttctatcttaaaatgaatcgtcaataagaggagtaactcatctatcttgtatgaagtgtgaatttttttggtttttgcaacgtgcgactttcaacttctccaacaatattaaatttgttttcacttaagttcttgcatcaattggatgtttaagaggagttcttgaaattttgatgggtcttaactgtttgttaagaacagattcttctaaagttgcacctcca

SEQ ID NO: 67795 - DNA, 618 bp, Cucumis sativus
  Intron number 4 from transcript Cucsa.285160.2 (locus Cucs a.285160) derived from phytozome v7.0 (chr-ID scaffold0265 3; pos 1593002 to 1593619)
ctgagggaagcgtggtaaatcttacttttactttatgatatacattttctcatctttgcttactgcctgctctctctgctgtcagtttaacatccaagtattaactagtaagcaacaatttgagatgggtttgcttgttttgtccattaagtacttagttagagagtgtgtgatgttttatgggggtgatcagagatgtttgaagaagtaattatttatctagtaatatcagtttcactcatcacaaaagaacttccatctttcttcttttacaaactttggaaatatgagaaacaggaccctgtgtgtggatagtgtagtcttctaagtttaatttcaagagattgatgtcacattttatgcagtcagatgttatgggctaactcaaagcacagtcatgttatgttagtattttgccttctgttccaattagtttttatctataaataaatgtttgcttcattgtttcatcttcttgcaatccgcaccatcacattgtcttatgatattctgaacttgagctcttgatgtaatttcatggaatcatgtcgtttgttttacttatcatgcaatacttcttcaggtgattgagcaatctggggtgatcgaggcacctga

SEQ ID NO: 67796 - DNA, 976 bp, Cucumis sativus
  Intron number 1 from transcript Cucsa.258220.1 (locus Cucs a.258220) derived from phytozome v7.0 (chr-ID scaffold0222 9; pos 5265898 to 5266873 reverse strand)
gttacgatccaaggagtatgcccttgtttaataatcatatttagcctacaatttttctatcaattatatttttatcatttctttctcacattcatacttgaaagttcttaaaattgttgagatggtagctctttgttatgaagctggcaaaaggttccttagatttgttagaagtatattagtatttctaaaaacattgagctcattttcatgcattgacatttggatactgtgattttggtcaaaattcgttctatcttttgtgcaacaagattgttagtttatgccgtactcagattgcagtctgactcctcatcttgcttttgtttctagttcaaagtttactttaaatccatacagttgaataagcaaaaactagtggatagttagaagagaaccaacaagatataccaaggagtaggagattgtcaaaattattcaaaagagaaaggacatttttgcaaaatacacaatataaaaagaatagaaattggagaaagtattttgaaatgatgcaaagatcaattaccttactgtattggtatttcatacactggttagacatcttcttttcacattcaattgctggatctgatgttattgaaccgccaggaagctagccagatttttatggctagttactgactgagttatcttgtttgttaagttattgccctggaagttatcttgtattcttaacatattctagtttccccggaagttatcctctagttgtaacatagtctactaactgtaacgggttgagcaaaagggaatcattgagttgaaaaagaaaaaaaaatagtactagaaatttacccaagaaggttctcttcatgatcagttattgaacttcaatctcagtagatattttcttgtactctatgtccactaatacctctcttgtcaggtaagtttttgcaagctcgatgctttgctcttgactattatttgaattgctatagttgcagattgg

SEQ ID NO: 67797 - DNA, 850 bp, Cucumis sativus
  Intron number 1 from transcript Cucsa.366670.1 (locus Cucs a.366670) derived from phytozome v7.0 (chr-ID scaffold0362 5; pos 214214 to 215063 reverse strand)
ttgcaatttcggtacggttttatttctttttacacaatcattttgtttttaactttagtactcattcgatctttaatttcattaatcacaatatgatttaattttgaacaaggctactcaaacaatattcataaaatgcaaatgaatttgcaaaatataaaaatttagatccagctcttattcatagtctatcgatgatagaccgtaccactaataagagtatcaatttattgattttagggacattttaaaatagaaaaataaattaaaatatttataagctgtagcaaaattttggattctatcaatgatagtcaccggtagacttctatcgctgtctatcaatgccactgataaaagcatatcagtgtctatcaatgtctattattgatagaaactgaagtattttgctatatattgtaagtattctgtcaaatttgctatttcttttacaattttccttgatattattctatttgcaattctttaatattgttgttagacacttaattcgttttcaccctaaaagtgctatccattttaattactttattaaatttgtcttcacctacaaacttaagcttgagggtaagttaatgatttaaaactgatttggagtcttcattttaaatgttctaaaaaatcaattcaaactatgaaagctaagaagaaatagtttttaaaaactaagaatttgacacttttaagatgcaaatcacggtcagaaattgtgaagaaatagacttcattttcaaaaataaaaaactaataaacaaaatgattaccaaattaaattactgatattggtatctatgcaggaggcaagtatagttggcccgaagtagtgggt

SEQ ID NO: 67798 - DNA, 331 bp, Cucumis sativus
  Intron number 1 from transcript Cucsa.312160.3 (locus Cucs a.312160) derived from phytozome v7.0 (chr-ID scaffold0299 5; pos 1654907 to 1655237 reverse strand)
ttttccttcaccgtcttctcatcctcctgctttctgtaggtggaatttggttctgtttcttaaacatcttttacggttttgttcttgtgcgttatggcgttacttttgatgctgatttttattgagactataaaatgtggttgaatccgccgggaatggaattgttgcgattattgatgtggatttctttttcttcggagcttctttcttatttctcgttgtttcgatcgattctgattttggttttataagtgtgagacctcgaatgaatttctattctactctgctcaatgagattttttgttactgagatgtttttgtttgtagatat

SEQ ID NO: 67799 - DNA, 733 bp, Cucumis sativus
  Intron number 1 from transcript Cucsa.207450.3 (locus Cucs a.207450) derived from phytozome v7.0 (chr-ID scaffold0144 3; pos 277967 to 278699)
acccttcgtcaaagaccttttagtctattttcttggtatttcctttgccattaatattgttctgttctttttcctagtatggtatacatcttacaccatcatctgcataaactttctgggttcattttaggcatttgagttctatgtgatggagtaggaaaagttatgttgccttctttagtggttatactttatagatatacagaggccaaagcagtggaaagctatgttattgatgatcataaacatgaccgtattttgataaaattaccatagttcctgtcttaaataaacattatttgagggacaagtatatctataagacatagaattttatgaatgagaccatcaaaatcatttatattgagagaattttgtttcaaccttttgaataaaataaggttagaagatcgtgttatattaacagttgttatgtaccaataaatgaaatttaagaataagttatactttttgcactgctgggagttgatatcgcgattgcatttccatgttttcgattgcataacttcatggaaaatcttttctacatacacatcgattataattcaacttgcctttgttggttttatttctttgtttttataatttctagattgatgtgatgataagtaggtgtagacatagtattaagtttttatctattcaacttattgtcatattacttcatttgtccatagaaattccttgccggaagcacctcaaaaggcttctc

SEQ ID NO: 67800 - DNA, 689 bp, Cucumis sativus
  Intron number 1 from transcript Cucsa.234850.1 (locus Cucs a.234850) derived from phytozome v7.0 (chr-ID scaffold0200 4; pos 65836 to 66524)
ataaagagggagaggttgtttgtgtaagtggtaaggtaaatttctagaatctcaagtatagtttctgttgtttgatttttattatggtttaagtatgtaccgtttcattgcctgataacttaaataacataccttttaaagatttttattcctttttctaatcattgaacatttttccgtctcattatgtttctttgcacttaaaaacttttgctgccgctttcttgtaactctcaatttcgaattctgtaaagcaatcctctcttgtttgtggacatgctgcaaaagcaatcctctctttttttcttttttgtattttctcccttgtttccttgatttttttttatctactcatcaatctacgaaaagtttgttttcaatgtgcttgtgtcctactttttaagtaaatgatgtgtcggaatgttagtacgtatctgtgtcaattgtttatttttgtgcttcttagcttatgagttagtagtatcctttgtgctagacaaagtaccagttaccactattgtaaattagcaaggtccaaaaatatagaagttaaaactactaccttttgatggatgatggtagatactgcactatgttgcactctaagaactttgtttttctttttttaaaactttatttagcctttcttatgacgacttgacactttgttttccacttaggtaaggact

SEQ ID NO: 67801 - DNA, 969 bp, Cucumis sativus
  Intron number 2 from transcript Cucsa.256600.1 (locus Cucs a.256600) derived from phytozome v7.0 (chr-ID scaffold0222 9; pos 4183210 to 4184178 reverse strand)
ataagtagtaagtttcttcttcattcatttcgtttcttattcatattgttatcacgttcaaacctcgaattgctaaaactagccgccgttctcaagaaagcattaccacatgcactagcacttgaacttgaatttttgtttgatgaattttcaaactctgctcgtgtgtgtttgtttaatctctttttgagtgtttctttctccgaattcaagtagttaattaagatttaggaagtcgaagaattcttatctatgaatatgaatacttcaagttacaaggtacaaactagttgccgctgcttttctctttggaattatgagtatctctaattttgccatatttaggagctcaagtatgcctctctgcattgacatttctcttgttttcctcctccattattgcatttgtccaaacagaatcatatgtttattctcaattaccaagagtagttcatgtataaaatgtaataggtaatttcattttcctttcggagctatactgttttgtatagatcatagatcataatcattcatagaatttctttccataacctacatgtttcgtaatgattatgaaatggaacaattacttttatcatttttaatatcacctctcaatatcaattttaatgatataaaaattgcacttaaatgtgtaatataaaatattaaattaaatttaagtgattttatttagacatgacaaaagtgattttaaccatttcaaaattacttccacacatgccttaaatcaccttcttgagttgagttgcatactattgaaaagagtgatttagagttggataactgttgcagcatttgcatatcacaataaaagcaggttcataagtaacagaggctgagatgttatattagtttgctttgaataataatgttcttactaacaatcatcagtttatttgattttgtgcagtgattgttggagaagttgctaatttcgctgcctat

SEQ ID NO: 67802 - DNA, 368 bp, Cucumis sativus
  Intron number 1 from transcript Cucsa.368500.1 (locus Cucs a.368500) derived from phytozome v7.0 (chr-ID scaffold0363 9; pos 179455 to 179822 reverse strand)
cattcaacctgtttcttccttcaatttacttccaggtactaacaatctttccattcttctttaatctatcctgttttctgcctttttctttctgcttttcacatcggttttgctttaatccatctgcggtactcttactttttctgcttctgttgatggatttcggagctttgagtttgttttccatgtttgttcttcatgtgggtgtctctggaggttgtttataaagtcatgtcggtggatgaaatctttttaaattaagatcggttgcgtttaggaattcatttttgcttacaaacccatatttcaaacttttgagttgttttggtttctgatttttgtggcttgaaattttgcaggacctggat

SEQ ID NO: 67803 - DNA, 586 bp, Cucumis sativus
  Intron number 2 from transcript Cucsa.307770.2 (locus Cucs a.307770) derived from phytozome v7.0 (chr-ID scaffold0297 8; pos 17201 to 17786 reverse strand)
caagggtatacaggttttattttcttagtaatgatgctttcattttggttttaatcttcatcaaaataaaaatcagattaaaatgatgtcacaatcacaagtagaacagttgataaaatacttttgaggtatgataagtttgtgagacggtgatctcttatctttattgttttgttgtattggagatcctatgttgctcaacaacttcctccttgattaacgtaggatagcaatttgacgagttttgtgccacgatgctaaccttacccatgtttttagctcctttcttcaacctggcttgttgataattttttcctggcaattggcatagcatacttatgcaacttctaacttgttattgcatatctttttaaggatccgtttgataatgttatacgaaacagcataacatacatttcgttgtgttacctgcataatttgtatcaggctaatggaatttaacatgatattagcaccttttattttctaaaggcagaacactgatttttcttcttatagttctggtcttgtcttgttcatatgtttatcagacactatcagctgtggatctacgcgattcagaaat

SEQ ID NO: 67804 - DNA, 959 bp, Cucumis sativus
  Intron number 1 from transcript Cucsa.307770.2 (locus Cucs a.307770) derived from phytozome v7.0 (chr-ID scaffold0297 8; pos 18165 to 19123 reverse strand)
ttttctgctcgtcatccgttcatttctgctaaaaggttcggtatcgactgccgatcaatgtttgccaatcatatatttattgcaatggttccaattatataggaagggattttggtttgtaatttgaatgggcttttggctcgatcacgtataaggtttgacgttgttgcggtagaattgtcttttaattttacgattattttctcaattgagtttcggagatctgaaacggaagtcttgcctgaggcttcttcttcttctcctttaaattccggttttgcttgattggcgataaaagtgtatagcgttgggggaatgtattatatgtcaatgtttttttttcctaggatgaaccaggatgggtaaatgtgaagaattggataaatttagttcttcaatgctatgtattgtccatttattagttcaataatttaagtgcaacttttctatattaaaaaaagtgcaactttttgttacatacgcttccctgaataatgtgaagttgtttaggcttcgatttcttctcataaataagaaaggggcaagggaaaaaaaccaatgtcctgaattattgacaattccgcttctatattctgggttattttcacaatccgaatgttcacagcccgtttccaaaattatacatagttcctatttttcacaaaagaaacatctttataaactgcatataattatatatatttcttacttttcattagaagaattatctttataaactacattatttccaaagttttgctgaatgaaaattaggttttatgttgtttattttacctacagagtttttatttttattgggtttttaaatcgagtttcttcttcctgcacaccagtcggggatttgttgaatagaattggttctttaaggatattgattatcaacctttggtttaattttttcagatcggataatttcacctgaagaagtttgttgtaat

SEQ ID NO: 67805 - DNA, 909 bp, Cucumis sativus
  Intron number 2 from transcript Cucsa.312220.1 (locus Cucs a.312220) derived from phytozome v7.0 (chr-ID scaffold0299 5; pos 1705011 to 1705919 reverse strand)
accattcatttcaagccgctgtgggcgaaaaattggtaatttcatttatcttcgtttaaattacggttgttattcaaaaaacaaaaagggaaagaaaaaaaagaaatcttgaagttcacgtgtgtgttccgacctgtccactttctgggaaggctgaactattttgtaattaaagctctaaattggttctttaggctttatgcttccaggatatccaggatgcatgctcgccatgatatgcatggactcaacatgctctgctttttcaaattattggcagtaaatgtcttattctgaatgaaaaccttaaacctataagttcttatctccagatgttctactttggagccagtttcgttcgtaatttatctcatgggaatcatgtgatctcttttagttaaatcagtacgataatgatagtttagaacttcagacatcaattttgtgtatatactttgttattaagaatatggttaatcacacaagattcagcttcgttcttatccacatgacaacagtataaagtgagacagtcacatattattattgtttttcatcttttgagcacaacatgtggggttgggggatttgagccagacttgaaagaaatacatgctaattattgtgtagctatgctcactttggtatcacatctaaaagatcgaagcaaccatacttttggaaatgtcatttgtttcattgactttattaaattcgttgttcttgcaaaggattaaaaaccttaagatcatgactgtttcggagctcattgaatgttgttttttctagcttacatgttaaagaagtacattgatatgccttagaacctactgcgtgatgaaacagtcaacctgatttggaatttattttgcagccctaggtttggaattgctcacgctctttgtttgg

SEQ ID NO: 67806 - DNA, 640 bp, Cucumis sativus
  Intron number 1 from transcript Cucsa.339670.1 (locus Cucs a.339670) derived from phytozome v7.0 (chr-ID scaffold0335 6; pos 2255995 to 2256634 reverse strand)
cctctcactcatcacctctcctcaggcatcttcatgtgagccattttaccttttcctgcttaaccaattccatttctctaactccaattattgtctcacaactgccttactcttctttttcttctttcattgcgaagtttgacgttcttttgtggagtttctggagttaggaagttgaattttcgccatttttctcttcttatggatttgatcgctgaaatgtgtgatgttcgtctctccttctccgatcatgtttttactcctctgttgttgacagattgtattgctttctttgttttcactcttctgtcgttaattacgagaacaggaagtctaatttgtgtctttgtgtaagtgtttgatagagtggtggaggatggatttatggattatcgaagctacttttgtgattgattagtttttctagtctccgatcgtgaagatagattactaaaacagctaggtccagtttgtgtgtttctgtgtgattgtgagctagatcggaggtggagggagcgtttctggatacttgaagttgattctgtgatttgtgaatttgaatttagttaattaacggctttcgtttctcccttgattatgatcaggcttctgcagagagcaagaagatcgtcggtgtgtt

SEQ ID NO: 67807 - DNA, 748 bp, Cucumis sativus
  Intron number 1 from transcript Cucsa.348670.1 (locus Cucs a.348670) derived from phytozome v7.0 (chr-ID scaffold0348 7; pos 106296 to 107043)
attcccttcctgccattgccgtcgtcggaggccaggtcatgccccgcttcctcacatttccatgttcttctactttaatacgcccgttttactgctatcttatcatttttggcccgagttcttgttttactttctctcggaattatctttcgcgacgtcattatgtttctacggttactgctctattctctatttcgtttgattatataattgaccgcacgagttgcttctctttttaattcgtttcagaatgtattgtataatttaagcaaatttgtcgaccttctctaggaactatattccatcgttcctttatatcccttctctccaatcactgcaataatttcatcagaattccacgagttagtgccttttatcttacctggaaaattcatgttatagaaaaaattgatcatgtccttttagagaaatatttgatagaaaaatcagaatgatagtttttttcccttctatcaaacattagatcgcttgttatcaatattacaactataatttagaaatgttgttcacccgagttaaatttgatgttttcatatatacttaggctctcggtttggttagatgtgcagctcaagaaacatgcggaaacctttgcaaacggcattagttcttatattacaattcgccttatcacttcccataatgtgttatagaccagcagtccactcaagctgctatcttattggttgtagagctctggcaagtcttcggtgttggagagcgttgt

SEQ ID NO: 67808 - DNA, 881 bp, Cucumis sativus
  Intron number 1 from transcript Cucsa.328050.4 (locus Cucs a.328050) derived from phytozome v7.0 (chr-ID scaffold0315 9; pos 322575 to 323455)
ttgtttcatcattagttgaagataaaggagaattggtgggggaattttctttgtttgaataatcattttaagttatgatgtttctgttgaaagtttttgtttgcttttgaaaagttcttccaactttttttaccactcgtctttttctatttttattattatttttgagtattggtaacagggctttggattcccagcacgtatagcccagagaacttttttttatttttattttgaaccaagttatcgtgtaacaatgactttgatctgattttcttgatttactcaagcgttctgtgctgagattattgttaattttcattgaaatgtcactgccttttatggtaaattgctaacattagttagctgattctctgtagttcttaaatgagtgattctggagggtccggaccttggcacctgctcaatcacctaggagctgacaatgctattcattgtatgtaactgttataatagttgggaagggaggggggtcttcttttggcttttggcttttgccagtttgaactcaaacttttctctttattatcattaaaatagatttgcttgttctgcttcagaataattgatataattacaatatctgaggggaatatataggaattgctaatggagtaatgggtcacagtcacagattatgatccatttcttggaatgacttttttccttcactctgttataacatcaaagtggcaatgaagaagttgtgtttgatttccaatcttatagtggactgcaaagttttatatttgtctcttccttttaagctcagttttttttcttcttcgttcgtccattcatagaagtttagaaagttgttgaatttctgtttcaataaattcatgttttttggcaggttc

SEQ ID NO: 67809 - DNA, 511 bp, Cucumis sativus
  Intron number 1 from transcript Cucsa.338380.1 (locus Cucs a.338380) derived from phytozome v7.0 (chr-ID scaffold0335 6; pos 1303873 to 1304383)
gaggtaatttctttctgtttttggttcggtggatgaatgacttaaatttgagttggaaatgaaatatgtcttacttctcaaattttaagtttttttttatcttacttttcttattgttgttcatgtcagatccactttaaccattaaaatggaatcttgtacgcatagattggcctttcgtttcctctcactctctcttttggtctcatctctctcactcacttgtagactcttctctattctgttcttccctctctcacccatcacaccaaacctcgatctcttcttgtacaattgatctcttctgttatttcttttcttgaaaaatcacaatgcgaaagttctttttttatgattagatgaatgggaaagaattatctcaagtttaatgcatgatttgttgaataatcaaatattaaatggtcaatatagagggcttgattgaaaagtttggttttctttttcctgaatggtaggtcctgggtgttcttctgttggagctggagctttc

SEQ ID NO: 67810 - DNA, 560 bp, Cucumis sativus; identical to SEQ ID NO: 63708
  Intron number 1 from transcript Cucsa.273770.3 (locus Cucs a.273770) derived from phytozome v7.0 (chr-ID scaffold0251 1; pos 804241 to 804800 reverse strand)

SEQ ID NO: 67811 - DNA, 804 bp, Cucumis sativus
  Intron number 1 from transcript Cucsa.348610.1 (locus Cucs a.348610) derived from phytozome v7.0 (chr-ID scaffold0348 7; pos 64973 to 65776 reverse strand)
atctctccggctacccaatttcttacgaaatcgtaattttccttctcagatttgtaattgtgatggattattgttctaggttctagatctccgatttgtgttattcgtcatttatccagagttggatcttgtaattatctagattagcacttgttgatttggatcctttttctgttttcttcgttgagaattcaatctgaatctgttctgtttccgctttatagggttttttttcttcttctccgatttgactattggttattgccttcgattgaatctcattaccggaatttagtggttaaaatgtttgtatattggtctttagacattgtattaagtgagtaatttggattgcccgagtctcttgatttgaatggctctttagttggcctagatcttctgatgaaaccgaccggagaagattgcgcaaaacgttgtttactagagggaacattttttacagtgaagagaaatcttcagcagtcatatggttgaatattgtttccttgtttgaatttaagttgtaggtaaaggaaatctcgcttggccgctaatctaagatgaggattgttttcacatgttttacattttaaatttagatcatgtttaactgagatttttggttggaaaatggctagggcattttagctttgtgatgatttcatttggttatgaattgttagtgttactcaaatgactatatatattaaatctcgatatcttgagttgcctttctgaacaatacttgatgaacttaaaccttttgtagacaacatcaaggcgtcttgcagaccgaaaggtggg

SEQ ID NO: 67812 - DNA, 697 bp, Cucumis sativus
  Intron number 1 from transcript Cucsa.359600.2 (locus Cucs a.359600) derived from phytozome v7.0 (chr-ID scaffold0358 8; pos 478208 to 478904 reverse strand)
atcagatttatcgaaatcgacggtatttgatttttgttttttgttttcccaagcagtaaggtacttagttgatgtgtatgatcttatattctgaaaagattttcacattgttttatctcacaattttattgagagaatgttctggcaaatgtatagttctgcattcattaatggaagaatatcgattcactaataagcaccactgacatggcgtcgagtgctattcctgttctacttagttgtctacatctacgtgttagacgatagatatatatattttattcaccgatttttgttttatgacgtctaggattttgggattttcatgccatttcaatttatcattgtccctaaattgtaataattcaacgaatttggtgcattgccactccccatttttctactgttgcgaaattattatttgatcacgaatcaagaaatcttctgcgtttccaatgttggctattacgtatatacgatgcctttttcatttgaatttaaggaatataccatatgcccagtttctccatttgtatattgtggggttgcgtctcttcttccaagtgtaaatgtagaatttccatgaatatatcttgtgctattaatcggtcagttatgttgacttcggggtattattactagtcccctgttaacagagtgtgtttaatcatttttaattatctctttcagcacaaag

SEQ ID NO: 67813 - DNA, 518 bp, Cucumis sativus
  Intron number 2 from transcript Cucsa.356920.1 (locus Cucs a.356920) derived from phytozome v7.0 (chr-ID scaffold0357 7; pos 1826426 to 1826943 reverse strand)
gaactttgctagtggtaacataaaatttaagaatctgctttgattattgaatagtgaaagttggtaagctaaataatagacttgagcatttatttttgtctatgcccccacttttttctttaggatttagggtaattaacataaactttttttttatttttctcccatgttagaatgctaataaagaagaaatatttaaggaaaaactatatatctttgttatttgagagtgatacatagttttttttatttggtattctggatcgaactgataaaatgtaattctaaattcatcccttagtaatgtaacgtaggtcgagaaacgagttccctcaaatcccataatgagtatgaacttctttggcaaaaataatgatcagaaattggggttttgtacgtgcataagtttcttttcaagatttgtccttgagttctttgatttgattgggtttagagagtaatataatattattgtaattataagtaaatattaaaagggtttgtgttttgtttttcag

SEQ ID NO: 67814 - DNA, 657 bp, Cucumis sativus
  Intron number 1 from transcript Cucsa.320440.1 (locus Cucs a.320440) derived from phytozome v7.0 (chr-ID scaffold0308 0; pos 277291 to 277947)
agcttttggtgacgctgaagaagtgagctctttgttagttcctctacttaaactgttctttcttgtttttgttaaaactgtttgtttgattctttttggtgcagagatgaaatttttttgagtttggtggtttgattgggtttaggtaagttgaatgatacccttttagaaatgttgaactgtgatagagtttctaagtttctagtctagtttgagtgatcctgttacattcaaatttcttaggtaatgatcgttaaccttcatgctagatatcctttaagttgaagaacttgtggttggatgcactggttctctagtagttccttaggttggaaatggctttggttgagaattcaaaacatacactttaggttgggtatcaacttttcaaatagatttaggttcttggggaatgaccaatgaaagattaacatgactataacagcttcttttttgtaatgggactgaaacaaaatgattgaaagttgatgggctgaaacataggcatttgagatgaccaaaacaagataaatataagcaagaaaatttaatagggtttagtcctatatgttaacaacttatcgccctataaaaacccatgtttaactttcattattctttacagatatcgcttaaggtctaaggtagatattgaga

SEQ ID NO: 67815 - DNA, 575 bp, Cucumis sativus
  Intron number 1 from transcript Cucsa.339900.1 (locus Cucs a.339900) derived from phytozome v7.0 (chr-ID scaffold0335 6; pos 2432986 to 2433560)
aagatcgggatcgtaaaaatgcgaaaacccctgtttcttcaattgttgatactgttgcatttgatcatttctttcttttgttgaatgattagctttcgtttggtgtttgatttttctataacttgaactgaacattttggtgaatgtcaccctacgtattgtgtttatggatcctggagaaacagagagagagtgtgtgtgtgtgtgtgattcttctatttctagcatgattttcaacttttttcttggaaaaagtgattatggaagataccaattagttttaaattgcaaaagattctttgtgtcagtagtttatttggctctttttctctttccaagtttgtatatttcaaaaagaaacaggggatctcacagctgcttcttcactctcaaaccccttaaatgaagcggaaaaacttctggttttttagtgtttttcaattagtccaccttgattaattgccattagagctttttgagtcgatccatttccaataattattcttattctatatctctttttttatgttttgggttcaggattttctggaagaagagctgtagttaccattgcc

SEQ ID NO: 67816 - DNA, 345 bp, Cucumis sativus
  Intron number 1 from transcript Cucsa.283620.2 (locus Cucs a.283620) derived from phytozome v7.0 (chr-ID scaffold0265 3; pos 675827 to 676171 reverse strand)
cttgggataacacaaagacacagaactgaatcagagtaagtagctttttccatttttctttttcctttttctctctattttaatgtcggatgttcttggaattggaagtgggtcaattcattgttcctattgttgttactgttcatactgttactctataatttgtttttctttattaaatcgtatttttcgatttttgatgagatttgcagcataatcgatatttttttttctgaaaaattgaacaatgttgggtatagattggcgatcttcttcgctttaatctgtttgttgttttcaatctttgaagaacagggctcagagttttctccatctgggtctgtg

SEQ ID NO: 67817 - DNA, 735 bp, Cucumis sativus
  Intron number 1 from transcript Cucsa.302320.2 (locus Cucs a.302320) derived from phytozome v7.0 (chr-ID scaffold0295 1; pos 477797 to 478531 reverse strand)
aagaaacgcttcaaataccattcttcttgtttcaggcaagttcatttactgtaaatgtttaggtactaatgttatttgttatcattatccctttcttatagaatctggggtagacgtaattttttatttagtctaaactcataaatatacattttctgtgactgtttggtgcagtaactacaattgagggaatgaataaacgggagtgttccttcctgctagtttttggtattgggttcttggcacttagaaacgtcttgaatctgttttatgacattacaattttatatggtgattattgtttctgttctcattttgggctctaagtcgtctgggcctacattgtttaaggtttagggtttaggggcacagtatataaccttctattctttaactgtagtgatttttgtattttgtactatgttccttttcgagataataaaacagtttctcttcttacttgtggatgtagttaatatactatattgaactatgttaatctgtgtgtcaatttcttcttatttgatcctttgcttgagtgtttctgtcatcacacattacctatgttttatgtatcaccatgccttttagatttgtgtcattgatttttttgagacaaattttgctagcaaagcgtcgatagattgctgtagttttgcattaccttgactaatagtcttcagggttgacattccttaagggggaagctgaacagactataccaaatttcattag

SEQ ID NO: 67818 - DNA, 952 bp, Cucumis sativus
  Intron number 3 from transcript Cucsa.385710.1 (locus Cucs a.385710) derived from phytozome v7.0 (chr-ID scaffold0390 4; pos 973406 to 974357)
ttcctcgccatcaaattcagaaggttttcttttctctcattttctgtttttcaaaattttaggtttcgttttgatatccatttaagtctcgttcgtaacaattttgtttttggtttcctgtttatgaattttctgcttgttttctcctggattttgtactctggttctcagatttacttttaaatactaaaacgtgaagtagtgaccaaataccaaacaaggtcttactttttagtttttgattttttctaaaatctgtttataatttcttaaaaattttactttcttaaagaaatatttgaattcatagctaaaatttgaaaaatatgaactttttttttgttttgattgaattttgtgagaactccatataagtagaaattgtcaatgtttttaaacttaattttcaaaaccaaaaggttatgaaatgggaactttaattttctttccaccaggtctgttcttgatttgatttctatgttcaatgattcgatctgcactaaacggcattgtaaatctttaatcaatctgacttggggaaatttgaaaaagcgactttatttctggtgggtggtggttttggcattattgaacttttagaaaagcttgaacatttcttacaaagatggtatttccatagaaccataacttaattctgaagcaaacctgttgcttttcaaaaaaaaaaagcgccacttaagtttcatcagctgtgcataatgcatacctttatgagtcttggtgccttttgtacaaacttgaaaagtagtccattttaacaccggtccaaagtgggcaatatcgtatcattttagagtacaagggattggcattattgtcctaatgttctttaagctagactggactacttgaagaaactgttgaatcttctctcttcttgtaactgattgtatgttgtcttttattgcaccttgcaggttatttgttcctt

SEQ ID NO: 67819 - DNA, 301 bp, Cucumis sativus
  Intron number 1 from transcript Cucsa.257450.1 (locus Cucs a.257450) derived from phytozome v7.0 (chr-ID scaffold0222 9; pos 4734662 to 4734962)
gtttctaccttcttcatcctcaagcttcttcacaggcaagttcagcactagaatctcttctttatcatcccgtttcttctagattttttgattcattgatcactcttaaatgcctgatatggagttcgagtaattatctgcgatattgaaaccctaacaacacagatagttttctaccttaaggtcctatcacttggaagaaacaatagaacttctgattatgttttatcttctatatcgtggtagtttctctcagggatactgataattagttatcaactttgcagacagatcgcggatc

SEQ ID NO: 67820 - DNA, 1014 bp, Cucumis sativus
  Intron number 1 from transcript Cucsa.218180.1 (locus Cucs a.218180) derived from phytozome v7.0 (chr-ID scaffold0165 8; pos 329056 to 330069 reverse strand)
cttgcaagttgtcggagttttggttttctgggggggtaagattttgtgtttttaagtacttttaggaagtttcttggatacccattgatacaaaatacaaaattcaatgatatttttttagtctttaaaagcccaatcgagcttagctgatatagatatgttcttcctctttagaagtggggaggttggatatcttatttcgactattgcatttgttagtactaaacaaaagggttatttttttttatttgggctttgaaatggagtatctgtgagaaaactcctttattactcacgcgaagctttcgccctaaattggattttgtgttaacggaattagttagggtacacgtttttgctctttcctttctctctgcttttcttctttctttcaacatctaaattcctatatatatctcatgacactgttcctaactccaatacactcttcaatgcgctcacctatcttcttcactccacattttaactccaactatttatcttttcctctctttcctgatttttattcttcaattatcttctccccacttcaacaccctacattatgttttgttgatcacgtatattgttattttactgatagattatatatttcttgttgttttctgatcctttttcgatattttatgaccaccattgggggctagcatcaatctgttggagtactatatatcaacatcggttggttgacctttgatctatcatgctcaccccaaccactcacgtcgccatctttacttgaactaggcctttacctctattctttttaatagaattggtgggatttctttttcccttacttggttgggattaaatgggttgatggggttgtcttctatggggagctctgtcctattggggataatttgttccccaaatttcgaaaattaaactgtagatatgactgaaattaaggttttgttgttttctatttaataaatgttggcttcattgacaggcgtcttggtgtgctacacatagagcaatcaaaac

SEQ ID NO: 67821 - DNA, 523 bp, Cucumis sativus
  Intron number 1 from transcript Cucsa.318710.1 (locus Cucs a.318710) derived from phytozome v7.0 (chr-ID scaffold0307 6; pos 243434 to 243956)
tcacttttgcacctggttaaaatccttactcattctctctcaactgctgtttagttcttgtcgttatggcatgttttgttgtgattttgaaaataatacaaatttcttttattatgtttttgaattactcctaatcatacttgatgcttcattttgcaattttttactgtcatttgcatatcatgtttttattttcttgttttagtatgtttgaatgtgattttaaccatgtcataaagtgatttaaatttttaaaatcaagttaatgggataatatgctctaatagggaggaaacattctttttgttctaaacaaatcatttaattaaattcaggctagtttccatatacttgtttaaaagctaagaatgtactaattaagcatttaaactgattttgaaggaagaaagaaatattttaacatactttcaaaatcactcttcaaacatgccttcaaatcaaatacaaacttaggttgacaataattgaaaaaaagtttataaccgttgcaggcttaggtggt

SEQ ID NO: 67822 - DNA, 925 bp, Cucumis sativus
  Intron number 2 from transcript Cucsa.232090.1 (locus Cucs a.232090) derived from phytozome v7.0 (chr-ID scaffold0198 9; pos 196481 to 197405 reverse strand)
cctttcatacgccggcttccggagttcaagttttggtattcctctttccattagctacttccttaatttttttattttgggatctgattgcattttaattttgcaattggtttttggttaattatctagtaactttggttctggctgctttagttgaatagatttcgttgctgaaaactatcatacgttgcagcatttggtattcatttctcgctctttattttgaaatgttgtataaggagtgcagatagatatatcaaataatgttccgaagacctcaccattgatacaactcgagtattactattgatatacatagataatttgcattgcgaaaagattatatttgttttacatactcgtataaattgcaggctttatgttgaaaatatatattgtatctatatccaatttttccttttcctgggcggaatgtgcattaatggataaaagttttgtttggttacttatacagcgtaacgtgtacttctgtaagttgctccttgccaagtgtaaacatatttctaaaatttgtcattgcatggagatggggtgactttgataattatggtggtggacatgttttttctcgtcagttgtcatccttatttcagacacatggcattcttgaggatgtacattcattgaattgtgagggattactataagttataaatgtattagatttcatgagttgtgtggcattatatactggctggttttgatgattctggtggtctcttattcttttcaagtgtcaaattatggcgaatgctttgtcattgcacggggttggaatgaaatgtgcagtatcagattatactgatatcatttagttgagttgatatagacttcatggacccttaaagcctatcttttctatttttcaggtacgccatcaccaaagctttttgtattgcgttcc

SEQ ID NO: 67823 - DNA, 931 bp, Cucumis sativus
  Intron number 2 from transcript Cucsa.366930.1 (locus Cucs a.366930) derived from phytozome v7.0 (chr-ID scaffold0362 5; pos 416375 to 417305 reverse strand)
ctggagtggtaacaatcatttacttctcttctttccatttctctgtctcatgattccatagctctaggttcaacgcatggttcgttagagcggaaggcgttggtttcagtttttatgcaatcgtattcgatttggtagttttgattgttctttgaagtgattctgcactcactgtttcggataattgtgctattgtactcttttcgtttcaaatttgatcaatactttgcctttgttttatggattttctttagaaaatgttttccaacttctatggtagggatgcctgcttggatctattaactaatctgaaatgttgatggatttttgttatggtgaagaaataagggatggtaatttaagtgtctagcaacattttaaagttattgtaaatataacaaaatatatcctttatagatttctaccagtaatatggtctactactgatctacatttcgctatagttgcagattcttttgcattttactatattttcaaattctttggattttattgctatatttgcaactgcttcaagaaacaatgaaaaaaagtatgcatttttctatctcttgatggtacatttcagctgttatatgttgttattgctgttggattttgttttaccttgtctaaattcttcagctgttactgtccttttctcttcctcgtagtttaaagtgttgtcattgctgttgaatactcactaacttgaattgtatgtgttttctgagctgaaattgtagtttttgagtagtttgatgaataccatgatttcatttcagtcatcctgctactagattctttcttcaattgctggtgcatgttaggtaatctgattatgcagtgacttcatgtcaaattatattgattcattgttatccttactcttataggtccttacctcaaccgcagtgaagaaagggggact

SEQ ID NO: 67824 - DNA, 809 bp, Cucumis sativus
  Intron number 1 from transcript Cucsa.242060.1 (locus Cucs a.242060) derived from phytozome v7.0 (chr-ID scaffold0204 7; pos 1893577 to 1894385)
aacatttggagttttcttactgtagttccatctgggtacttctaccaataattctgatgattaacagtacatatcatgtgtttactgtgctttgattttctaagctttactgtcgcactgaaacttttgtagatctctgaaaaggagagttttggaaagccttctttaccgggagaaaggggggtgttatgtcatcattgaaatttgcttttatttgaacctttgtgttgaatacgtgtgaatgcatttctttttatcttttgtgggtttgatttattgttttattggttggtaaggattacttttatgtaaagctatacgatgatggtgagtttgcttaaatggcatgtgctattcattcaatttaggaaaattctaataagtaagattcctatgagcttgttggctagcattttggaacttgcaagatcttctgttaagatttgtttggtaatttgtaagtaatgttcttcttcctaaggattcgattgtcatttaaagctgtttatatcttcctatacgtactagtgtgcttcatttgatgtcaacaagggatgttaattatttcctcaacccactttctatttatctgctacaaatttgaacccaagttcttcaaatgttttgcttaaagtatttacagtcgaccaagtttgagtaaggtactaaggtttcaataaacctgtgattgaatggctactgatgatgtattttcattgttctggttcagtttctcggaactttattaacaccatccatctcataaaaatctaggaggtgattctgaagacaaggtgaaaattattgca

SEQ ID NO: 67825 - DNA, 984 bp, Cucumis sativus
  Intron number 1 from transcript Cucsa.363710.4 (locus Cucs a.363710) derived from phytozome v7.0 (chr-ID scaffold0361 1; pos 1326056 to 1327039)
gttatcttcaactgggtcctgcttcaatcctcttggtattgcaatgattccacaaatttccttagtgcttttgcttttttgtggctttccaagttcatcaaatactttctgaaatctgaggccatttctttcaattttgtttcctggaatgttttctctctgttagagatttagtttgtgtttagaagctagcattgttgcagggtttcatttcgaggctttgatcttttcccttttctcgagtgttgcttgtcgatctgtgggagattttgtggtaaaattacatgtttttgagcattattgaggcttgtttctttagtctttttggactgtggtttgtgcttttcttcatggtttctctgattagttattagaatcagattttgcattctgttttgaatgatcatatgaattcttagaccatgagaatctatggcggcttcactaattgtcagttcttttttctttttttgtcaatttcatctttatctttttgttattttctttgtctaattattgaataaatgaatcaaagtaaaagacataatacccgatgttgaagttttcttagtcttcaatctctgggaaagttcttatccggaagaaatgttgacagttcaaacggggtccggaaatttggcgatatttgtgctggatgcacttttctcttgtgaattttttagttgattcttgaccattagcatggttcttacttataataagattccctatttgaatataatgctgttatggagaaagtttgatatcaagtagtttctaacaaaatagagagccaacgaaaagatgtttctaacaaaagagtggtattttatggtgctttaggtccatgtgaggtttgctttttgttcttttgaagaatcttctttccttgctttttgctttactctatgtgtctcctttcttttatttcttgtttattaagtatagtggatggaaactagtcaatgtttaatggctgtgcag

SEQ ID NO: 67826 - DNA, 358 bp, Cucumis sativus
  Intron number 2 from transcript Cucsa.239740.2 (locus Cucs a.239740) derived from phytozome v7.0 (chr-ID scaffold0204 6; pos 611800 to 612157 reverse strand)
aaacaaaattgtaagttccaattcttctagcagtcacttgaattctatggcatacaactttagttatgaatgatgcaactatgatcctatgcaattcaacagtagaaagttggatgaagaggataattattattcatccgttatttgtttttccagctatcgtctcctgttcttgctttgcgcaagtttttttccttacctcactcactttttagtttcatctatgtatttgggattttattttaattcctgttgtaatattttgatatttcatttatatatgaaatggttttttataaaaaagaaaatgtaatttcttattgttatgtctctgtcttcacttcttcagtgcctgtag

SEQ ID NO: 67827 - DNA, 950 bp, Cucumis sativus
  Intron number 1 from transcript Cucsa.360230.1 (locus Cucs a.360230) derived from phytozome v7.0 (chr-ID scaffold0358 8; pos 966341 to 967290 reverse strand)
gccgctccccccactgcacctccgtccacgttacggtgagcgattttccatctctgcatttctatctctctaagatttgttttctgcatttagatgttagatttttgggtaagtactgtaaaattgagtttgattttggggagttgaaatgaacgacaatctacaggaattacagatttgttagggcgaagattttgtagtttaaactattgagagaatctacaattttgttagtggggtggatatgacaatcaaaacattaattttgaccttcaaaattgggtatactgatatttctattcttttcatggatgatatccttatttttcttgtccagttttattctattttttctgggtactttgagattttagggcaattgatttaatttgggtagtttgaattcatagtttttcgattatttttgagaaattggattaaattagggaagaaaatgtctacttatgaggacataggagaaagcagaggggaaaaaagccctaatcttcgtcttctacctctccttctctcagtcactgccgtcgaccccccttttcccctttacaattcatctccttctcggggatccttccctccatgcaatgcatctccggcgacctttagaggccgcgtcagttctcctctcaggcagaagtggcttaattcaaatggtcactttaatttagctgcgaatgccacacttaaccatgagttcggcgcctcttttatttggtagtttacttagaaatcgttggtaataaattgtcacagttgaattgtgtattcttatgtttttgcattcttgttttatatatatatagcacttagcttcgtctccaaagcaatgctcacttcataattatcagacgtgtgatataaaaaagatcatgtttggaacatcagtttaaaagtgatataaatttcttgtgcagttgaagggtagtaagaaa

SEQ ID NO: 67828 - DNA, 842 bp, Cucumis sativus
  Intron number 2 from transcript Cucsa.384970.1 (locus Cucs a.384970) derived from phytozome v7.0 (chr-ID scaffold0390 4; pos 393377 to 394218)
gaagtctgacaagcttaagagcttatttttaccttgtgtttagttaaaagagttgaaggaatttgcatagatggaagctgccacgagttcagattccgcaagaatttgcaaggattttagctaagagttattgtttataaactatctttgaattatagtagtgataattttactttaagtagtattgtatcacttaaagtatagagtaatgatttgattttgtaaactctatacttaacatcgtaagattacacttatgatttatatctcaaagtaataaaatctcagatcaaagaccccctagacatagattcagtgtcatcgaactgggttagcaatgtctagtgtttctactgtctttacttatctgcactgttagttgtttctactgttgattaatcgagggttcatccttttttattgttgttgatgctttccttattttatcacttggtattagtgaaaggttttctacattctatggattttgtacatgaagaaacttcagcaataaaaccctcagttctaatggggtagactatgcctactagaaagttgtgattgctagatgggaaaatcactcttaaacctaagataacctggtctaaagaagaggatgaagcatctctcaaaaactctagggctttaaatgtaatatttaatggtgtagatcagaatgtcttcaaactgatcaatgcatgttcctcttcaaagaaggcctagaaaattctggaaactgcttatgaagggacatccaaagttcaaatatccagacttcagattttatcctcaaaatccaaggctctcaagatggatgaagacgaaatgatagctaaattcaa

SEQ ID NO: 67829 - DNA, 883 bp, Cucumis sativus
  Intron number 2 from transcript Cucsa.310320.1 (locus Cucs a.310320) derived from phytozome v7.0 (chr-ID scaffold0299 5; pos 151151 to 152033)
ctgaggagattttgtattctaaagctgactctgaggttccctcttttttcttatgaccttttattatcaaagtttgtattgtgttttgctatatggtcatcttttgaacctgagtaagaactaatttgtttttgggtgtagctctgttgtgtcattttttctttatcctcaactttcttttaaaaaaagcttagtttagtccatattgtcatccttttataaaataaaatatgattaagtttttgggagatttgtgttatgatgagaactaatgaaaactaatctttggttgatgtcactaccactattgctttaaggatgcccctccatcgcaagataatcggagccatggcgggatcttttaatgtctgagtttgggccatccatacaaaaatcttcttaactacactcttttgtttgaaaaactactaaatattgtaaaaaattgtgacattatcattgatctttcgttaagatgaaaaataggattgaaagagtgtagttttgaagaataggattggttttaggccactgtcacatcattataatcatctttgatcgaaatggttcagggtaatatttcaaacttcgaaagaataggaatagttgtgaaaaacatagagggatatttttgttatatgatttaggcaatagaattctgagatgtcactttactgtcctaataagcagatacatttcatcgggaagtatttgattagttgatatatatcttagggaggctaaaatagtttttttatgtaaagtgagcaactaaaacagaaatatttgagtgcttaaggtcccaactgaattagcaatcaaacttcaaagatagaaataaactcacgtggttcatcattatacatttgcacaggctgaatac

SEQ ID NO: 67830 - DNA, 819 bp, Cucumis sativus
  Intron number 2 from transcript Cucsa.365730.1 (locus Cucs a.365730) derived from phytozome v7.0 (chr-ID scaffold0361 1; pos 3598394 to 3599212)
tatattgtaataatcaggtgtggctggtttgtatgatctaaagtaatctaaagcttgagatctttgtagctatggttacatgaattagagtgtatgaagtagcagaaagaaaagaaattccaagcttcctagttatttattttagtgattgtattataaatttattctttggtttttttattatttttcttagcattatttgaattaattataggttagagtaaatatcacagtttttaaataaattgttttaaaaaaaatatttacaaatattacaaaaaaaatagattatcatttgtggtctatcccaacctaaataaatagtgacattttggtttgtaaatattttaattcatttttcaatatttggaaaatagttaaatatttcgaaattgactgtgtattataaaaaatattttgaaattgactgtgtattataaaaaatagtaaatttgacaaaatatttataacatataataaaatttttaatttttatcaataatagacttgcttatcagtgatattgatagctactgataaaagcttattagtttgtatttttgatagaatataaaattttagtttctatctttgatagaatataaaattttgcgtttgtaaatattttaatttattttgttattttaagaaatgttccttttgtatataagcaaattgatattctaactagtatatcaatactcactaattttcaaattgatcgtctaacgtcatacctttgctgataattttatgtgctatcgtttgaatttcatgtgattgagcctccacagatccaatcatcagttatttgatata

SEQ ID NO: 67831 - DNA, 486 bp, Cucumis sativus
  Intron number 1 from transcript Cucsa.307960.1 (locus Cucs a.307960) derived from phytozome v7.0 (chr-ID scaffold0297 8; pos 252592 to 253077)
cattgaaaggctcctcaaaacttcctccttcagtaactctctctttttcttacttcttctgctcttcactacaactttgactgatttttatatatgttccattttttctttttatcttttaatttgggttcatccgtagttttatatactctataattctctgcggtttaatttcccaaattattgttagtccattactggatcttgtgctgattgttgtccaatcttttggctaagtttaacatgatattggatgaactactgcaatgtaattataattttctcctcgattatactgttaataatcagagctatattggaatgactttccaaagccttagtgggtttttttttctctttcaattcaagcgcacttagaaattagtcattggttgtgctgagagatgattgatttaacaagcttgatttgttttttttttttttttcacagttactgttgtggattctggaagcaaagctttagag

SEQ ID NO: 67832 - DNA, 988 bp, Cucumis sativus
  Intron number 1 from transcript Cucsa.362540.1 (locus Cucs a.362540) derived from phytozome v7.0 (chr-ID scaffold0361 1; pos 379673 to 380660)
tatcgtcgctattctcaccggatcttggctttggggtaagatttatttgatgtggttgggttttgtggaagatttttgaacacccattgaacgttggcttcttcaaattagtgatacccttagatgttcggtttgatgctaaatttactcatgattttgaaatgctagaattcgaattagaagaatgttagtgggctgctcacgaagttaagacgaacttttgcagtgttgggtaattttagtgagttttcatagagtgttattgaatacccataattttttttttacccaaattgattgacgttcttcgtgtttcggctttagattcaaaatttggagaacattaatgtactatccagcgggttacgattaatgttgggaagattttggttaaaacgaagtgggtagagcttataatcccataagatcaagccattgacagtgggtggtttatttgtaagttgtttgggatcgggatgatacttgagggtgtctgtacactctgtagtttggatatcgtaagtcctagaaatgaaaacttcacctctttttcaggagtggttaatcaattatttaacagcccctactcccttgttttagaaaagtgtttttagatagtgtcttgtcatagatccaggttagaaagataatctgaaatggcttatgacaacttacctccatgatacaagaaatttcgtggaaaagctgacgttgagaacatgctcccagtctgaattttcaatagcatccaggggtttaagatagaatgtgtactaattaattaccatgaattcccacgacccttaacaaactttaagaatatgataacattgtttcataatggagccccaattttcatgcttttatgggaactgagaagcaaaatattgtctctcttagaagcttcaattcggtgaattaggtttatcctaactgggagacttgtggattccaaatccatgataaatgcttttggtgataggtcagt

SEQ ID NO: 67833 - DNA, 664 bp, Cucumis sativus
  Intron number 1 from transcript Cucsa.379730.1 (locus Cucs a.379730) derived from phytozome v7.0 (chr-ID scaffold0383 7; pos 135727 to 136390)
ttctcaaccggacgtctttccgatctgcttttcaggtttgatttcatttctgatccagatttacacatttcgttttgccttccgatctttatttttcttccttttatctatcaatgctgctccaagggtttcctcacatactctcgagttcttttcttttgtggttctactctgaaaaggattatttgaatagaatcagttcagaaacactacgacaattctcattttgtttatttgttttagttgagggataatcattcatttttagtagatgtaattacctttttctgtgtgttagacggcgatatcgtgtttgtctttggaagatttttgaagagtttctgagtcgttggttgcttctatagatatgcgttactttactagttacagtccttgattttgttatggaggtttggatttcattttacttttattatcttgtttggaggctgcctagactacagtgactacgcttttctaaaagcaatctgagaattgtacacgttagaagtataatatatgtactccttgtttttcatattatactggctctgcagccacattgggtttagttttggtgtttttatcgtacttatgggcttactcttacactatactattattttcaggctgtaatttggttagcaataaagcatttcaaata

SEQ ID NO: 67834 - DNA, 860 bp, Cucumis sativus
  Intron number 1 from transcript Cucsa.285020.1 (locus Cucs a.285020) derived from phytozome v7.0 (chr-ID scaffold0265 3; pos 1539243 to 1540102 reverse strand)
acttcctcctcttcacattctcaaggttaatttccctctctctttctctacttttcctcttcaccttcttctccgattcactcttcacctttccactgctgcacaatgtctttggatcttgaaatcattttctacttcaacaactccgtgttttgctttttttgtttttctacttgtttctagttcgaggtaattgtatctactgaactgcggatgaattcttcttcgttgttgttgttattgtttctttttacttcatttcatttcttttacttgtttgtttttctttctttctgatactgttactgattttgtttcgagttttagtgattttgtttttgaggaaaatattttattgcgatttacgcgggatgtacgttttggattatttatgtttgtattaattgttgaaactacttgccttactctatgatacattatctagcttactatcgattttatattctgcaattagtgcatgtcgagaagtctgatttagtttatgtttgttttgagagatatctgttttttgttatcggtttttttcccatgtttttcagaattagtgttgaggaataaggttccagccagctgttggcattttattttcgtgatgcttaatgatggaggagtttgggattgttagagttgttgcctatttgtgaagtgtttggtcgtcagaatgaagaaaagttatggacgggttttggttgcatctttgtctatgttgctgttgatgatttatgttatttcgagaagttcaactcgggagaattattatgcggctcctttttacaattccgttgatcctcttcagtggctcaatcctgcagttccaccttcagttctgaatcctgaaa

SEQ ID NO: 67835 - DNA, 855 bp, Cucumis sativus
  Intron number 1 from transcript Cucsa.307120.1 (locus Cucs a.307120) derived from phytozome v7.0 (chr-ID scaffold0297 7; pos 398821 to 399675)
ccgataccaagggttgtattatttgtttcatttgggtaagttttgttagtttgtacttacaacacctactgagaatatattaattgcttcttcattcgatgttcaatcggtcttaatgaaattggaaaatttagaagtaattattgatgttgagttggcttgaatggtagaagtaactattgatgttgtaatatggaagaaaccactggcttagggaggcttaaatttaaaaaatgggaacagattttttaagttcagaattcttccaaatactaccaatttggaatgatttctattattattattttcttttgggggtaaagtcagattcatcgatgttcttttgcatccataaacaaattaagaatggagatgtggcttccgatcatcctctatatcttttttctcaattgaaaaacgaaaattagagttgtatgatgaaacaatggagtcaaaatttgaataatggagttgtctgttttgaatttttttttaataacagtagccgaatagcataaaaaaaaacagcctctctgaaaagttggattgccttgtgctaccttctgccttttgatttgttgcatatgtaagtcaattttcttaatttagggtttcgataatatgtataacgatttggtctctgctaaaaattgcataatttctgcgaccatgagttttctgtcttcacagttatcattcaaagcattttttggtggaactacatccaattttcatcatttcttttacatgtgctcttaatcctgtgcctttgttttctttgaatgtcttttcaagttctatatacaaaaaagtcatatgttgtttcaggaaggattaatcaaccaacaaatttca

SEQ ID NO: 67836 - DNA, 801 bp, Cucumis sativus
  Intron number 3 from transcript Cucsa.307120.1 (locus Cucs a.307120) derived from phytozome v7.0 (chr-ID scaffold0297 7; pos 400084 to 400884)
gatgtaagttgtcatcacaggaaacgttaaagagtcttttaccatttagtctttggttttctgtattttcaaagtcaagcttataaacactacttcatccatgtgtttcttcgtttgctacaaggtttcaaaagaaagttcaatatctaatccaaaatttgaaaactaaaaagagtaattttagttttcaattttccagaaaaaaaaaagaaaaaaatggagctttagttatgaacttcggtcttaaaagaagatgaaaagcatacccaaaaatacgtgaagaaatgaacataaccttaaaaacatctataaagaggtcactgttatcaaacgtgatttaatatactccatttagttggcttcggtcttaatgttttcgatatctgtatttttcctttattagtattttggtctatatttattcaccaatgtaatcggttattatgtattttgatttacaatatattatataaaattctcatagtatcagagcaagttgcttaaagatgtcttgggttcaagctccaatattgatgttttctccccatttaatattcatttacatttttgggcaattttttcatatgttgagcccataagtgatggggagtgttagatttaatattaaatttgtttttacccactagcttaagcttttgggtcaattgtggcataatgttaagtatgatgtctcatatgcctagcaacaggaaaaagagctatatgtaatatgtacttggttaatttaatctcacttcttctgcaggtttcaaataatagaggaagagtaattgacaggat

SEQ ID NO: 67837 - DNA, 763 bp, Cucumis sativus
  Intron number 1 from transcript Cucsa.219120.1 (locus Cucs a.219120) derived from phytozome v7.0 (chr-ID scaffold0165 8; pos 997078 to 997840 reverse strand)
tcacttgcattcaaacatcatctataccttttcaggtattgtaattttctcttccctcaattcattctatgactttatatttaattaggctctatatttggtataagcttaaattaatagtcaatgcagcatagtttcaattggaaaaataatatgttacctctctcgattcatttgcatatcaataaaagatttattatgtatagtctacacaattcttgatatctgttaaggtaaccaacaataaatggaggtatcctaatactaacaccccttaaccaacaataaatggagatattctaacaccaaggttcttgatttctcttgttagagtaaacactatttcaaaactactagtttgttacaatatttactatttgctacgagttttactatttgacattgaatagtcacttatcaaactaaattagtctacgtgtcaaacacatattataactctaaactaaattaatacacctgaaacacgaactataataatatttatagtccttaaatagctgttgaaaatttaattgtttcaactaacatggagttgtatggttgattctctcccacctttatataaacaatattttaaaaagaaacatgtaaaattaaagaaaaaatgtcaaaaatataatatttgataaaataattgtaatgaatttattaatgttttataattttgaaaaactcctagattgaatgggtgtttacgtaatttgcagcttgggtacaagtgaacgaggggaaagctgacgta

SEQ ID NO: 67838 - DNA, 510 bp, Cucumis sativus
  Intron number 1 from transcript Cucsa.238330.1 (locus Cucs a.238330) derived from phytozome v7.0 (chr-ID scaffold0202 3; pos 927686 to 928195 reverse strand)
gaggtaaggtatttaaaattttgttaatacatctgacaatctttcctcttcatctactactttagcatgcttttatgtatttttcgacgtagaaaattgaaaattgatttgctgatttgtccttggcattttacttggtgctcttttttccctttttgtgagtactattagctgtaatatgttcttgttttaaactagtttctcttatctaattgtaggttgtaaggttaaaatattgtttttagttcttgaattttgtcttgttccccttttccatcgaagttctattaagtcctactgactgcaagataatttcgacatttaatctttgacaagagactgtatctttacaataaaaagtttagaaactaaagtagcaattgagatagaagtttagggattaaaattgaaaaggaatcaaagatgaatattttcttcaataaatctttctatgtaaagcaggtgctttctttttctctattgactaaatttatgatcataggtagtatc

SEQ ID NO: 67839 - DNA, 899 bp, Cucumis sativus
  Intron number 1 from transcript Cucsa.218230.1 (locus Cucs a.218230) derived from phytozome v7.0 (chr-ID scaffold0165 8; pos 355374 to 356272 reverse strand)
cacccaagccgctcgacattgtgtctgtaagcaaattttcattcattttggatattgatttaattgggaatctgttttactttgtccttagtggttgaagttcgaatgcatagttttcttaaccttcttttttgaacttttaaataggtgatgttaaatatgtctatcatgccatatccatctcatcctactttatacaggaggttattgggcaaaaaactggattcttttgtgccattttttccattaattcataacctagatttaacagttaggtaggatgaaattggggaattcttaaaggcttgattggctaatttaaacaaattagaaatgagataaattatagggatcaaagctatactttgccgtgtttcaatagtgctttcaaacttaccaattgttcttgaactgttattaatcttaaaagcgttcagaaaaatgattgtttgatttataaactaagaaagaccaaactagatatctaataacaagaatttcataatgcaacaaacaaaaagtacgccaacttttatgagttctatattttgaggaatttttaatgtctaacggagcatttaatgtctaaatgttttcttttaaatcccagccatgcaccgttgattcatttttaaaaaagaaaaaaagaaagaaaggacaagaaaaaggaaagcattggttatcttttacgaaaatggacaactaaggacactcttgaaacgcttggattttgaaggcctaaattgcaaacatacaacttcttgaagtattcagcatattatgttcagttactgttcaggttttctagtttagcaacgtaggttttctgttttctttgcaaatacatcctcgagaaaagaaaaactgaactctgggagacaatatctctgttttacaga

SEQ ID NO: 67840 - DNA, 972 bp, Cucumis sativus
  Intron number 2 from transcript Cucsa.240280.1 (locus Cucs a.240280) derived from phytozome v7.0 (chr-ID scaffold0204 7; pos 243065 to 244036 reverse strand)
ggcaggtgttggcatatttcattctgggattcaaggtttgttggcttgtttcttgtagcatgcattgtttttgggtgaggatgatgctaactaaaatttgctacgaacaaatggtaatttccgtctgcatgcattgtggagaataggcatcttgaagttgcaatctctttttgtgctcgtatctgttaaattgaaaataatcacccatataacatcgataagcttgtcgaataaattcaaggtatggaagaatgaaaagggttttggaaacaggaccatggacactagaacaaaagatttatttgccatttacatgtcttatctaaaaggggaaggaaaatgcaattgagatacacaaaaatggttctgcctttttttgcattttgattttgcaatggcagggtggttactcttgtttagaaacttttatttggactatttcctcccaagtaaagcttctggtccgaaatgaaatatcctttggagaatgcaccactagaactagagctcttttgttgtatatttggaacgaaagaaatagtagaatttttaaagataattttgattctttttggactgtggttcagcatcatcgtacacaactacgtcaaacactttcgtaattataatctttctatttttaacaaatggaaggtccttattcacttgtgtttcttctgggggaaggtctccctgacccttgcgcttaagttgtcttcttttgttctcgtggatataatcatctgttccttatttaaataaaagtgtcttaaaacattgtttcaaaatgaaaaattgagtccaagattaccgagtttatagtaggaaaactacctcttttgcgttttactgactcaagctgcctttaccttcattcaaggaagtatttagacagggtgatgcattcttttaactgaatatttcatgacgatgattgttatttctaatttccatttaattcacttacagttc

SEQ ID NO: 67841 - DNA, 685 bp, Cucumis sativus
  Intron number 1 from transcript Cucsa.310240.1 (locus Cucs a.310240) derived from phytozome v7.0 (chr-ID scaffold0299 5; pos 98158 to 98842)
ggttagtcgtatgttatgataacgtggaattgtttacttggaatttcgactatgagaactgttgatttaagttttttcttttctttggacttttcctggtggattgaccgaatagatttcacttgctttgtcgaatttattcgtccgggttgctggattatgtgatttttgaataatatctactgttttttttttcttttcacgatctcattgatttgtggtttaattcgtaaaatctacttgcaagctgttgtctaaacacaccatatttagcttaggttacttctaatgagtcgcatcgttcttagtgtatcagcggccttttttgcaccccatgaacgaactggagtccttctaagttctacctttttcttttcttttatagggaatttatggctgcctaggttgcaatacttttcaaaccaattgttgtttttaaaaaaagaaagaaaggaactcaacgataaatttttgaaaattttcagttaagaagttatctcatttaagtaataaatttggaagaagtaaagtaaagacctgtggcctagctctacgtttctgccaatgttgggtggtgtataacaatagcaactaactctcttgttttttttactattaaatgcactctttgtttttggtggtttacttatatcttcactcagaaagccttcatttcatgcgcaga

SEQ ID NO: 67842 - DNA, 769 bp, Cucumis sativus
  Intron number 1 from transcript Cucsa.269030.1 (locus Cucs a.269030) derived from phytozome v7.0 (chr-ID scaffold0244 4; pos 260418 to 261186 reverse strand)
ctttgggtcctttcaaccctctcaaaatctccaaggttcgttttgttttggtttttcaacacctaattcaaaataactcattttccttattaattttgagatcaaatgcgggagtgtgtgtatacaaatcatatattcggtggatccaaatattgagtatgtgaataaataagtgtttttttcctcctcgtgtatatccatattttcccgtcaaactaggtggcccaaccgaagtttcccatgaaaattttatatatttcacattttggcctttttgggtgtgtgcctggctcgaattgcaaaaatagctgaacccaacttaaaataaataattttattattttaaaaattaaacctttacgtatttattctaactctcaatttcttattttcttatttatcttttatcctttactaatctcaacttaaactttcaactaaaaatgtttttatttatttttgttccttttaaatatatttaaaattttaattattgtacttaataatcttcaaatcaggataagaaatcagatttaactttaaaaaacaaaatacaaataatgaaatgtttattaaacacaatctaaatgtgaacaaagcttaagcaggttatctcaattaaaatttgattttgtgaaaatatcattttaataaaagattatcaatgagacaaggataaatatacatggaataatttaatttagtttttttttttttttgtttagatggtttgtttgttaattgatttaatttttcctttattccaaga

SEQ ID NO: 67843 - DNA, 968 bp, Cucumis sativus
  Intron number 1 from transcript Cucsa.311410.2 (locus Cucs a.311410) derived from phytozome v7.0 (chr-ID scaffold0299 5; pos 1023970 to 1024937)
gagctcatcaaatacggcttcatcgaggatatttggtaatctttcctctatctctctttgttatttatgtttctttcgcggcttgttgtttgatgtcaatttcattgagaaatggttgtaaatggtttctcttgattaatcaagtcgggggataaagtgctgctgatgtttactttcttcgttgatgtatttggaaattgatattcgattttcttttttgagtttaaaggtaaatcaatctggttggttgttttttgttctgatttaaatcaatttccttccctttgtagagctttatgaaactgaaattgaatacatttgaggatgtctggcggattatgaagagaatgaaatgagtttcctgtcttcattgatatctggatttttcattgcacaatcttttattaagtgatacaggactcggacttatcatggtcttgaccactgttttaaaaaccctggtgtgcctaggcttaaggcacaggtttggcgccttgtcttgaaaaagcaaggctcacaaactaaggcgcgcctgccttctgggatgccaaacgtctcaaagcctgtaccttggggctttttcattatttttagaaaatcgtaataattggaggttttcccccttatttttaatatggaacaattaaatttagtaagactaaatgaaattttcttgtgttagagagggtttttcccccatatttctattcaactatgttttcactcctcaatatagtacttttatatataatgtgcctcacaaaaaaaatccatttgtttttcaccttgtacttgagtcctagaagaccattgctctttattgcaccttgaactttaaaaattactgactgttttgtggcattaagaactaaggggttatcatttagtcttttgtatctagtttttgttttagggaggacttggcttaagttttcttctattcacaatgattgttttgtgcaggttcc

SEQ ID NO: 67844 - DNA, 848 bp, Cucumis sativus
  Intron number 2 from transcript Cucsa.265730.1 (locus Cucs a.265730) derived from phytozome v7.0 (chr-ID scaffold0235 2; pos 149541 to 150388 reverse strand)
agccacgacttcagcttatttttagagattccagggtcagatctttttcattcttgtatttttaattggaatgctacactgtttccatgcataattgatatgaactgatgtttgttgattccattccgacactttcctagaatatacatattacttttgtacaaatagtagtttttttcagggcaattctaaatatgaaccaagtattggtatccagacactcaagactatttactcttatgttttagatgcatcaattttgctacggatcgtataatcatttttgtactcaatttccggctttgggtcctgtcataccctgatgtgcaacagattcacgtacttcttcattacccatcatattctgaaagatgggtgggtgtgacttttttgtgctgtcactttgctcctcgataatgtttttgcctaagaattatttgatcctactacatttggcttctaagaaaactagtaggatattaaattcttgggtaacttaaacttgttccatcaaaactatttgcattggctcgtgttgactgttaagccacacacaatggtttaatgacatgaattattccctgtttatatggtttttcatttggactctggaaggtttgtgttgttttcataatgcttttttgtgacaagtatgacatgttcttccgcatagaatacattcttgtttttctgattttcatttctgtaaatctatctacaatttatacaagtgagaatacctttcatgtttaagacttagatggatgatattaaaagctaaggttggtcttcgaaagccttttaagttgaatcaaagttgtagtttttgttgactttttttaataaag

SEQ ID NO: 67845 - DNA, 766 bp, Cucumis sativus
  Intron number 1 from transcript Cucsa.349620.1 (locus Cucs a.349620) derived from phytozome v7.0 (chr-ID scaffold0348 7; pos 838909 to 839674)
tagcaggtgggttagaatgtctagtacatcaatatgttgcaatttgcttcattgactctgccttacattaatttccttggttttcttttctgatcgaacttgagttatgtagatgggatatatacttaagcagttaagcttgttggttttccatcttgtcctatatcatcttgacttgaaaacttcatccatttcaactttttccatatttcaaattttctaagcattttctagaatttataaaaaccattttggacttggagttttgccttacgctctttgtgaaaacttttattgatcttatgatatgtagtatgcttgatacgatttatgttctacggtgtactaataaacgtgggagggacgttttttcttttacacttttctaccattttgaatttgcatttgcacttgtttttctgttgtatcgttactcatgctaccctggaaacaaatgataaatagagtggatcaatttgcatgagtcaattcgcaaaatcatgcttatttatttaatcatagatatcttctcaaattgttgtcacatactacatctatgcgttttccaccatagaaacctcgtagcattacctcatggatatatttcaaaatggtgctgtttttgcttttcaccagatggatggttggatcagtgttggatgcaaatctttgtgagacttacattttgtgtttcttatacttgttatttttgtctggttggttcccttcttatgttgatgtagattccattctttggtggagtttg

SEQ ID NO: 67846 - DNA, 841 bp, Cucumis sativus
  Intron number 2 from transcript Cucsa.339800.1 (locus Cucs a.339800) derived from phytozome v7.0 (chr-ID scaffold0335 6; pos 2355210 to 2356050)
tataagtaagtttctgaattatttgtttgttctaatttcttctcattgcctctgataactgcgtgcctgtatttttatcattccatgaaagaaggatgcaaatctttagtttaagagacttccattcaatatttttaaaacttgttaatgtttctgccactcttctcattctcttgtgagtttcgaaattagcacgagatctaaccagtagactaccgagacatttacaagatatgaacataaagtactactaatctaagaccacgttaaactattaatttatgacaggtgattttatcaatagtggttttcgttaaaatgatttgtttatgattaatttatgacaagtgatttcatatgttcgtttgagtgtttgcttttacactttaaacactattttcatacaattaaatttggttttgaatgattcaaagcatgtttgagagttatttataatccgagaaaagtgattttaaccatttcaagatcaaaatatcaagtaatggccaactacctaggatttacacctaagttttataggagcgagttgtctcgtgatattgatcaaggtgcacacaaggcttgaacactcacaaatatattacaaaaatcattttcaaacatatcataagcttcaagaacatgttcaatctttttcaatgatcttgccatgaacttttgtattctcaatcttttaccgttagctgaatctgttcttattaggtgatctatgaaaagcttttatcgtgcatgaatgatgatctctaagttagagccattattaccttgttatttacaggaaagtgaacaatacttgttggcttcattgtccacagaactg

SEQ ID NO: 67847 - DNA, 351 bp, Cucumis sativus; identical to SEQ ID NO: 66057
  Intron number 1 from transcript Cucsa.337120.2 (locus Cucs a.337120) derived from phytozome v7.0 (chr-ID scaffold0335 6; pos 276971 to 277321 reverse strand)

SEQ ID NO: 67848 - DNA, 784 bp, Cucumis sativus
  Intron number 2 from transcript Cucsa.374660.3 (locus Cucs a.374660) derived from phytozome v7.0 (chr-ID scaffold0373 5; pos 160793 to 161576 reverse strand)
gatcctgcttttcaaggagtagggcaaagggtgtatcctttgtttattaaacattgtttctcctcacctttgtttttctttttggaataagagaattgacgttagttgttatctaacatattaagatcatgctactgaattatttatttacttggtttagactttcttctttcttgtcaatattgaacatactgattgtagttttacatgttgaacttaatatcttttagtggcactgaaatttggcgaattgagaattttcatcctgttccattgccaaagtccgatttaggaaaattctatatgggggatagctacatagtattgcaggtttctttcaacttattagtactgctttaatatccatttgaagtgtcttatttcatttaataaattggcaatgataatttaacttagtttccatgattaatcttttttgtttcacggaaaaaaaaagctaaagttatacccaccttgacaactgacactcatttttgagtcttaattggtgtaagttaagttttgtgagatgtttgaagcagttggataaaagtatgagttctttgattatttttcttctttggttttcctagttttttcttctttgagaaaaaatgagtcattcatgctaagaaccgactgataaaatatagatatggaaggtggctttggagtaaatgcttttgcaattactttgttaaaatcatctcttacatgtatttgcttttaacaagtatttcctattgcagacatcacaaaacaaaagtagctctttcttgtttga

SEQ ID NO: 67849 - DNA, 732 bp, Cucumis sativus
  Intron number 1 from transcript Cucsa.247800.1 (locus Cucs a.247800) derived from phytozome v7.0 (chr-ID scaffold0220 5; pos 75431 to 76162)
acgaaagaagtaggtctttatgtttaacgcccacctactgtttgttgttgttctgcttttgggttctcttttgtgttttactgtgtgatttgattcactctgttgttggagtgatttgggaatgtgggttttgcaatgtggtgatttttgtgtaaggggcgggttgggagtggagtttaattgttcggaaagaggcatggtttctcaggatttcagaggtgtttccattcctcttattttctcatgggacagaaggcaattcttgggggaaacaatgctggttttgctttagtgccgtaggtttttgttttagatctgttagtttactgaatatatgttttggactatcctttaggcattttcgaatcttcttacatttgctgtggctaagcactttaaactggtctaaattaaggtcacaataacgcttttgagagtggattagaagaaattaaagaagaaggtttgtacctaaatgttgttaatgaaaacagaaaacaagatataaaaaggttgtcacagaaaacaaggtattaccatctttgttgtagttattgaggttcttgtcaatcctgttgtgtgatagattgaacactattataatctataccgcttagaatatgcaatacaaatgcttcttattatctctctaactctatgatgctggatacttttacttctctatgttcaaccttcctgcttcgtctggaaatattagactcgcttaaccat

SEQ ID NO: 67850 - DNA, 355 bp, Cucumis sativus; identical to SEQ ID NO: 63828
  Intron number 1 from transcript Cucsa.250440.2 (locus Cucs a.250440) derived from phytozome v7.0 (chr-ID scaffold0221 9; pos 593099 to 593453)

SEQ ID NO: 67851 - DNA, 497 bp, Cucumis sativus
  Intron number 3 from transcript Cucsa.202380.1 (locus Cucs a.202380) derived from phytozome v7.0 (chr-ID scaffold0137 6; pos 411028 to 411524 reverse strand)
atctgccgcaagtgagttattttttgttcttggtattttctcattctaggactgctgatatatcttatcttacatgaactgatacaactaagatttcaacctgactggtctgttcagttttttaatttccttttttctgttttctggtttgaactttggtttggtttgatttgaataactgaacgaataatttcatttcagttgggaaaattttaatagtaaactgaaaatccaatgtgtttaagttttttcttattatcagtttgattttgttgtaacatgaagattttcacgccggacagaaattggccaagccgtatcagaatgagcgtactcccaattgaaactcttgaactttgatactttttataaaaagtttgaacaataacttatttttcattttggaaattgatttttttgggtgtgatatggtttgacctcccgtccagaacagagaatgtttttctaaagttttttcttctttctttggcacacag

SEQ ID NO: 67852 - DNA, 567 bp, Cucumis sativus; identical to SEQ ID NO: 63772
  Intron number 2 from transcript Cucsa.202380.1 (locus Cucs a.202380) derived from phytozome v7.0 (chr-ID scaffold0137 6; pos 411582 to 412148 reverse strand)

SEQ ID NO: 67853 - DNA, 509 bp, Cucumis sativus
  Intron number 1 from transcript Cucsa.252180.1 (locus Cucs a.252180) derived from phytozome v7.0 (chr-ID scaffold0222 9; pos 1147951 to 1148459)
aaggctgtacggtttctgtttattgttacaatgaataagttaattgcatttgattgttttcaattgttattccatttatggtgtttagagtttctgttttctgtgtatcgcctgttcgctgaaaattcctgaactttttttaggggttctgacttgttcagtgcttccttcataccaacactgacaagcttctatttcttgattatagtgaactgtagtctctttgttcttattctgtttgtctcaggtttagctgtgtttacaatacctctaaagttccgagcttttgtttatggagattgtttctctcaatgatgttgatttgcatatttctttgtttaaataagcaaatgccaatatgtgggctttctttgtttctttaataggtattattagtcaagatgaaaaggaatgaagattgaatagcttaatgggcgttgcttatcgtaaatttctctgactcttatgttttaggtgccgttttattgatcaaccagctattgaaatca

SEQ ID NO: 67854 - DNA, 536 bp, Cucumis sativus
  Intron number 2 from transcript Cucsa.198620.1 (locus Cucs a.198620) derived from phytozome v7.0 (chr-ID scaffold0135 7; pos 1614757 to 1615292 reverse strand)
agaaggccaggagtaagtttttgtgatgcctttcatttctcttttccatgtgagtctagaagggaagattggttggtagataacaatgaattagtgtatgaatatgttgtcatgttttctattttttttccacatgaatctagagatgaagagagaactgattgacaggttaacagtaaacaatacataatcataatttagtgtaggattatgttgctaggacaataggctcttggtgtttctgtattactccatgaaatagtaagatattgtccactttaacttaatccgttaattttgcttttacattatgcacaagaggtgtatatgattatatggtttctatcatgttgtgttgtcaactgtctttaatttgttccttctatctgtgattaggtgctagtttgaatttttggcttagatatcagttgaatgtggattctaagcagaatgagttaactgaagaaacataacactcgatgttacaaaaaaattaagcggaaggaattattatttaatttcaggttcaagtggag

SEQ ID NO: 67855 - DNA, 745 bp, Cucumis sativus
  Intron number 2 from transcript Cucsa.286370.1 (locus Cucs a.286370) derived from phytozome v7.0 (chr-ID scaffold0265 3; pos 2433942 to 2434686)
agcttttaaggtgttggacacaattttaagatcaggtacttgtttcttactttctttctttgtttttgaggaaatatcaggtactgtattcatttctagttgcgcttttgttcttcgttttcgtttattaccgggagaattcggcgctggataggaatccgattgttgatatttgaggagaagattaggagtagaactcttgaaaacgcgttcttccatccgtggctaaaaatctgctgaaacttgatgtttcttctgttcaatgttttacgagagagagaaaagtcaggcgctctccaatcttatttatggctcaatttgtcataactgtcgcggtttccaaaattataagtcggcgtgatagttagagagaacttgaataaaattttgaagtccaatcggttcagcactaaaaacctgtagacagtttctcccatacgagtctaaaattctggagaacttgaacttccgtaagttcgacgactctgtgtttgacttgaaatatatttatgtatcatcgatcctcagtgcgttgttagctaaattttgtcgtggtttcaaggaaaaataaatcggcaaggtagttaaaaataactcacaattttagtgaaaccagttctgtgaaatctttttaactggcgctgctgctggatgccatatttatgcaatgcttctatgcggcctggagtggagttgtttgttatcttattcgctgtcaatgtttcagttaaaggagagcttaaag

SEQ ID NO: 67856 - DNA, 681 bp, Cucumis sativus
  Intron number 2 from transcript Cucsa.265620.1 (locus Cucs a.265620) derived from phytozome v7.0 (chr-ID scaffold0235 2; pos 51981 to 52661 reverse strand)
tgcacgagtttcggcttccccagtcaccaccaaatgtatgtactatccaatccattatatttcattttaaaacacacttttttattcttttgcttccctacactaactattgctattatttggtttccaaaattaagttctttttttcgtctctcaatttcttataattttgaatttttaagttaaacaaagcctctctctttttatttagccaaattctttaaaaaaataataataattgaaaactaccttttagtttttaaaataaaaatatgggcaaagtggataagatagcttaaaactagaaaaatagttgataaacttaattcttgaaaaaagataaatttcaactaggatccacctattttttgtatagcttatgagctagctagcattcagtagaataatttgaggagatgagagcataagattaagttatacctaatcattctactttaaaatttaaaaagttaaaagttttttaaatgaaaacttttcaaaatatttgtttattttggtgtatttgaaaattaaaggtaaacaagacgaagaaaatataaaaagaaaagaaaaaaaatcttaatttaaaaaaattaagaaattataaataatcaaacaacagtatatcattttaatagatttatctctaatttctttcttatgaatgattctgtaggagtc

SEQ ID NO: 67857 - DNA, 307 bp, Cucumis sativus
  Intron number 1 from transcript Cucsa.374320.1 (locus Cucs a.374320) derived from phytozome v7.0 (chr-ID scaffold0373 3; pos 207391 to 207697)
agtctcctggtgagaagtttgagtaccaagccgaggtgggtctttgtttctgttgacggaaaatggagaggacttgggaaatggtgttaaaagattggagtttttttttcttcttcttctttttatgggttttgagtttcttgacttggtgtttcttgaaacatcaatttcctaatatgtgtttggtttttgtggtgacattatcaagcttatggtatgtttagtcatgggttttcgtgtattgataatgtgaacgtattgaatgattgcaggttagtcgtcttctggatttgattgttcacagcct

SEQ ID NO: 67858 - DNA, 784 bp, Cucumis sativus; identical to SEQ ID NO: 66146
  Intron number 1 from transcript Cucsa.311580.1 (locus Cucs a.311580) derived from phytozome v7.0 (chr-ID scaffold0299 5; pos 1138453 to 1139236)

SEQ ID NO: 67859 - DNA, 500 bp, Cucumis sativus
  Intron number 1 from transcript Cucsa.242310.3 (locus Cucs a.242310) derived from phytozome v7.0 (chr-ID scaffold0204 7; pos 2068953 to 2069452 reverse strand)
agtcctcaaagaactgcaattagtgttttcagaaggtgaggtcctatccaagaaaacaaaagaaatagtgttttgaagaagttgtcacttaaaatttgtccacctccattttttattttataatttgtttacttttcgtcactaggactttttgtaattggaagcttgttctcgttcttttggacggagtacttttctgttatttgttttgatgtctttttgatcggttttgttttttgtatgtcattgtattctttcaactttttttgtggaatgttgggcttcttaccatttttttataatatcaattattttccattataaatttctaatgtgtttgtcaactgacaagaggcatgttatcctattcaggggattgcttttaactgaaaaatcctgtacatgaaggaaaattggtgccatgtgtttatgcaaattttattgtttgggatttaatgttctctttatgtttaattacgcagacacaaaacaccaattca

SEQ ID NO: 67860 - DNA, 524 bp, Cucumis sativus
  Intron number 3 from transcript Cucsa.259090.1 (locus Cucs a.259090) derived from phytozome v7.0 (chr-ID scaffold0222 9; pos 5750298 to 5750821)
catattcaccatcctcagttaaaacaaaagcacgggtaattaacaactccgtctaataattacttacgtagctctgtttagtaattaaattgctacccttcttcatcaactacactaccttcttcaccatctccatacatgtgtaagcttacaatattaaagttgagtggtgggtcaaataggtgcccccaagtctattttatttttgaagttcaatagttgaattttgaactaagttattccaaaaacaaaaagtttctttgacccctactttttttaagttttcaaatatattttacttgatttcatgaaaacactagtaaaaagaaaataacaaaaatcaaatagttactaaataaatataacttaattggtttttggtttttagcttttgaaaattaagtctaacatccatttgcctcttaattttaatccaaggtgataatgatattatataagtgttgaatattgaatgattgggttttgcagggtatcagaggaagttccccacagaaacatcaaaa

SEQ ID NO: 67861 - DNA, 886 bp, Cucumis sativus
  Intron number 1 from transcript Cucsa.386840.1 (locus Cucs a.386840) derived from phytozome v7.0 (chr-ID scaffold0391 8; pos 364780 to 365665 reverse strand)
gcttcatcgtcgtcgcccctcaggttcttactctttttttttttgtaaaaaaaaaagatctataaattgtttttattcaattaaattattggtttaatcttcttaatagatattaccattttaattttcattaatttcactgatcacttgctaagtcactcactaacgtatcataaacaaaaaagtattgtttttctttgattgattgagtgcaaagagtaaggaagaagagtatggagtagcacacctacaaaacgttctacatccttattttcaaaagcttaattgataaaattttagacattttaactatatattttagattgactgagtatgtaaactttagattgactgagtatgcaattaaaacatatatttttagaatctttttagaaagaggaaaacgtgagcctaacacactttatttttttattttttattttttttgaaatccagttaagtataattactaaattttgagggttaggaagaaaaaatgtttaagaaaatcattattatgagtaggaaatgaacataaatggtaaaagcactaaaatatctaatgtgttaatgcttcataatttgttaattttaagtggaatctatagctccacgccattggtttatcaaaagacctccaagtgttgctttgtcaacacaacataaaaataaagccatccccacttcttaaaccattttaagttcatactagactattaaatttcattcttcttggatgaggagagagataattgagagagttgacgtgaacaactatcctctttagtaattgatcaactcaacccaatttgggggctaaaaaaaatgggaattaatttagcccaaattaacttgtctgtacagttatacactgtggccggaccag

SEQ ID NO: 67862 - DNA, 710 bp, Cucumis sativus
  Intron number 1 from transcript Cucsa.258930.2 (locus Cucs a.258930) derived from phytozome v7.0 (chr-ID scaffold0222 9; pos 5657245 to 5657954 reverse strand)
gagattggaaagaaaaaaaaggagtaccgagaaaggtatgtttctcgcaattccatgtcctagatctctgcaagtgaataaaatttgcagcttttttttttttccaaccatttttcatgtacatttgattgaatctacattccatgttcttgatgggttgtgtcaatttctgggttttaggaactgaaaatcatctggggttgtttcaaatttctgtcattggaatcatttcttgctggaatggaatttgaataaattttgatctctgtatgtcttgttgtctcttggaaaagggaaatgtttatctgggctgtctgtatgttggcctttttcgaaggcctttcaatgggaattcagttttcttctttaaacggtggatttggcgaatattcagaaaaaggtttcgaaatagaccataataaatgcagataaaatctacccttttttcctcttccctagtttgacggtatttcttaaaaatatttatatataaatggatttgaaacggtcttgattattcggttttgaattttctgtttccataaacgcgttacctctaatttccgtcttctgcgtcgcttcatttgcgccttttttctgttgggtttagttcttcttttccagttttgtagatctaagccactaatcgacgaaccccattcgtatcttcttcagattttcaaccgtttcagctgcacaaatcaagtggg

SEQ ID NO: 67863 - DNA, 456 bp, Cucumis sativus; identical to SEQ ID NO: 67596
  Intron number 1 from transcript Cucsa.212910.2 (locus Cucs a.212910) derived from phytozome v7.0 (chr-ID scaffold0154 3; pos 701126 to 701581)

SEQ ID NO: 67864 - DNA, 996 bp, Cucumis sativus
  Intron number 1 from transcript Cucsa.204880.1 (locus Cucs a.204880) derived from phytozome v7.0 (chr-ID scaffold0141 6; pos 54732 to 55727 reverse strand)
tggttggtgagactggtagtggtaaaactactcaggttagttgcggaaagccttctattgcttgatgtatagatagttgttcgttgttgagactgcaagtaacttcagaattattcgtaacttcctttttcttttggatacacgtagttggttttttttcttttacttggattctaggggacaattattttgtttattgtgattatttatattctgtactttgtttgtcaagctattgtcaggctttattagggatgcttatgttaggagaaccttttctctgtagtttgattgatgggtattgctattttggttagaaattacatattttatcaatctgagccaaaagtatatctaaaaatgttaatctaggatattgtggtttgctttttcttattttagtgcttgtgctattacatcttatttttagtcctgaactttcattttatccttttttagttattaatttgcgatattctagaagatttggatttgtcctcccttgagaaggaaacaaaacatcggacgacttgggagattgcacacaatttgatctagttattactctttaagaaaagtctagctgggaatggactataaagagagtcgaacttcacatgttgtgttgcaagagggttgagattcgtgtttaaggcagtatggaaagctctccaatttcttcagtttaagctcgtagttccctttagaatgggatgaagctgttattggatttagaagttaactaccttcagttatttatggaaatgaacatgtttgttcatgatgtatatcttttcattgtggcatttttatctaaagataatttgaacttggttttcggagtctgtggagtctctagataatttgtttgcttgttggttaatctgtctgatggttattttgtttgaaattgtctctttgcctattctgatttctaatgttgtgatttttcttgtttcagattcctcaatttgttttagaagctgttgacctgga

SEQ ID NO: 67865 - DNA, 745 bp, Cucumis sativus
  Intron number 1 from transcript Cucsa.273590.1 (locus Cucs a.273590) derived from phytozome v7.0 (chr-ID scaffold0251 1; pos 670975 to 671719)
caacacaaaccctttgttcgggttttggattcttggttagatctttgttcaaattttgtttatctggtgtttttttatttattttttattttacattttttaacaaaatctctctgactctcacctcacggctccacctcaattacttcatgttccgttttgttaatcaattttgttaaactaagtgtgagcgatcaattggtttgacttgtttgattttttgtaatgaatggttgggtttctctttgtggggtgttggggaaagattggagatggcgggagatgctggtcaaatggatttgattacaaggtgtttgtgaaaatgtcttaatgggatcgttgaaaataaattctaatttgtttttatttgacgtaattgtgttgtcttttgagatcatttggagctcctaacttttttcttttgtttattatttttgttattttgtttgataattaaaattttgctgaagttgaaaccaattattctgtttgatgattctaccagatagtctcaacaaattaattttcattaacaaacatccacagcttccaatctccagatctctattgttttttgcatgttccatgatttttattgcatatatccgcgattgggattttctttgtcaatttttgttctacgaatcggtagagatctgaaattgtctagatctgttgaatgtaatgttcgattattgactcttttttcttttccttttgttgataataagttggttgaagcaag

SEQ ID NO: 67866 - DNA, 652 bp, Cucumis sativus
  Intron number 2 from transcript Cucsa.273590.1 (locus Cucs a.273590) derived from phytozome v7.0 (chr-ID scaffold0251 1; pos 672042 to 672693)
tgcgggaggaccgtgctctcttgtaagttcttatatatccatacagacacacacgcatatttgtttgttgatttaccatgcttgctgattgttgaggttcatagacggagatattgtttgataatgggtaggtaattttataacttgtgttgaccatgcgttctcctgttgtattcatttcaaatttttcgtttgctgatatttgttaatttatcttttataaatgcttttagaatcatagcctttatgaaacattttgtttgaagaaataattgttacaaagctgtaggatcatgcatgctatagtttattttttctaagttatttatgcgtattgttgaacaatgatggcttgaattactgtgactgcttttcttgttgatcaagtgcgatgacgtctgatataatttacttacaatgatgacatttgtagcatttcatttttcataaagttactgttattctagttgattgtcaatgcattgattctttatggtaatgtttccttattgtttggattaccatattgctagtttgattccttttctgatctatagtcacctttgcattctaatttaacttctatatatctgtccccaattattttccaatgtcagaaacggtgcacagaaattgctgggcatcctcatag

SEQ ID NO: 67867 - DNA, 868 bp, Cucumis sativus
  Intron number 1 from transcript Cucsa.326630.1 (locus Cucs a.326630) derived from phytozome v7.0 (chr-ID scaffold0313 5; pos 30260 to 31127 reverse strand)
atcaaggtttgtttggtttattgtttccttatttgtgagaattgctaaatgatgccaatttcctgcattaattttgttctctactagaaccgctgaaactttatctggccccttctgggatatcttttctagacttagtaattgatatagaaactttcaagaaagactgacccatggaacaccatacacttactgggacttttatatgtataagaattctgagatgatgtcctccccagcaaatgacgacaagaacacccactaaggagctgatggtgaaggaactatgttgactgagctctagtctagtgttttggtttagggaaagaataaatgctgtcaagatttgcctaaatgaagaggctcttctctgttcatctgtcctcaatggtctcctcgatgaaaaatactgtcaagaaactgtgttatctttagaaatttgaacagcctttaaagccctttgaagacatcacataaagtgcggcttccttgtcagccatattctttaaatttaaccgaaacccagttgccgaaattgaaagaaacatgcttggaaatattggagagcttggacatgcgatggtatgagctttttcatattagaacacaggccaacacaagaaaaatccttacagtatccacattattcttatggttgcatccaagagtagcctttctaaatgttttgagttctttttaattaatttgtgttaattatttagaatgaatgaactatattagctaaaaatacacttaagtttagaaattctactgcaatcgtgttgttctttctttacattgatatatattctgattgaaatacctattttcaggatagtgtacggacggaaacatatagggcggcaat

SEQ ID NO: 67868 - DNA, 861 bp, Cucumis sativus
  Intron number 1 from transcript Cucsa.320860.2 (locus Cucs a.320860) derived from phytozome v7.0 (chr-ID scaffold0308 0; pos 718263 to 719123 reverse strand)
ctctcgttctcgggatccttattctggtttcggaggtagttgttatcttcgtccatgcttcacttttgttctcgtggtttcttcgttgattctcatgtttctgaattgttctgcaactttcaattagtttttgtgtttgatttttttttttttttttgagttatttcgtttcggtttgtggaaatggctcttggatcctctggtggaaatgaatgtttgagtttgtatgtgttgatttatatggaataaatctctatttcttttataatttagtagagtacaaacctatatacaaccaaagggaaataggaaatagtatcagaataataattattctaattacgttaataatatgtcttattgttagtttttgtggaatgttgcgatgatattgtctatgagctttgacgattctgttcggcgaatctcggcatgattttttgtaattgattggagataagtgaaaatttgtgttagctgttgttggtggatgttgagctgatcggtcttttcgatcttgtagctatggaactgtctaagttgagagtgaacttgcgtgtttgttgttttgatcactctgtttacgagtctttggcataaaatctttggaactcgtcatgattttgtgaggattttgtttaggaatatatgcttgatgaatgatctctttgaggaatctagttcattcgtcaattggatcacattccaagtcttgttatctggttcattgaggatccttgatctgatctggaaatcacgccgttgtagtgattagttcgttgtggtttagtgggaaatcttgattgttgtttgttaatgccggatgcttgcgctgaacagtgtttgtttgtcaatttacag

SEQ ID NO: 67869 - DNA, 961 bp, Cucumis sativus
  Intron number 2 from transcript Cucsa.306770.2 (locus Cucs a.306770) derived from phytozome v7.0 (chr-ID scaffold0297 7; pos 202795 to 203755)
gttgcagattattgggtttcttgattccatctcaggtattttcagtgtagtgtacatattcgattcgcttgttgattttgtggagtttttttttttcacttgaccatgggtgtagttcgaaatcctaaatcgtttccgatgatctaataatggggtggagattattggagtagttgtcttcgattgctacttgtaatttggttaccgatcgttcttctgatttaatctagggttaaacgatttgagtttgttgcacattctcagctatctgccggtgatgaatttttagtctgaagtttaaccaattcctatattttactatgtagctgtaattttttattgggcaggactttgattgaattgctgcaattaggttttgttagtatttttgtgctgaaggatttggataaaaagggatgctagcgagtctgtctatatatgagaaatcttgattgctgttgcaatcagtatttatactttttctagtttattttatttgatgatctttgaattaacgaactcaagaagctactctttatgttcgacttttactttataattattgggagtatgtgaagcgccgtgaaagctttaccattgttatcagttttttggtgtttctcctgatggtatacgtgattatgattagattggataaagacattctgtttacaagtggcattctttttcgtataatttatcttctttcaaaaaagattctatatgaaaatcactgatttccctttgactttgaaatgatctccattgttgcagttggtatctgatgctaaaggcatcatttggaagttgatgaaggacaagagaaaaatagttatttaaaaagtataaaacacggacagatttaattgtctcctccaactcttagacacgtcttcattctcggaatttttcttctctgctttcagatttcaaattaacatttgtaattcaacccaccgtt

SEQ ID NO: 67870 - DNA, 423 bp, Cucumis sativus
  Intron number 3 from transcript Cucsa.281430.2 (locus Cucs a.281430) derived from phytozome v7.0 (chr-ID scaffold0263 9; pos 47331 to 47753)
aatcaaaagaaacgtaagttctttcagcctttaacatttattcttttttttttctttcccttctttgaatcgaaaacaagagtattcattgatataatgaatgagtctaataatcaaagttcatgagaggaaacaaaacaaagactacaattgattatacaactgatttttacatccaaaatctttattcacgagaataccattaggaaaatgaaaatgctaggcaactttactttttcaatgtcaagctgaagacaatatcttctcttgtaaattatgttaccgatttggcgttaaataatatagactgacataccaagtaaaaacataacttaaaagtttctctgtggtctgcatttgagttattctgttgattcttctctaccagaaactgtgatttgcaggatatctgtcacgtttgtc

SEQ ID NO: 67871 - DNA, 408 bp, Cucumis sativus
  Intron number 1 from transcript Cucsa.253270.1 (locus Cucs a.253270) derived from phytozome v7.0 (chr-ID scaffold0222 9; pos 1927114 to 1927521)
tttgcgcgcttctgtttttcaatcgctagctacaggttttacttctcgtttttttttggtttgcattaaacctttctctccttgttcttttgattgttctttgcaaatttctgaatcatgggaatgtattttttgtttcgttgggattgttttggagtggtgtaattcagtttttgaatgggtcgttttagttatggatgagtagtggaaggggagtgagattgaaatttgtgattcattaatgttaatgatgagttgttactttgaagcttgaattatagtttcgaattgggtatatgaaacagttgtttgtggtttgtgtttacagtgttgttcgttatctgattgtgaattttatggtctcaatttgcagaacttttgatatcagcattgagtaatttgagtttg

SEQ ID NO: 67872 - DNA, 838 bp, Cucumis sativus
  Intron number 2 from transcript Cucsa.350950.3 (locus Cucs a.350950) derived from phytozome v7.0 (chr-ID scaffold0350 4; pos 369366 to 370203 reverse strand)
acaaagatttgaggagaggtccgttgatacttcctcagccttacacttttaagcccactaattaaactaaacacaatccctccggatcaacattgggcggtcagagtctcatgtttttgcttcttcttcttttactatgtatagaaatgactgtggaaatagatttagtaataatgtccatcttcttgccagactacaaaaccttaataccctttttgggcatgtaattttaaggtatgatgtagaattaaatttaccttcacttaagcttttgggtgaaggcaaatttaatagaatatctaacactcccctaatagaacacttttacccacaatcttaagtttgtgtgactgttcttcatatttcaaatccacaagtgaggggagtgttagatgatatataattaaatttacctttcacccattagctttagcttttagctcaatcagtgatttaagaggtagttctaacttcttgcatgaccgtgatgtaaaaactaaagatacaagaccctaacacttgtaatttcgttatctaataaaaaatcacttcgttatttggacgctttattagtttgtagaagtaatattttgaattcttggctgcataacttctttgaatgtgcttgtttggctcacgatatgagagtttcttcatttggctgtctagtaatgaactctcaatcacaatttgaataggaagaaatgtaaagtgcatggggcatattggctagttgcattaattttagcctttaggaacagatattcaactcaaatatataagactttaaggaaaatgttttttctctgatctctttgtcagtggaagtttaaatact

SEQ ID NO: 67873 - DNA, 402 bp, Cucumis sativus
  Intron number 1 from transcript Cucsa.286190.1 (locus Cucs a.286190) derived from phytozome v7.0 (chr-ID scaffold0265 3; pos 2308321 to 2308722 reverse strand)
tggaatctgtaccactattttgttggtgagtttgttcttttcatttgttccaacaaccaagttatttacgcatttgacatatgtgtattatttatggttttgactttagagtttagaagggtgtgctacataactttccaacgtcgaagttttgtatcgtttgaattcttcgctagtaatgaactgttctctcttggtttctagatataactaacatattattaggaaccatttaaatctttatatgattttttttattgtttgacgttatctgtttttcctttgtttgttgattcctaacatcatttgttattgagcttcaatttaatgattcttcatgttcttttggttttttacttttgtctcgatacgtaggtcagtgtgccgtgtagtagcttgtca

SEQ ID NO: 67874 - DNA, 527 bp, Cucumis sativus
  Intron number 1 from transcript Cucsa.238200.2 (locus Cucs a.238200) derived from phytozome v7.0 (chr-ID scaffold0202 3; pos 849195 to 849721 reverse strand)
atcattacaagcggaagttttaccagagatacatcgtgggttctcttccttttggttgttttcgatttgggtatccctgttttcttcaatttagactctgtactcactaattctttattggggttgttttctttttattggattattacgttgttgtgggttttgagatttgaacttaactctttttgttgattttgtattatctcatttggttcttgctaatttatgcttgttagtgcaatttctattgggaattttcactttttggatttttagatttcttgtgggttttgggttcttggagttgagagaagatgtgcaagttcaattacaaggaaatcagttaaaatcttgaactttttttttttttgtttaagctgcgaaatggggcatttgttttaactgtcttcttttattgaatttgtgttctttgatggttgctgagagttcaagtgttctcttgcatttgttttaaatttttagtttgtgctttttcaaaacaggatcctgaacttgtagtagaagcc

SEQ ID NO: 67875 - DNA, 253 bp, Cucumis sativus
  Intron number 3 from transcript Cucsa.353220.1 (locus Cucs a.353220) derived from phytozome v7.0 (chr-ID scaffold0353 3; pos 831266 to 831518 reverse strand)
gggtaatcctctcttctcttttctttttttttcgatagttctccaagattcccatggttttaatttacttcatctcctattatgttcaaaaaaattgttgactttgatttttaaatgcaataaataactactttattcatttaaagcaagaaaaagagagaaacatatttcattccgtagattttaaaaaaaatcaaattaattagcaaatttagtaattttgagatgtggggtttttcgattattctcagat

SEQ ID NO: 67876 - DNA, 221 bp, Cucumis sativus
  Intron number 1 from transcript Cucsa.363150.2 (locus Cucs a.363150) derived from phytozome v7.0 (chr-ID scaffold0361 1; pos 742640 to 742860)
ttttaaattttttgatacctaactttaaagtaattccataagtaatttataatttacttgtcttatgattgcaactgctccactgcttttttctgattttttttttttccatttccccacatcgtttctttggtcaagtttattgctttatttctctgctggaggacacaattctgatctgaatttatttttcttttgattcctgtcttcatatcagaatc

SEQ ID NO: 67877 - DNA, 990 bp, Cucumis sativus
  Intron number 1 from transcript Cucsa.307080.1 (locus Cucs a.307080) derived from phytozome v7.0 (chr-ID scaffold0297 7; pos 384607 to 385596 reverse strand)
cttcttcttcttcttcttcttcttctgccgaacttgtcttctctgtttctaaatttcaatttcttgggcattattgtcgccttctgatgtcgacgtctgcgatgaatttgtccattctgtttgttcggttgtgcggcttgagctcaatttgtgatcactgcatgatatgacgacgcaaacttcaagtatcctcctcttgatgtaggcgtctaaggctctgaatattgttttggcattgtaattcaaagaaacttatgtgatgtattaatatttgcgccgtttctgtaattttatcgatgttgacatgttgcacgccaggtgctcgatgaatgtccgctaagagatgtagcaagcatgttcttacatcaataatgacactataatatagttggattttgttactggagctgtacacattttgatttggcacacaagctgtttctagtgtgaaactgcacaatagaaatttgaatggaagttctggtttgactttcaagacttgaatcctctgatccaggcattgtctcacattttcaatcaatctgtacgtcatactagagatagtggtttggaacaagtatggttgaaatttccatgtggaagatgattcttgcagttacaggggatgaataaattgaaaagaagttgaagggctttctctcctatatttatgcatcattcatttgtaaacctcatgtgctgattgatctctccagtgtgtttaagaatggctttagaatagattacttgaatggcatttataagaaccttcagttctatatattttttaactttagcatcagatgctattgttttcttcaacccttttagtccaacttcgtcaataaagaacttcaaacctcaactgcatttagcactctcccatattcgactcaatacccagcttgccttttctccctgcccccttactgtacattatcctcatgatgataagataatctctctctgcaagaaaaacttgcacagaga

SEQ ID NO: 67878 - DNA, 928 bp, Cucumis sativus
  Intron number 1 from transcript Cucsa.258030.1 (locus Cucs a.258030) derived from phytozome v7.0 (chr-ID scaffold0222 9; pos 5141438 to 5142365)
acttgtgagagcttcgaagaaatttgatttttgaatgcgattgtccttttatgtgtctatttctgttaaaaaaagctctgggtacttcttccattttttttcaaacttcggtttctcgatcctcttttagtgtgtcctttccctttttttgctgttcatagcttcgtcttcttctggactaatgatttttcgaccgttttcttcccatttccccaaattagtaaccaatttggcttctgggttttcttgattctgtcaaattgtttattgggtcagttccccttttcaaattagagcaatgggtcttcgagatcaagccctttctctcaatcactgatgttcaaaccatttctaggtcactacaaacagaggaaaaattttgggtctggtttggtttgactcatttctcactctttggtttgaggaagtgagaaccaattaagaagcgatttcgcttctgggttttcttgattctgtgagattttttgttgggtcagttcccttcagcaataggttttcaagatcaagccatttctctccatcacttatattcaaaccatttctaggtcactacaaacagaggaataattctgggtctggtctggtttatctcatttctcactctttgatttgagaaagaacagttcgagttggggtgggttggggcgtgtgaagatcaagcttgacttgatttcttttcttgaagaaaaagtgtagtttctgagtcttgaaggtttgctcttaatgtttccctttgtgcttgctttttacttagtaaagaaattgggatctcatccctttttggtgttttctattgtgtatgactaagcttttgattctgtgctggatgtttgtttatctggtattgatgggcttcattgtgttctttacaggtaaaggagaaactgaaaagcttaaggaagtagaa

SEQ ID NO: 67879 - DNA, 710 bp, Cucumis sativus
  Intron number 1 from transcript Cucsa.353190.1 (locus Cucs a.353190) derived from phytozome v7.0 (chr-ID scaffold0353 3; pos 814079 to 814788)
ggagacaaattcctagccaggtacgttttggtttctttctgttgtacattagtaccaccaatgaagtaatttggttttgctttcgtcaatcattgctttataagctcttttgagaatcagtttgttgttccacattgttccttgaactactgatggttttgttcccttatgaaattagttgaaactagttctattcccttgtttctaacatgttaaaaatggtctgaatgatgcttgaatgggcttgtgatttacattagaatggtaaagcggattatgagtaaaccatatatttgcttattggcttgaacaagaggagtgttgagacttgtcttaacatatggtattaacaggtttcacattcaataggaaaagtcattttgaatgtgatgggcacctttgaaatttctatgttcaactctaggacttttattatgctaaaatgttttctctccttaattggtcgactaaaatatttggaacttgtctgtgttctctctctctctctctctcttcacattatgataaacagagtatgttaaccatgatcaaacattaataactttggtccatgtgctggccatggtcattttattgatttttaatttgtgttaatcctcaattgtagtttacccatcaagctttttgatgttatacatttaggaatgttatgatgaatatctgttgattctattttggcaggttgcaga

SEQ ID NO: 67880 - DNA, 444 bp, Cucumis sativus
  Intron number 1 from transcript Cucsa.285710.1 (locus Cucs a.285710) derived from phytozome v7.0 (chr-ID scaffold0265 3; pos 2006385 to 2006828)
gcggagttgttgcttactgttcagtcgatcaccaggttcgtttattgttcacagggcttcctgaattttgccatcggtttcttaactcaaattagagtgattttctctatgttttagcttaaaataggtgataattggtattgggctttgaatgaattttaatttaggaatctgagaaaaaaaaaaaatcgtcgcaaggctatactattttgaattttgatgaaaattgaaacgtgaaactgtgtgggggtgagctacaacaagttgaagaataatggtgtttttgaaacaaatgtcaaagttcaaggttatcgttattatttttttttttgttgtactgatggtcattagttttatttagtgtaatcttacagcttggtcgaagctattccttgtttcaagctatcatcctgtttgaaaattggccataggttaaacattgga

SEQ ID NO: 67881 - DNA, 610 bp, Cucumis sativus
  Intron number 1 from transcript Cucsa.311210.1 (locus Cucs a.311210) derived from phytozome v7.0 (chr-ID scaffold0299 5; pos 858767 to 859376)
gataatccaaatcgtattctggacattctaattcttcatcttcctgtttggaaaatgatactgattttgatgaagaaggtacattgttttctatcgctaacaatcttcgaaattatgcactagtgaaagttttgatttatcatttaagaagtcggtgttctttctctaatcaatgtctaggagataactgttctctacgaactattttttcgtatgtttgatgatgacacgttgaaaaccatatttgtcacacattttgatattctttattattaatattttgtattagaaataggatgttatatttgaaagttcaacaaaatgaatttgagagtagatataaaattggggatatgatctttgtagacatttttgacaaaaaagaagcaataaatggatatatatatatatgtagatagttatgacttgtgagtaggctaacatgaataacatactaaacttgaaatgaataagaatgaggagagataaaatcagtagatatatataaagatagatagtgggttcagttagtttcttgtagaactataagcaatttgagtgggaaatggattcagcatcattggctgctctcgcatctcttcactcccag

SEQ ID NO: 67882 - DNA, 838 bp, Cucumis sativus
  Intron number 2 from transcript Cucsa.311210.1 (locus Cucs a.311210) derived from phytozome v7.0 (chr-ID scaffold0299 5; pos 859480 to 860317)
gctagtaagtattttcatctcctacttttaacctttttatttctcatatccattcttagcttcttctattttgttgaactcgaagtaaaattctcatcgatcattacctaattcctgttcgttatattatgattctgatttactctattgatcttttgatttacttggatttgtgctgtttctctgcttaatttgtatttagataagtaagtggatgttgattttctattttgtattgttgccgaactgtcatgcttgttttggattatctaggttttgttgcttagtttaacattagcgttatgcgagaaaggataatgatgagaaatactcttctactctcggctctttggtttgcaaatcgtgctattattttcttctttttcaatcaattcgaggcttaagtcgcattgatgatcctaatttgtgctgattttctgaaggagaatttcactcggtctaattaatcttactcggattcatgctgtttccttgtttaatttgtctctgtagaagtttgtggacgttgatcttctatcaactattgtaagcaagctagaacttatgttgtttctctgtttagatattctctttagaagtttacagatgattatctccaaataagtattgcaaactgttattgtatcggatctatttggttgttctaatttttaaggttttgatacttagtttaatagattaacattttgacaaggatggattaaaagcattcttctaggccttgcttgtattcccaagttcatgatatgattaaactctgtaatttgcatgagaatttgcagtcaaagactaagcattaaaaaaagagtttatccag

SEQ ID NO: 67883 - DNA, 789 bp, Cucumis sativus
  Intron number 1 from transcript Cucsa.383370.1 (locus Cucs a.383370) derived from phytozome v7.0 (chr-ID scaffold0388 2; pos 340568 to 341356)
gtaaaacggtgagttacgaatcttgtttctctgttcttcttttgatatgtggagtttttccctttctgtttttttttatatatatatttataattaccatgtgggttttcttttatttgacgtttttttttttttttattcatgatgactctagttggtggatatggatacaactcatttcagttgttgtgggggggtttgattccacaatggcactaaatagttttcttttgggtgccaaatgtttggtgcttattggttttttagggtggcttgtattgatgcgtgtttaactttcgattcatgtgttttcttttctttgcttgttgtttttgttgatttatctgttggtttggtgcatattttctcatgaggcgagacattgacaaaagggtcggttgtattatgtaatttcatttcaatatggtttatgatttcactatgacctactagacccaatcatatttcgtattttgtgtcttttctcttggtagccaattgtagagtatagacttggaatattagaagtgtgtggctatgaatctgttggtttcaaccgttaagtatgtctcaaattttctttgcttaatgttatttgttcttttgcagatgaaaatttactagatcaatagtattcacactgtttctgaaactgttttcttcttctgttatttaacttccgaaaatgcctcactttatatattcatatattttaaattactttttaggatatgtaatttatactcttttataggttgaggccaagagggccttatcacgggaggaaca

SEQ ID NO: 67884 - DNA, 827 bp, Cucumis sativus
  Intron number 1 from transcript Cucsa.241870.1 (locus Cucs a.241870) derived from phytozome v7.0 (chr-ID scaffold0204 7; pos 1702637 to 1703463 reverse strand)
tattactgttgtggtcatctttgaatttaccgtaggttagttctaatattgaaagtgttgttgggtaattatttgatttctttagttttaaattctttaaaattgagttgtaaaattctcaattacttgattagttatccatgttattaaaatttaaccaagttttgaagacaaaaaaaagaataagttttgaaaatttatttatgtttttaaaattgggttaagaactcaaaatgaaatttgttgtaagaaattaaacaaaataggatgattttttcaaaaataaaatagttacaaaattattatgtcctcttttaatttgtaatcatgatgtttttactatatagcttagagctaaatttgaatgatttcgtctattttgtttacatacatgtgtgtatatatattcacgtataggtatatgtatatgtgtacgtatagacgggcatacgtatacatatgtgtatatgttttttctaaagacttttaggaaaacaaaggtcaatgtcatattaccattgaatgatctcgacatgaatctagagtccatatcctaatagatataaatatttgaactcttgatgtaaatatttaaactttcctatgtgtaaaattttaaactctttcatcattttgaatgaatatatcattagaacatttggaacaaaaaaagtcaaacagttttcaaaccgtagaattaggcagaagttttttaactttgatgcggtttttgacatgcatgctttgtttgcaatgaatttaatattgtcataactttggttgtttctgcaggcgcaacccttagtaaaggtttgaatagaggtttg

SEQ ID NO: 67885 - DNA, 534 bp, Cucumis sativus
  Intron number 3 from transcript Cucsa.339880.2 (locus Cucs a.339880) derived from phytozome v7.0 (chr-ID scaffold0335 6; pos 2415283 to 2415816)
ttttacttctcggtgaaactgctcttaatagcttggtaatgttttctcttctatatcactttttgtttaaaaaatatttttgatacctaaactttactaaagtaacaactaatccttaaccttagtttgtaaaatttagtcccactactttgaacaatgtaacaatttagtctctatattctagtatattacaatttacattctacttttttttaacaatctaatctaatttatacatgaacgagattcccattaaaatctaacagtatttttcatgattctgacttaaatggtacaaattttcctagtatggactaaattgttagttcaaggattactaattcactacaaaattaaaatacaatgagaaattttacaaatacaagtttagatactaattgttacttttcatgaaagctgctttgttttttagcctcgtttttttttatcttccttgtactcttcttttaataagctgtttgatgtcaatccactgcagacacttccaacgttccgaatttcattcttcttttt

SEQ ID NO: 67886 - DNA, 673 bp, Cucumis sativus
  Intron number 2 from transcript Cucsa.306680.1 (locus Cucs a.306680) derived from phytozome v7.0 (chr-ID scaffold0297 7; pos 124689 to 125361)
ttgttaagagagctctggctttatattcgtaagtacttctttgtcgatttctattggttctttggcgggttgttcttcttgagttaatattgatttggttttttgcttgttgccttgatactcgtggttatagaacgggaaaattttaaatcttatgttgactttaattcgtaatgtatgaaaacctttttaattgtttgagttattctacttccaccgatgtaattattggtagtttttgtatggaagtttttagttgaaattgggaaaattgaagggattcatttaataccatgttggatactagtgaaggaaaatgacatatggaaccattcaacttattttgaatttgcaccactggtactttcatacagtacactggtttctcatgcttctgcattttaaagttattttaactttaaaaaaattacatacgctcatgaattcagtgaattggcattgtgattgcaaatgttcagcattttgttggtgattagatgttgatggggataggttaagaaaatctcaataataagccaaggaaatgaaagattggcatctatgataccatttcctgaaacgtataatggtatttgcctctaagttttttgcatgttataacatattgtaatttgcatcttcaacagcactgaagaggtcgctttcagcttca

SEQ ID NO: 67887 - DNA, 1033 bp, Cucumis sativus
  Intron number 2 from transcript Cucsa.310380.1 (locus Cucs a.310380) derived from phytozome v7.0 (chr-ID scaffold0299 5; pos 209128 to 210160)
tttgttagagaactatagtgctttgaactatacaggtaggttggtgtgttgctgttgttttcatctctctttatttatctttttttatagcttttcctattgcctttttgttgtttataaattgcatttcatttcttgttcaaatatgctccagaaaatggatgttgttggtcttgattaccatttcgttaccatagctttatagtcaaattacatcaaacaaaagaaactgttcaggcctcgttaggtaattattttgcttttaaatcaagcgtataaacactacttccatagctaccggtcgatttctttgttttgttatatggtttttaggagtgctttgaaaaatctaataaaattgaagactaatgtctcgtttggtaaccatttgagtttttgaaaattgagtctacaaatgtcatttttctattctattttgatatctactttttatcggtatttttgaaaaccaaatgaagttttgaaaactaaaaggagaaaagaaaagaaaaaactgtttttaaaaatttattttgtttttaaaaatttgactaaaaagtcaactgttttacttgaaaaatttaagtaagatattatgaacttgaaacacaaattattgcaacccaaattgaagtcatatgcattacaaaacacaaactattaattataactcaatgattgtaatattgactttataataatcaacgtaacttccagttcagagtctgaagcgctcctaagttttctaagacttgtggcaaagaacattccaaactttctatcaagctctacccttatagttcattaggattttgcacaaaagacaatgaaaatatacgacaacgtgctttgtgtcaaatcttcctaatagttgctttacaaccatatcaacttacatatacataacccatcacttctgctatcttcaaaacttaattttcattctaaaactcttcaaatttctaaaagttaattaattgaatatatgcttggcataggattggtcaagattctaaagaagtacgacaagcgg

SEQ ID NO: 67888 - DNA, 810 bp, Cucumis sativus; identical to SEQ ID NO: 65441
  Intron number 2 from transcript Cucsa.311940.2 (locus Cucs a.311940) derived from phytozome v7.0 (chr-ID scaffold0299 5; pos 1438966 to 1439775 reverse strand)

SEQ ID NO: 67889 - DNA, 833 bp, Cucumis sativus
  Intron number 1 from transcript Cucsa.220090.2 (locus Cucs a.220090) derived from phytozome v7.0 (chr-ID scaffold0165 8; pos 1639499 to 1640331)
tggagagctcgttgccgtcaagtacatcgagagaggtgagaaggttagtcagctggtaactgtcattgctacattattatgtttatttctgccaattctttgaattttaagtggggattgtttcaattttctttgattttcgtgagttagtttgaactattgtgaatctgcttctgatagtatacatttttgtatgtttcttgtgttttcgatttctagagtcggttgaagatggttttctttttttcttgttgatttgagagaaaatatagagttattcacaccttagaattttgtttcttatcaattacaaataattcgtttgtgatgttcttcaatttaatttctagttttttaagtttttattattgccatcagtcactatgaatttatacgggttatgatatttagtgtgacaaaaaaattgttatgatagagaacatggaaatgccatatacttgatataaaattttgataatttaacaaatattagtgtattatgaatttcaagacattctatggagtataaattattatttagtttattacaccacatgtggaggtcaggaaatgggttaatcattgagttatgctcatgttatttgagggttgccttgtacacaaaatctataaatttagttttaattacttgaatttaatgtgaagagataataaaaaaacgatcaagacattctatttaggggtgaaaagaagtgcttgcaacatggttagtttagtgacaacatgttacaatatttaattactttagtcagaatacttcatcaaatggcggtttaatagtatttaccagctccattgcatttgacagatag

SEQ ID NO: 67890 - DNA, 597 bp, Cucumis sativus
  Intron number 2 from transcript Cucsa.342660.1 (locus Cucs a.342660) derived from phytozome v7.0 (chr-ID scaffold0335 6; pos 4943452 to 4944048 reverse strand)
cgccacctgtctttgtaggtattttctggtgttgactgcgtggtagtctactggcatcttgtctgctgcatactcactggaaaatgttagaatttggaattgtagattcaaattaaaagcagttgttaaacttttgtttctgattttctcaataagaagaagtgtttcctaccttctgttttgtagcttttatgatatctatgatatacattcatctgttccttgcattccaccagcttttgttgtaagctattgactatttctttccgattggacattgagtgcaatccattaagttttatgtttttcttggtagcaagtaaatgaatgatatctttgtgcatgtagttccattgatttcactagtttgtgcaggccatgggctttgtgcatctcactaagacattgagttcaatgtatgccaaaatattcgttacaataaacacaatattatgcattaaagctattgacttgtatgcttcttggtgtagtttactgacttgtcttcttggaaataggttgatcatacaacttctttctcatattttttgagttttaaaattttttgggtcatctttctttgatggcagaatttgg

SEQ ID NO: 67891 - DNA, 597 bp, Cucumis sativus
  Intron number 1 from transcript Cucsa.312190.1 (locus Cucs a.312190) derived from phytozome v7.0 (chr-ID scaffold0299 5; pos 1682702 to 1683298)
ctcagatccattgtccccaaaatcagcaaggtttcttttttcttcttttttgttatttaaaacgtttatttttctatgatttttgtgtcaaaattaccattttgttgttttaaaaatacgtttaaatttaagaaaattcaaaataactcaaaattcaaaataaaatgatgtgttggtaataatgtagctcattctttctttagattcttttgttttgggttcaaggacctctcctttccagggatacctttttttctcttggctttaatcttttttcgcccccattcttgtatttttgtccgagaaatggttaaaaatgtcaaaatagataaatgatttatatttctaaactatagcaaaattttgaattctatgtcacttatagagacgaaagtaacgtttttgtatttttaataataaaaaaaacaaaaaattaaaatgattactaaaaatgaggatattttaaacacaaaatacaaaatttaattaatttaattagtatattttttgggggtgtagtttagccttttagtttttaaaattttggttaatgtttgtgttttcactgatgatgaattgttttaaaaaacgaaatag

SEQ ID NO: 67892 - DNA, 468 bp, Cucumis sativus
  Intron number 1 from transcript Cucsa.280910.1 (locus Cucs a.280910) derived from phytozome v7.0 (chr-ID scaffold0263 3; pos 869166 to 869633)
gtacttgatagtcctcaatcttcaatactgcaaaagtaattcactttcaccaactttttatgtttctgcttcagcaataatgtttgtgttcgataagttttacattttgggttttgaagtagacatttagttagatgagttttaggagatttgaagaaataagacaagggtcggttttgttttaagttcttattgaacttagtccgatgagttagttggatttatgcatttttatgatgaatttcgctagagaaattagtttacactgtctctgcaatgagtaagattgtggtatgaatatgtagatgcaataatctattcaagtacttaaaatttggttaaaaaacgacttggtaaagttggtttggtatatttctttttgattcgtatgttcgattgatgtcttgattgttcttttcatctatgtttgcaggcataagtgattctggattagcggcaatcggaagt

SEQ ID NO: 67893 - DNA, 392 bp, Cucumis sativus
  Intron number 3 from transcript Cucsa.310830.1 (locus Cucs a.310830) derived from phytozome v7.0 (chr-ID scaffold0299 5; pos 574942 to 575333 reverse strand)
caggtttgtgaaaggaaatccattaatattcaaaacactcaactcaacgaagtagagattaaacttgtatgctcatccatttaaggtgctaatggaatatatggcaaaaacataacaatacagtataaaggtactgcacactgatcgtgaaaagaacataaaatttctactgatagtgtactagtagtattcttgacatctatgaaaacatagagaaatactaagggtgctattatttattaatactgttggggtccagtgtgatgaatggtatggtccatttaacaaagctatgtttctgttattcatctcatagagtatatcgcatgctgtcagttatgttgtttattttctcatattcaatgtaacctttttcccggttgcttaggtgg

SEQ ID NO: 67894 - DNA, 369 bp, Cucumis sativus
  Intron number 1 from transcript Cucsa.253580.3 (locus Cucs a.253580) derived from phytozome v7.0 (chr-ID scaffold0222 9; pos 2124615 to 2124983)
ctcgccgtgctgactcttttgagaagcttgataaagtatgttccctctttctcttccatgaacggaattttgactgattagagtttgggttttagttgaaaatatgaaaattaatgggtagaattgaaggggaagagtttctttgatgtttgttctttctaaatatgaccatatctttcttttgaaattaccatgtttgaattatggtttagttttgttcctctttcatttttatgaacaagattggaattcctcaaagttatatataatgttgttcaacagattgggcaagggacgtatagtaatgtttacaaagcaagggattctttgacagggaagattgtggctctaaagaaagttcgttttgac

SEQ ID NO: 67895 - DNA, 965 bp, Cucumis sativus
  Intron number 2 from transcript Cucsa.320830.1 (locus Cucs a.320830) derived from phytozome v7.0 (chr-ID scaffold0308 0; pos 665196 to 666160)
gattctgttgagcttttactcgataacttccctgagtatgttacaaatgcttaacttctcttgaacaatggcgctaataatatacttacaatcgttttttataaaattttaaatggatatcagcatagtatctttaaaaagttatttatccctttctatttttgtctttgcatggacaatcacccttgtaggtaaaataaaaccattgtgttcttaggacttttattctataatatctggatttaacatttcaaggaaagaaaaccacgaacatatatgtgattggtacctgaacacctgtttggttatttatgtttacagtttcttaatgtttacttttattcacatgtaaaatattttatgaaggcacatgtttccttgtttaactttcagttgagcttttgaataaattatttctattctccataaaactataaaagataaaaccatctgttgattgaatcaaatacattagtgctggctaatatttcaattctccatgaggtacacacttatactatgttaattactttgtctttgaattctaacttttaatcgtttttttcctgaagccattcaagtgcttgaattcaatctacttcttacattgtaatatctcacaaggccaccactattaatattatgaatcttctaaggtgaagttcaatgtttcaaagatttttttagcagacaattcactgtgtaagattatttcattatattagttaatgctcttgttgtgattagcttcaaaggtaaaatatctatatgtaggcgtgcataagattttgtagttaccgcacaaaagatttttaagttgacatgtataaacttgtttaacattggcatcgacctcttaagtcttgtctcccttatagttggttaataaatttattatcttgttcacaattgccatcttattttggttaccattggcattgtttcttgcagattctttaaatccc

SEQ ID NO: 67896 - DNA, 899 bp, Cucumis sativus
  Intron number 1 from transcript Cucsa.386660.1 (locus Cucs a.386660) derived from phytozome v7.0 (chr-ID scaffold0391 8; pos 161228 to 162126)
agctctcaatttctcagaccctcccgtctcttctcgtaagccatatttcatttcctatccttatcctgactttttatgttcaactcttaggacacaagagcttcttatttgattcgtttgtgtaatgtttttgtctctctacttacataaatttcgttgacattgagttctaattactgctctctgtttgttacggcccgtgtctgagttatttgtttgctttgttatttcactttgattgatcagttctgatcgaatgcaaatgtaaatgtaaataaatgaaagtaattatgtgtcagtttctgatcgtttggaaaccgatgtgcttgttgtatagaatgtgaaattctagcagattgataaatttttcgctactgaagaactttatttatttattgtttaagatgctttattgaggtggagaggcaatgactgtgtactcggagcttgttttgaggttatagagcaaattctgacgtagtttgagacgaaaaaagatgataatttgattcagttttgttagagcattggtggaatgggtaagattatcagtttggttcttttaggttcacataattttttttgatgaggagggaatttgattgaacctggaggtaaaagctttgatgccatgccatattttaacaagtttttacttggtgattctacttcgttcaatcagtttttgtaaattgcgtatacaattcactgattgatggacgtgtagggcagagaaaaaagaaatggggcatgccaattttatagaatctgaaaatttggcaaatctgtgatttgtgtctatcttggttgctttgcataactttttattatttccttgaacattgtcgtcattctttcttaattaatgttgcagtagaaaactgtcagctgctgtggtc

SEQ ID NO: 67897 - DNA, 888 bp, Cucumis sativus
  Intron number 1 from transcript Cucsa.259390.1 (locus Cucs a.259390) derived from phytozome v7.0 (chr-ID scaffold0222 9; pos 5917384 to 5918271 reverse strand)
tggcttggaccgtcgtcaatctatctcattttgctgtatgtgcatccatttttctctcgtttttgttctgggttatttatttatttatttattgctttcctgtgatttcatcattgggtgtgagattgttgttgacttgtgcaatattcatttattgggtctttttctgcagcttggttttggtctttctgtattgttttgtgctgctatactccccttcaatttaatctttttgtggatgctgggagagatttcatttggttgattttgtctaaacgaaacaaatacagccaactgttgtggctttgtgatttcggttttgcatttacgcttgttttgatagttatatgcttattgaacttgcatgcaagtaactttgatacgaaagagttcctgttcttatcttcgatttctactgcttcagatattcttcttggattcttgtgtagagggctatggtagataatatcttttgatttcataaccttttttcatgattgttatgttataggctattgtttagtttagtgacactaaaattgtttgaggaagcaaatgggagaaatgctatttagtgattttgaaaaagaccataggcttttcaactttatgtttgatgtattgccatttacgtttcttatgtgtaaatgtggatctttctggattaagaggctgtgaactctgttttctattggcttggacgtgcctacttcaatgcctggttgcctctcctttcaagagacctagtgatcatcttagaataatttagagcgttctttgctccattatttgaagttgatatgctctatgtctttatataaatgatggaaaggagtgtgccttttactttcaggtcacttaccacttcttccattggaagaaagggac

SEQ ID NO: 67898 - DNA, 837 bp, Cucumis sativus
  Intron number 1 from transcript Cucsa.301090.1 (locus Cucs a.301090) derived from phytozome v7.0 (chr-ID scaffold0293 3; pos 1545 to 2381)
gggaaagagtaaagtaagaaagagagggaaatttagtttttagaacttaaaaaaattaaaaaagaaattaaaaatggggaggccattaatatcagtttttacaaaataaaaaatatcaaaaacagtaagatgtctatttttacataacaaaaaataaaaaatggagaaataactaatatatgtttaaaaacgacattaaacccataaactttttcaaaatgaccgtagggagaaaatttcacttttttcacccgacactaaaatccatattctttttatagtatcatctagaataagtatagaattgatttgaaatcgaatattttcatgtttaaaacttgtaaaatgtttgatgaggtaaaaaaaaaaagaaaaacagtacccttagtgtgtaaaaccatgctaattttttcatattagttaaaggaataataagctcaattaaaaaaaatgggctttaaagaatttctccatcaaaaaatttcaaacacatagcattaaaataataataaaaaactaaaaacaattataaactaacaacccaccaaaaatacactaatatccatacttttatgcttagttggtttatgcaccaaatcaagttctcttgcgagttccagtcgtttgaactctaccacagctgcaattgaaatgcataataccagtagcatttaacagtactaaaaaaacaaccatataataattcagcagcatataacagtaaagaaaaaaaaaagtaaactacattaacagttaccgacaacttgatcaaaagtgggaagagagattaagggaacgagagtttgaaagaggttagagaaaggattgacagtgctg

SEQ ID NO: 67899 - DNA, 655 bp, Cucumis sativus
  Intron number 1 from transcript Cucsa.283330.1 (locus Cucs a.283330) derived from phytozome v7.0 (chr-ID scaffold0265 3; pos 500145 to 500799 reverse strand)
attaagctttgcttagcttttgtttctttattcgagtgtgtgtctcgtattttaaggaaatttttctccttttaggacgcgtcgtcttgaagttccaactttgaattttgctattggagatttttttctagggtttctcaaagtgaacttaggactcaaagaacatgcttgcctttgctttttgttacatttaagccatggatttgctaatctaaacattaataggtttcatttatttgtttactttgattgttgtttatgagtctcatgtaatcaacaataaattagcaatatgtgtagttaattatctaaattttttttaatgaggtaattttttgggttatgaaggttgaaatattgattattattattttgggatgagattgaaaattgaatgttgagaatggaaaagaaataaattagaaaatgggaatgtgatcatattaacaaaaaatcttaatacagaaattaattaaaagagagcatgccacacacaactaatttcaatccactcttcaaatgagtgtttaaataagttcacaattttacatctaattctctctcaaatcaaaccataaactaattaaaaactaatcctgtcataacatgtcgaatccccatggccgtcgcagatttgtatattccattttaggca

SEQ ID NO: 67900 - DNA, 373 bp, Cucumis sativus
  Intron number 1 from transcript Cucsa.253860.1 (locus Cucs a.253860) derived from phytozome v7.0 (chr-ID scaffold0222 9; pos 2348667 to 2349039)
tcaccaggtaatttgagatacggggaattatttagttcttgaattgggttgttgtcttcttgttctttgttccattttgcaatggggaattgttatctgttgtcttaagatctgggattcttctgatttcagtatatttgtcttgttttattgttttaacatttcgaggattttgttgttcttttatctgtgatgtatcttcttcattaggaaaatggtggaattctgtttcgttgtattagaagagtgtttctcctgagctcacacgctgctagcttttaagccttttcttttgttagtttttttatttttgttcattttcctgttatttgatgtatgtctttaatttgcagttcagacactgatctcaaca

SEQ ID NO: 67901 - DNA, 653 bp, Cucumis sativus
  Intron number 2 from transcript Cucsa.323790.1 (locus Cucs a.323790) derived from phytozome v7.0 (chr-ID scaffold0309 0; pos 41633 to 42285)
gaggccctcccaggtcactactaccttgtggaaatgttggtttgttacctttatcgatgatcatacccgtctcaattgggtctttcttctcctcactgataaatatgaggtttcatcgattttccaacagttctaccccaccatttaaacctagttcaacgttaaattcgccattttacgtgacaatagtcgggagtacttaaatcatatccttaatgggtttttgtgctctaaagagattgtccaccaaagtttctatgcttatgccccttagcaaaacggggtatctaaacgaaaaaaccatcacctccttgaggtacttgatctcttgtgttgtttacctctctcatcttacttagattctattctcactacgactcatctaattaatcgaatgtcatcttgtgttttccatctccaaactcctctaagtgtctcaaggagttctaccctgccatcgacttatatctgatattcctcttcagatgtttggatgcactgcatttgtgcacaattacggtcttaatcaaaccaaaacttgtgattttcgctaagcgcacaagacaatgggatgtaaatggatattcactctgaagtattaatcagactgaacattagaccgatataagggcaagttagttgcaaaagggttc

SEQ ID NO: 67902 - DNA, 958 bp, Cucumis sativus; identical to SEQ ID NO: 65443
  Intron number 1 from transcript Cucsa.342420.5 (locus Cucs a.342420) derived from phytozome v7.0 (chr-ID scaffold0335 6; pos 4719592 to 4720549)

SEQ ID NO: 67903 - DNA, 292 bp, Cucumis sativus
  Intron number 1 from transcript Cucsa.219570.1 (locus Cucs a.219570) derived from phytozome v7.0 (chr-ID scaffold0165 8; pos 1292568 to 1292859)
tcgatacgctcgatttgggagtgctcagtgggtaatacggggaatatatttctatcatttccccccttttctaattagagatgaaagtttttgaagactgctgagttttaatcttttactccacccttctgttgtttgattatgtgattcttgcaaaaattggatgtgggaagttgttattttgttatctatttggttatggaggattgggtcttgtcttgcttaattacctgcattttggagcaatagataatgatgtctgtttgtatgttaggtcctgcactgttggtgg

SEQ ID NO: 67904 - DNA, 507 bp, Cucumis sativus
  Intron number 1 from transcript Cucsa.257410.3 (locus Cucs a.257410) derived from phytozome v7.0 (chr-ID scaffold0222 9; pos 4724737 to 4725243 reverse strand)
acggagcacaccacaacctctcttcttcttcctacgtaatctctctcttgatctctcttatctttcttcttcttcttctttgatttttcctctacttttctgtgttattgtttccatcggagtctttcgttttctggatttgttggtaagagggttttcctttatttgtgatatatgtttgattccggtttctgtttgttatgtttacatcattcattatattcatgttatcttgttcttgttcttcattgtgatcatttttctgatgaatatcatttattggatgcttttttgttcctttcttctctttttcccgcattttttgtattgctaaaaaacgattgaatttgaatgtatggttattttttctaaagataatttcatctgtgcgagtttgtcggtgttcttcatgtcttcttgattttcaagagttgcactgtttagagttgttgatctattgttctattacgaacttttaatgtattgatgttgaattaataggtggat

SEQ ID NO: 67905 - DNA, 792 bp, Cucumis sativus
  Intron number 1 from transcript Cucsa.352290.1 (locus Cucs a.352290) derived from phytozome v7.0 (chr-ID scaffold0353 3; pos 172956 to 173747 reverse strand)
cgaggtatgttattttatgaatatcccatcccatgcaataacccattaacaaattaaggtttgtgtttattttattcttaattaaagttacaaatttttctatgaatttttaattcttttattcttcacttttttttttccatcatgatatccacatctaatagacacaagaaataattaaaaataattagggttttgtttagacgtaaattcaaatataagtaatatatgaatatagaggacagtttgatgacaaaaataaaaggcaaaagactaaaaaaaaagctttcaatttgaagcgatagaagatgcatcataatcacaaaaaatcaaaggtattgttcatcaaaagggccgtcaaagaaacgatctcacatcccacaaatgtcaaaaatggatttttaatgttttgggaaggttagttattattgtttcatctagccatagacatcacaaagaggaagcaataagattgtttgggagatacatggaactcaaaatattagaagtccaaaggacctattatagacacgcaatgaaaatttttaagaactcatccaacacttcgagcagctgtttaaaataaaatggacacaaatttcagaatttagaaacccaaaagttaatcatttttgaatttgaggactgttatggttggtaatacttcatcgtacgtggatggcaaaaataaaaataagtaaaaaaagattgttggttaattgataatgttaattaattattgggtatggatatgcagaaaagatttttggggtaccccaagaaacttacggg

SEQ ID NO: 67906 - DNA, 1034 bp, Cucumis sativus
  Intron number 2 from transcript Cucsa.341380.1 (locus Cucs a.341380) derived from phytozome v7.0 (chr-ID scaffold0335 6; pos 3773073 to 3774106)
caaagatccttcaaaagcatagcgaggagttgaaagtaagtaaacatctcgtggatcattttctgttcaaatgtgtaagttgcaaacaaagtccccatgttggttagggagagatctatagaatgtgtgaggacaattttctgtgtatgaggcattacaggtgaaaccagaagcaaattcaagaaggtttaggcttaaattgaacaatatcataccatcgttgaaatatgtggacgtttgttgtcctaaacaaaagggatgaatacttcatctcatgatttatattgagcaattgacagtctctagatttcttggatcttgtagatcattaaaaagagtatttgtaccaacatcatgtgctcatttttggcatccagattttcatgtgctagagttaagttagtggactgtgattattttggttggatgataatttgattctatggagttttttttgttccactgcctcgtctatggagatcatgaattactttgaatcttccacagttactttcctttgtcatcacttgtttgtatgatccacagtcgaaaatttaagtgactaaaagtgcttgaaaatgttatcgtatttttagatgtgcacaattttataggaagaaattttgaaaattatttgctggatcttgaagcttgtccaatatagtgaatcacactgggtttgctgattggttgcattggatcaaattagatgaacttcttgtcttactttccttttattttctttctcttcttacgcttatactatcctggagcgaaacttttgtttaaagtgcattaccttttcacaccaaaagattatattgtgcatttgaagccaactacttctgcaatgcgtataaatgtttaagcaatcttcctcttcactctggtggggcggcaagaaaaaaatggatgttccttaaacttgtacacctttacactactctaatcaatagctaatgttgttgcctgttttctttgattctattcgtgcaacaggggacagttgtactagttttccaaccagctgaaga

SEQ ID NO: 67907 - DNA, 539 bp, Cucumis sativus
  Intron number 1 from transcript Cucsa.219480.2 (locus Cucs a.219480) derived from phytozome v7.0 (chr-ID scaffold0165 8; pos 1261580 to 1262118 reverse strand)
ttcttcctgctggctatccttgtgctgagcataaggttctctatttctctcatttcgcttccaattttttggttgattaattagaggaaggtgtggacaattatgtgaaatgagactgtaatattagagttcatcgctctgtttcgactggagatacttggatggattttagtcaactaattgcctctaatgcttcttgtttgagatttcctttgagtttcttgtttattttcttttctgaggtgagacagatggaattaatttctttgtatttttagattcgatgcccgacgtggttttgatttgtttctgtcgattttctggataatccgatgtatatgtatcgttctcgaaagtgtgatatgcgaagaaatatgattgaatttgatttttatgtagatctctgattttatcaatttctcattaaccatttggagcttaatgcatctctactgtgtaaatttgttactataaatgatgttgttctttgatcatgctcgagttttgaggaatgttatccattattgcagactgggctg

SEQ ID NO: 67908 - DNA, 891 bp, Cucumis sativus
  Intron number 1 from transcript Cucsa.217780.2 (locus Cucs a.217780) derived from phytozome v7.0 (chr-ID scaffold0165 8; pos 27735 to 28625 reverse strand)
agaagaaagaggagaagaaaaagaagggaaagaaggttgggagtgagacgcgtgtggttgagattgaagacaccaatgatcaaggagctgtcgttttaagacaggtattgacattaaatgatcaatttttcacaatacttccaaaatctggtgacattctaggattttgtcttctctttttttcttttctaccatattattttccccttgaaattggtttaattatatgaacaggatacaataaggagtacaggaacttttgggatggggaaggggaagggatgatttggttgagtttggattgccttttcaatggatgcttaaaactagagaagggattcgtttcctgtaaaaatatattattaagcaagccgtagattgtaatagagaagaatggtaggaagtttttgtgccttgaaaacgtggtaaaggatggaatttctaagccccttcgagaccccacttatgattgattaggtaaatgggttaagaaacaatgatttgattctctgaattttaatatgcaattttctgaatatttaaaatttcatcaatcgtgatggaactcagctccatgtttaattttctaatctacagcttcgactctgtttagcaaaatgcatatgctgtgtaaaataccaggaagttattgtggggtaaggaaggatacagaaaaatgatcagcaatgcctaaaacgcgcaaataaacttgtatacatcatttagggatgcgtcatgtagtttatcatttgcagaattgaattgagctttactgttaaatgaaatatatagggaacttaccgaatgtgtttttgtgatgaaaggcctttgccaggagaactagagttgtggaaaataagaagggtaagaagaaggagttgtctcctcaag

SEQ ID NO: 67909 - DNA, 373 bp, Cucumis sativus
  Intron number 1 from transcript Cucsa.341420.2 (locus Cucs a.341420) derived from phytozome v7.0 (chr-ID scaffold0335 6; pos 3803639 to 3804011)
tctgtatcagcgattcatcttgcctttcaactgtacgcttcttcttcatcttcttccatgctttcacgtataaacatcttcaatttgaatctcgcattgcagaaagattattagtttcccaatacacacatttctgctgatacgcgaaaatggagatttatttttctttctttctttcttaatggttgcttttatgtacgtacttttagactgagtttcatcttccttaattagcttcttgtagatctttttcctcgattttggtttctttttggttctctgattgatgatcctttctctaaatctgccgttggttaaagatttgtttttctatcatttgccttcttacttttctaatttctgctaatgctag

SEQ ID NO: 67910 - DNA, 866 bp, Cucumis sativus
  Intron number 1 from transcript Cucsa.259550.1 (locus Cucs a.259550) derived from phytozome v7.0 (chr-ID scaffold0222 9; pos 5983259 to 5984124 reverse strand)
ttgctcaagagggtcaactcgttaagatttcaggggtattcttttcctttttcttcaatccccatatttccttttttttcccctctaatttctttaccattttcagtttcatgggttgtatttgctcttttcaattggtatgactgatgggtttggtttgcttctgcatattttttgtgtttattgctatgagaggctactaaattctgctttgaagtgtatattgagaggacttcttcttattgttcgttttgttgacttgataattgttaatatgctttggtatcctaacttggtttgcttatcccaatgtgagtttgcattttgaatacgatatgaggcaggctgtttcttgtgttttttaatgtgttatcccacctgtgaaatgtatgcttgtgacattttaatattttaagaacccaaaactttgagttaggaatagtttttgaaaggctgaaaagtgtattgaactgattgtaatcactttttttaaaaaaataaaaattataatgtttgattagatatttaaaagtcatttagcaagtcttagaatacttacacaattctttggaggtggttcttcaatgaaattgttcatgggagaagtgtcatattttagagtattttcacgagaagtcatctggaactcaattttagttattgacctactacttcgtagggagaaaaattgttccgagtggtagtttcttgtgtttggaagtacttactatgcgggcttcgtgttacctgtttaggattttattcatttttgttcttaaatacattccaggtatgtttgaggatttatgtttactgcttttttatattcagtttgcttcgtgcggaacagtatccctggaatcatc

SEQ ID NO: 67911 - DNA, 820 bp, Cucumis sativus
  Intron number 1 from transcript Cucsa.325910.1 (locus Cucs a.325910) derived from phytozome v7.0 (chr-ID scaffold0313 2; pos 195944 to 196763)
caaattttctgcgcaggttcttatttctctctccctctgcgaatttttagttaactacaaaagctgggaactggggttctttattttttgtttaattacagtgtttttgggtgcgcggtttggtttttctcatgtactgtacagattcttgtttggtttttctcgatctgatctatggttttggggcttgttctgtttatcaatttcgcaagtgtttggtactttggttggtgttctgttttctgtatttttttttttttttgctgttttgtttccatttctttctgaattttgaggattctgttctacccagctcatgtgtgggagatcaattagtcgttgttttagttttttgtgtctcgttcgatcagtttatggagctttctattctagtgctgattaatctgagaagtatgatggtttatgaaactagtggaattgagttttcaataaatattttttatgttgtgttaagattaaattggctgttgaaggttgactttttcttatgacttctaataaaattaattatcctaagtgatcaaataccaacttgaagttttagatttagtttgtgaaatggtttagtggagatttaaattaggcttggttgagtttgtgtaatgttattttcttcctatttaataccaattgtcagtttgttgagtttcatgctaattttgaattaaggagagtttttgagacttattatagttaacctgtccttaagctttggaatttttagtgttgatttaaaatcttttgtgtgcctgttcatagttaagtaaataacgtaatgcttatatttgactgcagattt

SEQ ID NO: 67912 - DNA, 900 bp, Cucumis sativus
  Intron number 1 from transcript Cucsa.349720.4 (locus Cucs a.349720) derived from phytozome v7.0 (chr-ID scaffold0348 7; pos 945988 to 946887)
cctttgagctgtctttgaatctaaaatttgtaagggtttgtaatgattttttttttatttttttatgttagatatttctaaattttgagcttcgtggagaagttttattgagattgggtggtatttttgagttccagaatcttggtgttagtaagactgctagatccttgctacctttttcttttattcttattcactattgaactatttgtttggctttcttgcattggggtttatcttaactttgtgaagaagttgtaatttggattgttctttgatagtataaaatgtgaatgatttgagcttgatttggatctggtaactctgcttattgtttttaaaatattttgttgaccttttgttgtactggaaaacaattctttaagctgaaatcaagtcattttcttactcgaaatccgtgcctttggtgattaattctttattagggaaaaagagtggaaaagtggagtttagttccttattttaattgtcattacagaatctaaaagtgccaggatggaagttctgtgcagaacaccctgggcctttttattgttattttattcttttggaaaaattttcaagtattaggtgagcacatgctttgttatttggtcgttttctctctcttaatttttcattatgaagagaaaccatggaaattaatcaaacattgacaagatgataaaaaaaaacaatatgcaatgtttccttactcgaatggacacttctataacatttgacgaataacataatttaagtagataaaggaaataccattagtgttttgattatagttcgaaattatttgctttcatttatgttgtttcttactctaaattatatgctcatcaaccaatttcagggggatcaaaataaatcttctattatcaggttgaa

SEQ ID NO: 67913 - DNA, 437 bp, Cucumis sativus
  Intron number 2 from transcript Cucsa.242680.1 (locus Cucs a.242680) derived from phytozome v7.0 (chr-ID scaffold0204 7; pos 2371514 to 2371950 reverse strand)
ttcacttgtctctaactggaaacctcatttacctggtatttctcttattctatttgataccatgagacgtttgggtggaagtatgctatgcgatgcatggggcacactatgattctggctttagggttctttaatttttttgtttttccccttttggtgagttttagtgtcttaacccgtactaaaacttagtgtttctattgacgtggttgaactcaatttaggatggatttggaccaatccttactttgagcaacttttttttagtttttcatcttgttagtgcaacggtttaagcattgtgcttttaatcataatttagggtagaacttagaagcaacttcacgaggaatgtgttttatgggtttggtgaaaatttgtcttcaaaacaatgtcctgcagttagcaccgtattggggttggaggaaggcaaggaa

SEQ ID NO: 67914 - DNA, 258 bp, Cucumis sativus
  Intron number 1 from transcript Cucsa.388470.1 (locus Cucs a.388470) derived from phytozome v7.0 (chr-ID scaffold0396 7; pos 866885 to 867142 reverse strand)
cactgcgcagtaagatctccgtttcctttcactaaaaacatacactaatactcttcaaccacgctacaaaattagatcaaaatcatctcgtagtctcacaaccgattcacgttttctcctggacattttcataaacacctcgacgcatttacattttcattagtttttctcttttctttttaacgtaatcgatcggacggattaagacccattttcagtccaggttctggagcagtaggagtgaggcttggccacgga

SEQ ID NO: 67915 - DNA, 592 bp, Cucumis sativus
  Intron number 1 from transcript Cucsa.359140.1 (locus Cucs a.359140) derived from phytozome v7.0 (chr-ID scaffold0358 8; pos 191152 to 191743 reverse strand)
cttgaaagccccactggttacgtcttcttctttctatttcttagttccatcggtagcttttggtctgattaagtattaagtatttcttagttcttcgaacagcatttgtcgctcgtgtttcatacgttacgagattcccttttcattacctgtgacctattattactgggttatgatgctcagttgtggtttcgtgatatttggatcgttacgattgttgaaatatagggtcccatttcgagtctgggtgaatttatttctatactaatcagaacaatgcttgagcctgaagtataggagtcgatttatgttttttgctttattgttggataaatttatactgttgtttgatcataaatttgagtggatggaggaaatgcggcgttttcttgagacgaagattctggataaaagtagttgcatttgagcaatttgcagtgtttgtaaaactcgagggtatttgctagtgagaattcagtttaagaaaaaaattatttaactttttcctctgtaggaaaagaaatatttttttctatttcttgattgaagtttattctgttgctgtaggtacgggaaaaactctaagcatcat

SEQ ID NO: 67916 - DNA, 835 bp, Cucumis sativus
  Intron number 2 from transcript Cucsa.254170.1 (locus Cucs a.254170) derived from phytozome v7.0 (chr-ID scaffold0222 9; pos 2564334 to 2565168 reverse strand)
ggcagattctccctctcattttcaggaaatttaaggtatatatcttgtaataattaagtttaacttttagacctctaaggtaatttgtgcttcaaatcaaacaaaaatatagaaaactaatttttaaagaaacttagcttgcataacgttttcaattttaagatgactattattttgatctcgatatgataggactaaaaaagcattatctgatgaaactcagtaatcttgttgcaccagttcaatcatcatggagctaaactcaatctaaatatttgtttttaaattattcgtccaaaacttgtaataggttaattacactgtcctttcataaaagatttcaaactacttttagattcaaaatattttaactgaaattgggatgtagatatagatgtcacgaaataaaaatcgaggtcgcataattcaatttctattcaatatttaattaattgtgttattttgaaatattcatgaaattataatattgtaaatttttttagaaaaatggaggtactttttaaattaaaccagagacaaatttgaagattagtttcataattttagtcaatattttatcggtataatgtatgattgtgtattgtatttaatagataagtgtaccccaattactaaaaaaaagagtatgtccagaaagaaatgctttagctactataaatataattgcatggcttattgatatttaaaagtgtttcttttcaatgtttttgaagaacgattacaaaattaattagctgtggtaaatgtaattaattaattaatttacaatttttaaccaggtatccacgtgggagaagcagcctcctaccgagtg

SEQ ID NO: 67917 - DNA, 507 bp, Cucumis sativus
  Intron number 1 from transcript Cucsa.310710.1 (locus Cucs a.310710) derived from phytozome v7.0 (chr-ID scaffold0299 5; pos 457028 to 457534 reverse strand)
tcttcttatatttcatctggcagtgtggacataaggtaaaagacaaacaatcaacaatctccctctcatttttctcgtaactttatgtgatgattgaataactttgtctttttgttggctgtttcttctgattttgctgctagaaactatttaattggcttgagttttgttccctggaatgattctgtttctgttggaatacttgtattcttattatctatgattttagctcaagaagtgtgatatataaacttgactttagctctagaatgtagaaaaacgagctatataaactctttgacctagaggtccttttgatccgtgttctgatatttcgcttcgataataaattgttctccttccgctgtagacgtgactaatacatcgttagtaaatcatgtaaacttgtgttgattctctactgcttgttttatttttatttgtcgatttgttatcggtcttattgggatggagaattttgacttgattttgtatgtttgacaaggt

SEQ ID NO: 67918 - DNA, 627 bp, Cucumis sativus
  Intron number 2 from transcript Cucsa.310780.1 (locus Cucs a.310780) derived from phytozome v7.0 (chr-ID scaffold0299 5; pos 535245 to 535871)
tcaagtttcaacggtgagttctctttgttattttatatttttaaaggttctttgatctaaatcgatggtgatattacatgaaatttaagtatgcgggctttattcaaagttgatcatggtagctatagctatcattgtcggcctgcttggttcggttcttgttgccttgttcattagccatctgtagcttgtaggaagagtcgatttgttttgtggggttggacttctggggaggatctttgggctttgattatattaaaatcctctttctggatgtatcttaatagttttggtaattatcagcttggtcttattattcttttgggtgtgagggttgttttgtctctgtgattgttttttatattgtatgcccttgtttattctttcaatattttctatgaaaacaagatttcttatctttaaaaatcctatggctgccattaatcactccttttgctctctttggtgtgaaaaggaattggaattctttcatgtaactcacggttgtttacaataagattgtaaacaaggaatatgtaacgttaagctatttccgcatgtagttcatgtagttgcacttctcatgttaaatgaagcacagtcgttgaatatattttcatcatgcag

SEQ ID NO: 67919 - DNA, 974 bp, Cucumis sativus
  Intron number 1 from transcript Cucsa.325960.1 (locus Cucs a.325960) derived from phytozome v7.0 (chr-ID scaffold0313 2; pos 237478 to 238451 reverse strand)
tcgccgccgccacaactgctctctgggtcattcaggttttcaccttttctaaatcctttgatctatgcatacttttgtttctgatttccacagatttatgaagtgaatcttttgacttcctgtgttgaattaaaggatgcatcgattttcttgagaattgattcttgtttctgctttattacccttgccaccttaatggtttctatttcaagttttggacgacctactttggcgtattcggatctctattttttctcctgccttgatatagtgattacacagttgagatctgaaagaaatttattccttttgaattatggtgtctacgaacatacgtattccccgttgacgaggagcctagatattcatttcagttctcttttactattatcttctttttggttgttgatcgagcacaaaatgatactcttgcccatctttggaagataactggtagaactcttgaaatattaaaaaatggagtgtaataattcttttctcactctatatttgttttgaacgaaggacacaattctacaacctttagaacagttcttcttcaagttatctttatttatatgcagcaccatgttagacattgaatctcacaggtttctaaaaagttgtagtagttcattatatgtggctccatgtcctgccgtcctcatgatcacaactctggttccacattgtaagttttgtttacttcagattccaatccaagttcagctttcagtgttatggagcttttatccatcaaaaccctacctcagcagaagttttgatcctctatccttgctatttctacactcttttccaagttccgtaattttatcgatatagatggcttcatttgttggatttaaaccattagtgaactttctaactgtacctgctgcaaaatttccatcgaagacactgccaaccaaaatcttaatctaacttccatcaatattcttaaacagtcctggggt

SEQ ID NO: 67920 - DNA, 628 bp, Cucumis sativus
  Intron number 1 from transcript Cucsa.303800.1 (locus Cucs a.303800) derived from phytozome v7.0 (chr-ID scaffold0295 1; pos 1620921 to 1621548)
tttctatttcttgcttgcctttgtgggtgctaccagtgagttcccatctcctttattttttattttcagtccaataagggtggcacaacttcttgatttttagagaaattggcttgtgggtctatgaattacctccgattttgaagtttagaattactagattaggatatatctacccatttgtatttgcttgcagaagaattggcatctttatccactttgttacagtttacaaacaggaagaacggtgtttgaagtagaatttgcatattgggtttattttttcttttctttttgagttcagcaattgtggaattgtggtggtaggattgaaccatcgacctttggatggtaactttttcatattcggacagtttagttgtcagcaaagattaaagtatcaatcttgttattgatattgtaattttttccccttatcagtacaatttctctgttagttttcattttggtttttggtttctttcacatgaacttcctccgaatctggttgaaattctttttacactttttgaatgaaaattttaatcctaatgcctattatttattactgataactacttgatttcaattcatgctggctacaactctgcagttcctgctggaatat

SEQ ID NO: 67921 - DNA, 782 bp, Cucumis sativus
  Intron number 1 from transcript Cucsa.240760.1 (locus Cucs a.240760) derived from phytozome v7.0 (chr-ID scaffold0204 7; pos 889696 to 890477 reverse strand)
acagaagaagatttgcggttcattcaactgttgtaaggaaaaaaaaaaaagattcggttgattattgattctttcttcttctctatttggtcttttttgttttgttttttggtttcttgaagttaggccaacgcctttcgcgtatcctaaaccgtttgattgttgatttcatttgaatttctctgtttttttttttttttccatttttcttgagtttctggtcaccctctgcgacccaacatcaacttcctgtcttcttttttttcaaccgttttttgttgccttcttcttgctctttatgcctttatatacgccttgattccaattctttgtttgttatgggattcccttttaaggcttctctctgaattggcagttttgggcctgcacgataggtgtttgatgttttgcctcactgaataccttataatttgggacatgagactttcatgaatttggatggtttgcttttgtccgaaattgggttccgtttctcttttaatcattacgggcaaaacttgtgtgatttttgttgtcttcgtggttggacttgccctttccttttagctatcctttcatgagaaccatccccttttctttcttcatatttccaactttctccatgtccgtgtagtttgttgtcttgtcttgataaggaacctggttggttttagttggaaaagttcattttgcaatgattcattctggtttcttcctttcgggaccatcatttaattctgatgctactacgtctttcatatcaatttcggtgtctgaagaag

SEQ ID NO: 67922 - DNA, 647 bp, Cucumis sativus
  Intron number 1 from transcript Cucsa.218300.1 (locus Cucs a.218300) derived from phytozome v7.0 (chr-ID scaffold0165 8; pos 411162 to 411808 reverse strand)
ttctcagtggccttctctccgtcgacggccttaaagtattattcattctcttgttatttttctttttctttttttttctttctatttttcctgttttgcatcttcatcactttccaatagtacatgtccttgaatctctgttgataagaaattgtgttttgctttgcttaggatttggatttggattttgtatagatctgtgaaatgtatctgtttatgaaatcttgcgacgatgataaatggaggttgtaaatgatgtattggatagtgattgagctcttcaggctggctttatgtaaatgttaaccacggatgagttttgtttgaggaatttttgttctagcttaatttgttgtcgatcactgatgagtttttaatcgaaatgttttgaatccagttaagaattattgttttaacatttcgacagcattgtatcaatgcctgaatttctttattttgagctgctaattttgtttttagaactaacaacttttctgcgatggataagttgttcttcgaaagtttgtttcccttaggaatctgttcttatcctggtctggtcttgaacatggagagtacatttagtttttccctcttgattttgggattaaacgagagtgatcaatcttctggaacaggtacttcat

SEQ ID NO: 67923 - DNA, 703 bp, Cucumis sativus
  Intron number 1 from transcript Cucsa.259950.1 (locus Cucs a.259950) derived from phytozome v7.0 (chr-ID scaffold0222 9; pos 6279392 to 6280094)
aagtttctttgggagttcttggagttattacacaggtcagcatgcatctgcattttatattactagttaaaatcttgccatgttacttgctgtgagggcgtataaaataagtatataaatttaaaaagagtaattgctggggttttttttcttcttcttttatgcattgttgaaataatgatgttgagtaaaggaatatgtgggacgatacagagttgttaaacttgttttgttttgatgagaaattaaaatacatagtaattaaaggaatatcaaatagacactattataaaattaagctataatgtcagcatagatgttagatgagaattgtcatgtgtgaatgtattattacaacgatggtcatcctccatatcaattttcaatagacattatcgttaaaaatatctatttttataaaataaaataatcatcatctttattttattaaaaataaagtattgactatataagtagctaaataatataaacgagtatccattcgtgcacaaagtatattcaacttacatacataaatgaaaataaagagaagcaaagtgattaatatggcatatcgttatacattcaacttagaaagataaataaaaataaatataggaagacaaaaaaaggaattaatatggcacattggtatgattgaaatgaggaaatacgtgtgtaggtaactctgaaattacaacct

SEQ ID NO: 67924 - DNA, 772 bp, Cucumis sativus
  Intron number 1 from transcript Cucsa.336970.6 (locus Cucs a.336970) derived from phytozome v7.0 (chr-ID scaffold0335 6; pos 105058 to 105829)
ttcttgctgatctcgtctgtgatcgataaccccatgtgatttttctttttgatctgggtgtttcttcgttttgtttgcctttttctttctgggttttgtttgtttggtcatatattgtacttatctgcttcagattcaatcgaagctttgatctaattggtacatgggacttacccattttatgtatttctattatatcctgtttttgtttctcgttgatcctttcaattaatggtgatttagcagtgttttggatttgatgtatctcatttggatgtgttcttactgtgtactggaagtttggtactttagttgggagaaaatctagcaatttggatatgggtagttgttaggctaagcaaattgttacttcgagatgatgacttatcataatcaaacttcttatatcactctttagttgccgatttgttcttgatatttatctttagcaccaccttggcacgactgttattttaatggatcagtcattggcttgacaccttgcaatgttcaagagcattaaatgcattgaaaaacatttcctcttagttctcatctgctggattcatggatatgatcttttgcaagtttgcaactcttatagaggatcttcagcattactggattacaaaatggatattttatacatgtgatgtatgagaaaactgggtgggatggaatgtggtattagtcaatattacaagactatttacttgtaaggtatgtgatgtttgtagtgtggcggagatattcataatttgggcttgaagga

SEQ ID NO: 67925 - DNA, 897 bp, Cucumis sativus
  Intron number 2 from transcript Cucsa.336970.6 (locus Cucs a.336970) derived from phytozome v7.0 (chr-ID scaffold0335 6; pos 105858 to 106754)
gttcaggctacaaagtattgttatcttatagcaaggtatggagcggacttaattaaagactgaatctcccaatttatagtttccaaatacaaatgctggattacagcagccaatatattcctctaccaataaaatagtgagatttgtgctataaattgttcttccacatctgggctccggatattggcagttgataaatcttaaaagagtactgatattaaaattttgagggttcaaatagattgcattgtattttttctcttaattattggtaaacgatcaggattccctcttgatgaagcattgaagctatcttgtcagaagtttttagggagcacttttgtctttcattgtctcctaaatgatgtttgcatcggcattgagcaactgaaatagaagggcatcctggttcatggaatgctcctatgtgttgtttatggttattgatgaagatcagtgactgaacttgaaaaaatatcaagtaaccttgaatgtaatatttaacatgctgttgcaactctcctgaatgaatatagtatgatattcagctttggaaaattatgtcagatgaagctctagcatgtttctttgagtgaagatgttaagacaagcaaagggaaaaaaaaaagaaaagaaaagaagaaagaaaagaaaaaaaaaaggaaaagagaaaaaaagttcaattgtgcaatacaatatattaaaaaatgagctcataatgttttgcttgctttcctgattttcttttgctttgaaatttgtaagtccgttcattttttccccttgtttctatgcctggggtttccaccaatttatcatcattgtactctgtttcaccctcttgctttcattcttcttgcagtgaattcgtgtggcatatcctgatttcagagacca

SEQ ID NO: 67926 - DNA, 894 bp, Cucumis sativus
  Intron number 2 from transcript Cucsa.238430.1 (locus Cucs a.238430) derived from phytozome v7.0 (chr-ID scaffold0202 3; pos 992783 to 993676 reverse strand)
gagagaaaggtgcctcaacttttccagtcttctttctattttcacgcttccttctactctgtgtgacgaccttaacaaatcaacacatatatttgttctatatgttgtacaactgtgtctttgagtttctaggggaactttttgcgtctgccttctttgttagtgtcagtttattaggttgaaccaaacactaacttgcttttcacggaaaattggaattagtttaggagaaagtctttttcttttattatttattatgtaatatttgcttagctaacattcgttgacgacgtctaattttttgaagctttttagaaaatgaatacaggcaacttatcgtaattttgttgcatgtatctgtgtgttgattttctttatttttttatgatcacaaacagcgccctacaaattaataaaacgtaaattgttcctgaaaaattcaactaaaataagatgataaacattctcatgtcaaggaaactgagattgtgaagaagtttctattggcagtgtagttaaacagatgtctcatttcctgcacctaggttgttgttgcgcttaataatagattccttccatttcctaatatatattataatgaaataataaaacatgtatatatagatacacattatgacgatggcctataatgggagtgtggatgttcacatggagctattttgtatagtttttgacttttgttctttaaagttctccatccttttgccttgatgtttgccctttaagatatttttctaggctaagagactgcagtcaaagaaaactttttcttccaaaagagaaaaaaaagggaaaaaagaaagaaattcttttgatggtttatttatattttctctttcccccctcattgcagcgaatctcccaagggtgcaa

SEQ ID NO: 67927 - DNA, 427 bp, Cucumis sativus
  Intron number 1 from transcript Cucsa.238430.1 (locus Cucs a.238430) derived from phytozome v7.0 (chr-ID scaffold0202 3; pos 993786 to 994212 reverse strand)
ttgctcggcgtcgaatcgagaccgctcaagctcaggttcagtttttgcttttgtttcccctctagaaaatttcatgggcagttctcttagtcccccatctcaaataagaagatgaagaatgggttataataatcaattttgttgtaaatttgaagttttttgatggtggttgtttgtgtaatatcctctctgatgaatcaaggttgtatagcgtatattttctggaactccaatagattgttttctgtttttctgggtgccattagtccagtgcttattgatgagtatattgtattgttgttctctgcattctgatggcagcacgtattgaaatccatttttcatgcccatttttgttgtctaatactttttagtcttttgtaaacagtcctccactttattaacttgtctgtttccaatttgtagg

SEQ ID NO: 67928 - DNA, 524 bp, Cucumis sativus
  Intron number 1 from transcript Cucsa.360700.1 (locus Cucs a.360700) derived from phytozome v7.0 (chr-ID scaffold0358 8; pos 1290403 to 1290926)
ccggtgaaacttctaggtcgcgaagacgctagcatgtaattgcttcttgttattggttcattttaagttctgttcttcattgatttggtttgtgtggattgtattatcttcttgttcctggctctatctcgtcatttccaattcctttgtgtttactggttaacccttttcgttctgcaaggttgcgtatgatgtttgatgtccgtgtggttctcacttggctgttctttgaagctaaacgttgacatttgtggctttttgctttttgtttaacaatgattgcataaattctttttggtggcttatagctattagctagagatttggtctctggaaagcatgagtttttcccttgcagttgcatctaccactttttatgcatcctgattttcccctgttctctatgttttgaatgttaggtgccttattttgtttctgtttgaggtttttctctctattgtgactatattcttactcttgttggtttagtgactggtacaatcttgagaaatctaagagggtga

SEQ ID NO: 67929 - DNA, 970 bp, Cucumis sativus
  Intron number 1 from transcript Cucsa.253530.1 (locus Cucs a.253530) derived from phytozome v7.0 (chr-ID scaffold0222 9; pos 2098408 to 2099377 reverse strand)
tatctgcttttgtgtaagtttctacccgattcattttagaaccactattgaaaatacaactcttttttacgctaataattttttttttaaatattgattagcttaatatatttgagcgattttgaatttaattgagttgattattgcttttaatactcttttagaatgtatttggaataaaaaatattttttttctttttagattttagtttgtttgctattatatgtactatggtttacgaggtgttttaaatatgttaaactacgtgtttttttctctcgaatttaaaatatgttcaatagatttctaagatttttattacgagctcgaattttaaaaatgttcaattagatatacattaaaatttcatgtcaactgaaaaccttaaattttaagctttgacgggtgtactataactatacaaatttcaaaagctttgaatttcgaactaaatttgtattttttaaactttagaaaacaagtaaattaacgaacctcaaatttccgctgatgacatatttaattcaagtatttattaaaataaacattttgtcgattttccacttgccccaaaatatatttagaaccattttcaaaacaatgataacgaacaaaatttatttaaaattatagattaaatagacttattgactatttaaaactaaatacacacctacttgctcgaattctcaaattcaagttaaattactcactagattaaatagattaattttcatgtaattactcaagattgaaagacttaaacggtaaaatcgttcttttcggtccattcaaaatttacaaaagtgtaaaaaaatctctaaaaataaaaaaatatattttaaattcatacaaacaaaaattagtaaattaactcaaaattttcttctaattcatttagtaataaattgaaattaaatcattaatcacattttttatatattttttcaaggtacttattagcaacaa

SEQ ID NO: 67930 - DNA, 942 bp, Cucumis sativus
  Intron number 2 from transcript Cucsa.394290.3 (locus Cucs a.394290) derived from phytozome v7.0 (chr-ID scaffold0410 0; pos 305940 to 306881 reverse strand)
acttcttcttaaggtaatccttttcttcccctactttcatgtttgcatcgttgctaaagtcgtgcctcataaggaaaacttccaatcatgatctcaactaaacattgttccttgtcaaaattgtttgattgcctcttccttcattatgcgattccggtcaaacctgctcatcaatctccctaactttcctcgtttagatatccccacttctgatacactaagctttttcccgttccttttgccgcgtccccatccctgttgatgttttttctgactatcgctacatggttttatgattgattcaactcctgctatttcttctgatctgatctccctctattgttatttctgaattcgtgcttcccttgaattttatgtttatgtttaggtttgactttctaacgaaaacgtgatggtggttagtttctcgtattttcacctatttggatgggttgttattcatagtaaatgctacggatatctggattctgtaggaatattgattgcccattatggggtttcaaatactgaattcagtcctggaatatcatacccatgtttcataataggatctgttgaagatgagcccccttttgttttattaacaatgaaacttttgtggcaatgcgatgtctgttcaataacttaatccatccaagatttttggcatttttgagaaccgactcacagaatactctaagccttgtttcttgcttgtctacatgtaatgccaaagtaaccatagcccaaggttaattgacatatgaatttttttcatttgaggttggagcttcatatctccatactccactcgtacttaaaaattcatattattgtcctttttcttcctcgctgtttttttcccatcagtgaatagaatgattaagactgctgtctccttttgcaggcagtgagccttccgtgctgtccgtattttaattt

SEQ ID NO: 67931 - DNA, 428 bp, Cucumis sativus
  Intron number 5 from transcript Cucsa.323190.2 (locus Cucs a.323190) derived from phytozome v7.0 (chr-ID scaffold0308 0; pos 2667122 to 2667549 reverse strand)
gatatcgtaaagtcttaaaggtacagctatttaattatggaggcatatgtgcaaagttccatattttgttgttattcaaagtagtttggatgggctttaatatgtatttctgctactatgtttttacttttcagccttgcttttgtctaccgtaggtagtttctattgttattttggttgttactttggtcttctcatgaccttagtattgttattgttctttgtattttggatatgacgagggtgctatgggggacctagttgagatgtccgggtgcacctactgatcctctctctctcccccatttcttggcttccctattattctcattgtatagatttcttgtactttgagttcattaataataaagaagcttgtctcctttttaaagtaattaacttttatttggtccgttacagggttgcaa

SEQ ID NO: 67932 - DNA, 1014 bp, Cucumis sativus
  Intron number 1 from transcript Cucsa.343220.1 (locus Cucs a.343220) derived from phytozome v7.0 (chr-ID scaffold0335 6; pos 5481525 to 5482538)
atcgcgattatcttctctcacccaccggagctcaggtaccatttgtttttaaatattttgcttaccataaagacacaatatttaagcaggaatggttcagcaaacaaaaagttcagagttacttaaaagaaatggaagcaagatagaacgatgagagaagaaatcaacttctccgtaccgtttttgggttgaagagtagtgacgacatgagtataaatgatagttgggagttgataattttcatggtagtaaatccaagaaaaaaaaagaactgtgtgatagttcatattaattacactaccaacctgaaggttagattcgatctggttttgtgaaacctaaaacgtgactggatttggtttagtatttgctcaaggcttttttgagtaaacaagtatgaaaaaacatacataaaatcataccataacacacacccaaagagttatattttgatttccttagttgttggattcattgtttgtggatccaatgttaatcttagacatatttgtttgaagtttatgctttgataacaaagaagaagacgatgtatgaatggaatactgggatagacgtttatgattgtttgggcattattgagtgttcatttggcacgagcagcacgtggcaaattggttgtacaaattttgtttgaagggagcgagagggaatttgatgcttcctttttgtgacactcaatttgaaaggacaattgtcgttccattaaacatccacaaaaaagaaaaaattcaagatgtagtaattaaattgagaaattattctagagggccgagaataatagtgattttattacatgaaaacaaaaataatttatgaaaattttgcttacgtggtggggtttacgtggaataataataataatcttccgctaccacatcgctttcaaacaaattaacaccttcccaatacgattccctttttccggcggagattttgattctacttttaattccggcaggttaaagtatccaatctcgacggcaaggttttggg

SEQ ID NO: 67933 - DNA, 180 bp, Cucumis sativus
  Intron number 1 from transcript Cucsa.228460.1 (locus Cucs a.228460) derived from phytozome v7.0 (chr-ID scaffold0193 3; pos 359606 to 359785 reverse strand)
gtgggcatctttgatttctccctgtacgtcgtctctttgttgcatccttcttctttgatttctattaatatgttgttcttgcttcttttttcctcttagcaaatgatgaaatgggattgttttttagaatttgttggtgcgaaaagctctactattttatgtaatctttgatacagagag

SEQ ID NO: 67934 - DNA, 664 bp, Cucumis sativus
  Intron number 1 from transcript Cucsa.364870.2 (locus Cucs a.364870) derived from phytozome v7.0 (chr-ID scaffold0361 1; pos 2297785 to 2298448 reverse strand)
aagtttcaaggtatttttctttttctttttctttttctaattcattattattattataatattaatcttttcggaagggatcaaaagggggtatgaaattatgatagattctttcattgggatttgttttcatttctcttgaataactaaacttgaacttgggttttgtgaattttggccttccttgtttttttttccactttcatttggattttactatttcattaatgtttttgataaacatgtgtatactatgattatgtatcattgtaatcatattattgaaccactatgttttgtttccaatcctggtaaattcatatgaaatgagaagagagaaaaagattaaagtgaaccaatttgatctacatggcatcttctaacatgggttgtctgtttttcttttcctctctttttcatgttaaaaccttaaaatttaagtccctctctctctctttttatttttccatataataacagttttttgagatcttcgttattgtaaattatgaagaggggtgagttaaaaaggaaaacaaaaaagatttaaaaatatattgtaattaagttttcttagattgagttttttttttctttttcttaatttgaattgagataatttcaggaaattaggagagcttggattcaatcgaactccaaagaa

SEQ ID NO: 67935 - DNA, 590 bp, Cucumis sativus
  Intron number 3 from transcript Cucsa.334780.1 (locus Cucs a.334780) derived from phytozome v7.0 (chr-ID scaffold0331 2; pos 253288 to 253877 reverse strand)
ataaatttctcaaggaaattgacaagtaattgctataactcattctaaattacaattttcttcggtactgtggattcttatgctatggattatgtaaacattatccctatagttgttattaattgaagctctgaaccatatgtgaagatagcacaccaacgggcacctgctctttctgtttatttgacagttatgcttttgttagtttgctctactttactcagactgtgtgtcatagaagtacaataattcttctctccttgcctatatatgaggcctatttcagttcctctaactgaagccatttttcatgactttgaattttgaagttttgaaaaacacgtaaaagaacttcaaagtagttctagagagattacataatttgcgtttctttttgggcagatgctttttataagttatcatagattcgttatcattgctcaactccccaaacctggtagggggaagggaacctctgttatagagttaaagatggttaaaatattttacattttatcacataacttctaaatcgttttctaacttcttttcttattctttttggctgttgttcaatttatcatctgcag

SEQ ID NO: 67936 - DNA, 622 bp, Cucumis sativus
  Intron number 1 from transcript Cucsa.338320.1 (locus Cucs a.338320) derived from phytozome v7.0 (chr-ID scaffold0335 6; pos 1259861 to 1260482 reverse strand)
gaagtcattcagttcttagtctcactgcctttcaggtactcaaaagattatacccttttattcttttttcccctttttttggttaaattataaaatgtgcattcaaagtttcaaaatgatacccctcactgttagtaaaagaaacgaaaaatgatatgaacggttaaaaattcaaaagcatattagttgtcatcgagatgtgcctaagctacttgtaagtgtatttacagtgttccaattaaattaacatcacctttcttcccagtggtctgagatttgattactcattctcgtagtgttgttgtattcagtcaattttcctctacttgaccaatgttgaggatagttttggaccgaaggggtatatttttttcatataatttatagaattgtatgtattaaaagatataaaagttagaatgaacagaacttcgtttagtaggaaatttgaaaaagaaaatagagttaagatacattacaacgttataaactaaaaagaaaatatcaaaaacagaatttgagatgtagttcagcagactgtaaatttaaaacagaatctagattctcgattgaataaaacctaaaattttgggttggtttgaaaggtatccagatcaaaaac

SEQ ID NO: 67937 - DNA, 818 bp, Cucumis sativus
  Intron number 2 from transcript Cucsa.337310.1 (locus Cucs a.337310) derived from phytozome v7.0 (chr-ID scaffold0335 6; pos 407104 to 407921)
acttgcagtggaatacagtgagtatcttcttttctttaacaatgtttgagtacgtgatgaatatattttcttttctttcttcagcatgcctttgcctgcgaatatggagctttagacacgttgtaatgattgaaattatatatattggcgttttgacatctttttggtcatcaatcattttagttggttggggaattaaaagtttttcctattctgctattttatgtttaacttcggatgcacacatatcctcatatgtgcattaagttcacatttattttcacttgcatatattcagctgattcgttcttgctattgataatctactgccttttaaatgcttttctttcattgttgtatttgacgctgttaatgatttaagagttttagttcatctattctctgttttttgaactctctggaatcaagggagtgatagtcttttttgttttttttaacttatgatgttgacaaggttgaaagttgtcttcacatcacgatggaaatgatatatttggcatgtcatataaacatttcatataagtattactctattattgtgccagaaagaatgagtgacattcttgtatctgattaagcatgttattataattaaattctttcaattttcttaatgttttgagctctcttattgagtaagattgaatgttagcaaaagttatttgaatacatgtttgaatcttgtagagtaagatgattttttttattattcctgtatgtaattttcttaaaacttttgttttctaccttcattgtgtaaagtcgcgagtttactcatcgagttaagtcagtatcga

SEQ ID NO: 67938 - DNA, 739 bp, Cucumis sativus
  Intron number 1 from transcript Cucsa.280180.1 (locus Cucs a.280180) derived from phytozome v7.0 (chr-ID scaffold0263 3; pos 99176 to 99914 reverse strand)
gcgaggtgaattaacttaatcttgagctcaaagagggtttctatttaatgtcagagtgagtaaaaaagaggaaaaccaaaaatgtatcttgtctagctatatgagtggcgtagaaataaaagaaaatgaaaggaaaacatgcaatacaatcatatctctccaggctaattgacaatttcttccccctgtaggtgaggttaaatttttgaaacattttaggtgtatgttataagttgaaaagatattgcaattatctatatgtaatagagtctgctactctttagcttcattatggaaaaatggaaccaatgggagcctgttatgaagtcttctttatgaattgccaaatatttgcgtagtaaaacattcatcaactgtgatttcagatcttttattatctgctttatcatctctaatacttcttgtccctgtatcattgtgtacctttatatattgccatatcgccttcctaattctctcaattttattgagtttttttttaaaatttttattttgcatgttatgtgatttcaattatagaaatccaacttgaaatatacaccttgtttttctcttctcaaatatactgtatggcttctaaatacttgtagctttcatacactgactgatacaattcccgtttctcatttattcatttgattgacattctatgaagttaaattggttttatttatctggtttaggatattgcatctgctattcagagaggaactcgaga

SEQ ID NO: 67939 - DNA, 963 bp, Cucumis sativus
  Intron number 2 from transcript Cucsa.313900.1 (locus Cucs a.313900) derived from phytozome v7.0 (chr-ID scaffold0299 5; pos 3042708 to 3043670 reverse strand)
ttcgaagttaaagaaagctcttttcaagcttaaaggtacatcattcatcatttgagtatacacacaacgtttttgtttcttgttttaatctatgtttaggtaattaacattttttgatataatggttcttgtttgtagttttttcttttgaacataattaaaaaagtattgttttatgattcttatctaatgaaatgtagaatattgtaataaatattaaatgtcctgttttaaaatctgttgtttctaaattcatttttttaaatctaaattttgtgtttgacttgtaaggccacatttgaaaatccttcttattttttagtttagaaattaggctttattccttttttactctctctgttttcttttaagaaacaaacaccatgctgttagtctaatttcaaaaacactaaacaaattttgaaagaactggtttggattctgtaaacatacctagaaaagtatatagaaaaatcaatgggtgaagtagccagtgttattttaaaaattaagtgtacttttatcaggtttaaaaaatcactcataaacttacctttgatcacctaaaattagtttaatattgaatttgaaacttaagaaagtaaatttcatgtctatgatatctaattgttgtaatgcaaaaaaaaaaaaggaaagaagaaaagaaaaaagtgtgtgaggggtgcagcttgtgttggttgggcagagcaaggggtgggagacagtggtccttttttattcattctctatttaaaaagtgacagttcatttgtccccaaaaagtgaaaaccatttttaaagatatgcaatataaactttcatacaccacactaccaagtgtggatatatatacatgtgtatatatggagagaggtgaagagagaaaattcgattattattattaacaataatgaagggaatatatattttgtaggagttgaagaagtggaggtggaaatagag

SEQ ID NO: 67940 - DNA, 374 bp, Cucumis sativus
  Intron number 1 from transcript Cucsa.340960.1 (locus Cucs a.340960) derived from phytozome v7.0 (chr-ID scaffold0335 6; pos 3312824 to 3313197 reverse strand)
gctgttggagctctgtccccaagcttgctggtgaatcactttctcttttttcccatgaccgtcatagttactattaaactcgtaagcttaagcaaagccttataaaaagttttctttatttttttatttaaaaaaaaatgtgatgagactaataattagctaaagaataaatcttcgttttaagattccttttttcttctcgtaattctctgatgtaattattttgtggtttgtttttttttttataaatggaaagagaagttctaaattctaattctaactcatttgtttagcaatatagaatcattagtcacattgtttcccatcttctaataattatttattttgatggtgtatttttcaggcttgcagag

SEQ ID NO: 67941 - DNA, 978 bp, Cucumis sativus
  Intron number 3 from transcript Cucsa.257300.1 (locus Cucs a.257300) derived from phytozome v7.0 (chr-ID scaffold0222 9; pos 4647797 to 4648774 reverse strand)
aactttttctccattcaagctctcaggcaagtagcattgtggtttgtgcttctatagtagtatagattgcttctaaatcggatctctatatgagcgcatcttttaactagatgaaaaataacgtttattctgtaatgttcttccttcatgcttcatgcttcatgcttcatgttattagtacctctcgtctagtactcgcttccgtagatgaaatactgttagtcgattttacatctgattgatctatttatttgactctgtaactttgtagagaggcactgcaagtatctcttccgaactccatgtagctattctgaattgtgcatgtttggctggtttctggtctctttgctctaattttattttgaagatgatgaacttcttctcaatttctagttatcaggcgagttaaatttcgtagtttcactctggtttgtgcttcctccggttgtccatggactgaagtttgagtagaacactacgcttgataaaaactgttatgtttatttgagcctattctttgactagacaaacaatacgacgatatgttcaactgtcatcctctatgcatcctgttattaggatctttctacatttagttttttttgttctttattattatcattatgttctttttcttaaaaaaaattctgtgattacgtagttgcattctggttcatgtacttgttcatcttttttcaaattttcatctcaactgtttcttcactttttttattttcctgcacatatatgtgctgaattgttcatgttcgactgttttttagtagctctgcttttcttttcttgttcttttgacctgatattatggcttttatgcctacatctcaatgactccattaactgagtgcacactgttcttggtgtatgtctgttttttatccatggaacacttaccaatgaattttcaacttattaatgacagtgtgtgggggtacctgaaagaagcagattggtttc

SEQ ID NO: 67942 - DNA, 990 bp, Cucumis sativus
  Intron number 2 from transcript Cucsa.299720.2 (locus Cucs a.299720) derived from phytozome v7.0 (chr-ID scaffold0292 0; pos 185868 to 186857)
ctgtggaaaaaggcgcccagcttgttgtattgccggtcagttcttaggttttttaaattattgttagtctggtgtaatttaagctttcctggtggtatttcgtggttttagagtttctgttctgctcgtgattttttctattgttccatatttctgtgacaggaaatatggaattgtccttattcacctgattgcttaccactttatgccgaggacattgaagccggtggtgacgcctccccttcaacagccatgttgtcggaagtttctcgccgtttaaaagtcacaatagtcggcggctcaattgtagagcgctcgggggataaaatttataattcttcttgtgtttttggtactgacggaaagttgaaagctaaacacaggaaggtacaaaatgatatacatacatgatttttaaatcctgtgatggaatactagtattcaatgacgcattagaaatatttccttatttgattttggatgtgggaagccttgatggggcacttcgtttatttagtgtgaaacttttaatgtgttcctaatagtttcacttatttgatgtttacatattggtggtagatgatataatattgaatttactttcagtcattagcttaagtttttttatcaataggtgatttaagacttgtttttcataaaactgattcatctttttctaactcgataatgctgaaaagagtaaagaattcatacttgactttccactggtaaatttaaaatctccacttttagggtgttcctcagtttgtcttctgaaacatttttcgagtttctattttgttgttaggagatggatttaaaatggttattaaatgcttcaagtgttctacaagagaacaagttaatgttgtttagattaatcaaatttgtttgaaggatggttttttcttgtttaactcatcactcacgagtttattgtcattttcatctgcagattcatctttttgatattgatatccctggaaagat

SEQ ID NO: 67943 - DNA, 469 bp, Cucumis sativus
  Intron number 1 from transcript Cucsa.241060.1 (locus Cucs a.241060) derived from phytozome v7.0 (chr-ID scaffold0204 7; pos 1229368 to 1229836 reverse strand)
gtggtgacctgagatctttcttcactctggtttgtaattcttttaacttcatttccttgtttgtttatctcaaacttattacaaaaaatgatttatctgaggcttggatctgatcttattctgcatgttttgagttgtgtgtggtctttaaattcgaagatatatagttttgttgcttaaaatattgattatatcgttcataggtttaaatttctactcttgcatgttgaataaatttaaaaagaaaaaattaaaaaaagaggggggaaattttgccatagggtttctttccttaataagagttattatgtgatttaacttaatatttgacacttttaaataatattatttttaattatttgttggaattaccttttctttagtttttattacatttttaattattatatatatctcttaatactttgattatttgatttaattagttttttctttttgttttcagatt

SEQ ID NO: 67944 - DNA, 383 bp, Cucumis sativus
  Intron number 1 from transcript Cucsa.207400.1 (locus Cucs a.207400) derived from phytozome v7.0 (chr-ID scaffold0144 3; pos 241970 to 242352)
tctttggcgctagcaacatcatcaaattacttttagtacttccttgatccctaattttctgtttctctctttcaaatttcgctgtcttttcttcttgtttctatgtttgaaaattatgaattccgttattgaaattgaaaattgaccttaacaacttaacgaaaaaccatcgttctggctggaatgaagtttgacgaattcacaatcctattatgtttgattgcttttgcttgatgataatttggagctattacgttcatacatcatgaaaattggtagaatcaaatgaaaacacccaactgttcgattaatgccctcgaacaatccatcatattgaatgttttattgaattcttcaggatcttcctgattcacaaagggcgg

SEQ ID NO: 67945 - DNA, 832 bp, Cucumis sativus
  Intron number 1 from transcript Cucsa.201450.1 (locus Cucs a.201450) derived from phytozome v7.0 (chr-ID scaffold0137 4; pos 359421 to 360252 reverse strand)
ggcagagatttgtttgggtggtacgcgccccaaaggtaaaatgtaattaagaaactaatcatgttttatcacggggttttattttttttaaaaaatagttctttataaaatatcattttgaaagacacataataatttgttccatataaattgtatttggctaagctttgttgtttaaaacaattttttttaattaattatttttacaaattaattaaagaaaaatatttgaataaaatatattttttttacagagaagaataatgtgtaaatattattattcttaaaaaaatactactctttataaaagcaaaatttatggaatatcaatttgtggttgaatattatctgtcaactgcacagatatggacaaactcgaagaaaagtacttagtgttacatctattttgtgcaacttatgtagttgttcaagtaaaatttatcacgtatcgaaccattgttttgtttcaagaaaagatttaatagttagtttgaaagaagtgaaaaggttggatcaaaattctcgttttgttttatctttccatgcggtaagaaagtaggcatacgaattggtgtgtgcctaattcttgttttgttttatctttccatgtggtaaaagagtgggcatatgaactgatgcctattttttattctcatttccacgtgatgggtttgaattaattacccacatacatcattaaaaaaaaactatttttgatcattagagtttatttaaataaaatttaatctatatactttcaaattaatatataaatttaacattttgtaatcttataggtaagatcggacggtgcattttttacgacgggaga

SEQ ID NO: 67946 - DNA, 856 bp, Cucumis sativus
  Intron number 1 from transcript Cucsa.219660.1 (locus Cucs a.219660) derived from phytozome v7.0 (chr-ID scaffold0165 8; pos 1356021 to 1356876 reverse strand)
cggtggattcattgggacattttgtggtggagaaggtaagggaaagaaagggcggtagattctgtaagaattcttcttctggttcgtcgtaactcttttgattgtttgataattattatgtgggtttgtgattatagttttgtaaaatcttaatacttttctctttttgttagtattatactgatgtgtgatggatgtattacgttctaggtaatcggaatgttcttttccttatgtatgtgtttggtttccgagaaagtgcgagaaaatgtatatatatgaaagcaagcaacctccttgctttcttttacactgttcatcacttttttcttgtcatcactcaacaaagaaatgaaaattactttctgttcctgtggcggatactcatgcattccttttaaggcgtagcctcttactccacatttggttgccttgaaaagaaataagaagaacaaaacttctgttttatcctttcttgaattacactacgcacacatagatctatacacatgatatcacaaccatttcatcatttaaaaacaaaatgagaaccaaagattaaaatcatctcttgatttagttgagttagatttgaatttgttatgtttttgtttcaagaatttggttaattgaaagttaattagattatgacaagtttaataaggtatatatctgttgtcataaagtagcggtcaactaaaatcaaaccacgtgtctccaacataaaagttagaatggtttgaattctccctaagtgtgtatttagtaaggattagaacaatttccctctttttattattcaaaattgagtttgtgaaaaggaaggaggaagaggagggggcaaaagagtaattaa

SEQ ID NO: 67947 - DNA, 946 bp, Cucumis sativus
  Intron number 1 from transcript Cucsa.308170.1 (locus Cucs a.308170) derived from phytozome v7.0 (chr-ID scaffold0297 8; pos 370431 to 371376 reverse strand)
ttttcttccaacacgttcatccccttccactctcggtaattggtttgttgatttctctaattctctccctccctgtgtacattgaattcaattcatttaagaatcgtatggaacctgtataaaaatattgataacgcatgccctttgatcctaagatactctggatatgaattgttgatgtttaaacgttaatgtaaattatatcatatgattggttattttgctttaatggttgacactgactttgttaaatgatagtaattaaatttactttcattcattagcttaagctttaatttttacggaaattggttatttgagatgtctttaggtggttgaagcattaaaatggaattttggacattgagtaccgaccttagattggaaactgaataataagaatgatgtcctatgttctaagtgttttggctaggttgtaaatttgtcaatttcactgctgttgaccctttcttcacccagaatctgagcaattgattttcttgcgttaaaatgttgtgtcttgttaaagaaaaatgattttttctctccgtgtgtataaactttctttgtgcaaaattggatttatagtttgctgttctagttctaattttataaaaaacatgggaaattgttgatggccgaaaattatctcctggcagaaaggttgaaatagactcttgtatttatcccttttgaaattttgtaatacaatcgagcgggtagtatttgcaaatggtgtataaaatgctctatctgtttttgtagacttgagcttataggcccaaccaatgctaattggttttgttgagttttttttttgggagggcggagggatacgttgagataattttaagtaactcaattgtgctttgagatggacttagctataactataaggttttcttttattcgttgctgaagaataaaatcagtctaatttttttag

SEQ ID NO: 67948 - DNA, 899 bp, Cucumis sativus
  Intron number 1 from transcript Cucsa.320750.1 (locus Cucs a.320750) derived from phytozome v7.0 (chr-ID scaffold0308 0; pos 584679 to 585577)
ctcgatatattggttaacacatgcaataattgaactctaatcgtctaattcagtctgtacaacttcaaaatgagagaataaaataagaagttgtaatactttattttatgtctgcacctatgttttttaagttccataagtttgaagccgaagtttggaggttaggattgaaagaccgtcaaccctagagttgaaggtacatagatatgcatatatcttaaccattacactatactcttcttcatcttttattttcatgtaatttggcaagctattatgaaattaaactaatgttatcatacgtgtttacttatatttatcaatatataaaaacatgttgtttatctaacatactgatacaatactttaattttaattggtgttagatatattattgatacagttatgtcttacgtactttaggtatatttgtgttgattgtgatgaatactcttatatcttatatatatgatatatactatcgaaaacacctgtagactatttaaaattattcttcactgatatctaacagtatgatagtttgttgacggactagatatttaatatgtttattaattgatatatctcataactgtattaaattaactaatacttttgtactaatgtttattcattgatatttgatagattaaaattttgatatatattgttgatgatgtactacagaaagattaattggttttgagcatgttggtaggattagtatacccaaattaacacctttttttttaatacaattgtaatctctattgttaacgaatttgactaattggtagactagctagtgcatatatatttagtataacaacatatagttatttgagttttctgtttttagaaaaattaatgttaatttggtatatcggtgtgattagtag

SEQ ID NO: 67949 - DNA, 425 bp, Cucumis sativus
  Intron number 1 from transcript Cucsa.323110.1 (locus Cucs a.323110) derived from phytozome v7.0 (chr-ID scaffold0308 0; pos 2614402 to 2614826)
gctggagcacctgaagaaggttcgccttttcgtttgattttattttttccgttggaattcttttcgtgtttgtattttctatcattccgcttgtttttcaatcctaagcttgttatttataattgaattttgaggtttgagctgtagcgcgtttcagtatttttgttgacagacttgagaatgcaatttatctaactgtgcttcgtgaagtttacgatattggattgaagacattgtgatttgattagtttaggaacgcgatgcatttaatgtggagatctatggacattttcagttttaatgtctgggaatttgctaatgttataatttgttatccgttcaatcttgtcaacttgtttgttttgaaacaatcgtgtttccatcatgcgtgtacttttcagagaggttccaacagccaggtggaa

SEQ ID NO: 67950 - DNA, 737 bp, Cucumis sativus
  Intron number 1 from transcript Cucsa.254780.1 (locus Cucs a.254780) derived from phytozome v7.0 (chr-ID scaffold0222 9; pos 3006790 to 3007526 reverse strand)
ttatctccattgatcttgctatacaactcttgcaggtttcttcttcttacttaaaactttaactttctctcctctctcctctctcctcatgatatcatgctttaaacaagttttgaacataattaatcaagaaggatagattaaggagttatcacgatgcatttgattatacttccactttagcatctaagcctttaaactctcttatttactttactttagtttccgcatttggcatgttctgagatagattttatgctcgtagtagttagttatgattttaattttatgtgtatgtctttgagtaagtagtgtttgtgtgtttaattactagagtatgttctaattaaaagttaaatagttcctatgaaatgtagttgcagttaaatatgatgagtataatgaagaataatggcatgtgaatgtaaataagagggaagggaagaaacattatatgaatacatttaatgtaagttaaattaatatggcaatgccaaaagtcaaaagttgtatgcaaaatttaatatggttaggtgagcgggttttagataaagtacttaaggtgttcagtgtttcatacaccttttttctttttcccctacaagatttcttttgtcttttttataaacacacaagttttcatttatcatttttacttgtacaattttaaaagttgaatttgaaggtaattgaattgaaaaatttgaacaaaaaaaaacaggtacacccaaattcgt

SEQ ID NO: 67951 - DNA, 527 bp, Cucumis sativus
  Intron number 1 from transcript Cucsa.374120.1 (locus Cucs a.374120) derived from phytozome v7.0 (chr-ID scaffold0373 3; pos 12498 to 13024 reverse strand)
ggtaatttcttcaacttttcaatatttccttctctctttttctgatgttttggtaagtcatattataaatggatgttttattatttatcattatcaatttctcttccttgattctgctttgaattattgtgggaattggaatagtatacgattctaaagtatgagatttttttttctcaagagaaaaaatatctgattttgaggacttgtattgacttgttaatgggaacttattgcaacataaattaaattatgatatatgatgatgattccaaggacatagttgtagaacatggaatgaattcacttgtccagttgtcttatagcattgggtcatcattaaatacacaccaaagctttttcattttttaaattacattttaggggtttctccaaaacaatatctatatctatatatattatcttttattcgatggtgtagaaaaatttgttgattttattgtgtgtttatgtttgatttttgaatggtagaaatttcaccgagatcttcccccaactcctgtttt

SEQ ID NO: 67952 - DNA, 647 bp, Cucumis sativus
  Intron number 3 from transcript Cucsa.339470.1 (locus Cucs a.339470) derived from phytozome v7.0 (chr-ID scaffold0335 6; pos 2069081 to 2069727 reverse strand)
gatcatttggaggataccaaacaggtctattattttttacccatcttatttatttaataatctaaatacaaagttcaacgataattggagtttgaaatgttaaaaaaatataagaaaaatttgatgacgtagaagaagataaatatattattttgaactatctaaacctgttttattttgacacatttacatacatgtatagttttattatgtatacaaatctaggttattagttctaaatttgcaaaaaaaaaaaaaaattaaaagaagtaatatcggctttgaaagcttgtgcagcatataaagttaaaagaggtcaaacttaacgtttggaagtgaaattttcattatatctcgataataaattacataatcatataaacacaccgtatatgaatttaagctaactagcatgagcatataacttgactagttaaagatatgtatactcacaccttgatcgtaatggtgttaaatagtgaagcataagacaatttaaacatatctcaactagttaagtgtgtatattatctttgatcgaaaagtaaaaaatttgaaaattttctgctctttgaagttatgtttaacttttttttatcgttgagagtataggaggtggaattggtggctccacgtgaagtagcaag

SEQ ID NO: 67953 - DNA, 799 bp, Cucumis sativus
  Intron number 1 from transcript Cucsa.274750.1 (locus Cucs a.274750) derived from phytozome v7.0 (chr-ID scaffold0254 1; pos 129202 to 130000 reverse strand)
atcaagaatattcccaatcaatttaggtctacccttctctcttcatttttttgtcctttatattttcattctatattattaacctttttccttttctttttttgttgtatcggtttatgaaaacactctttaaatgacacaaaaaaaaaaacagaaaaaaaggaaaataatctagaagctattatatattggtaaattattaaatttatgaaccctaaagttgtatttttgttagtttttttaagtttcttttttggaaatcctaaatagctatttagttctgggttcttagttttagtaattgtgcatattttctcttagtttctcattttggttttgtttttttaatttttatacaagagttcaattctttgccaatattaagaaaggaactactttttagaaacaatttcctccatttaacttagtttttgaatacatcaataaaaggtaaacaacaaagcataaaactagaattagtgtctagatttaattttaaaaaaccaaaaactagaatgattttcattattttttttgttgaaaattatgcatataaaccctcgtaccacatctaggtctattaatttgttatctattttgttaatttttttattgataattgttggtgcttttgtaatttcgctgagaaatgaacttctgtgcttgaatatgcaaatcatcagtaatagtttactaaattaggtcgcctaatatttgtttatcatatagagctatttagtgttcaatttcaatttttttggtaggcaaaatcatttattgaatattctggacaagcatt

SEQ ID NO: 67954 - DNA, 518 bp, Cucumis sativus
  Intron number 1 from transcript Cucsa.325800.2 (locus Cucs a.325800) derived from phytozome v7.0 (chr-ID scaffold0313 2; pos 109395 to 109912)
atccgccttgtgcagttgcagtagccgcaggggaagtacgggttctttctttctccttcgctctttgtttcttcttaaccctaatttatctctgattttgagtggttttgtacatttttgcattggaccttgttccatgtttctactttgaagttgatatctttctgtttctactcattttcgcgtttggtttatgtgaaggtttagtaaatgcggttgcacttgaacatattctgtggttattttgttattgaatgatcttgcactctgatttgtagagatgcagcctagcaacattttggattttaataattgattcttgttataagtaattgcctattctgagttagatatacttgtaggagatggttacttaagataatagttaaaaaagttccatcttttgattgtttaattgtgattgtggtctatttcttctctttcttatagtgtttggtattgataaattattttccttgatattgaataaatgtttgttggttatgtgaaggaagaag

SEQ ID NO: 67955 - DNA, 480 bp, Cucumis sativus
  Intron number 1 from transcript Cucsa.258090.3 (locus Cucs a.258090) derived from phytozome v7.0 (chr-ID scaffold0222 9; pos 5179129 to 5179608)
cgtatagggtacattacgtttgatttcaactttcccactttctattagtgtaattctgctgttgttctcttgtcaacgagaggggtttataactcaagtttcatagcaaatgctcgaattgaagttatgtactaaaaagggaaaacaattcgtttgaaaatctggatgctgtatagttagcaacttctttaggaattttctggtttccgtttttaatttgtttctgttgttactttttgcagactaatttgataaaagaaagtataaggatgggatataatgattttggggatttttattatgctcacggtgcacttggtgatgcttttaaaagttatgttcgtacgcgtgattattgtactacatcaaagcatatcattcatatgtgcatgagcgcaattcttgtcagcatagagatgggccagtttactcatgtcacgagttatgtcagcaaagcagaacagaccccggaggcccttg

SEQ ID NO: 67956 - DNA, 873 bp, Cucumis sativus
  Intron number 2 from transcript Cucsa.198290.1 (locus Cucs a.198290) derived from phytozome v7.0 (chr-ID scaffold0135 7; pos 1369626 to 1370498 reverse strand)
caggtaaacttcagtatatccattatattgctacacagtctatgttcgaagagtagttaaccaacctttcatttatttgtatttttttttaagggtgggatacatatggaaatggcaccaattctgtgttcatgcattttagtttctgtgcgaagcattggttgattatgcattcagaatttttggtacatgagtgaatcatttatgtactcttgttattggagtatgtggttgtgaaattggaaatgaatgggatattggattgtgcaagtgcataaacacgactgcagggttggataaacatgggccattgtgaatgtatttgctactgtattagtactacttaaaaaaatctgatctatctatagtagcaatcaggtaacttctgtggcatagttttagaacggttacaataccctttaggctgttaattgtgttttttctacaagacaccagttcattgatttaatgaaatatccacggatggatgaaagagccttaattaaatgagaaataaaatattatgcatcttaattttaagtttttgacaattggtcctatagtcattgtggttatgatttgaattgtttttggtgcagtagaattgtttctgagtattgatgttcatggttaattgaaaattgaagtcgaaccatgtatttttactagtttctttctgaacttctcccatcaatctgaatcaatcgaagttcaaggatgtaattgatggatatgcatttcatattccttggtctgtagaactctatcgtcattgattgattaacattttttattttagtggtctggagaattctagtttaaattttgcttgtttggaaattaagttcaattcgtgtttgtgacaggcaataa

SEQ ID NO: 67957 - DNA, 702 bp, Cucumis sativus
  Intron number 1 from transcript Cucsa.198290.1 (locus Cucs a.198290) derived from phytozome v7.0 (chr-ID scaffold0135 7; pos 1370685 to 1371386 reverse strand)
tctctccaaagctcgattctctgcccttcaagcaggtacttccttttcttctccatcttcattttcttcaatcttctctcttttcctaacttgatctgttatattgcttctcttgtatgttttatttaatgatccatccatttccttttttaattttcactcaatcctattttcttctctgcgtacggttgatctgtattagggttttatgggttttcattttttatacttttttttttgtccgtttagggctcagcgacatttgctacgcattattcgatgattttcttagtttgattcctttaactctcacttaactctcactcgaatcgtcatgctagtgtatgtatactgcgttggtgtacatcataagtattgtttagaatccgagtgttgtctgtgtgcatgtttactgattaattttgttttattttattcgttttacttgattctttagttcatttaacatataaaaccctagagaagtgtggatttgagtgatacctaaatgttgctggttaggatatctatttttacttcgtattgggttttatttagcgaagtaatttattgttttttttttttaagatttaggttacatgtttgttcaacctgcaatttaaggttgtgggtgaatctttggtattagttatatacacttggttgagctatccttatagtatgtcgttaattttcttgtag

SEQ ID NO: 67958 - DNA, 846 bp, Cucumis sativus
  Intron number 2 from transcript Cucsa.394930.1 (locus Cucs a.394930) derived from phytozome v7.0 (chr-ID scaffold0410 0; pos 650782 to 651627)
tgcgagatttcggcggagcttcttgtgagttgaaggtaagatatcttctacctcaaacgcgaattgtgattctttttttaaagtgatgaagagtaattgaattgactgaatcgatgaaaagctccgtttcctgttcgagcattcgaatagattttgttttgtttgaagtacatgtggacttaatttcgcggaatcggttaaaatcgacaaaattcctttgtcttttagtttgagtctcacctaacgaatcttcttatacggtgattattattaacaaaaccaacatgttttttatcttctatgcaaaatttctggccgctttcacaaaagcttaatgatcgatgttaattttgtttaatagtattgaataatttggtgaatagacgaatagatagagactaactagaacaggaaaaattctataaggaaaaatattagaaaaggaaaatactaattaggaaaaaccatcaatcataattttctttaacaataggaaatttcaggaattatcttcgaaattttctttcctaacgattatgtttttcattgcatagcaaaaagatcattattgttcacagaaaagatagatgagagtaaaattagtttgaagactatcaaatctttctcactctttccaacagatcatttgacttatttatatatagatatcttatgcatacttcaactaatctcaagaaaaaagttggataataagaaaactccaaggaaagtaactctaggtaggttgccacagagttaatctctatctgcttgacattaatccccatctgtttactctcttgatatgggcataacttttgtttgtgtttttctttaatctacagg

SEQ ID NO: 67959 - DNA, 676 bp, Cucumis sativus
  Intron number 1 from transcript Cucsa.332450.7 (locus Cucs a.332450) derived from phytozome v7.0 (chr-ID scaffold0326 4; pos 189929 to 190604 reverse strand)
gaagaaagggagagagatataatataaagacaaaggttctctctcaaactctatgattattcaaattctctatctttttttttaaaaaaaaaacttgattttaccctctacttatacttgagtaagaggaaaattcagagtttatttgcttaggccttgttgggctacccttccattttttctttctaaaaagaagaacaagagaagaagatcaagaagaaaaaagatcgatagggttttgttttttaatttggtttttttttttttttgttaggaaggggaaggtaaattagagatgaatagaggggttttgcaaagctcagttatgcaacaaatgatgggttcagaaaaccctaattggtggaatatgatgaatattagtggaagtatgagaagctcaacaatcacacaacactcttctcctaatcatactaataattcttcttcttcttctaatattcttttccctcactcttcacttccttttccttctaattgttactatgatgctcaagatcatcacctaattccagaatcttggagccaactcctcttgtaaatccctctctttttgtttattcaaatttaaccctactttacttcacttcaattttcatttgttattcgttttgattttgttttgtgtttttgtataggggtggattggttggtgaag

SEQ ID NO: 67960 - DNA, 688 bp, Cucumis sativus
  Intron number 1 from transcript Cucsa.349200.1 (locus Cucs a.349200) derived from phytozome v7.0 (chr-ID scaffold0348 7; pos 489628 to 490315 reverse strand)
tcctgggcttcatcaatacgctcaacttctgtctagtagtgacgctgattttccttattattcttccagtcttcttttcaaccaacaacaaagccattaccctttttttagttcttcttcttcttctagccaacaacagcaagaagatcaggatcgttacggtgaagatttcggtactggtggatcaaataagtagaacattattgtttttttttattattattattaagtcttacattaattatatgagtttttgttctcataactttatgcatatccattgccttttctataaatctaagccttcttttttttctcaatggtttctactataattatataaactatataattctcaactcaatccctttttaattatttctactatttatgatccatcttgcgacaagattattttcttcaatattctcgttattgttttatatgtatgtatatctatcagtattatgcagactaagggtctgttcaaattgatttttggaatgttgttaaggttattccaaggaaactattgtaaaaattataaaatatgatgctatcaaagtgtattaaagtctatcattaatctaaaatattgtacatttgatcaatatttatttgagttaattttaatgtgtttaaaaatgttaactaagtgcttttaaatatctctagggagtgaatctaa

SEQ ID NO: 67961 - DNA, 625 bp, Cucumis sativus
  Intron number 1 from transcript Cucsa.363930.1 (locus Cucs a.363930) derived from phytozome v7.0 (chr-ID scaffold0361 1; pos 1520071 to 1520695)
actgccttttcaaataggtacaaatctttatgtaactacgagctttctttaattagcatcagttaaaaggaactttttacaactgctttggttttttgcgtgattttgtacattcatttcatttatcaaggaaattagttctcatcataaagaaaaaaaaggttattctgagaaaaacaggaacttacaaggtgcttggaaaaccagtccccctgtagtttcagattcacatagagatgaataaagctactaactaatccatctccctgagaaccatcatgattcatgtgtgcatggtttaggttgtgagtttcaacatggtattattgaggaaattacgcatccattctccaatgtaaaatgtgtattaagagatcatttcaaactcccctgaaccacaaaatctgtacaatgcaaaggccatttgaatcattcctcttcctccccacctctgccgaaggattttgttattttagttcttttggtcttcaaggcttctaaagtttgttccatatgtcacaatatcttgtaaagctgtgaacagttaaaataacattatattgatctctaactaattttttttttgtaaggattgttctaattttgtatcctctctgcttgcctt

SEQ ID NO: 67962 - DNA, 803 bp, Cucumis sativus
  Intron number 2 from transcript Cucsa.198110.1 (locus Cucs a.198110) derived from phytozome v7.0 (chr-ID scaffold0135 7; pos 1254020 to 1254822)
ctggtatcgtggctttgcgagattcaaagttgaaggttatcttcattattatctttctatatgaattgtatattacccttttattgggattcgactttctttcttgttcatattctgtttgaatgagagtcatctttcaaatggaaacacggctttctttgtaggaagccgtgggttgctattgcttgcttttaagatttttttttgctcttttgtgagtatgtgcttatttcatatttgataagttagcttattttttagctatatttttatattgttgcattgtttatgtatgtaactgaatgtggtggagctggtgaattaggaattagctatggaatctatcgaacttgtaaattagattttgttactaggaagaaatcagagaaaaatgtatcttacaaaataaaatgacttcgggattccaaatagttcttccagttgggtcaaataaaagaaagattacaggtacaggtcctgtatatgcatgctctatttgtactcttcagataagaacctctaaattgggtcacctggaaaatttacccatatatggacccttgctcttcaatacatttgactgtgtcgatgtcgatgttgatggtactttgagtgtttgaattgggctttcattgcatagcataattataatcattctgaaaagtaatatacgagttcatgagttccaacaagaataaatcatgctgttctttggaaatgcttgaacagtgattggtttctttggccatatgcttacacatctactattgttggaacagacttttcctgacgaagttcttgac

SEQ ID NO: 67963 - DNA, 847 bp, Cucumis sativus
  Intron number 1 from transcript Cucsa.356990.1 (locus Cucs a.356990) derived from phytozome v7.0 (chr-ID scaffold0357 7; pos 1996920 to 1997766 reverse strand)
cttgccggctttggacactttcagtaagttcattctgtgtttttctttaaaagacagtttcaaaatttgacagaggtaaaaaatgtgcagtaacaattattgcaactattattggctatatggttaattattaaagaaaagaaagattattccatgactgctgctgctctgttctatagtcttctaatcttgtttcttttttgtttggctacaatagcatcaggttccggctacttcaaaatcaaaggtatgattggatatgcattattattttgtatagctagattcttctttccttttaatatgaaattttttgttaatatcatctaaacttatatttttaaaaaaaagttcaaattgtaattggttcctataatatagcttttaaatttaatcaatgagagattttatttaaaattttaaaaatgctccatatttctattaaattggtctaaaaacaagaccttgtcatctctataaactcaattcaactttttataaaattaaaatatgtatattataaattatattaggacaaattccaaaattattttggactctatggtagggataaagtaaaagagttggcctatgtagttttaaattttagaattgagtttcacataacttcacagataactctaggatttgttaaattttttagggactatgtttgtgaaattaaaccaatcaaactataaaaatcaaatactgacttagtgaagaacacaaaagcattaacaaacaagaaatagtgaacatgaaaaacatgacacgtcattgatctagtcctacaaataattttataccattctaaaatttgacagattcagtaggaaaggccata

SEQ ID NO: 67964 - DNA, 233 bp, Cucumis sativus
  Intron number 2 from transcript Cucsa.313600.1 (locus Cucs a.313600) derived from phytozome v7.0 (chr-ID scaffold0299 5; pos 2771337 to 2771569)
gtgttcaacaataatataggtgagttttcttgtacattgttttttttcttttttttgatggatggatttctttaggttttttattgttctattctagttatggaacatcagacaaaagtcttgagataaatttgagttgtgagaagaggatgtaccttttagaaatcaattaatcaattgaatttctgatgaaaccaggaagcaattctcgaaagagaggaagagaaatctct

SEQ ID NO: 67965 - DNA, 198 bp, Cucumis sativus
  Intron number 1 from transcript Cucsa.349040.1 (locus Cucs a.349040) derived from phytozome v7.0 (chr-ID scaffold0348 7; pos 394908 to 395105 reverse strand)
aaattatcaaaggcctcattgttgtaagttctgagttcttttttcttttcataatggaaaattattgttttattcgtaattactttgatcaacacattgatggttttgaaattttagagagagaaaaaacaatgaacacattcttttttccttgaatttgcagacaattctatcagcagcaacagaaacatcatcagt

SEQ ID NO: 67966 - DNA, 897 bp, Cucumis sativus
  Intron number 1 from transcript Cucsa.309490.1 (locus Cucs a.309490) derived from phytozome v7.0 (chr-ID scaffold0298 0; pos 208116 to 209012)
cagttttgctcaaggtacacatatatgtgtgtgtttttggagaaatataaaattttagtttaatattaaattgtgaattttttccctataaaactttcgtttctatgttatcaaatcatacaaactattttatcaaattagttataagaattctccaaattatatggaccaatttttttattgtttatgttcgaactcattattttgttatttaattgaatattgacttttacaaacttcattaatctcatcaagtagaaaaaaggaaattttgttggatggggagggactatatatatatatttgacataaaagtatatctcaaaagatgaaaggaaaatttttgttgtttgatacgtggtgtttgttatacatataattgtatctctttgtttccatagtaccttcaaaacaatattagaagaaaaaacaggtactttttctaaaatatgcttttatttttaaaagtaagattatcaaattaaatgtataatttcagttattttttcttgcatttttttttaatttgaaaacataaaaaaaaaaaggattcataaacgaattggctcttaatattttccacatctaaaattaacgtttagaagcttgaatcatttctgactttctgaaatatttcaaaattactattcgtttaaaaaataaattttaatactatgaaaattgaatttaaataatgtgtaaaattaagtgattataagtatattttagagtcatttcaaatatgaaaaaatgattttaggttaagtgggggtttagaatgggttacctccagaacaaatatgtatatataattaagaaatcaaatgatatgtttttaaaattgatttttatttttggattttgactataaccagtggattctacacaattggaacg

SEQ ID NO: 67967 - DNA, 931 bp, Cucumis sativus
  Intron number 2 from transcript Cucsa.285590.1 (locus Cucs a.285590) derived from phytozome v7.0 (chr-ID scaffold0265 3; pos 1911251 to 1912181)
tcttcactttctttccgaaagggctgtttgaacaggtaactaattttaagcgtcccaagtctatgtattgtttgttcattttgttacttcggtgggccttttcttttgattaggagggtgggagtaattgaactttgagaacgtttatgcaagagacgttatggctgtttcattgatgatttatataatgaccaagtaatttactgttcaaaactggaggggcagtttctatcctactattggtccaagaacaaggaacattggaaacgacaagtttatttttttgatgttattaggaacttccagttttttaagtgaatggctagaacatgttctttacttgatttatcgtgtaattatctttaggaattattagagtatttttggaagacgatagccaatggtatttttgtctgatcaaatgatgtgggtactaccccagcttcatcttactaaatctattctaaacgttgtatcttccgttattgtaattttcacttttattttgtataaaagaatttatttactaaaaagaaaagatagactactagtaggtctatcttggtctatcatggtccatcgtaaatagactatgctattttctaaatattttggttcattttgctatgtttgaaaatagtccaaaaaaatgaaaaagtaaactgcaatacactcaagaaaaggaagtgaagataagtatcctctaaattgaggccaaaggaactaccaaaaaaaaagaagctctccgattgccattattgaaaaatattattttatttatttatttattttcatttttattggtgctgctttgtgtaacttcttttaaccctgctaccatcataacttttttgaaacatcactgattagagttctgtaccttttttaactgacagttcaggcgtgtggctaacctatactttcttaccat

SEQ ID NO: 67968 - DNA, 564 bp, Cucumis sativus
  Intron number 2 from transcript Cucsa.250190.1 (locus Cucs a.250190) derived from phytozome v7.0 (chr-ID scaffold0221 9; pos 313604 to 314167 reverse strand)
tgggtttgaagagaagtcggaatccagcagtggtaattatacactctatattatgttgcaattaccatttggaatatgaatgaacattttgtgtacaatatgtaatctgaaggaaagctcaaacgatttagaaaaggcatttttctgctcagacagtttattatggattgattaatgtgactaaagtttagtgttttgaataaatatcaaagatggtttctttccaaattctttttcatgtgaagttatgtacaatgtgctctttcctatttatctgctactgctagttgagcgccactatttttgcttggaataaagcacaaaatgaagaaattaaaaaaattggtggataaatctaatagccataaagttaaggtaattttattttgtaggtgtgtctttaaccttgttcttgcatttccatcattaatccgtgatccttgaagctcaggaattggttgatgtttttacaagtgctgccagttctttagccaattgtattcatgttatctttatgttgtccttgtagctactggattctggcaatcagctactgaaggtaaa

SEQ ID NO: 67969 - DNA, 921 bp, Cucumis sativus
  Intron number 2 from transcript Cucsa.394200.1 (locus Cucs a.394200) derived from phytozome v7.0 (chr-ID scaffold0410 0; pos 245981 to 246901)
gaccgacaaacctccacaaataaaggtgcacaatgacaatcataatatcaagatagaagggcatgctttccattttagatatgatgttcgatgaacaagaaaattgattctcctatcataacttcttggaattaatgaaatgcacaactaatcaagtgttgtgtgtggtgaatgcggaaggggatgcgttttactcttttaagctcttcatctgctttaattaggatttcattaaattgattatgatatatcctcaattacagaactcaagttttgaagtgccacgttttcttcctgtaactctataactttaactttaagtctcgttcttccggtcacactttcatctttatttttacatttgattcattaaggatgaagtctgttgaacttaattcctgctttactattttaatctattgatggctttttagctaaagtcaaagatgaaaaaagatgcactcatttttaaattatagattttaaatattgccatcgacaagtaaagttacagtagttcgttggatgcgacgtgcctatttccaacacgaatgtgattgatgtaaagaagtaaaagttcaaggacatggttaaaatttttataaaaatataaattctagaaaatacgattgatggaagatatgaaacaaagttcttcgcctatttcagcagtaaatatgcacttggtttctgtatttaggcttttcgaaaattaagttaaatgtatgcatttcgcagtagttgctcataaatacttctgaacacttaagcttgaagattcattgttagtgatggttagtaagaaatatatcaggtccccgtataagatatttttcaccagagaaatatactgaggctgattgagtttaaacgggactcattgtaggtcagtgtaccaaaagatacccttagcagactcaa

SEQ ID NO: 67970 - DNA, 437 bp, Cucumis sativus
  Intron number 2 from transcript Cucsa.212530.1 (locus Cucs a.212530) derived from phytozome v7.0 (chr-ID scaffold0154 3; pos 312071 to 312507)
tacatttttctcgacttaaacacgtatggaattcttgaaatcaacagaagtttattatttccgctggtaatatggtttgaccgactttaagtttgttattatgtctttcaccctccggaatttcttcttgttttttttcctttcatctttgatcacttctatgtatttgttctcctatagtcaagaatttccttgttatgctccttggaacagagttgccaactttgattttcagattacaggaagtgttgatgctgctatggaggtcttaatagatgggatccgaaatgtacctctctgcaaattacttcttgaggtatttttacttgcggaattttatagattactatgagaattgggtccagttgcagctttacagttttatgtagcatcatatttcgctcatggcccttctgcaggaacttataaacttcgtc

SEQ ID NO: 67971 - DNA, 820 bp, Cucumis sativus
  Intron number 2 from transcript Cucsa.218430.1 (locus Cucs a.218430) derived from phytozome v7.0 (chr-ID scaffold0165 8; pos 544442 to 545261 reverse strand)
ccttgggaagaagctttggctggctattgaggaatgtatgtgcgtaatctttctttgcatacatattactatgctttggctgtttggcagttgtgctttctattgttttgatttttcaattctggaaggtagagagaggcttttttttcttatttttattttggcttgattcttttttctttttaaaaaatacagtgtcaatttttttattgataaggggatttatgggttttcatatttcgttagttcttgtttctgccactagtctactttactaaagttttttattagccaagcaggtaattgttattttagattgatcactttatcatatcttatctttctttgattatgcatcatgtccctaacaaaaactcttgtgagttcttcacaaagatggtatattattacagaattaggttgtgcttttttattttttattttaggatttctttctgtgttattacaaaatgatagaagtgaactgaaaggtcatgaagttctagaaattgaataaaaggtttgaacatgcctatgttttttgttgatgttgtgctaatgtcagcattgttatcgttatgggttcaacctccataaggccttcaatggatataagaaacttccaatacaaatggacacttaagagaataaccacttaggatttaggaagcatgtcatttcccttgaatataactctttttagtttttgccatcgtacatgacttgctccagtttggagtaattgacaaaataaggtggaaatcttttttgaatatgatattgaatttttgcagttcagcaattaattgccttttaggcg

SEQ ID NO: 67972 - DNA, 832 bp, Cucumis sativus
  Intron number 3 from transcript Cucsa.362410.1 (locus Cucs a.362410) derived from phytozome v7.0 (chr-ID scaffold0361 1; pos 281644 to 282475 reverse strand)
ccaccattcctccattgctactgagcctatcacctgtaaattatatctctctcttcttttaatttccaagtctcgatctaccaatttttcatgacgtaacgttcctattgaactttaaattcaccatgtcttaatcaacttaattagatacttaacaaataagcgtataacgtgtccattttctttaaatgttgttttagcaattccatcaatgaggccctacttgttaattcttctatttaatttttgcttcaaaactatttggtttcttggttttgcttagaataatggttgagaaattaaagattatatatttcttttgattgttatatagggtatttgataagtcaaatgtgttaatataagataaaggtgtaatttgacctgaaaaaatgcttttctataaagtgaagaagagacgtgaaaaaaagcaacaagtggatgtgtgagtttagaccctacactttcaatgaacaaattaattgttcatctccctcttcctcaaatctagtggatcacatgcatgttactaaggaacgaaggatgagaatggccatataaagataaaggtttttaattaactaccacccaagtttatgtaatagatgattaaattgcacctaaggaccacaattttaatatctgacgttgatatatgaaatgggacaccgtcgtctctcacatgttagaggaactttagacctgatctgatcttaatcgatatatttgtctaaatcagttgataagatgtattttaattgattttgattagaatgtatgtgtattttgtttttcagctgtgatacatccatttgcagaacacatagtgtat

SEQ ID NO: 67973 - DNA, 870 bp, Cucumis sativus
  Intron number 2 from transcript Cucsa.200140.1 (locus Cucs a.200140) derived from phytozome v7.0 (chr-ID scaffold0136 5; pos 594364 to 595233)
agaggtacaaatagaatgaaatacacataattttgattctgcatatattcgtatacctttttacatttgagatacttaaatcaaacaaataattatacattaaatgttattttctagagctacttaaatactattttggcttttaatatggactgattttagtctatttagtttcattaaaaatagttttcatccaaatttataataataatatttacaaatatagcaaaaatatcacaatttatctatcataaaccataaagattattatatgtgtatatcatgatacatatagacataaatactagtctatcttgatctatcacgatccgtagataaatgatgatattttgttatattatgtaaatatttttgtttattttggtatatgtgaatataactctaataagaagggtctttaacaaatcaatcatggaataaaattataaattaaatcatgggacaaaattataaattaaacgaaagcatataaattaagattgaacaattaagatcttgtttaacaaccatttcgttttttgtttttaaaaattaaacttattttcatctcatttcttataataatttgtatctttcttaactataatagttgaatggggagacttgtttctaaaagctattttttaaaaagtaaaagttcaaaatttgtttggttttttaaattattggtaaatatggataataataaaaaaagaattttgaagatgaaaatagtcgagttaacttaatttttaaaatataaaatatgaaaatcaaatggttactacatgtataaaaacaaaagttaaataacctttcaaactacaaaaactaaaacgatactttaacttgcttttcttgttttcagat

SEQ ID NO: 67974 - DNA, 567 bp, Cucumis sativus
  Intron number 1 from transcript Cucsa.363230.5 (locus Cucs a.363230) derived from phytozome v7.0 (chr-ID scaffold0361 1; pos 828209 to 828775 reverse strand)
tatcttcgccggagtccgatcacggtgactagaaggcaatagtcttatctatcccgtttctcactctccaatattttattcttttggatttttaccgttcctgattgattactgaatgttttctcggatcattgaagctagttcggaagccctaaaattatgatcgggtagattttattattgaaaaattgttgtaatcattatgaagaggtatatgttcactgtttcttcaggtcaatattgtgaatgttctctcaatttcgatttataattctctgtctttccagatatatggaaattcgtggatggttgatgttgttcttctttgctttattgttagtcttctctgttggaagtggtgaggctgcagtttatgctcttttttttaacatttcacatatgcaatttgagataattgagaaagtggttgtgaaatttgttctagttttgacttttcgggaatagcttcgtaaaattataatacattgtaattttacttttaatggagcttcgttttaattagtctactcactggattttttcttatcaaacgtagagccgaagttg

SEQ ID NO: 67975 - DNA, 481 bp, Cucumis sativus
  Intron number 1 from transcript Cucsa.239850.1 (locus Cucs a.239850) derived from phytozome v7.0 (chr-ID scaffold0204 6; pos 729602 to 730082 reverse strand)
agcaattatttccaaagcttcaccttgaggagaaggtgagtttggagaaaaatgtaatgatagaccccgatcatacgacagtatagcagaagagggaagaaggagccagcacgtgatagttaaatgagtctgttttcttagcatcagtataaatagtcttgtatttttggagggagagttagttagctttttgagaattagcttgtactctgtttcttccttgagtgataggataacagaaggtgagtgccctaagcatcgaattgagatcctctcaattcgattctttactttcattgacattgtattgtttttcctaccaaagatatcaataaacttctataatcgaatcttcaattccggatcccattagaagtctgggattttgaaacaaagaaaaataaaattttaaaaataatagtttttgaatttctgtttcttttcagattggaagcctccagggtataagaaatctgaaatt

SEQ ID NO: 67976 - DNA, 348 bp, Cucumis sativus
  Intron number 1 from transcript Cucsa.313030.1 (locus Cucs a.313030) derived from phytozome v7.0 (chr-ID scaffold0299 5; pos 2304128 to 2304475)
aggatttctttactgctcccatttctcctcttcaggtatgtacattattgtaccacacttctcttactaagtacttctttctttttaatttagattttccatagtaaagattaaactgacaggaattaaaatttatagttcatgtacctaagttgttacaaatggataaaagctttcagataaaatatataatattcgtctaaacgatcaaaagttgaaaaatcttcctttgatcccactagtaaaacaaacaaaccctaatttcggaaagcaaaagtgtgtgtgtttttttgttgtgttgaaaatggaattggttttttttttttttttttgtttgagacagtcagg

SEQ ID NO: 67977 - DNA, 995 bp, Cucumis sativus
  Intron number 1 from transcript Cucsa.236400.1 (locus Cucs a.236400) derived from phytozome v7.0 (chr-ID scaffold0201 8; pos 45087 to 46081)
acatcttctcctgatctggggttttcatctatcaggtattgattctatctcttatttcttttggctgtgatttctatcttttcttccatttttatgggttacccatttggattttgatcatttaatttgatgggatcttttagtttgttcttttatacttatgaatttgtgtgcttgctgttagttccaccattcgatctttaagcttacctggttataagcttttttagcgttttgggggtttgttccagaaatttcatcctcttgcagtttgtttaaattcaatgagtgtgcatcatttctagtttaggcagtccttttgttccgctccagcaaatctgttttactggaacatttgatcttatatgtgttgttgaatttttctcctttttttctctagttttctgttcaagtctttatgtttgagttcggagtgttcaaaaaggaattagtatagatcttcggaatgatcatgaaagttgaagattacttgaacacagtgacagctactgctttagaaaacatatatgaaaataatgaatgggatgtgttatttgtcaaaagggtctatatgatcatgatgtgactctgtagatgttaggatgacgttttttgacattgcagtttaatgtctctaattagagttttctacgcaaagttgtgtaattaaatatttttatgatagatctggacgggggagatttaatttttgatcctataagaaaaataaaaactatggaaccactttagctaaatgattcttgtgcttttttgtgggaagttccgaatgaatgcatattagaattttacaaaatggaaagaggagtggactagattatgggtgttgttattattgccctttcttggtgccttgagaccaaattcttttgtgagattaattgtcgttatggacactgatttcttgtgcactaatgttttgatcaccattctttatattttcacttactaacttcttcatatttaatcaagaaagg

SEQ ID NO: 67978 - DNA, 465 bp, Cucumis sativus
  Intron number 1 from transcript Cucsa.198190.1 (locus Cucs a.198190) derived from phytozome v7.0 (chr-ID scaffold0135 7; pos 1302406 to 1302870)
actggccattcaagtaagctccctgcattttgtttaatgtattttgttatctacctttgtagtgtacactaaagtcataatgcttgtattttttacttctcactaatcttttggctgattcaagcatttttcctgtgagtaatctttaaaggctatgaaaatgcgctgaatgtgtgcttgaacctctttgctgaaatgtgtcaatagatcttctagttatatgttctttggtttaaaagagatagcttcctttttcagtttgaaatttgtggttgtttttggatggataaggggtttaaacattctgggagttttctttacttttgaagtttgttatagatggctagatcttgttgtgtttggtttattttctttcgtttcttacacagtctttggtttcttttgactgtctcttgaaatggtggtttctggaacttgtaggtgcaacgtggtgtgtttgtaggg

SEQ ID NO: 67979 - DNA, 210 bp, Cucumis sativus
  Intron number 2 from transcript Cucsa.390900.1 (locus Cucs a.390900) derived from phytozome v7.0 (chr-ID scaffold0403 1; pos 100933 to 101142 reverse strand)
gtacgtgcctgttgtttattgggagttctggggtgcaatttcaaattgattttcattagtcgtggttgaaattattttgagttgtttgtgtcaaatgaggttgcatgattatgtatgtttcttcaccatctctttataccagcttcagttgtttcttggtgcgaagcataactttccgccattgtttttcttttgcagaaagttcagggc

SEQ ID NO: 67980 - DNA, 784 bp, Cucumis sativus
  Intron number 3 from transcript Cucsa.257770.1 (locus Cucs a.257770) derived from phytozome v7.0 (chr-ID scaffold0222 9; pos 4979865 to 4980648 reverse strand)
gaaaaggtacattaatttggggagttttctcccttccttcttttgctgcctcgtggaaaagggagttctaaagtctccctcttatacactcaatgcctgccttgttcactaatccagccgtattcacttaaacatggcctatgcaagttaaatgatatcggtttaactactgtgagctggtcctccatcatcggtcaaaagagcaaatctaggatgtgtttaaagtcatgagcgagctttgataagcagctatatagtaggacaatatgctcggatgtttttgagactgctattgttatgttgagtaattagctttggcaattagttgaattgcttttggtagttagagaagattcatgtgcttattttgcaggtagcttctaatgtatgatctgaattataaatttcctaccatggctagtgaattctttaggcttcatttgataaccatttggtttttagttttcgaaagttaaagtttacaaaaacacctcccctctaaattttgtatttttttatctactttttaccaatgtgtttcaaaaaccaacctaggttttgaaaacatagaaaaaataggttttataaacttgtttttgtttttttaattgggctaaaccattgtaagaaattgggaggaaatagattaaaattaaaaagcaaaaaaacaaaaacccaaatagttcttagatgggatggtaatgtatcgaattttatataaacttttgcgcatctatatcttaatgcagacacaaactggaccaggagatcgtcctcttgcaga

SEQ ID NO: 67981 - DNA, 846 bp, Cucumis sativus
  Intron number 1 from transcript Cucsa.257770.1 (locus Cucs a.257770) derived from phytozome v7.0 (chr-ID scaffold0222 9; pos 4981267 to 4982112 reverse strand)
aagtcccgaaatctgctgaggcaagttcttcgctcattttttctgctattaattttacttcatgttgccaaaactgttctagtttatgcaagaagtgattgcccactataagttgtaatttgatttcctcatctcttcatgtggatgataggacttttctttcagtgcatactcaaggagctaggttgttttcgtttttttgtgaaaacgtcgttgtcagtgctttttattagcttttgcaatcacttcatttctgaaaggactatctgccattgcatttaattggaagttctactaaacctcgagcgcgcagcttttgctgattgttagaacttagaggtctatggtttttttgttcttttgttttcacaatgtggtgggtaatattcgagaaatactaattttgagggttacgtctttgaaataatatatgggttacgtctcccactcacaattagttttgagatggaatttatggttatctaagtaggacttttctgcgtttctgggcaaatgatttctgcgttttctcttcgttgttgcaaatgaatggcagcttgcgtagttcacctaaccggagtagtattgatatgccgtatattggtgattacattttcttttgaaatgaaaataacccacttcattgaatatattggtgattacattgagatgttattactgaattctcattggccttagattatgtactagtgtttctttttatgtattttggattggcttggcaattgaagtagtgaagtctttggttttcaaatgttcgtgtactgatgactccaatattttattaattacagaactttttggcattgtgtgcaagtggttact

SEQ ID NO: 67982 - DNA, 738 bp, Cucumis sativus
  Intron number 3 from transcript Cucsa.360980.1 (locus Cucs a.360980) derived from phytozome v7.0 (chr-ID scaffold0358 8; pos 1451492 to 1452229)
ctgtgatcttcacttttggttcctatcgtctaggggtaagcatagttgatgctgttgtatttcttccccatgatgtatacaaacagtccggtgcttttttatgaccttacatgagctagatataccctataggttattcaattttttaaggaatactcccgggcttgtttccatttcacttggggatgtattgtgttttataggttgcacaaccgtatccttgagttcaaggaataagctggtgcttttgagttttgactatttggtcactagtgtatgccttaaccagatgagcaacgtttaggttggcatgaattgtgtcccacgtggtgttttagataatttatagttgttgctgtcgccacattccttttcttttgcgggtgtaggggtccttgagttttatggaatgaaacaaaatacagatccttcacctccccatccattcatagagttctctgggaaaggtttggagctcttatcaagctaaagtaaagtatgagtaaaagtgatattgatacaaataatctcattcttcccagaaaccaccctttgctactgttttcagaatgttatagaatctgactttcccacaacaagtatggtttcggggtcaagtttctttctttctttctgtttttttttgcaagaacaaagttttggtcacaggagtatatttttttgtatttgtttcgtacttgtcaatcaaccgttgcatgccatttgaaatgtaggtgc

SEQ ID NO: 67983 - DNA, 252 bp, Cucumis sativus
  Intron number 3 from transcript Cucsa.254930.1 (locus Cucs a.254930) derived from phytozome v7.0 (chr-ID scaffold0222 9; pos 3108520 to 3108771 reverse strand)
aagaagttgaaagaccttgtggtggcagccactaggtgattcccttattcatcttcgtcaattttcttgagaagtcaattttggttcctgagttttgaactttagacacaacggcatcttaactataggattaagatcctttagataactttgagaaatgaagattcttaataattttctctcttttttttgggtttctggttgttattttttataggaagcaaagatttgatagggtgagcaaggatttga

SEQ ID NO: 67984 - DNA, 791 bp, Cucumis sativus
  Intron number 1 from transcript Cucsa.283200.5 (locus Cucs a.283200) derived from phytozome v7.0 (chr-ID scaffold0265 3; pos 412399 to 413189 reverse strand)
gattctgtatctgcgctgtgcttctgactacgtacgtatgtctttttctgctttccttcactcttcttctttatcttttgaagcttttaggggaattgatttgtgggtttgttgtttttagttctttctattcgtgtttcctttctttatttaagtagttgtgagtgaaagtatgattatgttagtttctggtggtttgagttttattttctgcagttgctcaaaatggaatactcttactatatttgtcgtggacgccgtcctaatggtgaatagccagttagaaaggtttaaagcggttctttaaatcatatgggtttatgatgataacttttttcatccgtgtttaatcattgttttaaattactatattttcatcatcacacgagcttactttttcaatagtgttcgcttttctctctcttttatccccctaaagttgggtctactttagtaatgcgcttatacttatagctaaagtgaaggcaaaagttttatcgatttataaaattacagatggatgctaaagtgggttctaggctagagtattttggattttttttgcattggaacgatgagagagaaagacaaagggggtgccctgttgacaccatacattttcatatttatactattctacatcatgatttttgtgtcactgggttgtggaggttttaagttcttgattatagcttgattcaaatggcatattggtgttagttgagtgatgtaaatttaaattgctttctgttgcatggtgatgaagaaactgctagttgatctccatcaga

SEQ ID NO: 67985 - DNA, 559 bp, Cucumis sativus
  Intron number 1 from transcript Cucsa.254850.1 (locus Cucs a.254850) derived from phytozome v7.0 (chr-ID scaffold0222 9; pos 3049903 to 3050461)
aggtattgattccttctctcttcccattcaattgtgtttcagaaacccattaaggactgataatcgattaatccttccttaatttaaataccctccaaagccaatagcctttctctctttttttttaaatttttttattgggtaagctcgtcgggtggcctacattgctggttattgaaatggtggactttgaataattttttcctgatatctgaaataatttttcttaaaataaatctccaaattttcgttttacctgccagtacatggtgattttgattgattttatatgcttacacattctatttaaatcggattgaaggacggaagttcttctgaaaacttactttacaatgatacagtaacattattgagagtttcactgtcttcattgaaggaggacagggatttggaattgttattttcattttattattgataaactcggaaatattgtctgtttgagtttcatttgcttatgatctggccccatttctctactgtttatctattttctcattgttttaagcaagatataattgctatgtaggtccgtgag

SEQ ID NO: 67986 - DNA, 930 bp, Cucumis sativus
  Intron number 2 from transcript Cucsa.307140.1 (locus Cucs a.307140) derived from phytozome v7.0 (chr-ID scaffold0297 7; pos 412025 to 412954)
cagacaccgaaagcaaagtaagattaacgtttagtttttgaattgcttagctgtttgcctcctctggccgcttaatccgacgggttttcttttgttgcttatcttatggctttccgcttcttattcttgatttctgattgtttttaactgttatctgaactgtttatgtttttcttaaagaactaatatagtccaaagatgcaatcatgcgcgatttaaattttctaggaggtgtgacatatgatattttagcatcttggccctctacatgtaagctatgccaaattgtcaatgtactgtctggtgtatttgttgggttgaacgacaattctcagttatgaattttcaagttggtgattgaataaagggggagggggaaagaagaagataaagataactcattgcacgtaggggtacattaattttgtatcttggaagtgcgtgaagtatatgattgagattgggaatttatgtattatttcagaactggatgcaaatggaatgtagttgacaaagtagttttatggatgatagtgaggagagaaagattggtgaacatttggcatgtgaatgatcttgcttatctatttaataatgaagcatggtagcatttacatcaaacggagaatgcaatccaacttaattgtgatgattgattgagattgccatgttcttaattacaagtcaagctatgctaaacacagtatatgcagatggtaaagtatactgtttgtctatctaccgtgtcttatcctccatcggtatgtgtgtttttacgttatcctttctcaggatgaaagatttcttttagttcattggcacctagtgttgtagctaagtagataaagctatatattatggccagatcttaaaagttgtttgaattgaattgcagaactggctcctcagaagtacctcaaagaaaatccc

SEQ ID NO: 67987 - DNA, 307 bp, Cucumis sativus
  Intron number 1 from transcript Cucsa.303810.1 (locus Cucs a.303810) derived from phytozome v7.0 (chr-ID scaffold0295 1; pos 1625103 to 1625409)
tcacaattaaaaggtaaattcgattttcttctttccaatttctccgattaataatatcatttcggattttactaccgttgtgaaattaaatttaccaagtgttagactatttaattacttgccaaaacatgagtagttacgtttagttttagcatgctaacaacagattgtgatagacgtaactgttgatttttaaccgataggatctgatgcattgtcgttggtatctttcccttcaattttttaaattttgatttctgtttctcatttgtttcataatgtaattatttggattggacttgcagaa

SEQ ID NO: 67988 - DNA, 785 bp, Cucumis sativus
  Intron number 1 from transcript Cucsa.296080.1 (locus Cucs a.296080) derived from phytozome v7.0 (chr-ID scaffold0285 6; pos 70194 to 70978)
tttgttattagtatttccttcaccaacaaagataggtgtagtattgcttgtgacggagtgaataaagaagaaaaaggtaatctttagtgcttttaacacattgagaagctacgttatatataacatagggtccgttgggttgattctaagacttggtaacctttattttttcttttaacttaagtaaaaaatatacaaaaaatctaaagatagtttttaatttaattttttaaaaagcaaacatcatcgatgcatctcaccaacaattttcaattataacgttgaaacgtctcgtactgggtgtgatgtcgcatgcacacatgtattgcccattttttatttcggtttgagtgggtctactccttatctcaacctgaactatacactttagcaaaaacgatcgaactggtaaaatgattattttctttcctttttctttttcttttttctttttttttttttttttgccatttttgcttaattggtaagtaaatgggcattttgctgtatacatgaaaagaactttaggagttattatttgcaaaatttcacaggtttataaaaagttaagggtagtaaaagacctaaaggctaaaacattctctctcttttcccgataaaatcaatccaaaagtttggaaagtaataaacgtaacttttatttttatttacttattttgcttattactaaaaaattctagctagaattcgaatgtatatataattctttattacatgaaaacttgtagctccgaggccacaatccagcctcaccatcgtgaagc

SEQ ID NO: 67989 - DNA, 545 bp, Cucumis sativus
  Intron number 1 from transcript Cucsa.253640.1 (locus Cucs a.253640) derived from phytozome v7.0 (chr-ID scaffold0222 9; pos 2200816 to 2201360 reverse strand)
tacttgctgctaacaaggctatcacacaggtaactttaacaagttatatacttaccattcctcttgaacagtggatttcatttgcatcatgagttttgctatagttaaaaattgtatttggcctactgaatttcatgtatgattggtttcataacgtgatgtatcctatatcattaaagtaatttgctttctgaatttttcagtttttttgttcagggcaaggtgaatgaaaatcttttaatggccaacttacagaagtgtgttatgtagtctttcttgtttaggttaagagaaatgtttttctgtaactattatatgagcttccattgagcaattgaaatgcatcggttcttgacattttctgtttgattgtccatagttaactctattcatactagtttcgttatctactgaattaatgcatcttgtagcgtgtaaattcttacctgtaaaccattttctgttcccttagataattttttgttgatattttttttcttgtcttttttgcatttttcttttttgggtggggcgtggtgagcagt

SEQ ID NO: 67990 - DNA, 780 bp, Cucumis sativus
  Intron number 2 from transcript Cucsa.255300.1 (locus Cucs a.255300) derived from phytozome v7.0 (chr-ID scaffold0222 9; pos 3336772 to 3337551 reverse strand)
ttgagaagcctggccttcttttactagggaaacaggtttgcttttatccatccttcgatttgtgaactaatttttagtgatggcagattgaattgaattttgagtactggggattagttgttctcttgtagttgattggggtttttatgataattttggggatcttgaactatgcccactatattaattgaacctttacttctcgtattggggtttttatttctgttgtacattttctggtggtgattgatacgagactgagttttgtatcatgttctagaatagtttgttttgattaagatggtacattacaaaaaaatgtgacattggttgacaaacccaggaactgttggcattttttcgagcctatgtggttttcatcttttggcgaagtttcttcagcttaacataaaaacgaataccaaattcagttgtgatgtgaacatagtaccattagttagaaataggaaataatttttgcatggaatcttttggatagaattcaatagtaaactatccagagtttgttgcaaaatagacgatatcatagtcttgtagaaatataggggggttcgttatcctaaaatttgtttgcttggaccatttacatgatgggttatgacacgatgttggggaatatgacgttggaatttgggattgtggggtttggtaatttgttcttcgtgtatattgttatccgttttcatctttctttaactgcaatatctaacgtgaaaggagacttattgtccaatctgactctggacttgcaggctattg

SEQ ID NO: 67991 - DNA, 644 bp, Cucumis sativus
  Intron number 2 from transcript Cucsa.313530.2 (locus Cucs a.313530) derived from phytozome v7.0 (chr-ID scaffold0299 5; pos 2686112 to 2686755 reverse strand)
cattgttggtcgtgattttcttcccaggggatcaggttagtcagggatgtagtggtggttctagttctgttgtttttctttttctagaaagtggtaaaatgattaacggttgagtttcgtgatggtttttgctttatttcggatggatttctgttaaatatgttgtgtgtctacgtcgaagtgtggagttacggaagaaacattagcttgatatttactgttaatttgagtctgtaatggagaagggaaagcaacaaaactatagaggaccttgagtaaatgatttaattgatttagtcacgaggcatgtgttcagtgttaaagttggtccaagaacttctactatcagcgacttgaagaatctatattctggagggaatgctagaagtttgtccgggatgttacattcaattaagttagaacttactattttcgagaggatagcaatacctcgctgaacttctgaacgggcaaaatcccttataatcaatcgtattcttcgaatttctactgcctagcagtttattgaccaaagattaagaatatccgtcgacggtcctactcttccttaataatttaaacacaccaactgataattttattttccaggaattgttacgcggaggcctctagtcttgcagctc

SEQ ID NO: 67992 - DNA, 726 bp, Cucumis sativus
  Intron number 1 from transcript Cucsa.362060.1 (locus Cucs a.362060) derived from phytozome v7.0 (chr-ID scaffold0361 1; pos 59782 to 60507 reverse strand)
aacaggtatacggttgaaattaaattgatctagacttgatacatgaattttaattttgcatatgcatgatgtactttcctactcattttaattttgcatatgcatgatgtactttcctactcctactggtataaatatgggtaaggtttctcatttgcatggaagaaagaaagtaagaaaaataaattgatactaattaaatattattgaagttcttatttatttattttaaaaaagaacttcaataggtggacacccgataatcactcccgcttcattaaaaggtaaaaaaagtaatacaagaagccaagagagtacagggctagagataagctcaaatagttatacaaaagcattgatgtttgaagtaatagaactagtactataattggagaagagctttgatcccctagtccaaaaacccgtaagagtttgtatatcgtctcagatttcaagagcagtacgttcgcagtctttgaaaatcctcctattcctttcaaacgagatagtccataaagtaacagcaaaggagttgaaagtaatggcccttttttctgtttttagtattgatgttacataagtctttgccgagagaagcaacattagagaacttatggccccattttaatctgttaacagttgttttgtgtggaaaagtgaaacgatcttcttctcatgtctcttgatttctattgtggtttactacgtttccaacaggtactaata

SEQ ID NO: 67993 - DNA, 347 bp, Cucumis sativus
  Intron number 1 from transcript Cucsa.197620.4 (locus Cucs a.197620) derived from phytozome v7.0 (chr-ID scaffold0135 7; pos 958134 to 958480 reverse strand)
tacaaggttattgaaatcataatctattaccataaaacgtctttcattttgggtcaagttttagtttgatgatatgaaatcatattaatggctaattatgctcattaagttagctcaaatcaacagatttaaggtaataaaattggcattaaactgtttgatattctcttcttttaatctctctttattctattgttcttttgcatcttttctttttcttttcttctttttgcctctggaaagttcgtaacactaaacaatttgtattaaacagagtatttaccaaatctcccattggtttgttcgctaatttccttttttatcactttcacctcagcacttgtttc

SEQ ID NO: 67994 - DNA, 320 bp, Cucumis sativus
  Intron number 3 from transcript Cucsa.316080.1 (locus Cucs a.316080) derived from phytozome v7.0 (chr-ID scaffold0304 1; pos 33626 to 33945)
agaaagcaacgttttccaggtcttaaaggtactcattttttgtccgaagtaagctatgtttatccataatcaatgtcattcttcattctgcctattgtgtttgattttctttttcttgcctgatgaagattgaactatgtatgttgtaaattgagttctaataattgtgtgtgttttagattgacaccacttgtttacttatgattgagttctaaattctaataattcttagtccgaagttagtttgtccttcgagatgattgaagctcatttcttcatatgacattacaggtgaaaccaacaaagagtcccttgaagcc

SEQ ID NO: 67995 - DNA, 829 bp, Cucumis sativus
  Intron number 2 from transcript Cucsa.320650.1 (locus Cucs a.320650) derived from phytozome v7.0 (chr-ID scaffold0308 0; pos 412221 to 413049 reverse strand)
tagcagagattcctggtatgagaacaagaaaaactcttcaattaaatccaattgtttactgtttaaatgaatatgaaggttgaggaggagatagaattggcatcttattctcttttcccactagcaattagagttctgtacaatttagataagattaactactcttatccattagtttcaattcttgcaggttttgtataggttgattgtgcaagagtaaattatgagaagaataaggaaacacaaactttaatgaatgaatttacattgtttccttgagagaattttgtccttctatggtgctgttcaaggtgtcatgaacttgtcttccagtctaagacaggattactaacttgtgaatagaatacttcaacaacatgactcaacgaacactttagtatctattaattatatagaaatgagaaacaattttttgtgtgtttttttccttgtagaccttataaagaaaccacatatttatagacttggatagagttttgtcttttgagaagaggcatatcctcaaacaacataccttctcacgaaaagttatgacttccaaatttaaaaacaaataaatttttattcatattttccaacaggttgattgtgttcttgctcgttttctgtcatcttttttcataacatacaagcttttgtgttttggttttagtgttttttttttattcatgtactctttttatgctgtcttgtgtctgccagtctataggaaagtttccgacaggagttttctctctctctctctcttgggataagggactgactagtacattgtcttttaataagaagatgattttttcagggattg

SEQ ID NO: 67996 - DNA, 513 bp, Cucumis sativus
  Intron number 1 from transcript Cucsa.320650.1 (locus Cucs a.320650) derived from phytozome v7.0 (chr-ID scaffold0308 0; pos 413631 to 414143 reverse strand)
ggttcttgtgagatttaagattgatttgaaatttagtttacaaacgtttgttgtaaatagtattattttagattttcttgaatgtttaaaaatcaggtcggacttgaagatgttttttttaaaaaaaaaattgcttacgttttgttttatattaatcaaagtctttatttgttaaaaattaacgatctcgacttacttagaaaagttggttcgttacaacttcaaattgtctttaaatatttcctctttcacaaaatttgacatcacctctttttcatgcagtgattgttttctttacaaaatctacacttttttctgtcatccatgcctatttctacacttttgaacttctttccatgccatgttttctgatctcttcttgaatggttgaaactaaagtttacaaaagaatttgggcacgaaatactttgttctttcttgtgaattagccaacttttgaagatactaattaatagtataatactacaacgtgcatgtgaactgggcagcaag

SEQ ID NO: 67997 - DNA, 657 bp, Cucumis sativus
  Intron number 1 from transcript Cucsa.395070.1 (locus Cucs a.395070) derived from phytozome v7.0 (chr-ID scaffold0410 0; pos 739407 to 740063)
tcgtccctaaacttatcgaagttggagctctcccggtatgtcttattaatttattcaaaattcggaaatattaacaatgaaaattcatttcccctttttcttttcaactattactaataaaccaaactatttacaacacgtaacaaacaaaatttatatatgttaatagaaaatttgataaattttactataaagtttttgaaaacaaaccttagatcatcctttctattttctactcacattgaagtagtctacaccataaccaactattataacccacttaatgtatatacttaatagctatcaactacaagagccaatctatgtatgaagcaccttcgtaatttcttgcttttcaaaattaaggtcataagcacaacttccaacaatataagttaatttctttttgttttagctgctcaaatccaccaattttatatatatatataaacaaagttgaaagttgaaaattcaaactcacttctggaatatagtgttaaaatattaattggaaattaagaattcaaaatgccctaatgctcatggaatttccgaaactaaaatgaaaaaaaaattgtagcatttgatagagaaggatattctgatttggaaaatgaaacaggtgggacacgtgcagtgttgagagtgggagatcac

SEQ ID NO: 67998 - DNA, 532 bp, Cucumis sativus
  Intron number 1 from transcript Cucsa.318680.1 (locus Cucs a.318680) derived from phytozome v7.0 (chr-ID scaffold0307 6; pos 228071 to 228602)
agaaggaactgttcttaatctcatttttgctccaggtaacaatttgtagtaatctcttccattgtttcatcttcccattctaaattttcgagaaatttttattgaaagtcgttttatgttcgatactcagtaataactcagactacacatctatctctgttcattcccttcaattacaaggataatttagaccatccattaggttttttttttaataacattaagatttaagatttttttttgtcagagtagggttaataaatttaagattagaccatagagaatatatatagtaaaaaccagaacatttatttttaaaaaattttactacgaattcaactttcttgagtaagaaagaagcaaatagttaatttagagtataggttcatgttgagtataatttaatctaaacgagcacaattcacctacttttgatctttaacatgctgagtcttgacttctgagacaaacgtgaaaatgtgtggacattaatgcaggtttaggtacctcaagttataaagagaaatttaca

SEQ ID NO: 67999 - DNA, 949 bp, Cucumis sativus
  Intron number 1 from transcript Cucsa.396010.1 (locus Cucs a.396010) derived from phytozome v7.0 (chr-ID scaffold0410 0; pos 1357208 to 1358156 reverse strand)
cttcatactttcactttcttctcggttcgtctttggtaaaaacgatccttattcgtctttattctgcttccttttttattttttattttttaaacttctggggtctgatccttggctatttcttaaatttctgatcgcacagacttcagattgtcggatttgtctgttggttttctcatatttacttctagattgagatctgttcttcctaaatatatctcttatagtgtttactgttcaccttaactatttccgaagttctgctgttgaagtttctgaacggaatctttgatgtgaattttctagtttctgtttgggtttgttgtgttcccattttttccgatctaatctcatttgttgtatttttataaaactcgcatattatcatcatgtactgactgtgtggcctcttagcgatgactgatgagacctcttatcgtactggttgtctcctattgttttactgtggatcagcgaattttttgttatgaatctgcgctcttacggatgcatttactctttacttttaagtgtttggagccgacccttaaattggtgtgtttgtgtacgttttttttcttatgttattgttattgcgattagatatttcataaaacagaattaaggtttatatgttttagtaaatgatctttactcttgaccatgttgctacttttcaacccttggcatttgttattacagctctgttttcaacgaagacttatagtacttgatttgctacattgaacgatgcttataaaatattaactttgttcttcgattctttattgatctcattttccttgaatagctatctgccttacctaaactgtacttctggcccactactgtcgtattggtgtctcaatgtcatctcttgttctaaatttgaaacgagtatttctcatctgatgaaatcattgggaattattgcagggaagaagtagcc

SEQ ID NO: 68000 - DNA, 776 bp, Cucumis sativus
  Intron number 1 from transcript Cucsa.201930.1 (locus Cucs a.201930) derived from phytozome v7.0 (chr-ID scaffold0137 6; pos 134084 to 134859 reverse strand)
aaaatcctgcaaaaacaaggttagatttgtaccgacagcgttgaatttcttttgcttttgtaattgacctccgtgtttatttcgtttctggcatttttgaagtatggttgattgattctaatttattcaacattctttgtgaattcgtttgtatgttgatgaatagtttttcatttctagaattgcgaatctattactttcttattggatgataactcttcgttcccttgttccttagattaatgtattgttttgtattggatggtttccttttttaatttcagaataaatagaattcatttaagctttggcttttaagtattttggatgtgtgtttagtggggtgaaatatgagagcttttcttggattggatttactttgttgtatacaaactccatatttgatcaaataagggttcgtttgattacaattttgtttttttctcttctgcttttggaaatcatgtttatttaactttttgtagcttttaaaaacttcgaatggattttgaaaacaatgttataaagtagtttaacaaaacaaataaactcatagatggaaatggtgtttatgaactaacttttgaaaactaaaaaccaaatagttctcaaacaagctttaacgtttctttcaatggcccttattcttggataataacatgatttgtgttgtggccgactagcaggcatttcgcattggtgcataaccaagttctactatgttctttatgacccctgcaggtgaacagagtgtgctttttgcagataaagtcttg

SEQ ID NO: 68001 - DNA, 779 bp, Cucumis sativus
  Intron number 1 from transcript Cucsa.273150.1 (locus Cucs a.273150) derived from phytozome v7.0 (chr-ID scaffold0251 1; pos 150810 to 151588 reverse strand)
caccgaagtttcagaaaacccaattcctgtgagaggtaacgctttcaactctcctctccttcaatttccccttccccatttctctccttcttcttcattccttccgatctgtttttatttcccttttttaattcttgatctgtcatttctttccttttcttgcttcttaagctgcactttcactttgattcctcccagatctgtcttaattcttttcactttactctaatttgtatcttgactcctctcttttttcttctgatctttagatctctgggtctttctctgctgttttggatcgatctgcatgcttttgttttttttttaattctaattacaatgcaacgttaattccttgttataggaagctgtgttaggatcatggttggttttcatgcactcgcatttcgtcttctttttttagtcgagttacgctgatttggatttgttgtcattagttgagattgaattgatatgtcacttccgcttctcttctctctaaaagatatatacacgattgtgattcagattctgatttgattacattttgggtgattttcgttccattctttgttgcactcttgtttagataaccataagaaaggagtagaatttgctagcgaagtcctgttcttcaaatcttctaggatcaatgaattttcttcttcttctttagaattggtgaattctcgtttgtgatgtgttcttattcataattatgattggaaatcggtatttgtccagattataaattgaaaaaaggaaaaaaaaaggcaaga

SEQ ID NO: 68002 - DNA, 701 bp, Cucumis sativus
  Intron number 1 from transcript Cucsa.381840.1 (locus Cucs a.381840) derived from phytozome v7.0 (chr-ID scaffold0386 6; pos 76959 to 77659)
atcaagtaagaacgaacactttatgaatagttgcttacttgcattcattgatcaatccctgttttgttgtgtttataataatgcagagtagtgtctatgttcttgcttgtattctattgcattgagaatcaatttgtcattcagaaaacatttcatctgttgaaactttgaaacatgatatctctatagattctcacaacaataatgatactcacaggagtacttccgttaatagtatttcgaacgttcgttttctgtttactctttgaaacttagtgagcatacgttgaccacttgttgaacgccgtaactcatgtcatacactgatgtacttttctagagtaagtaaatttagatgttgaagcattattgacttgatatttcctttgcattaatgtgtgaaactatttgagttggtttgaatcataaatgcacaaacattgtatcttttgagataaaacgttgtatcataaatgcgtaaacatcatcaactaaaaggggatttttgcatgaaaaccacagaaatgtataaatatttagaaatgaacttatgtataccaagtatcagtatgtgcgctaatgacttaatttttagttaaggggttttcattgatctgaaccgagagcaaaagctaacatatggatttacttcttctgtttgcataggtgtttgtaagagacttcgtcccaagtgcgtttgc

SEQ ID NO: 68003 - DNA, 902 bp, Cucumis sativus
  Intron number 1 from transcript Cucsa.310570.1 (locus Cucs a.310570) derived from phytozome v7.0 (chr-ID scaffold0299 5; pos 337190 to 338091)
ctgccattggaggccgtggagctctcctttgagccgtaagcgctctagttttgtattcatatatcttcttttattcaatcactttatctgatctatattgcgctcatttacgactacttattttgtgcgtttgaatgtttctttcgaggttttagccgtttcgaagctgtgttgaatgatgattattgtggacgtttcgatttacttggttttggtgctgatttccgttttattttaagtgtattgagaaatctagcttatgtttagtactctggcctttgtatttctgttcaaatcatgcggatttttttagtgtagtgcatgatttcatgctgtcgccttctttttttttttttttcttttcgttttggaagaggtggaaatttgatttgatttgatttgatttatcaagtttttgggagggagtgtgtttgcttattcctctgtttcatgggcggcgacgggggagggtgaggagaaataggaagatttgtacggctgcggataaaaatgagcatattaggtttgcacctcgagctcttgcgatttttaatgtttttatatgcttgtttgaaaatgtaataggaaatccaagcgatcgttcgtttccttttatttgctgcactgttacaactgtatcacttagccgtagaatagtgatggatcgagtgtcactttagggatgttcttttgatttttctctataagtttaagaggtgacgagggtcttgtgccattgttttttcatgaagtcttcggtccattgcatgttattttgcgttttgaattagcccttatcacggtttgctttttctggattttcatctgtgcctctagttttgaatgttttcagcttagtgactgctcttgcacgtttatcttatgttggttacgcagcttca

SEQ ID NO: 68004 - DNA, 977 bp, Cucumis sativus
  Intron number 3 from transcript Cucsa.310570.1 (locus Cucs a.310570) derived from phytozome v7.0 (chr-ID scaffold0299 5; pos 338797 to 339773)
tgtatcttcagaagaatctatccctcagccaagtatacaacatatctctagaattgcttttgtatgaattatatatctttactgtttaactgaaccatcaaatgacaatatctgaatgccttccatgtgtagaatttccaggccaggaccctttaaatattattatataatcctcataatggggattatcgcaagtgctgaactgaagaagcattcatgccttaacatcttttgttatgatattttgtcgtgtgttgagaattttaacaactcacttcttaagattttatccatgtaaaaggctgcgttacaaattatactacaccatgtataataagagtgaatagtggcaaaaacaaattgtgacatactaacattcctttaaagtttttatggaaagacgtgattttgggtgaactatattctatttcaaactgcttatgatttataagaggtagacaccagcctgggactcggctatatcattatttcagtgagtctgtaattgttgtctttgtgcattattgctttaactttgaagaatgaaccgttaattctaacctttttgttctttgttctttttcttcttttgtgaaaaaaaaaatctaaactacaatttaatgcatcttccttatacaagtagtctgctgcaagaactgcactggagggtgaataatttcattttttattgtccaagtcaactgcatctccaatgtttgtggagcacaattaattagcatagccgaatgttctagttttgcagggaaattgaacattacaaaaatttggttggaagtatggtcatcatggagtaaactgttaattatcgactctattaatatcagtacccacataatatccgtggtaatgggaaaaagatttaaataacccacataataacgttgtatacaagcattgtagtcttcaattagcaaggagtgagaatgttacaattgtaaaattttgcagaaaaatat

SEQ ID NO: 68005 - DNA, 635 bp, Cucumis sativus
  Intron number 1 from transcript Cucsa.388240.1 (locus Cucs a.388240) derived from phytozome v7.0 (chr-ID scaffold0396 7; pos 694670 to 695304)
ccttggctggtaccatctccgttagagtatggcgctttcttttttcttttgtttttccatgctgaaattgataatggatatgtgatgattctttggacttaatcgcttattgcatgcaattgcttaagcctagttcttcttttaactgttcgccctaattctgttgtttcccccccttttgcaatcttcatttccaggagcatttgtaaagaatttgaaagtgtcttttggcctgattgaaaattttcgactctgtgaaatggtttcatctgttatgattttcacatttcataaagttaagaaggaattcaaatttattactgtttagatggggcagtgatatttgaatcatgatgaggtagggatatctcaatcagtaaattataaaaagttagagatactttagctgctaatcatacgtgacaatcattttcagcaacttggtggtttaaatttctttaaattgaagttaggtggaactttttaagctgtttttaccgagatatatgagtgagcaagaaaaatgaattggcctttggtatttggtaaagggtttctgcactatgaatctatcaaattactttccctcttaagaaattgtttgttctggtttcctctttgtcagcactgttccg

SEQ ID NO: 68006 - DNA, 908 bp, Cucumis sativus
  Intron number 1 from transcript Cucsa.388370.2 (locus Cucs a.388370) derived from phytozome v7.0 (chr-ID scaffold0396 7; pos 794709 to 795616)
gggtttaagggtttccatcttcttcagttctctcggtgagatttcctctgattttccctgaaaatcccagattctttttgtttttctccatttcttaatgtttgaatttgcatatgctttctctttcttcctcaaacttgttactctttctcactgttgtagcctctgtttgaagtttcaattggaagggttttcggcttcttcgtaccattttgtgtagtgggaataaacccagtttattttgtggctaaactgggctttttttgggtgtaatttttattaactccttttcgtttaagaacaaattttctttctggcggtttgaaatgaattcttgttaattcatctttctggggaatactggtttctattgagagattgtctgcacgaatcagtgaaggattttgcatttgaagatgcattttcaggaactttttttaattagagagaaactaattagaagaacagttattttcggggaaatttgggtgtggtatatttttctttggggcagtgtttctttttgttgatttcgtttaggggctgcctctgttcttgtgtcttcgtgtgtgtgaaatctcatttgttatccttgctggttttttaattgttggtttcttttggcatatgtatcttgtttctcattgatttgagggatatcatttagctgaatgattcagtttcaaacgtcttttccattgaactttttggcaattgagctgctaccagtttttgaacatttggttagctttgccggcatgctccgtttatgataagtctctcgttttatttatttttttcttcatgaattgaaatggaggtttttcccgctcctataatgatgtatgtaatcgcttgtttgtttgtttttttattttaccaatcttgcttctgtctttacagtgttt

SEQ ID NO: 68007 - DNA, 702 bp, Cucumis sativus
  Intron number 1 from transcript Cucsa.382430.1 (locus Cucs a.382430) derived from phytozome v7.0 (chr-ID scaffold0386 8; pos 695 to 1396 reverse strand)
tcaaatcgtggacatcggtcgtcacccctccgtcggtaagcttctcttcgttatctctttctctctctctctatgaagttcttctttgttgtggttacaacaactccatgtgattgttttgtgagtttcagttctttccaatttctttttttctaatcgttgaatttttgttatgtctttaattcgttcttgcaactacatgagattattttgtgagtttgagttatgcccaatttctcttttctaattgtggatttctcttgaattttaatttatggcagtgtacagtggtacaatctaaaattgttctaatttcccattctttagttatttcaacaattaaattcaatgattttgtaggatggaattgctatgttccaaaatgggaactaatcagacaaaatactagttgctgggaaaacaaaattgattagatcatttttctatttagtattcacatgggaaaaggcttcgtctgtaggaaaatatatctatccatcaaatcttatttagaagttttttttacagacttttgatcttcctatatgtttggtattaatttaattaacatgctttccgatacaaaatcaactatcaaggaaagaggtaactcatacctgttataagaacatttcttgatttttcaatgagttggaatttaaaatttgatttagaagcattgtgctttcaggtggagccacc

SEQ ID NO: 68008 - DNA, 660 bp, Cucumis sativus
  Intron number 1 from transcript Cucsa.366540.4 (locus Cucs a.366540) derived from phytozome v7.0 (chr-ID scaffold0362 5; pos 120739 to 121398 reverse strand)
ccctgttcgtttgccccttgtgcttcgccggtccggtagggtttctcagtacgtgtgggatgggttttctctgcagttgattggctttgatggtggtgcttcctctgtttcttttgatttcggtgatgggtttcgaactttgtatagagtctctgttttggctgttaaagatttttttattcctaagaatgtcagtgagcattatgtaatttatgttaaatggaagcttttgcatcgggtttttagctccgctcttcaggtcattgctactcaggtcagtggaagtttcgcttttggttgaattttgttgtactgaaaagttgaaattttttattagcttttctggttgtgagggagaaattagtgatgtttgatcattctctgttttatttatttcttatagttggttttagaattaagtaacattctcagtattggaataatacttcatacttttctttgtgagaaacaacattaaagcttgaggctttgagttcattcggatgacagaagcttgaattgtttggtgatgtgtgggttgaattgtttatctgaacaatgtttgttagtttgaaatttctgatgttatacatgtccaactcctgttttaatgataagcattctgttcagattataagggaaaactgttgttgataggca

SEQ ID NO: 68009 - DNA, 898 bp, Cucumis sativus
  Intron number 2 from transcript Cucsa.323040.1 (locus Cucs a.323040) derived from phytozome v7.0 (chr-ID scaffold0308 0; pos 2577631 to 2578528 reverse strand)
gcacaagacccttactgctcaccaggatctcacaggtgccttctctaaattaattaaaatgctctttcattcatttcttcaacttcttctttcaatccaatcccctaattaattgtttaagccttacacatctactaccccctatattgtttggttatactatttgattttttggaatttcctctttttaattttcactcgattgatagattattgaattttgattcctggtggtatattgtattgtatcattgtatgtgtttgtggtgcaatttctcgaggtgttgttcttgttcatgattttcttatattttggaaatgcgtgcaaatatttggtgatttcgagcagctaacagttacctcaaaataagggcaaatatctaagtctgtaactaagactactaccggtttcccttttcttgatggctatccaacttttttgtggtccttttggctatggtgtccctgccgtaaagtaacgatttccctctccttcattgtttgcagcatgtgtattaagaggcactttagtaaccatttagtaatccactttatataaatatatgtatacgttttcagaaccaattcatgagtattctcggaagaagtgaaaactttcgatttaaaatgaaaagaaaagagtaattgggagatttattttctttagcaattgattaaggggttcaatactatagaagtatttgtaaattgaataagccaagttgaagattggagagttttgataatgtgatgttaatggaatttggattaagatggttgtaaaagtatgcctttgacttaaagcttgctttctactccacctgtatgatcttggagacaatctgatgaatctcctctatgcacttgcttaaagcttgtgtcttgctgctttgcagga

SEQ ID NO: 68010 - DNA, 764 bp, Cucumis sativus
  Intron number 1 from transcript Cucsa.323040.1 (locus Cucs a.323040) derived from phytozome v7.0 (chr-ID scaffold0308 0; pos 2578735 to 2579498 reverse strand)
catcaccaccctcctctcttccaccggtacttcaggttgcctttccctctctactatatattatttcattctttctttttctttcttttccctctcaaattatttcctcttttataaggaaattaatttttgcttaattgctttccattttagattccaatatttgccataaaggaacaaaaatcaaatccaaggtggattggatttgatagtgtcctctttttgttttgctaactaaagtattttttttattactatatactaaattaattaactctatgaattgaatcatttttatctactattaaatattggcttttcgaaaagaacgtagaaaaagaagagactttataaaactctcacaatagaaggtaaaaattttgtttatctctataaattttattgtatgtaacagaggttaatacgactttatttttaaaccaataaaattacttatagtgattaagaaaggaaaaatcatgaaataatttaatatatatagtgaaaaagaaaaaaagtaaagaaaaggtgagagaaatgcttttattaataggagattaaaaaaaaaaattgattgattaatttaggtttaaaggataatagaaataagaatataaaaattgatttttgggagtgttttcctttcccgcatatttgtctgtttctttactttcccgttaaccgtccgcttttgtgaattacaatttcttctttctttaatttcttcttcttcttctttcattctctctcaaattaaagcgatt

SEQ ID NO: 68011 - DNA, 1001 bp, Cucumis sativus
  Intron number 1 from transcript Cucsa.341610.3 (locus Cucs a.341610) derived from phytozome v7.0 (chr-ID scaffold0335 6; pos 4043925 to 4044925)
tgaattattttttttctcgacgcagaaaaaactaggtaaatattgattttgaattttatatttcttgagttttatttccaatccttctctctctcttgtgatgtggaattgcatgtatccatttgaagccttatcgtatcgtaattctcaggaaataggagatggctgatttttcagtgaatgaacatggaattggctgtatttaggattttattatatcatattctttaatttggtttacttttcatgtgggggagctgttcttgagttcagtttttcactaaatatatgatcggagaacagtttaggcaggaaatttaagtgaatgaagttgagaagcctcctatagttcaatattgagaatgattatctatctgtctgttcatttgttgcccgaacatttttagtcccaaaagtcaaatcgttgcatggtatgaagtacaagaacgtcgtcgttaaagatggtttagaacgaaaagactatattagagcgaaacttcaaggagctaggaatgagtttaagttttttaattaaatggtagctgtagtacttgttaagattttcatttcattatcagattattaagtgtttacttttcttgatattgaaattaaagctaaacagtgtagtgatttcactcttgataaggttttcaataataaggagctcaggatgagtttaagcttctcaattagattagagctgcagtgcttgttaaggtttccatcatcagagattaagtgtgtggttttgtagttattgagattaaagttaaacagcgttatgatttgacttccattttggaattttttttcttctggcattatttgatggggatgatcttgatccaggtgcagcaattgttatttctgcatttactgtttctttattgattgtgatatgtacatctgtatattaatatcaaactatctttgtatgttttgatgggtcggtttattacaaaggccatttctagattatctggttcattaacggacaa

SEQ ID NO: 68012 - DNA, 1029 bp, Cucumis sativus
  Intron number 1 from transcript Cucsa.364590.1 (locus Cucs a.364590) derived from phytozome v7.0 (chr-ID scaffold0361 1; pos 2021638 to 2022666)
gactgaagaagaacataggtatttatttttctaatatacatatcaacacttttgcttcaattttatgctctctctgtttctgtttggctgctgtgaaaatggtgggaaaaggggaggaatgaacaaacacagagaatttgaactctaatttggttttgggttttgtgtcttatgtgtttggtttcttgttccatcttccaatttgggaattcctgagatttaatcacctttttttgatttagaattgcttgtttcttctgtattattcaccctgattttcagttttgtaagggggaggggggaattttgaaattccatcttaagaaattggtgttcctaaatttaggaagaatctcattagaatgaagaggttaagtttagggatggagttgttgttcttgatatggtttgtgggatgcaacatcttgggatttattggaaaaacaacccgatactgtcccctggacaagaaccgttaacaactcaaaccatctgttggaattgagttttagagcaagaattcaaccaagaacacgaagattggaacttattgatttgttatctttgagtaagcttgagtgtttaagctggctcttgcaacaaccacttaaccttgtgacattgacattcagaaagttgactggctggactatgtttaatatcttagttaggtaggttacatacatgacaactggtttcatgatttccccttctaaattgatgagcttgagtgatgtttcgaaaacaatatcgctgtcccattgtagattgctgttgagtgttagcctaaaagctcaagctagtgtgttgttctagagatctgttgttgcagctgttgcttcctaatgcatacctaaaactgagttcaaagcttgaatatagaccaatgaggaaaacataagctagcaaatatgaaaatgatgttattgtagggattttaactctttactttataggttttgtgatgcaatagtgtgttttgacattgttacaggctatttctccttggactgaaaaaattcggcaagg

SEQ ID NO: 68013 - DNA, 720 bp, Cucumis sativus
  Intron number 1 from transcript Cucsa.377380.1 (locus Cucs a.377380) derived from phytozome v7.0 (chr-ID scaffold0380 5; pos 88825 to 89544 reverse strand)
tactctctctccctcatcacgatcacctttctcccgtgagtttgcatctccctttttttttctttttgttttcgggtttgtgttgttcattgatttactttctttaatcgtttgaatatcattgatgaaattgaattggccttgttgatgaggcatggatgtgaaatgatgattcgttttggcagtgtatccggaaaaatacaggaactgggaatgacttccatctctcatcaatcttactgtgcctcttctatctctcatcaatctttctctgtttttcgtatgtgagcacatagtagatttcaattctctgcctcattctgcttattttgatttcctctgggtttgttagggatagtgaaaatggtattaggagggacaattctcggttgttggttcctgagttgtagaattcatttggtcaggttatttcattttgtatttcggttctctgatatcgttatcttggaagatttcttttgagagagttgcgtgatttatttacttattatgtttcttatttaattacaatgcatgtgattgtagtaagacttctctgtacttactatgtttcttatttaattgcaacttgcttaacagctcttatgcttaggtgctgaattgatttggattgagtttttcttttatgcttatatttattctgttacttgccttaaatttttgcctcttctggctgtgaaatgtgattgtaggaggctg

SEQ ID NO: 68014 - DNA, 981 bp, Cucumis sativus
  Intron number 1 from transcript Cucsa.271380.1 (locus Cucs a.271380) derived from phytozome v7.0 (chr-ID scaffold0250 0; pos 275640 to 276620)
gcctttatcttactcccttgtggttcactacggaggtacattttctcttaaactattttagtttattttgactcttgcatatatttctttttgtggtacacgtttctttctttggtgcaccttgaggtgatggatttgaactcgggatattttggtttttagcccatctatatattagttgagttaaattcttgttagcatttagtacatgtttcttactttttttttaatgtaatttaatattattctcctaaacaaataaaagaaagaggaattttcaataatgacaaaatatttacaaaatatagcaaaatttcagattctatcaaagatagaaattgataaatgttgatatgtttctattagcgactttgaagtttatccattattgataaaattcaaaattttactatattttgtaaatattttagtttatttgaaaatgtccctaaaagaaatgtgtaatgtgtatatgcttgttttccatactatatatgattcacacatttcttgaaagaatgtttgaactatttttggccaaaattttaaaaccaaaaataagtttttgaaacactacattttttctaagacttcatttggtatttttgtttttggtttttcaaaatttagtctataaacactaactctacctctaagtttgttatctattttctaggaccaatgttttcaaaagttaaagccaaattttgatagccgaaaataatttttaaaaatttgttaaaatagactaaaactattttaagaaattgataagaaatagacttataattttcaaaaacaaaaaacggttaataaatgggcctaaatcttagaccgaataaatgtggttgtatgtgaatgtctactgaggttttcatttatcattgattgttaattttaggaactcgtgttgctgcaataatgtcgtttgttgagacttttgcagtacttctcaaactcggccctagcaaatacgagtgt

SEQ ID NO: 68015 - DNA, 1037 bp, Cucumis sativus
  Intron number 1 from transcript Cucsa.348710.1 (locus Cucs a.348710) derived from phytozome v7.0 (chr-ID scaffold0348 7; pos 145278 to 146314)
aagtttgatcattctcaggtttcttgtctaatctctttttcttttgaatttcagtttaggttttatgttcatgagttttaattctttgatgcagacttgtttttttatggtatatgcgtttattatttgtgattttaccttaagtttgtattcgttcgtttcggtttttgcgtctgttaagttatctgccttggaattggatgaagtttagcttaaatggcatcttgatcttagttaacgactattgatagatggaatacgaaaagaaatattgtaagagcatgggcgttaattaggatcccgtgggtcatcgtaaatcttcttttctaagtggtatttttctctaggcagtaggcttagttgctgcaatcgttgtttgatgacagtgcttggattgacaagccttttcgatgcatctttgtctttggtctggaaggatatgctctggaaaaagtgctagtactatagttcacaattcagttttcatgttcttgccacccaacttttacattgtgtactgctccactgccgttcttctgtaaaattccaaatggggtaaatctcagttctaggattgacttgttcatcaagataaggtcctgatgaggagtttagtaatgtttattttgtttaggagataagaagtatgagaggtttttacacacatttatttattatgtagtagagagcaatatcttttgcttaattttttctctcttttactgggaaggtagttgaactttggaggaacagtagtgttatcacagctttagtttgtcttattcgagggtttaagtgttatttatcttgatatgtcttctttttagtttttacagtagtatggaacaaattaaagaattcagaatgaaccaaatgtcctatttgttactatatgccattgtttcatctcttcgagctgttgcaaatcattatgaagagaatagcaacaaagagtagtctgactgcaatggtggaaatatatgacctttgatccttttttttttggcaggtccgctatctcacacttctggtaattg

SEQ ID NO: 68016 - DNA, 557 bp, Cucumis sativus
  Intron number 1 from transcript Cucsa.252370.1 (locus Cucs a.252370) derived from phytozome v7.0 (chr-ID scaffold0222 9; pos 1290186 to 1290742 reverse strand)
ttggttgcatcccctccaaggtcatttcctcgcttctcagatttgtttcttcgttttttttcttgcgtctttttctctttctagttcttgttgaagttttcgattttctttagatatggtgtttgagtgggttttttccgttttttttttttggtctgttttgtcaactgccctaatataattgctggtttgctgaaactctcagttttttcttcaatatggttggatttttaggttttgaactctattctatttaggaatgtgaaatgattatctccagtttcagctttttcctagccattggttaagaaatgattgaattttttgtgttttttacggtattctctgattgaactttcccgtgaaatcaatggtgttgaatcaaatatgattagcatagcatgtctcaataatgttgtgctgattgtccattaatggctactcgttttgctgaccactgattcaatatttagatcattagatgcaagtccaagtctctttaacatataggttgtggtttatttgtataatttcaggctcttctccattcctcacac

SEQ ID NO: 68017 - DNA, 403 bp, Cucumis sativus
  Intron number 1 from transcript Cucsa.366810.1 (locus Cucs a.366810) derived from phytozome v7.0 (chr-ID scaffold0362 5; pos 314465 to 314867 reverse strand)
gatttcttcttcgtgctgcggcatcgtctactgtacgttgtttgaatttcacttcaagaatttctcaatttgttgttcgatctttgtcctgatcttggatttgattcgatttttgcagccatggggtcgtttttggttattttagtcttcttattctgttgcattttacgctagtttaggtgaattgtatgagtttttgatatttagaacgtgggtagaagccgcctttgattttcataagaaatgatgatatgcagtaaacagctagaaactggattgcttcttttgccaattcctttgttttcaggtgaaaattgggttttgattgttatgggttgttttgttggaatttgcaaccgtctttgtaggcaagcttatacagaggtgtttctaggaaggaaaa

SEQ ID NO: 68018 - DNA, 584 bp, Cucumis sativus
  Intron number 3 from transcript Cucsa.232940.1 (locus Cucs a.232940) derived from phytozome v7.0 (chr-ID scaffold0198 9; pos 690769 to 691352)
aacaatctgaggttgctgaacggctaaggatcaaggtaagcttgttttctcttcttgattgccaagttgggtttgtgttgaattagactgaagttttgacaaactgttcttggtctcttcggaaactttctgtttgctttgagatattaaaatcttcttattctaattattgtaaggtccgattttaattttaatttttaatttttaatgatttcagtaatttttattattattagatttttgctgcattaaaaaacataactaatataatatttattgttgtttcaaacatcatcaagaaagtattaagaaatggttaaattacaaattttgtcatttgaagaaaattagtatttagtttgaaaagttatgtttagtccttaacaatacctcatgaatattcattataatttgatttagaggtagaaaaccattaaaattagtgtttgtttgtgattgagttaattaagttcctaaaatgttaatgtttatgataaacaagttttgtttttgtattttagttcactaatgttgaaatttgatgatggcattgcagactgtgccactgttccacttctacaaag

SEQ ID NO: 68019 - DNA, 327 bp, Cucumis sativus
  Intron number 2 from transcript Cucsa.369500.1 (locus Cucs a.369500) derived from phytozome v7.0 (chr-ID scaffold0364 6; pos 96437 to 96763)
cgtgatctctacgtggagtctcttaaaaaatacaggttacttccatcttctgtttgagtatatttagtcatcaataattttagaattacgacactggaaatgggttgaaacatagttgacatttttatcctctcaaagcacttttcattccttttgatttgtttctccttctcttttggttggttttcattttttaatcaaagagtcatttgaggcctttttcgaactttttgctatttatatttttcttcccaatttattttcccagtgctttttatttcatctaattgcttgctttataattgcagtgccagtgaggaaagagac

SEQ ID NO: 68020 - DNA, 937 bp, Cucumis sativus
  Intron number 2 from transcript Cucsa.204850.1 (locus Cucs a.204850) derived from phytozome v7.0 (chr-ID scaffold0141 6; pos 32140 to 33076)
agaaggttttttcctgtctttttatgcaatatgggtatctggtagtatgttgtagaagtgtggataatggtgaattgaatatggaagttgaagactttgtttggtttatagttctctgtactgatatgagaaatttgggaaactaactgtatttgaatgcttaaatgtgttattgagtcggagatttttaatttctcggctggcttttcatgtattacttgattgcttggatcatagtcgggtagcttgcgtgtaattgatgaatttagatgggattgggtctttgaattgttcaggttatgtttggggcaaagaaaaactattgctcaatgctaggggaggcgctgatgcccctttgagaataagggcgggttgtgttagattaaatgctttgttgtgggcgtgacactggggagttcctccatctgtctttcagtgagaggcttgtttctgtggtttatctgagtgtatgccttgtttagagatatttgaggggaacaacaataaagtttttcgaagtgtggggaggaacaatagagtttttagaagtgtggaaaaggacccttctgaggagtctttagtgaggtttcatgtgtctctttggatttcatgctcttttgtaattttgtctaggtaataccttaccccattggaaaccctttctctaggttttcttctcctctttgtatgcctattctttctttcttttttctcaatgaaaggagttgtttcttaaaaaaataaaatgttgtagttatcagtttggtatgattcttttagattggattttctttcttttggtgggctccctttgttgagttattgtatttgtattgcccttacacattccctcatgtttgaattcagatcattcttataatggtctagtgattttctttcagattacgtggcagtggcttcctttttcaaattctgc

SEQ ID NO: 68021 - DNA, 791 bp, Cucumis sativus
  Intron number 2 from transcript Cucsa.284780.2 (locus Cucs a.284780) derived from phytozome v7.0 (chr-ID scaffold0265 3; pos 1406381 to 1407171 reverse strand)
taaaggacggatcacactggtatgttgtaatcgtgattttatatttaatatcaaatggatgcttaaatttgaatacttttaagtgtagattaagtgtaggttaattgtgagagtagatattcaaatgatcttctgctcaaatggtcagctttctgacacctacccacagatattatgtaagcacacgatgtgatgcaagtttttttggcgttttgatattttaattttttttcctaagattcataccttggtcagtgatcaatgaaattcactttcttgtggatcactggagaacttctggttttcttatttttaggcaaataccacaaaactaattggttccttcgagttggcaggttatggatccacttttcggctgtgtatcttatcaccgcgtatatatgctgtctactgtactatgtaggtgacaagccagtaaaatatttgtgcttcttcgtatatatgtttcagtgatatttatttaatatttctgcagccacttgactagcattctttcctccgatgctattctggtgaaaatcatgagcattgtgcattcaaataacaactaacagttgtatttttggaaggaatgatccttctttgaaaataaacctattatcttagcttcttaaatgcctgcacaagtgtgacagtacagaggatgttgtttcacccataaatgatatttacaaactcttggcatctttctgaacttaattgtagttcaaggcaatctgtacggttaattaataacgttggttgatctcaaagtttatatctgcaggagt

SEQ ID NO: 68022 - DNA, 490 bp, Cucumis sativus
  Intron number 2 from transcript Cucsa.256120.1 (locus Cucs a.256120) derived from phytozome v7.0 (chr-ID scaffold0222 9; pos 3799112 to 3799601 reverse strand)
tccggtagtgcatctgatatcagttcatctaaaacgtgagtttcttcgtttttgttttgatttttccgagttgaaaaggaagctcattgatgttgtttcgaattttggatttctatgactacggctatggtaatgcactatgttaccctacaattccaattgattttatggattaatggttagaaatccaacgtatttatttattgtcatttaaactgataattctactaatctggtttctgggatttctaatccatttgatatttttacggagttttgtataatcgacaatgaattcgacctgtaatcatgctaattgctccaccgagttgtagtcaacaaaaacttaaaattttgttgtgtaaaactgattttctcgccttgttttgtaatttagtgaatccatgatctattcgtcttcctcactcatttatacgtcttctatgttttggcagtgagaagtctccaagtgggttgccttatcctcttc

SEQ ID NO: 68023 - DNA, 517 bp, Cucumis sativus; identical to SEQ ID NO: 66276
  Intron number 1 from transcript Cucsa.395130.2 (locus Cucs a.395130) derived from phytozome v7.0 (chr-ID scaffold0410 0; pos 766778 to 767294 reverse strand)

SEQ ID NO: 68024 - DNA, 576 bp, Cucumis sativus
  Intron number 3 from transcript Cucsa.388060.2 (locus Cucs a.388060) derived from phytozome v7.0 (chr-ID scaffold0396 7; pos 513977 to 514552)
tttctcctgacctccttgctgccaagtccaaaaaggtcttttcacttttccccttttcttttttaaattttagattccactttaatacattttccccttcattaacttcactttttctggtaacaacttggtatcaatatttccttctcttttttttttttttctcttttgtaataaaagataatacattaaagaggtttcactttgagttaaagatggtatttctttgtttggattttgacattacataaccttatttattcaattgtttttagagaattattataaatggcaaaattattgaaaatatttaccatagatctgatacatctggaattttacggaaatggtccatttttcttcaacatttttgtaaaactctactagaaagatgatggtaagttttgggtgatacaaaagttgaaaataaaacttcttgttaatacttttctttaaattttgtttatgggttatgaacttatgtatatatttaattataaatggtttttctaatgtatatatatttatttatgcagaaaagagggctgagttacataacaaattgctttgtgccaa

SEQ ID NO: 68025 - DNA, 865 bp, Cucumis sativus
  Intron number 3 from transcript Cucsa.240200.1 (locus Cucs a.240200) derived from phytozome v7.0 (chr-ID scaffold0204 7; pos 142441 to 143305)
tggacagattcttattgggtcagtaaactcggtctcttcgccgaacctaaaagggaaaaaaagagagcaatatgtttttgttaaggtttatatgttctgtctatttgatttgatgcgttttgaatccctttgttttgaggagttttggttctccattgtctttatttaactacatattctcggtccatataaagttgttgttgttgccctttcttagtcttcggagtggttttgcctcagtcaaagattccagcctgggtgtttagttggttttgtttgctgtcttagagggctgtgttaatttccgtttcaactttgcttacagtctttggtttaaagaagcttttagcgttgtttagtagtagctttgttcttcttgcgggactagagcatttcttccttttagcattctctttgttgcagctgttttgtatgattgttggtctgtgtgtctagctcatctggaagattgtatctctaaacaaatctcttccttttcatcgatcaattaaagttttgtttttttattaaaaaagaaaaaagtttaagctttgcatttccaacttctatttcttatttccttgtatctagagatttattctctttttattacatcaatcaaaagttctgttttcgtttaaagaaaaatccataattattgatatttagttacttcatctttttgtaatttccttttatgagcatagtaattagaaggttctgtttcaaatccaatgattctcgtctgcctttgttatattttttgggggttaaaacacgctaactaccaaccgtttttgtattattttttatattgtgaatttatttttactaccgactgctgtgtatttttgtatcttgtagg

SEQ ID NO: 68026 - DNA, 846 bp, Cucumis sativus
  Intron number 1 from transcript Cucsa.201060.1 (locus Cucs a.201060) derived from phytozome v7.0 (chr-ID scaffold0137 4; pos 4960 to 5805)
cactaaccatagccgaaacttgggaccgcgttcaggtaacaatgctttttctgtttccattccctcattttttagctttctcttcaaatttacgaattacaaattccttgtgtaacatcaattatgttaacacagaaattagaatgatggaattctgttagatgctttgattcttttaattggggtttagttgtgacctatagatagaaatgagaatttcggtttgatttcttactgagtcctggttaaatgagaaatgccgtattctcaacactcataagggcataaacattggggatccttgattaaaatgcttttagttttaagttgttggacttggaatgtatctggcagggctcagtaggagaggtgattttcagttttacctcctaggaaattttagaggtggctagaaggctcggtgcataatttggtggcagggtagtttctttgcttttttgtggagaatttagcttgagaagaattattggatttttagagaggtagagaaccctaaatttgagaggtggctagctttaacgcttccttatgggtgtcaatcactggattatttttgtaattataaccttgtccttttataattgtatcatttctgaagatagaatcagttttgctctttcgtaattgttgtccagaaggatttagatgttgcataacagctcaactagagtgggcaatgtcacagctctagatcctttttatcctgtaactttgtgctgttttattagttatctatgtcagtaagtggcgttgtactaagttgataattgtctattcttttcctttccaggaagttggtttgagaggattaacaagcaaaaggca

SEQ ID NO: 68027 - DNA, 501 bp, Cucumis sativus
  Intron number 1 from transcript Cucsa.280780.3 (locus Cucs a.280780) derived from phytozome v7.0 (chr-ID scaffold0263 3; pos 691202 to 691702)
gaaatcaagtctgcttataggaagcttgctcttaagtaattctcttgctctgcgcttcgtattactgaaacttgatctgttttagttcacatcaattcataattcctgtccaccgtcaataacgaatagaatatgctgtgtactagtgcagaacttgatatgtaagaagattattagtctaatctggtttaattttaaagagtggactggattttaaggatgtcacttgatggattcttttcttcttcctcttcttttcaccatgtttggaagtttagttagtgattgatattcagtcctgttcacttggaagcaaaagtttggaactgggtttgatttatcgtttgatctttgctcttttgaccttattggacttcttacatcgtctgctcattggacttctgttggtgttggtcgtaccttgtgtgctaattgctatctagttttggtttcatttctgggattgatattcagtcctgtttcaattcagctagcctgtgg

SEQ ID NO: 68028 - DNA, 732 bp, Cucumis sativus
  Intron number 1 from transcript Cucsa.319490.1 (locus Cucs a.319490) derived from phytozome v7.0 (chr-ID scaffold0307 8; pos 189715 to 190446)
gctgccaaaaaggtaatcaaaatattagaaaagagattgtttttaaacaagtcttgaagttgttttattatgcatgcattatctaatatttatacccattttgttctttactattaaaaaagatatattgatttggtttggttcattagattgttttttgggttgtgatttttttcttcccaaagccctaaaagttaaaattgtagttttcctgatctttattatttgttttttttttatacattgattgattcagtctatactttctatgttcataaagacattattaaacaaaccccaaaaccccaaaaatggttgggacaaatttccttttcttactatatatgtgtatataattatcgattaggtttggtcaatatgaagtgttcttgggttttgaattttttttcttcaggtttacaaaacctcttttctttttttggttcttgaactcagttgattcagtggtgtacttagtttgtatgtatctatgaattattaaaaattatcttaaagattggatagcaaaaacaattagctctattttgtaaaatagagcaaaatctactaaattctttaggttcatttaagtttttttttttttttttgcataatatagtttcaatttttgttattttgctatcaataagagtttctccaaaactaaatggtttttttttggtttaatgtttggatttcagtcttatattgtgttattgggatcccattcac

SEQ ID NO: 68029 - DNA, 720 bp, Cucumis sativus
  Intron number 1 from transcript Cucsa.204000.1 (locus Cucs a.204000) derived from phytozome v7.0 (chr-ID scaffold0139 8; pos 3808 to 4527)
agcgttaaaggccctttgtgggaacaaatttccaggtacatatcaaaaagatttaaattaccaatttaattcaaatcttttcttcaattttttcaaaataaatcacttctgatttattttatgattctcttcaaagatctgagtttgtttttgttttttgatggttttttttttaaaacaagaaaatttaaatctcactgtcggcagttcaatcattttcacttcatctgaagtgatttatgattttctttttttgttttcttgggaatctctaagaaaactgaaatcccaattcagtgtcactgaaattcaaggtgagtttttttttttaaaaaaaaattaatttaaggaatctgtgaagttaagtagtagttaaatggtacttttttttgttaaaaaaacattctctcttatgtaacatcaacaactgaattttttttttgcagttttcagaagaaaaaatgatcaattgtatgatatgtatgtcttagtttgagattaatttcatgtatattggtttttctactgaattttcagttcttttttgaacgcaatcattgtttttacacatgcaattgccttgtatgagagagaaattcgattactttttttttttgtatgaaaattctaaaaaattttctctcttttttttttttgtggggtcttggttttgttttgttatcaggaaattgggggagcttgggtatcatcgaagtgcaa

SEQ ID NO: 68030 - DNA, 300 bp, Cucumis sativus
  Intron number 1 from transcript Cucsa.334240.1 (locus Cucs a.334240) derived from phytozome v7.0 (chr-ID scaffold0330 6; pos 121985 to 122284 reverse strand)
ctccaacattattgctacttctctcgactctcgaggtgctcaccttcaattttaatcttttttttttcttttcaattctaactttaatatttcctttaatctttctttatacccatatggactgcattatagaatatatcattgaaatcaaaatattgagcaacattaatttgaagaattgtgtataagaagtaaaaaaaaacaaaaaccaaatttatcttttttagcataattcaattcacacccacacattctaattttaaaaatttgtaactaaatttgcaatttttttttttaaag

SEQ ID NO: 68031 - DNA, 726 bp, Cucumis sativus
  Intron number 2 from transcript Cucsa.321920.1 (locus Cucs a.321920) derived from phytozome v7.0 (chr-ID scaffold0308 0; pos 1757163 to 1757888)
aagctcaagctgctattcagaaatttgactctcaagtaggttttcttctacctatttctgctcactttctgtttgcttatttgttcaaatgaatttttattctgttctatactggtattctaccaactacattcttgatgttctgaaattgtgcattttcaatttcattatcacttttagtatgtataaaactactttgagagtcctcaaaagttcttttctttttggatatttgtaggttttataagtcactagagtttgaactcgttccttttactttcttttttcacatgtttcaatactactaaaccaatctattgttatccaaaagccctttttgatcttagagtttattgatgagatttatgtagatgagatttatgtagggatgactcaaatttaggtttactaatgtccgataacctaaattctaaaaacaatggaaattaatattttgctcaagtcacaaagcactagccaacattgaaatgcacattcacgaccacggggcttgcccattgcaaactgatgcaaccgtgaacaagttcatgttcgagaattaccagacatgcatttcagtcattctgctttatgtcggttctaaacatacataagagaactactgcctattaaaacagacatgtgtaggttcttttcatggtaagcatatagtgttaatatatttgtgcaggaaatatcaggaagagttataaaggtagagtttgc

SEQ ID NO: 68032 - DNA, 643 bp, Cucumis sativus
  Intron number 1 from transcript Cucsa.388450.1 (locus Cucs a.388450) derived from phytozome v7.0 (chr-ID scaffold0396 7; pos 855690 to 856332)
cacaggtgagaaataaccacacacaacttcaaagttttaatttgagttaattatattatctttaaaattgtcaaactatttaacttgagccatattgttcttagctcatagctcatctcttaggtaggtgtatctagcaagatgcattttttattcatcttcctctcattactaacatcaaacaaatagttgaaatatttataaaaaaataaaaaagaatttgcaacatggcaaaatctgatcggacaatttagtagcattcacgaagatagatcacccaagtctttttcttagattttagtcacattcattttagagcaatatttcactatattttttgagttcacctcattcttagtccgaatgataaaaattgtgggtagctaacagtgcatgaaaagaaaattgcaacttttttagatttgaatgggaaagtaatactaattataaatactaatggaatatttagattgttgagattaatagactatattgaacttttgatttgaatataactatatgaatgacaaactcatttttagatataaaattcataaatctaaatcaataaaaaaaaaacttggtaatcaatatgggtgatacatatatattgaatttctatgtgttaggcattcgagacaac

SEQ ID NO: 68033 - DNA, 594 bp, Cucumis sativus
  Intron number 1 from transcript Cucsa.254190.1 (locus Cucs a.254190) derived from phytozome v7.0 (chr-ID scaffold0222 9; pos 2585358 to 2585951 reverse strand)
ttcggctacgacgtcggtgtctcaggtcactactcaaactctctctcgctatctcgatctctatcttatacattgattaagaacacatcacgatttcagttgtcaggaatcaggatgacgtttctttctgatttagtttgaaattatcatcaatatgaattcaaatcttctcggatcttcgtacacggtgattttattattattttgcaaatccttaacttatggccgtttacgattaagtcgcgatgtacttgattatatcacctcattgtcagtcgccttcttgtgtttctttcctcttgatcagttttttattaatcaaaattctgaacgaatggctgctatactattacgattgatcgatcgactgtgtgttctgctatcacgactgttacacactacattttttgtgccatagactagcctaaaattacagaaatataaattagcctagaacattgagatattaatttgctaatgtatagaacaacgacgatgtgcttgatcgattattactctaccaggtgtgacttattacgtttttcttttaaatcaatttttggttaatcgttaaacgtaggaggagttacttcg

SEQ ID NO: 68034 - DNA, 724 bp, Cucumis sativus
  Intron number 2 from transcript Cucsa.292330.1 (locus Cucs a.292330) derived from phytozome v7.0 (chr-ID scaffold0277 5; pos 35995 to 36718)
gatacaggtaagagttttttttcttcttcttcttattattattttactgagaattgaaatgggttggcaatctacagaaacatgtattattatgtgggcttttagagaattaagttagtcattacatccccttgttcaggtatcttaaaaacaaatatatcttttgagaaataggtttagatctaagttatggggttgatgaaccttttctacgtgcaaattttcttttagataaaactcttggaactcatttgatggttaggtaaatttctatgcatttgattaataacaagatgcagagacttaaacttggtcaataacaacgatgggttttcaattcatcccctattcttaatctacttttgtggttggatgctaggacacctcctaataagaacacactcaagaacataaataaaactcaagaacactggaaacttaaagaacacactcaagaacatatatagaaatatattataatatcattagaaacttaacaagctaaccaataaccttttgagagggctactcaaattctccaaaggaaagtacataatattcttcacactcttgcttctaacccattcactctatttataattaaaagccctaatcaacttactaactaattactaatatggcccttctaattaatattctactactaaacctgctatttccataaataggggtcttacgttggagcacggaggtatttttgagt

SEQ ID NO: 68035 - DNA, 960 bp, Cucumis sativus
  Intron number 4 from transcript Cucsa.292330.1 (locus Cucs a.292330) derived from phytozome v7.0 (chr-ID scaffold0277 5; pos 36943 to 37902)
gcaaatcaagttttattattcttttacatcacaaggtttggaatatgtacactagtctatatgcttttagggtatgaaatttatttcctaatgtgcttttccattttctcatattggattctcaatccaacatgtatcttatttattttcttgcttttgttttcctgtacttgatttctgatgtcgtctatgagatgtagaattattatgttggtcttaagtgcttgttaattcttattaagaatgttcttcttattcttctttatatatatatatatatatatattcttttttttttccccactattttcattcttctctaaaatattatttgacataaaagtcagatgaagtcattttctcatctgtataaattacatggggaaagattggactgaggctgagctatacttcaaaaatgaagaaaaagggaccaagggtttaaactgaactgaaccgaccaaaactggccaagagtggttaggttaaaaatctgaaaccgaggtatatttggtgttagttgtttcatcatgccttaaaaccgacaagttcagtttgattcatggttctgtccaaaatcgaattgtgaacactcctagtttctactacttttttcacatctggtatctgacaagatttttacataaatatactgtacttatcgggtcttttccatcttatctcattatttcattagtcattttccattagttttttctttttggtactaattttttaccctggacttgtccgttccctagctaagtttgctactgtttgctacaatgctgtcaattgatgccctaatactactgaaatggaaattgaaaattaatatttttcccacttggcatctccatttataaatgttgtaccgcatctatttttgttttatatctctttccgtctggtgtataatacggtggtaaattttctcaggtaaccaacagtggtgagacc

SEQ ID NO: 68036 - DNA, 473 bp, Cucumis sativus
  Intron number 2 from transcript Cucsa.219230.1 (locus Cucs a.219230) derived from phytozome v7.0 (chr-ID scaffold0165 8; pos 1094088 to 1094560 reverse strand)
tccgtagcaacgccaaggaaattggattcatcaaggtgaaaattttactttttatctatctgatcactaattattttgaactatatccacatcaaagttttttgattgtcttctgagttctgaccccttgtatctcaactcttcttgcagtatcgctaaatggccaattttttgtctctcactagaggtgtaacggatggattatgttagcatcattttcatatatatatataagacagaaccttgaacttccattttatgtccctagtttcttttttttttttaacttgaaccttgagttgattgttgaactttaggcccctatggtgttttactaattttgaagatctaaattgatgtttcttcattcggtatcgtgctctcttacctccttttcttttactcctggtaacatctccctattagtatggattaaagtatatagatcaagttaaccatcgtccttatccttt

SEQ ID NO: 68037 - DNA, 851 bp, Cucumis sativus
  Intron number 1 from transcript Cucsa.355910.2 (locus Cucs a.355910) derived from phytozome v7.0 (chr-ID scaffold0357 7; pos 550996 to 551846 reverse strand)
ttcctcagtacaccctcgttggaattgatactcaggttaatcacgtatatgggatctttctcctttttcgtttttctttcgagaaactgaagcgcaggaataggtttttcagtcattctatactatgttactagctgctgtttctgctactgggtgaaatttgtacggcaatgtttgattctattgaatttgaatgttgatttgtgatgaacaaatagttgattcaatgttacgtttacttctccatttccaccatttttgtctgaaattggttgaaatctccatggtttatgtttccctcgtgaactcctatcattttagctgaaaactggccaaaacaactgttcatctttggacttgtcggtagaaaaagccacattatgagctgaattcatggatttttagcggctaggacttatgatagtatatttattgatattgttttcaatgaatgatatcataagctgatatcgttatatcatactggattcccatcattttgagaatgaattgcccaaaaccactgcatactttttgtttggctagctgaaaagccgcaccatgagctgattttataattttaaacaccaatacttataattttctcgactaaattctgtttcaatgtttatttctgctgctagtcagtgttattctcaccagtcaccatgaatgaagttttggtttttgccttttgatcattcaatggtaggctaaattatattctaaaatggaacattgaaatttgaaatagcttcagttttattttgataaatttggagtaaatattgcgctcaaataatttgatttaatttatttagagtgactaattagttgtttctcttctaaag

SEQ ID NO: 68038 - DNA, 876 bp, Cucumis sativus
  Intron number 3 from transcript Cucsa.303850.1 (locus Cucs a.303850) derived from phytozome v7.0 (chr-ID scaffold0295 1; pos 1653262 to 1654137)
ctaacaccctcctcaaccacgcctatcaggtatacgaaaattttcattcatcatctcaattactttcactcttctcacaatgtggggtatagatccaatcaataactataaatttagtagattcttgctcaaatcagtaaatctcaagctcttattatctacctcacacccttattgaaaattattacatattttactgtgctcgttttgattatttaatgcctcactttgaagtttattctattacatggttaggttaagagatttattgtttgtcaaatataacatgtagtatgggtaaaaaggaagacataacttatgggtttaagtttattttggtctttataaatatttttttttgttagtttcaacttttcttcattttaatctatatgtttttaaaatgcttctttaggttcttacactacaacattcaaatctatctatctacaattatacttacaaagaagcaattatggtataaaaaattagaagtacaaaataaaatataattccaacttacaaattataaaaattacagaaacgatggcgttccataaaaacggaaatttgttaatcaagtagatggcaatgttgggcgcacatttaggatcgcggctttaagccatacacgtagacttagattttgtgattccgtgatcacaaccgtccattctatacgatcacgaaaattaacgtagtcatgggagtagggtgtcggtggcactgttcaccttacctcaatacccttgtatttaaactgtatttacaactatacccttgaattaagatgaaatctgacggttatctaacaatcgatctgtttcaccggtaatctcagctgttcgattttgcggacaaatacaggggcaaata

SEQ ID NO: 68039 - DNA, 704 bp, Cucumis sativus
  Intron number 2 from transcript Cucsa.302260.1 (locus Cucs a.302260) derived from phytozome v7.0 (chr-ID scaffold0295 1; pos 443748 to 444451)
aaggtactcttaccttcatattttcactttcttttcgtttttcgattacttccgaactttacttcactattattcctttctcctcgatttctatgttgatttgtggtctcggttgagatcggagaacatcgactgttgcagggtgtttattttatgcggggatagtctagttgagtattcccttttagagatgaatagaggaaagctgagtaaagataagattttattagaataaggctcttgcataacgtttgctgtttctttgtaagtttttaatgttgtaggcgttttaagtatagcgtctgtagaacgatcttcacctattccttacaaggtaggtaaagagcaaggtcaacgctttctcttgttgtgtgaatatgcatagattatagcgtgtgactggagatacctttattcaaatcactcaatttttaactagataacctttttgtgaaagtagttcattcttcatgcgaatttggaattgttgctacccaaaggttataccgttgttgaatttttggatttcaagtatatttttttactctttttgttttttaaattagtttctgcttgtaaatccaagatgtttttgccattacttctaaaattgtgcattcaactatcttggggaaattttgaagaattacatcatttttattcacacagggttaccgggtaatttctgtagacattccacgtgt

SEQ ID NO: 68040 - DNA, 260 bp, Cucumis sativus
  Intron number 3 from transcript Cucsa.240780.1 (locus Cucs a.240780) derived from phytozome v7.0 (chr-ID scaffold0204 7; pos 936008 to 936267 reverse strand)
ggaaacaagtgggtgatccaatttattttgattttactggctaatggaatattttattctgctaaattggttaaatggcgttactatctggtctctcatggttttatgaggtttcttttgagttctgttggatggttaataatttttctttgataccctctcttctttcttggttatttgttttattttcttttttctgacacttactttgctgaatgaaattaggttgaaattaagagaaccattcctaaagggcaagg

SEQ ID NO: 68041 - DNA, 479 bp, Cucumis sativus
  Intron number 1 from transcript Cucsa.264080.1 (locus Cucs a.264080) derived from phytozome v7.0 (chr-ID scaffold0233 0; pos 195457 to 195935)
aagaggaagtgcaaaccaccttggtggggacaacggttagttacatgggagggagttaaaagggaaagaaggaagggaagaaagaggtggttaatcagttttctgaaagtggaagctgtagttcctggagagcaggaatgcagaagttgttcagttactaaaaccttagaaagttatttcctttatcgtgatttaccttttatgtttagatgttttatttcgaacttggtatttgtctgtttgttttgaattctggttctgttttgttaatttcagtgttgaagtttgtgtttaagtgtgctttgaagactgtttaagtgtggatactttgtaaaagttatgctgtttaatgaaaatatagaacacacatctggtgttctatcaatttcatggacatatcaagaggacccaataaaggaaaaagtaaaggttaccagaaatgaactttctaaaacttccatccaaactttgcacaggag

SEQ ID NO: 68042 - DNA, 304 bp, Cucumis sativus
  Intron number 1 from transcript Cucsa.292590.7 (locus Cucs a.292590) derived from phytozome v7.0 (chr-ID scaffold0277 9; pos 79884 to 80187)
tagtttcgcacatccgggagtaatctctgaaaaaggtaaagaaaactgagcaaaatccatggcttccttatcagtggccaccattttatcccgtctctctattttggggtttgcatcaaagtcttcttttaaaaaccaattattgatctcctccaatagtagtagaatcgaggttcaaaacagctggtttttttcttttttttgttgctggttttcttttacaatgggcctatctaccctttttgattgagtttttagaattcgttttttcttgcagagattgaatcgattgagacccttttcc

SEQ ID NO: 68043 - DNA, 609 bp, Cucumis sativus
  Intron number 1 from transcript Cucsa.219060.1 (locus Cucs a.219060) derived from phytozome v7.0 (chr-ID scaffold0165 8; pos 925955 to 926563)
ctccacggtcgactccagaacagagctgctaaaaagtggtgcattcttctctaaactacctttcttcttcttctttcatcaattgtgtgttttgttttcgaaaaattgttatttgttccttagttttcttccctaaatattcattttcttcttcttctgaagtctgattttgggagaagaagcatccaacttagtttcatctgttttcttttgctcttttcaagaacatcccaaatttatttatttaaaaaaaatcatttcaaatttatcaaaatttaatcttttctttatttctatcaataaattcgaaatgatttttggtgaattattcatcactttgctaatgggattcctgattttttctttacaaaatttgaaataattataatgtacttgtaattttttaaataaataattatattgaatagtgtttactaatataaaatatttgtaagtattgtttaattatagatagatttttaataatatgtttagtgtttaataataagtacaatttcctgtaattagtggcattttctttacaaatcaaattattatgtgttttgtactttagggtacctcaagaagtctgaagagaacaaagaaaag

SEQ ID NO: 68044 - DNA, 822 bp, Cucumis sativus
  Intron number 3 from transcript Cucsa.252260.1 (locus Cucs a.252260) derived from phytozome v7.0 (chr-ID scaffold0222 9; pos 1192451 to 1193272 reverse strand)
agtgccttcgaagggccaagtttcttggtcatcgggtatggacgtgccctttgttttttattttatctaatccaatggccccattctagtaatcttgcatttgaataatttaaaaaggttactgatccaatgagaagtgaaaagttaaagtttaatgctccgggttaattgcaattatccaatcaatgagttcattcgtttatctctttatttgccatttgggtattgtactgcatcaagcctatagttgaattcatgcaggacataaccttactgtacagctatgatcttattattcatataaatcagccaaaatattactataggaattgaacaatcgaccgtaacatagaattttgtatgaaaaactgaactgccttttgctatctgcctcccatgatcatgttttatatccaatggaaaagtacttccagtggctaggttgttgcgattgatgtagaaaaggattattcaaatcgatgtaaggtcattaatgctaataattttctgtataaagttcacaatattaggtgcaaaatggaaattcctattcatttcacccgcacttcaaagttagaaatgatttgaagattaattgacgcacttcatcttgttgactgtgatattaggcttcctcttcttttttgctgaattaggttatagttctcatctgttttgacttaaaattttgtgctcacatttcaaattagttgtacccagttacaggaaggtgtagaggattcgacattggttctttgacacttgttaaacttgaatcctatcaacttcttgcagcaacataacaccgagcttattatcgat

SEQ ID NO: 68045 - DNA, 698 bp, Cucumis sativus
  Intron number 2 from transcript Cucsa.319770.1 (locus Cucs a.319770) derived from phytozome v7.0 (chr-ID scaffold0307 8; pos 452260 to 452957)
ttaacaccgccgaaaggtttttctctttttctcaatgctttttttacttgggatttctattgcttactccacttccttgaagaagcttcaatcgctgcttactttttcatcgcgttgatttgttttgcttctctttgcttttggttgttactgtaaggtgattggttcaaattttaagggactgtgataaatgggttctttttcttgttatcttcaggattatcttatcatggctgatgaatattagtttgtaatttgtatttgattgcagagaggactttctgtatttacaatttggttttatttatgtatttattttctgtatttataatttggttttatattttttattttttttctgcatcactttctttggcaatgaatctgagttaatcacatgtgagcttatcagatttctcctctatactctttctttctgagattttttagtacaacctggtattaaaccttcaaccttgattttgagaattcattcaactttcatgtatatatacacattcatttgttctatgctaatgcttccacttgaaggctaccttcgaatgatgtcccctttatgttttatgttagtgcttccacctgaaggctacctttgggtattgtttggatttggtttttctgtatatctttgatacagcttggacgtttaattctttgcaggctagttagatcagctc

SEQ ID NO: 68046 - DNA, 825 bp, Cucumis sativus
  Intron number 3 from transcript Cucsa.319770.1 (locus Cucs a.319770) derived from phytozome v7.0 (chr-ID scaffold0307 8; pos 452961 to 453785)
caaagggtgcaaacataatactaattcaggtatacaaattagaaactaaacctatgaacttttccctttgaaatgttaagttttttgcattgatgcttgttttattaattatgtattttagaatttagttatagagcattgctaaaaaatttcataaaaattaaagctgtctcgtatgagaaatggatgaagaataaaactaggaaagccgcttgaagcatgccctctttgcaaattaccagtgaataaacaaatggtccaaaaatttgacatcatttttaaatcaaggaggctatgagaaatagggatttcctccctttaagacatcacacacaattgatcttttcaaatcaagaggccaaagtaacactctaccttggactgaatgctttaaaaggataaaaagaccagtatttaactggaagcggtttaattagaaatatttatgagaaaatacatcctagacctcaaaaactgtgaagaaatcatccagaaaagttgcttccaaacaaaggcattctattaaacttgtacaacctagaattgaagcaaggagccaatgaacctatcaaacaacacaattcaaagccaatatgttattaaaggaaaaggacatatatgagagcctgaaacaaatggtactgcagcagatgcataaattcagagagtgtctggttgggttttatcatgttgctgtcttcttgctcatctattgtaaagatcctgacagacgagataggtgattctttttcgtcgtactcaactgatagcaactactgtatttccccaggaactgtttgaaggttactacttctgccaggcaca

SEQ ID NO: 68047 - DNA, 520 bp, Cucumis sativus
  Intron number 2 from transcript Cucsa.219850.1 (locus Cucs a.219850) derived from phytozome v7.0 (chr-ID scaffold0165 8; pos 1445352 to 1445871 reverse strand)
attcaagctcatgtaagtatcacatattcatatctcttctttacattttctctttctttttcttcctaaccattctctctttgtttcttctttctgagacgtgtttataaatcttgttttggaaactatgagatataaatttcatgagtttcttatgatatctagagctataaattttcaattggaagcctaatgaatctgtaaattaatattttaaaatatatatctaaaacttaaatttgaaaattcaagctacattcaatgcaaaattaaacatttaaagatctagctataagacatttttagaatataatgaactatgaaaacactcttgaaagatattaggagtactcaaagtatatatacaacatgacactgaaaaaatcaaacagtatcattgtaataattttggtacatttctaatacatttgaaaattttattacattaaaacaaaattgagaagtaataggcattttattatttatttcttaaaagacaagaaactaaacaagaacggag

SEQ ID NO: 68048 - DNA, 898 bp, Cucumis sativus
  Intron number 1 from transcript Cucsa.326140.1 (locus Cucs a.326140) derived from phytozome v7.0 (chr-ID scaffold0313 2; pos 376662 to 377559)
atcgtaaaccaactaataataacgtctctcctgtttccccaattggatcttcctgtaaggcaagttctctgcttttctctatttctattcaactgttatacttcacatttccttctctaatctacactttgattttctttaattcttttgttatattataaatttgtttcacagttaatgaagttttcactttctgcttaatttttctcaaatttttaccttcattgacttactctacgtcattttctggtctatggttaaaaaaaaaaaattaaaaatgtcttattatataaatttaaattttaataacaaaaataaaaaacaaaatagtcatccaatgatgaaagtcaaaatagtgacaaatctagtatcatgtaaattataatatatagaagtctattaataatagacttctataaacgataagatttcgttatatttgtaatttttttaataacactatactactaaaattatccaattgcaattatcctatattcttcaaaattttgtaagaaactaatgtaacgtgaatatgaataattaatcaataagaaaaaaaatgaaagatcttgaatagcaattttctttgggaatagtggttgaaacaaaaaagaaaaggcatagaataaaggaagatgggggtgttggtggagtgattttgatagagattagagtagactatgaagttgataaaggcaccacaacaatgtgttgggtggtgttaattcaaggacgtaccacctaccatgaaactcaagagattgatctaagttttcaaatttgcattaataaaatgaaggatttgaatttaaaattatttaggttgtaaatgagttatgaatagaaatctaaaagtgaagactaatggatctctccttcttacagacactcacta

SEQ ID NO: 68049 - DNA, 669 bp, Cucumis sativus
  Intron number 1 from transcript Cucsa.249300.1 (locus Cucs a.249300) derived from phytozome v7.0 (chr-ID scaffold0220 9; pos 31454 to 32122 reverse strand)
cgccttctcttctctctttctccattgattttcaggtatccactcctttgatcttcttttctctttctgattttttttttccaactcagctcccaaccgttgattccgttttctgttgccttcaatcttgctctacttcattagatctttctatccaatatagtttctctttgattttccatttttatacttgtaacggtacacttttgggttaggtttagtgcaatctaggcccttcacttcgattcctacttttcccttttcagctttttttggcgtttcaatctgagttttctatcacactaaatatttttttttatttgatgaattcatgctgtatctatagaaatgatgtttttcttttaagatttgagtttctactttttttaattgggttttttgaaattttgttttccctgccggaattttaacttcttgtgtgtcggtgaaatattgctgatgaatatggagtttattgtgatttttgtctaccctgacggatttctatatggttcaatggtgcctttgaattggcagatcaattgacgatttgtgaaattaattatttatgaagatttttgcttaatgcatagtttttgtttgtgcaaggtgaaccatatcatattgttgagttttttttgtaggtttattaatagcgagggagagaga

SEQ ID NO: 68050 - DNA, 600 bp, Cucumis sativus
  Intron number 1 from transcript Cucsa.254990.1 (locus Cucs a.254990) derived from phytozome v7.0 (chr-ID scaffold0222 9; pos 3150801 to 3151400 reverse strand)
tcattctcaagtataaaagctttaacttttctaaatttttatgattaatgttgttgatttcatatatatattttctacaaactaaacattcttaattaattaattaatcaaaaatcaaaagatgaggtttccaaaatgtcaaagatacccttatcctccattattatattcttctttgctttgaattgataaattacaccaaagtcaaataaactacaaacccaagtaatctcaaaatctccacatttatataaatccatcatttccctaaccaatacccccatcatacacagctttaataacctctctggttattaaataattcaaaccaaagatgtccatcgattgcaaaggtacgaaagtcagacttgttgtttcatagttgcttttagttatttgtgtgagttttatctatacattttgtttctcatcagaaatttttataacaaataggacatgtttaattatattttgaagatggaaggggaggtaattttattttattttccttactcaaatggttaattaattatttatttgttcattggccattaatacaggtaagagctcttggcctgagttggttggagtttcgggtaa

SEQ ID NO: 68051 - DNA, 829 bp, Cucumis sativus
  Intron number 3 from transcript Cucsa.372750.1 (locus Cucs a.372750) derived from phytozome v7.0 (chr-ID scaffold0370 9; pos 4571 to 5399 reverse strand)
gctctcattttcaggtatttttatttttaatatataatttagtgttcattttccactatatttccaaaattatggctattctaatttagttttttccaaacatatttttattttcttgtctattttccgcatcccatatactttggacaatattatatttaattattattcactgtgcctttcgaaactcaacaactgtcccctattttaattattgatatgcatccattacatatttaatactttaatttagtagcttaagatttaatttttacttagtgagatttaattaaaatcgccgcctaattcaattaatttaatttaaataactgcctcctaatttaatccttttgcttaattttgtcattaaatataatccccattttaaaaaaaaagctaattagatattattcctaatttaacttattctatatattcaattttttttatgtatcaaaataaaaggaatctaaattagtaattagtgcttttgttttccataacaactttaaacctaacatttaagattgtgtttgttttttttccgcgagttatttattatcacctttgtcgaagaaagaatggcaatgagtttgctagctattttcttttttaaatgaagttttaaaattttaaaacttagtttaaaagatagtaaatattgaaaggatatcgaagatggaagtttgatgttaaaaaactatgaaatgggatttattaatcttttgtttaacaattttggatcgacacttcaaaattacgagatttaaaacatttcttaaacgattaatcaggctagaaagtgtgaacttcaagaagatccgtagca

SEQ ID NO: 68052 - DNA, 881 bp, Cucumis sativus
  Intron number 1 from transcript Cucsa.292680.1 (locus Cucs a.292680) derived from phytozome v7.0 (chr-ID scaffold0277 9; pos 255357 to 256237)
ttgagaaagaagaggagtacataatcagattgaaggtatttatatatatatatgtgtctctctctcatttcttttttaattcttgtgcattctacattctgcatatcttttgatttcattttcttgattacaatctcgttaaagaattctagttttcattaattgtctaagcatttttactacaacactgtagaatgtactctcaagcgttgaataatttaacgtcacagactaatccactgacacctaacgtagcttcacaactaaaataacggcgtctggcttttgctttgcgaggtgaaaagacatcccaccgtaaacttttgaaaagggatagtttaattattttgttttacctatcgaaatcaaagataacttataacgcactgttctttgatgttttcttttgtaatatctggtttcttcctttttgactattggaattagaatagagagttatttggcccacgttgcaacgactttgccacttacttcagtatctgggatggatgtacctgtacatgaccatgcctgccggctattccttatcgttttgtgtgtttggcggccatattttatgcttacaatcatcagcctgtaatattttattggttttgggatcttcagttttacacatcatccaagctctgaaactcacagttgttcactgtgccaaatgcaatgatagtttgtttaatgtgacacaatattcgttttgacgatgctctttttgtctgtttgttttaaatttgagttggaccaagagaaaattttggttgcatattgtatgctgattgaaatgctgacaatgttgtcttggtttttggtggggaattaatttaacaggagttacaagatagagtagctacagcaaaagattt

SEQ ID NO: 68053 - DNA, 672 bp, Cucumis sativus
  Intron number 1 from transcript Cucsa.272220.1 (locus Cucs a.272220) derived from phytozome v7.0 (chr-ID scaffold0250 0; pos 881790 to 882461 reverse strand)
tggcggtggatttattcccgaagtgcagccgtcaagtaagtgtgcatgtccttaccctgttcatccgaacatatcgaacgcacgaattcgattaggtggtcaggtagagacgtagaaaaaattggtttatggtttagtgtttatcgtgaggatgtatttagggtagctttggacgacatatattttcgttgcgcatagcttgcaacaaaaactgtcaagtatcttgaactgttaactttttcgacggttaatttgatctgaagatggttggttttttcttttttctttttatggacgaataacgttgagatagagtgaaataatacgtgggcacccagaggttggaacaaattgtttttcttctattcactatggaatatcatctttcaaactgcttaatgaaaaatagctattgtggaatgcggatgatggcaagcttttgttttacatgcggctctttctcatttgtactgaaatttctactgatggaaggacgtcagctaacaataaagtaacattgctcacttttttttaaaaaaaaatttaaatatatatacgtatttgcttttttatgctttgtgttttatggaccagtaacttcttctgaggaatattaagggttctctagtgtctacagatacagagtcatctcttccagggccaaacaacaaa

SEQ ID NO: 68054 - DNA, 901 bp, Cucumis sativus
  Intron number 4 from transcript Cucsa.316920.1 (locus Cucs a.316920) derived from phytozome v7.0 (chr-ID scaffold0305 0; pos 143184 to 144084)
tggtgttagactacattcaaacaggtccttgcaaggtaatatacaagtcaatctctttattaagacacttcatctttccatatttgtatttggatgaatatatttgaaaattttaattattagtgcattaagcataaattacatatttataaaggtggttggcttgctttacccttacctgatgcatggaataacttttcccaacgtatttgattttaagagtgttattccaatatgctcgtcttactagtcaactcccttttcttaagaaatatatctcatcattgcttctatatcactaattttttacatgatttctaaacaaatgattttttcttggcacagtctgggttcagcttcatttaacttctggtttgtctattttcttagagttaagaaatcaaattgtgttggctatgtgcaatgtgttcaaatgaactatttaggtaaaagtgcatcgatttgaactttcagtattgtttattgaggaacattgctgtagcttcgttgatccttgaagttcacagaaataacatgggagtcaactgctgcgccaataatccgtttcttctcccatgtcccttctgtattttatggtttcagtaattattcttatttatggcatgcacataaagttcagaagcaactagtgtaaatctcttgcagacttaagagtaatggagttgacctgttatataccagcaacgtttttcctccagttttcattaaaagtcaagtggtgaaagtgtataggaagctgttctttttgttgcttcatgaagtacttcatttgattctttttgtcatggcttgatttcctctattctttgttttcttattaattatataaaaaacaaaccatgcagacttcactgacagcagctggttgctacatttgtcc

SEQ ID NO: 68055 - DNA, 461 bp, Cucumis sativus
  Intron number 2 from transcript Cucsa.284250.1 (locus Cucs a.284250) derived from phytozome v7.0 (chr-ID scaffold0265 3; pos 1081843 to 1082303)
gtgaaaccgtcctgaaagaggtattctattttccccccctcttttttatgaatcttttggttaatgtctttctcttatgcggtgaagaatcacaatgagattttttttcttgatatctatgactgtatgggccattgggcagcttggggatttcttttaaacagttcagtaaaggtgtatagtaccttgacaacttaatgtaaactgaaattgtttttgatgataagtttatgtataatataactttgggatcagtgataaaagggaaagaaattcgtttgaaaatccccttgcaaaattcagcatgtctaggcttatgaatgatgacacaagtacttattcaaggtcatctgtaaattctcttgtgtatcctctaaactaagattattcttttggaatttgattatgatctggttggaaagctagattgagctggaagaccctttagagaacgttggggt

SEQ ID NO: 68056 - DNA, 846 bp, Cucumis sativus
  Intron number 1 from transcript Cucsa.319340.1 (locus Cucs a.319340) derived from phytozome v7.0 (chr-ID scaffold0307 8; pos 45584 to 46429 reverse strand)
ggcaattttcagtccgacgaggaccccactcagaggttaacaattttcttcctctctctctctctgtattttcgttctatctatgagaatgtttgctggttcgaggttttactgaagtttttaaagatatactttgcgtgttcgattgagtattgcaatcttctttttcctataatggggagaagaaatacgtctttgaatagtagtgcatttgagtgaatggaatgctttctgcttaatcagggtagcacaccaactttgattacatatctgagtggtttctactgtgctaattactatttgggcggtttgttaaatctttggaagttggattttctttaatgtctgatgattagtacatatttgctgtgaaatttgatgccaggctcggtatttttggtctcttgtgtacctcactagtgattataggttcatgtgccatgttctattctttggtttaacatatttggtgaaatctttttcagtttttgagcggaagataccttatataggatcaaatgtttgtgttttttgtgaaatataatcttccattatgtttatgaatatccatttcatgtgtatgttttaacatatctatgttcaccatcttttttggttgtaattcatgagatacaaatcagtgttcttgattttattttctcttatattgttttggatctgttggcttccttctaggcgtttgtttattttattttctacttctcttccttcactttttttttttaatttctttttctttgtgtaatatgctctgtattgtttacatggactttcattcttgatgctgcagatctaggagaaaaaaaaattcttctagtggagata

SEQ ID NO: 68057 - DNA, 634 bp, Cucumis sativus
  Intron number 2 from transcript Cucsa.392160.1 (locus Cucs a.392160) derived from phytozome v7.0 (chr-ID scaffold0406 2; pos 403111 to 403744)
taccacaatccaaccatccacattcacgagctctggtatttcatttctccattaattatgtttacaagttgatatctctgtttttactttaattaatcttgctaattatttgatttttttttaatttatagaattttaattaatattttcactttttttttctttcaagaaacactttaaattttagttagattctaaaaatgagaacagattgtttttttttttttaagttaagaaaatggataattggttatagtttgtgtcttaaatcacccctttcgttgttctaaaaaaaatatgttgaaaatatcgaattagctctgggaggataatttcagattcacaaaaaagaaagcaagtttttataaatttcttattttcgttctcataacatttgacatagattaagaaaagaacgataaacaataatcaaatagtatatgatcattatatatcgtcaatcgtgattttgaatgtgggttctcaacatttcctattttgattctgaatttgggcctttaataaaatttaactagagttgagggttttgtgagtatttgcaatagttctttgttaaaacttgtgttagtcattaatgtgatggctgtggtttatgcagttttggaagactgag

SEQ ID NO: 68058 - DNA, 755 bp, Cucumis sativus
  Intron number 1 from transcript Cucsa.340620.1 (locus Cucs a.340620) derived from phytozome v7.0 (chr-ID scaffold0335 6; pos 3029654 to 3030408 reverse strand)
ctgccgtctgcaccttccatcatcaggtgagtgaggttccttattcttttctgcctttaattttgttggcttcttctgtaattctcttgtgttcttgttgttgctcttcagctttcctctatttttggaagtgatcgtggcccagtgtgccaattgtttagttcgaatctcaaaaaaaaaaaagtgatggaatagactatttgatttagattaaagctattatgttgtggggtttacatcataatttctattgtaggattaatcgagaaactttataatggttaactcattacctctcttgtcttcagcttattattgttgttttttatatatcggtggaattccacctttcaccaactctcaacctaaaaggtgtcgtgtgaatctataggaataatctagggcgaacaggggagttgagtattttctatttgtggagttaaatctattatacacagacatttgctgaactactaaggatatgaaaacccttggctctgtcaacatggcttatagaaagtatctgaaaacgatcaccactttgcaatttcaacaataagtgtagattctttttctactgttgttatttagtcgatttgatcgttgtacaatatttgcagtaacgtgcttgatttttagctattttggagcagttcacaaggagatattgcttaagtatttgtttgttataagaatctacccgatcctttacaattgttattcaatatattgcgtactccgttgacagcaggtct

SEQ ID NO: 68059 - DNA, 290 bp, Cucumis sativus
  Intron number 1 from transcript Cucsa.327710.2 (locus Cucs a.327710) derived from phytozome v7.0 (chr-ID scaffold0315 9; pos 62472 to 62761 reverse strand)
tttctccattctcttctctccgcctttaatctcaggtttgttcttccatttttccttcttcttcttcttcttcttcttcttcttctttgattcgattccattcgattttatgtttttgttttttttaattccttgttttttgttttctgcttctttcgaggtacttcttttttttttttaaataattgtttcttcatattttactttacatctttaactttttgttcctgattctttttcttttctgggttctagtttttgaattaggtttgtttagtggtggtgttaga

SEQ ID NO: 68060 - DNA, 599 bp, Cucumis sativus
  Intron number 1 from transcript Cucsa.218770.1 (locus Cucs a.218770) derived from phytozome v7.0 (chr-ID scaffold0165 8; pos 747255 to 747853 reverse strand)
gtagactgattcgtggtgtgtcttcatcaagagaggtatattttgatattatctattcaaagcatcctttggtgtacctttttagtagtacaataagtggaccacatctcagagtctcagactatcttagtacaagttccaggttctagggcgatacaaaaaacaaactctattaagaaaagcacaatggtgaaattagcaatataaattaattttgcaagtgcagtaggcctttgattttctcattttattccatttatcaatcaagcataattttggttcttttgaaaaatcacatggtttaaaattcctgaggctgtttttcttgtcttcaatggatctttatctagaatgcctgtacaaatgctcctttcctcaggtccttcgcttgttttttcctagtattggctttcattgttgcctttgagacttgaaagcaatttgatcatttgcacttaaaatcatgtgtctctggttgataaaaacttggatgattttgtggagtacccatttgatggaaccctaactttttttacctatgcttgctatgaattgcaattgcagtgtgctagacagggttttgccttaggattgactgc

SEQ ID NO: 68061 - DNA, 612 bp, Cucumis sativus
  Intron number 1 from transcript Cucsa.272270.1 (locus Cucs a.272270) derived from phytozome v7.0 (chr-ID scaffold0250 0; pos 908955 to 909566 reverse strand)
tgagctccttaaagctcattggccaagctgatttagtgagtttaattatttttacatcttctattttctggagatacagatgcaatttcatagcttctcttttaatattatctgtataatgtccttccaatttcatgggatgctttgatggttgagatatagacatatagtatagataagcctgggaaatgacgttatgggcattaacctctggttgcttccatttccttttaatataagtagcatgaccggtattcaaacattattgacacattgctttcgggacagctgaatgtctgaaagatttctgtactccatcagacttctattccttgggtttattgttattgatgggatacaaatggaaaattgcaatattctattacctgtgtttagttgtaatcatcataggaagttggggtgccctagcttgtttttctaaaatatttgtacttgtagaaccgtagttcttgttctattgtcatcagtaccttcactggtcgccgtatctttttataatttatagttttattgttattttatcttttgttgtaaaatttggggtagctatgaaacacctacttacgtgctcgtaaactctccagagcttgg

SEQ ID NO: 68062 - DNA, 1009 bp, Cucumis sativus
  Intron number 1 from transcript Cucsa.292760.1 (locus Cucs a.292760) derived from phytozome v7.0 (chr-ID scaffold0277 9; pos 358361 to 359369)
gccaaggctgcgtttccttcctgtaagttgtttttgctgatttccttgtttcctcaaattttttgtttcctgatttcttggattcactctggccgtagcaaatgttgttccagtttttacttataatgctcatgtttgtcttattcagtatattccttcgctgaatattttattatgaacttttctagtttgaattttgggggttacagtgatttgattttgctgcatgagtttttttttttttttttttgaatcggtgcactgttgtctcattaaaacgaaaaagagaaagatgtgcactattgtgcagttaatttatttttctttgaagataaaataacttccaatagcttcgcgagcttctgattctcctaaccggccttctcttccatgaaaaatcacatgtattttgtttatgctagtgttgagaaagagggttgggggtattagtggtggtttggttgataagttacaggagacaacataaagctctatgaatgacatatgtgagtaactgaattgattatgagtttattactgcgaagtcgtctgaatgttagtcctttgcatacatgaatctgcaccaattgatcttcttttcagttatcgatcttgatcctttaaacatcaaaacccataatttctttttgatttctgacattgatggtctttccaagtttggataaagtaagcgactttgttgtaccctctctctcgttttcttttatcaagtagaaaatcatctatggatacactggctactactcaaattatgttgaaggttattggcaagacctttccaagatatatgtgggtggagaaattaggatctgttgttatattgttaagttagatctgcttgattatgatttgaaggcttatttaaattttgtttagtaatctttatgacacttaagctttgtgcatgattcttcttcaagttcacactaaagtttcgtaggaaagcttattgtgggaaattgataaaggcttttgtatgtggtaatag

SEQ ID NO: 68063 - DNA, 742 bp, Cucumis sativus
  Intron number 2 from transcript Cucsa.299450.1 (locus Cucs a.299450) derived from phytozome v7.0 (chr-ID scaffold0292 0; pos 33737 to 34478 reverse strand)
tgactgtggaactctcttctccaggtaaattacttaatgtgaatatgcaattcaatataagtttcaaactcaaatcaacgagaactattatttaatcatttccaaatttaaattcctatgattttaaaaatgttaaagtctagtccatagatgcgtgatttggtaaaagactaattattataaatggttttataaagattatacatgtatgaataaattttatcaaacatataccataaaaatcaattgagttttttctaaaccatagaaaccaaataaaaggacagtttttaaaaaaaaacaaaaacaaaaatgaaccaaattttgtaattaagcataataaatgattatttatgggttattgtttaaaatgtctcaactgttgaagtatggtagaagaatataaaaacattattattgttgttacattttgtgaaaagtgggagagagagagaagtaggggataataatgtgggagtatttttgagtatgtagtacagagaaaatttatggggcagtgataaaaatttgtttgtttatgtgttgtattgttttgaactttggcaggagggacagtttcataacccacagagcattttgcaatgccttggctcaggaaagtaccaattttaatagtaacccaactcctaaaattacatcccaccttttcccatctattaatttccctcttaaatttgaacaccaagaccctttttttcccttcctcctcctcctcctcctc

SEQ ID NO: 68064 - DNA, 1004 bp, Cucumis sativus
  Intron number 1 from transcript Cucsa.355580.1 (locus Cucs a.355580) derived from phytozome v7.0 (chr-ID scaffold0357 7; pos 30869 to 31872)
cttttggaatttgtcttgctggtgctcaaggtcaggtgagctttaaccccattaaatccgatacgttatggtgaatttttaattattctctctctcttttttttaggtttattgttcctgtagtttagagaaaactaaagtttagtcccataatttggtaaagtgtcttaaatagtttcgattttttattctaactctaaacaatattatcaactgtagaactatatgaactaaaatttaaatttctctcaaataatatgtaatttacctataattttgtgagtgaatgatgttggagtttagttatactagcaagttgaacacttttgtttaaagtttagtaagtaattatttaatattaaaagaagttattatgaataacaaaaaagaaattattttaacacttgacaaaaataaacttaaatgattacaaataatatgatagattttgatgtatttataaaatatatatatatatattttaccatattaaatggatgaataagaccttccaatgtattgtgtctattagatttataagaatggttccttttgatcaagattttttttttagtttagcatttaaactttgttgttgcttacctttcaatctgaaaaggtaaaacacatttgaaaaaaaaagcaaaagtttgaaactactttcttttagataattgcattacattttaaagcttagacatgatagttgtcactatttatgttttagtttttagtttttaataaataagtatataaaccatatgactcagtacctaagagtttcttgttcatgtaatgtacgttttgaaagtgtttcaaaaaataaaatctttgtttagggaagatgaaaattgttcaaaatattcagcaaagcacaattttgaaaaataaaaaggttaaaagttaggaatttaaattgttattagttagggtaaatttaaactttccattcatattattcttgacaaggtgtttggagggatagttggcgggaaagtcacggc

SEQ ID NO: 68065 - DNA, 789 bp, Cucumis sativus
  Intron number 1 from transcript Cucsa.228070.1 (locus Cucs a.228070) derived from phytozome v7.0 (chr-ID scaffold0193 3; pos 68156 to 68944 reverse strand)
gcttcaaacaagcgaattgctaccgtaacatttctttctcagttccctcgtggaggattatttaaaatttgtatcattttagtgcttccctgttcacctaaccactagtgccttttgattttcatgtatgaacgagaagttcagtttacgttgataatgaatacatctgtaatttataggcactctcagttactgaatctaaactaatcaaactaaaagtatgcagttaataaatttttcttatttacgttcatcccgttttcctctttacagctggttttctcattattcatgggttgttttatgtatttgggtttgctaacctttgatcaattctactgccacaagtgtatgactggttttttcatgtattcagtttattggtctagctttctttcatagatataatgaaaagatactgattctcggaaaaatagaagagacggtcaccagtgatttaatacagtatataatctccagttggagtattctttcctggttcttttcttgtaattatactatcagatcaacctcaattggggaatcgccttcccctagccttagggagtgatttattattattatgattattttacgaatcctgcttgtccttatcaaagaaaggaaattatatcatttactaaatcctttacaatttttattattgttacagctgttcttgtatttgtgacttaattaaattcttactttttttttcttttctttttgattttgcatcttcaatcttttaatttgacaggtcgatcctttgaacaatttgcctctgga

SEQ ID NO: 68066 - DNA, 947 bp, Cucumis sativus
  Intron number 1 from transcript Cucsa.341020.1 (locus Cucs a.341020) derived from phytozome v7.0 (chr-ID scaffold0335 6; pos 3402514 to 3403460 reverse strand)
cctccctcactcatcgctctaacattgacctcaaggtcccattcaactgtctttttttttccctctttcaactacctttattatcattattatttttcttttggtttgcttgtttggattgatatttagggttttaattagaacctcgcgacggaacggaaatattgcgggttttttttttttttttttttttttgtttaagtttagttttggtttgtttagaatccaatggtattcgcctcgtttacttgtaatttccattgctaaactcagttggttgagtggtttagcatgtaaggaattgggtttattctaaaagtttcaaacgaatatgaatccttcctcgatgctctccaatggttttcctgtagtattggttttgatcaacttagtgatgtaaaaagaagagtccagaaagtggaactagagagaagaaagactttgatttggtatttcaatattaaaaattattaatacgatggggcgtttcttagcttgttttatgatggaagccatgtacttggttgatggacacttttttgcagtctaggggcgataatgagtttattggataaggttggctagtgagggctaattcatggcaatggccattaattacttgagccttaaagttatgtctgggtaacgctattctagtggactccaaagaactgtggccttggatgaactgtataagaccttcttcgtgtctgttcatagatgggtctttcatctttgagattacttgtgttctaatattgcttgaaacaatgataatatgggttttattcttctcaattttaaggtttggacaaatagatcccttgattaaaaatctgtctttgttgtaacttcaaaatatcgtgtactcagaaacagcgtgactatctgactaataatatctgcagccatttatttcctttgtgttgcttatgtactcaggataa

SEQ ID NO: 68067 - DNA, 260 bp, Cucumis sativus; identical to SEQ ID NO: 65467
  Intron number 1 from transcript Cucsa.342300.12 (locus Cuc sa.342300) derived from phytozome v7.0 (chr-ID scaffold033 56; pos 4664010 to 4664269)

SEQ ID NO: 68068 - DNA, 556 bp, Cucumis sativus; identical to SEQ ID NO: 65468
  Intron number 2 from transcript Cucsa.342300.12 (locus Cuc sa.342300) derived from phytozome v7.0 (chr-ID scaffold033 56; pos 4664322 to 4664877)

SEQ ID NO: 68069 - DNA, 556 bp, Cucumis sativus
  Intron number 1 from transcript Cucsa.255600.2 (locus Cucs a.255600) derived from phytozome v7.0 (chr-ID scaffold0222 9; pos 3540130 to 3540685)
acttttcttgagttaaaggtttaacctttttttcttttgttgattgtttgctctcatcgcattacctctctttcatgatgctcctgtgtgtttctcttacttttttcatcttctttacctttagtaatcatagaattttcctgcattatgatgtctacttatagtgagttctatttcattttgtcactgcttatggttctcctccccaactctcattatatccttcttctttccatgttatgggtttgcttcatttctcagtatttgttgtttgacaggtatttatggagtagttaaatttgatgggttccaataagctatgctagtaggagtttaggagaaacaattgagtcgactcttctcaactcctaaaccatttcattttttcaaattgattcttgtggtgcaaggttttactgattgggaattgggcgtcctatttttgtaatttgctcaaatttcgagctgcgtgccttctttttgtttatcagaagtggaaatcttttgtttttttcccatcttttattccttctgtttttgcagttcttcaggtgga

SEQ ID NO: 68070 - DNA, 425 bp, Cucumis sativus
  Intron number 1 from transcript Cucsa.350850.1 (locus Cucs a.350850) derived from phytozome v7.0 (chr-ID scaffold0350 4; pos 284272 to 284696)
gtggaaaaaaggaggaagggttttgcttaaaatactcaaaagatttctgttttatttgtgattcaattcaattgaaaaaataaaatatattgatttcattttcatcttcttcttcttcttcttcttccttcccctctgttttgagctatcgccatcattggccattttctacagctttactttctgtaatctccttcttcttctcttgattctgcccaatcaatctctttctttccctaaccttcgtctgggtttttgagaaaaactaaagagggctcggaaaactttgtacccacttccaaattttcgattttcgatctcgcttcactgttctttctctttttctgtaagatttcaacgaacccctttttcttttctttctttcgctatgactgtggagggtcattctgttgctgtagtcggtg

SEQ ID NO: 68071 - DNA, 734 bp, Cucumis sativus
  Intron number 1 from transcript Cucsa.212680.1 (locus Cucs a.212680) derived from phytozome v7.0 (chr-ID scaffold0154 3; pos 471328 to 472061 reverse strand)
cgatccttatctacaatctgcatttcatttactcggtaagaactcacccttttcttgttttattttatttttattctttttcccatcttttacttcctctgcatttgttatctattttgtcgtttgatgatttaagtaatgggcgtgtttctcttgggttaccatgttttgtttttggcagtttcttggggttttgagggtgtgggtgtgtttggttttgtttggttttgtgtgttttttaatgggttttgtttatttttggtgactgcattgttgaattctgttttttgtggcttttaattactgattacaatcaaaacctttgtaagtacgtttgattcttgaagttgtaacgatggttttgctccagggattgttgcatttctattattttggtttgcttgatgtatagagagtcgtgtactcttgtgtaaatcgaatcttcatgacttggaatttgaagtagaaaagtatgttaggcttggctattagatttttttctttccattatcgattctcttgttttatacacatgtatttgatattgttgcatgtatgcataaggattcttggttgttagaaaaaataaacaagagaaagaagaagataaccatgagaaatattgccatgctagtcgtttctttctgtattgcaaggttcttttgatgaaggacaaggaaatctaagaaattatctgctctttctacatgcttacagtacttgcgtaacaatca

SEQ ID NO: 68072 - DNA, 788 bp, Cucumis sativus
  Intron number 1 from transcript Cucsa.312730.1 (locus Cucs a.312730) derived from phytozome v7.0 (chr-ID scaffold0299 5; pos 2059447 to 2060234 reverse strand)
gttggagaggaaatcggaaagaaggtatattacactctactttgaaacaaatgtaaatttaacctccctagaagcatgtgattaacgtgggagaagaaattttccagctctattcaaatttatggccaattagaacttaatattgtgactttattctacgactaacaaggttccttgctgattgattatttagaaaagaagtgaacataaatttatgaagtagtccatatcccatagtttttaagtttttttttttttttccgaatgagcaacaatttaattgattgatgaaatagaggaaaactccaaacacgtccaggtgaatcacgaaaaaactcttcaattggagatttgttgattaaataatatgagctatataataagcgaaagggtccaaactccatagatgttagtcaagtaatttatttctatgcatgtcattttttagctgagatggaagtttctgaacttaaaattaatatataatccttgcactttttaacttcatgttagttctttagcatttagttggtggtataaagaagtgaagtctattatgactcatatatattctgtttgtggcatctattaacgtgtaattggatgtctatatatggttttattacttacaattgttgatcttctggtttccttatcattttggatcaaatccttcttgagtgatgctgtattgttccttggtcaagaacttccatgtcttcgtttggttcttattcttatgaactctgatttgatctttccagtgcaatctgctcagggaaacagtc

SEQ ID NO: 68073 - DNA, 425 bp, Cucumis sativus
  Intron number 1 from transcript Cucsa.307160.1 (locus Cucs a.307160) derived from phytozome v7.0 (chr-ID scaffold0297 7; pos 419593 to 420017)
cgacctccacgacgtcagttctttaggtctgttccggaaattcttcatttcagtacagttatatttattgtgctgctaatcctacttttgttgataatttgtgtttttgccgtatgttctatgtatggagctgcttgagttgcatttctgttgtgtggtttttgtttttcttggattttcgatattctcttttaccactcaaatttcagaagttgctttaatttttgtttttggtcgatattaatcttttttacttcgttacgcgtcgttcatctgcggcagttttatatcgattttcttggctttaagaactggcagatttgcttaatatctgggaaactcgaagttttgatgattgtattggaattttttatttttattttttatgtgcttatgtgtagacattacaaatgaagacgaggaac

SEQ ID NO: 68074 - DNA, 1016 bp, Cucumis sativus
  Intron number 1 from transcript Cucsa.285230.1 (locus Cucs a.285230) derived from phytozome v7.0 (chr-ID scaffold0265 3; pos 1656800 to 1657815)
ttcctgagattcgcaacggccgttcctcctctagggtattgtatttcttctttcttacttctttctttctttttttaattactattctcacttattacttacttcaatgactttaaattaattgatttatgtacttagataagctggtggttaattgtgtggatattagtttgcataatcaagtgttgtgtgctaattttaattagcagctcccaacaggaaggagagtgggttaactattggactttgaatctaattaagtcattcagcatttctcaattataatctccatccccttcaattaaaacttgttcaacagtctgtgcaagtcaatgcaaaacaatgtgttctatattgaatttaacctcatcgttgaaaacaatgttctaacaaaaacacgtggattgtaagtctcatttcaatgacaaagtatagttctttttttcattttttcttgttttcaaatttctatctccatgatttatacaagtagaaaataaagaaaagaaactagagacaaaaggaaacgataaagagtcaatacaaaaatttacataatttactaataataatctaaagggaaagtatcatattgcaaatactaaagcacaagtgagtttatatagtgtaccaagttctttttagagtgtatataaaacagatttgagatatttcaacaataaaattaattgaaaacaatgtgttggaacgctttaaacctattatctaacattttgaatgagcaaacatgcacaaaggcggcaacctaatttgtttataagtattatatgttattgacgatttcaagcatcaaatttagagaagtgtctttaacaaacactctaatttctattagcacctttgcgtttgtattattttactaacgcatgaagtttttgtttaccattaacattttctttgatcgtcgatttcgtttatgtcgcaacaaaatcttatcaattcaaaatgtgtatggtggttgtttaggtatcagcttcaaaggttctacaagagac

SEQ ID NO: 68075 - DNA, 477 bp, Cucumis sativus; identical to SEQ ID NO: 65393
  Intron number 1 from transcript Cucsa.228040.1 (locus Cucs a.228040) derived from phytozome v7.0 (chr-ID scaffold0193 3; pos 42737 to 43213)

SEQ ID NO: 68076 - DNA, 864 bp, Cucumis sativus
  Intron number 1 from transcript Cucsa.288830.1 (locus Cucs a.288830) derived from phytozome v7.0 (chr-ID scaffold0269 8; pos 349931 to 350794)
tttctactcctcttgctcttttcattcagatccaggttccttttctttttctttttttctttttcagatctgttttcttcttattattatttttatgtttttgctctccttctcttttgctgaaatgcgaaattcggcttagtgagttagttatttagttttattgtggttttggtgaatgttctaatgtggctggaaatggaatagctctcttctttgtgattactgattacgcggaagtttgaatttattatttctgctttcttgctgtgatagtgcttgtttaaactggaattttaaattgcggtttggatttggaaatgtgttcttagttaggatagtcgttgaagttatttgatgtttgattctctcgttttgtattatgttatggatgatgttatcaaagataaagtttgaatttattattttccgtttcttgccagtttgaaaattgtctaagctggaatttgaaactgcgtagtgatttggacatgtgttcttagttttaattttgatgatagtgattgaatttttttggtgtgtgattctctcatccagtgttgtgttgtggatggaaaatatctttctttccgttttgttatttccgtttcttgacggttggaaaatatctacatgctgctgtaattttctttttagtgcttgtttaagctggaagttgaaattacgtttggatatggaaatgtgttagtttaaatttgacgatagcgattgaacttttttgatgtctgattctcttattcggtgtaatgttatagaaaagatgatgatttaactgggtgaagatttttctattattttacagaagttttatttatttatttatttttttttttgggtgcaggg

SEQ ID NO: 68077 - DNA, 775 bp, Cucumis sativus
  Intron number 1 from transcript Cucsa.365280.2 (locus Cucs a.365280) derived from phytozome v7.0 (chr-ID scaffold0361 1; pos 2838677 to 2839451)
gcgtacgttgaacgaggttctctctcgatctctctctattcagttcttttttttatttcactgctgagaaattggtagatcacttttggaatcagaaatattttggattttctttccctggttactccaagaatttcttgcatagaattagggattttggttctactcgtcttcagatatgatccttctgtgtttgggttgttcgtgtgttatctatcgatcctttccctatttcccttagctttatgcatttcatgattttgatttccattttgggcctagtaggttagatccaaggaacattcttctcattgcatatctctttgtctaatttctttatgaattttgtgttgccaaatatcaatttgaaaaaccgtacacagaagatgaaaccacagaaatggaaaggaaataaacctaggtcccgaatttaataatgaagaggggaaaaaccgtcgaattccagttggagaggtagttgttctacgacctaatggaatgacgggaaaatagagatatacgagtttgggaaatttattgtcatttgatatgttagataagatacatagcttgatggttttattatgttgtatgagttgaattcttatttcgttaacttaaattttgaattttgttgtgccacttttacgagctgttactgatactttaaagatgaagggatttagttatttctttgtgtggtgacagagattttctaacgagttctacactgtttatcaatttatggttttggtaggatataaaggccaggaaa

SEQ ID NO: 68078 - DNA, 327 bp, Cucumis sativus
  Intron number 1 from transcript Cucsa.285630.1 (locus Cucs a.285630) derived from phytozome v7.0 (chr-ID scaffold0265 3; pos 1946276 to 1946602)
ccagcaggttcgttcaagttgaatcagtttatctattatcgaatgctgtttacttcctctagtcagttttgtatttgcttatcctggaatagtagaaatgcatcgcttgaattagttttaatttgagagaagaaatcaataattggttgaggcaagaatgcaaattctaatcttcgataatggtgttttcctattttggtgggattgttctgcaactaacatttgctttgagcttgttctttacgtaattggttgttctatttattatgatgaacttttttcattccggcagttcacagtcaagagctgatctgttaaccctaggac

SEQ ID NO: 68079 - DNA, 814 bp, Cucumis sativus
  Intron number 1 from transcript Cucsa.379610.1 (locus Cucs a.379610) derived from phytozome v7.0 (chr-ID scaffold0383 7; pos 6413 to 7226)
gagcaaattagaaagcattcaaccagcttcttcaggtatttttcatctctttttcaaatttattcaagaggtccatttcattttttaagattcatactattaattgttcccccaaatgggtctagaaaaatccttcaatgtggacaaattttatgattgattttggttactttaattttaacttttgattacttttcatgtggttttagatttggaatgaacaattttatgtaagtaaaaagaaatttctcacatcaagttttaggattgtttcgttttctttttttttatgtttgcttggaaaataagatagtatccaatttgttagattttgcctctacattgtcttgtagaattagaaatgttgggattttttcttttattgtgcatcaatcaatgacgattctggtgcacagttcttttctttagagatttatctttgtcaaaaaagcaatcaatcttctatgttaaaagattgtaatttgtaaaaaccaagattgttgtaactcaagaaccgtaaaattctacaaatttaatttatattaactcatattaactgtgtttttgcatagtttataaaatctaaactcaatgtaagcatggcataaatttattattgatctaaatatcactgactcctcgggcaaatttttaaagtatgttgacgtatattaatgattaattttacataattctatgtcgtgtcaacctacaaattaatttttttaattatataaaaaattgaaacaatgaataatgcattttggtgttgcttatgctaatcattaatttattatttatttattaccaggaa

SEQ ID NO: 68080 - DNA, 771 bp, Cucumis sativus
  Intron number 1 from transcript Cucsa.273840.1 (locus Cucs a.273840) derived from phytozome v7.0 (chr-ID scaffold0251 1; pos 857136 to 857906)
ccacaagatcatccaaagaaggttccttaatgtttctttgttctgtgtactgttttgatggtttgaaatgatttctagatgatgaaggaacatgaaacgttttcaatcttgtatttatcctggtgctgaatgagctcatctgcttttggattaggtttagtgtaatgggcttttgttcgatgttactaccagttcaatcttcttcaccgtagggttatatgctgctattggatggattctattgatcctttctgaatcagtttctttgcagtagtagagttatctccgcagcgctttatattctctcaaattttgtttttattacatgatagagggatattcttatagggtcaaggatttagaaacaaaaatggatgtgtttttttccatggatagggacgattagaaagatctttgacgatgaaagttggtttgtttttttttttttttgagatggattcttgttgtaatttccttttggatataggatttcctaagaaatactgtgtttgatctcactgttttagtagcattttttatgtctaactattatgtctgcagtggtgatgtattggtataagttcccctctactttttatttttggaacatcttactcaatattgggttgcatttgttcaattttgtatgattggttttgttcaaaagttaaatatttggattacagtgattctttgtgttctatttctgatgacgtcaacataattcatttgatctgtaggaagccaaagaagtaaacttttttactgaat

SEQ ID NO: 68081 - DNA, 347 bp, Cucumis sativus
  Intron number 2 from transcript Cucsa.258400.1 (locus Cucs a.258400) derived from phytozome v7.0 (chr-ID scaffold0222 9; pos 5375564 to 5375910 reverse strand)
aacaggtcaatctcggttcttgtctagactctggatttaggactttgtttgtccattaagaaattaaggaaatgacactaaaatgatctggctctttatcattcaatgcgtattagcattgaagaaaaaacttggaaatggttattttcattgtttaggaatcacttatgaattttattttattatctattttttgacgtataatctaccaaaaaaaggaaagaaaaggaaactatctcttgagttcttaaatctatttttgttttcatctcctcttatgaattaactttgatgtacgatgctttttggcagagatttagctctcaagaccgagaaaactcaattaa

SEQ ID NO: 68082 - DNA, 606 bp, Cucumis sativus
  Intron number 1 from transcript Cucsa.258400.1 (locus Cucs a.258400) derived from phytozome v7.0 (chr-ID scaffold0222 9; pos 5376049 to 5376654 reverse strand)
ctcagttctatctccgttcttcctcctcagtccaggcatgaatctgttcttaattatttttagcgtcatattctgtttgaattgcaagagttcatggagaacaatgcgcaaagaggtttaggttgcaatgctgttcgtattcagtagcttgacaatttcttaacaaaaatgtttcatgttgtttattgtgttattcgttttgaaagatatggatttccttttcatcttagctgcgttttttatgatacggaaggagtttgctgtccccgagcttttaagagattgatattttaaatatttcttactgacagagacttcgaaactgatatttacacgcatcttagtttgattcgttctatatttttatcgatacattattcagttactttaagtttggataaaaagaacagatgagtaagaacatgaggttttcagactataatcttatcatgaaattgcaagcgagtactctgcaaacttgatccaatcttttgagtttgacgtcattattttcaattctgttcaacgcaaaaatattcaagaaatatacgtaagtttcttcaatgatgaaaatgtgaatggtcttgaaaatctgtagaaggttaa

SEQ ID NO: 68083 - DNA, 308 bp, Cucumis sativus
  Intron number 2 from transcript Cucsa.288590.1 (locus Cucs a.288590) derived from phytozome v7.0 (chr-ID scaffold0269 8; pos 172391 to 172698)
gttatttgttctctctattccaccattggaagtaggcaagttttcttctccgtttacagataaaattgtatatgtatttttcattatttctttgtaattattttataaaccaacttgatggaaaattacttgtttgaaaatttgattttgataatgaaaggaaatggtaagaagtagagatgtaacgaaggaaagaaactaatggatgaaaaaagatgttggtacgttttgagatatatgtgatatgaaacgtagtgatttgttttgatttaggtgggcggtaattgcatcacaattacctggaagaa

SEQ ID NO: 68084 - DNA, 473 bp, Cucumis sativus
  Intron number 1 from transcript Cucsa.238490.1 (locus Cucs a.238490) derived from phytozome v7.0 (chr-ID scaffold0202 3; pos 1058498 to 1058970 reverse strand)
caattgcttctgcttctcgatccctcactggtatgttaatgctttgctttacttccgagctttggtttcttttcgacgcgttttatttctcatttctgaaaacttttttacgtgcttaaacgtagtgtcttgaatgttttgatccgttgaggactggaaactctcagttggaatagaatttaagtgtttctaactctaaacattttttgttttttttaaagaaatgaatttacgaattgtaaattgtgtaagtgatttgcttctatatgagcttcaaatttaattaaaattgaatttcggctttgcttcttgattcttggactttcttcttcttcttcttcttcaacatttctttattttctcgggaaatggatttcggttggtgatatggtggtattcaattgatgcatgttgtctttggtgcatttgcctcgacagtggatcaagctgaagctatagttgttgcggttatt

SEQ ID NO: 68085 - DNA, 343 bp, Cucumis sativus
  Intron number 1 from transcript Cucsa.356750.1 (locus Cucs a.356750) derived from phytozome v7.0 (chr-ID scaffold0357 7; pos 1607309 to 1607651 reverse strand)
tccttcctccgcagcctcaacctccgctcaatcatgtatgcttattcttttcttgatttctcattcttcatctctttttttatttttttttcttttgggggaaggatgggcttgttcttaactgattctatttgcttctttaaagattggggattgatttttggggatgtgggaattggttatcaataaccaatttgtattgggttttgttggtttctctcatcaagattggtggggggttgtgattgtgtttataagaaattttgattcggattcttatttgtgttctcttttgattgtttaatcagatatttgtgtcctgagccctaccctgaggagaatt

SEQ ID NO: 68086 - DNA, 747 bp, Cucumis sativus
  Intron number 1 from transcript Cucsa.379850.1 (locus Cucs a.379850) derived from phytozome v7.0 (chr-ID scaffold0383 7; pos 244025 to 244771 reverse strand)
gagatttcaggaggtgggtctctcttattctctcgctcttcatgtcccaagagttagttcagttcatttcttcttctgggtcttctcaattttgggtgttttcaactaggagggcttttccttacaatgattgtttgtttgatcttcccatgatcttcctcattctctgttttctttaagaattccaatttttgaatggaaaatgatcgattaagttcactgaagttgggtgttgtaatgattatcttatatcacaatgcatacaccaagctagatcttttggttttctttattctttggtgggggaaatgaactacaaatgttctatttgtcttgttttaagtagcagaagcaagggattgggagtaacaaacagtgtttgtgctttacacgacgtgtgtgctgacttttttttatctgagcatgtttggttgcaaatggaaaagaatatgtcggttttgatcagaattatgctatatgttattccaaagacattgattaatagtacctaatttacagcattatttgacaatggactttggatttccaacttcttggcattctataacctcatcctgatgctccaatagtttatcattatcttcccactttctctctcttgaagaaagtaaacgcagaagaggattttctatatctttaaagcaaatattttgttctgcttacgctaacaaaactaattttcaatttgcagaacgtggaggatttgaagcagaaactcctacagac

SEQ ID NO: 68087 - DNA, 874 bp, Cucumis sativus
  Intron number 3 from transcript Cucsa.366490.1 (locus Cucs a.366490) derived from phytozome v7.0 (chr-ID scaffold0362 5; pos 98025 to 98898)
aggtgatgctttaccaccaaatcttgtttaaatatattattcatgggcacatcggtttttctacatttagaaagaccagtttcttttgcttgtaatttgaaaatacaacgtttaaggggtaactgtttatttaggtttctaatgatgaatgattggatattagatgattcaactctctggtcaatgaatgagatgacttcacctatttctcattcttctttctagatatattttcttcaataatattggcaacagagaaatatattaaaagggagtagttgaagtatccccacaattcctgctctaaggagcaatgaaaaacgattagagtatagacaagctcttgatacctgggaatttccaacaaattatcttattccttggagagatagaaccaatctgttagtgtaacacattttagtatttgttatcgtattttccttctcatttttcctctttatttttcctgttactggatatcctattgtattgtcagatgtggctttcctttgagtattaatacacatgctagccttagtcccattatgggttgcaggcatttctttttgctattacttcatgttattgctacatggtattctaggttcactttctctcttttctcaagaatcttctaataagatggtttccgcttcttttatttggggtttacttatccctgctgccattgtgtttcctctactagctcttgataaggagctcaaagttttaaatccttttccagccaaatttgagctgatttttggtcggacttattattttctttttttgaaagggtggtcgaacttattattgatagaagttactgtaaatatcaggcaatacaaaatctcaaagccagtgcagcaggcag

SEQ ID NO: 68088 - DNA, 708 bp, Cucumis sativus
  Intron number 2 from transcript Cucsa.228050.1 (locus Cucs a.228050) derived from phytozome v7.0 (chr-ID scaffold0193 3; pos 49890 to 50597)
gacaagcttaagaaagaggaagaagagaaaaaaaggtacttcctccatttctttgtcttaaattcatatcccagttgggctgtcttaattctaaattcgaattgcttcttagattcataccgtaggcggttacatattgaaatacttgaaaactgtcttgaatatgacaaaacatggtttatataagcagttgaaacaaacaaaatatgagttaacttacggtagttggctctctaacagaataataaacaggaatctggtgcaattagagaggaattttgacgctttctttcttttatttcttggttctgatttggacgatcatcttgtattcctcctgcattaataaaacttccaagctgccgggtccccgaaccaccgtaattccttgtgcatttgattctttgttttaattgtcttggctgtaatctttgagtgtcttcttggcctagctattggtgcaatgttaaacataccaacttcttgggctctaagcctataatagtttagtacaattttatgcgctgaatgagtgcaaatcatttacgtacagcaatatggatgaagataggtagaagtgacaaactttggattttggtctcttgattttgttgtttctgacctcctgaatgagatgttggctctatgatgggcatttaacccgcctttctttcaggcgtgaagcagagttgaagaagttagaagaag

SEQ ID NO: 68089 - DNA, 870 bp, Cucumis sativus
  Intron number 2 from transcript Cucsa.249900.1 (locus Cucs a.249900) derived from phytozome v7.0 (chr-ID scaffold0221 9; pos 40920 to 41789)
agtttaaaacagcacttttacaacgattagagagggtacgtatatataatattgcatggctaattccatgcagtttcataaaggatccgtccatgtgcttttgcaatcttaactgcatgactgtcattaagtgatgtcattattcatatcaagaaacacacaaataaatcaaaaccgtgtcacccaatacaaattatttaaactatacccaacacctactcaaatcatttatccattcaaaattattgcacatgcaattatgtgtcttaacttgtaaaatttatttaatgatattgttactgcactcaaatttatagtatacgattatcataaatttagtttcatattaataatgaaccaaacattagtgtatgtaaactctattctatttttaaaagggtgttaaagtgacatacaataaattaaattttctaatactataattctttatactattttaatttattgcttgtgatctattttcttttaaatttaaataatcaataaaagtaatatgtaagaaggatgccactaaaaatattttctaacatattactatctatagcagtggaaatgtaaattttgtttctgttacaatttataatatatggtcctataatgtaaatgctaatatatcatttaaataataattagtgaaatttcaaatttaaaaatatggttacattcacaaatgttctctcttacgcataaagttacaaaagccatattgtggcgcgccccgtctccaatattttgctttgctctgtttccccgccatgaatttggcggtggcctgtaaagtcctccgattatcgacggaagaactttgaatagaactaatttgaagcgtgtcgtctttggtccaggata

SEQ ID NO: 68090 - DNA, 607 bp, Cucumis sativus
  Intron number 1 from transcript Cucsa.358690.1 (locus Cucs a.358690) derived from phytozome v7.0 (chr-ID scaffold0358 6; pos 311806 to 312412 reverse strand)
ctccatcgttcgctcctctcttgaacatatctaaggtttgatcttgaatattcttccttagttttcattgaagtattttttttgtttagttttaatgaggtattaattacaccacaagatggatttgagggtttgtttagaagaaattgaaaaaatgtttgaggtggttgaggtggaccgaaaaaaaatgtttcaacaatttttcaaaagtgtgctagttttactagacaaaacctattaaaacgatgtttctcacaattttccattcaacaaattttattattgctgagtttaatccaacaataatcgacatgatgtctatcgaacaataatcgacatgatgtctatcgatcaaattttgattttacattcctagaactgttgtaataagaactaaataacgaaaaaatttactcggttgatatattcacaagtaacttcaacaaaaaaaattatggaataactttattatttttgtgagtataaatgatagcgtataaaacacgatatcttatagtacttaactcaaggtcattctttcattttacatgtctattccttgatttttataggtatcgagcataattcaggttattccatcccataa

SEQ ID NO: 68091 - DNA, 720 bp, Cucumis sativus
  Intron number 2 from transcript Cucsa.365120.1 (locus Cucs a.365120) derived from phytozome v7.0 (chr-ID scaffold0361 1; pos 2624217 to 2624936)
ctcgccttccgaggcctctagatcaggtgggttttgcgattttcactgggtttacacaatttcttttcatactctaatcactgcactcactggagctcaattttctgagtctttgagatcctaccttctctattctgttttggaaattatgatcttcttgtgtcggtttggtcgggatctttgaaatttgctttttgtcttatttgaaactgtcaaataatgagatcttttgataagatctgtctgaattttattttgtttttcatggatctatgtcttgggtttccttttctttttggttttatccttttaattcattgggtgggatatttgggtttttaacacccattctcaagtcgggatcgttatgttctccaggtgggagcgctgaaaacgtattgattatggaactttgaatgtcttgcttgtttcttttagtcaggtgttattagctattcttcaagtttgtgaggttatgttattgagcgaaacatgatgtttgtttcactttgacttgcagcaattttgttgtacaatgtttttcttttgatctcaatatgcaccgccagggcgtacctatcagattttcaaataagaaacataactttcattagctgcggtgtatatctttcttaagtgctttatgatggttactaatttttcatccgttagggacattgattaggtctcttggatttcatttcgttacgcagcattggc

SEQ ID NO: 68092 - DNA, 958 bp, Cucumis sativus
  Intron number 3 from transcript Cucsa.365120.1 (locus Cucs a.365120) derived from phytozome v7.0 (chr-ID scaffold0361 1; pos 2625123 to 2626080)
tggttgttggtgattgtatcttggttggtttgcaggtgaatgtcatttctgaacctactagttgacatgcttttttttctttcttaatttaattctaaagtaaaatgtgcttccatgattatcctgctttttgcacgtgttttgctttctttccctcttgaaatggtagttagcaataaatttttgttgttcggttcattgtgtaactgaatctaactctactgcttactcttgtatatcaaccccctccatcaccgattatatctcacactgcaaatcataataattactgttactcatttagctcaattgcactatcaagaaacctttacagccttccttcttggtctccttgtacatgcttgttgttcttttggtccaagttgttggcattgcccatcatgctccccttccttctttatcattgctaatcgtcaacttgctcatatgatatatctatttttcttttaacaagttcaaccttcagaatgcttaacaaatagcaaataatgtttataagtgctttagaacaactgccacttataccattgcctctctaaattaatggtacttatctcacagagtaaatttcagcaagttttgacatttatctagcaatcaactcaactaattcttgtcaaactgtagaaaggaaacagatgattgtgtatatgtgtgtgtgtgtgtgtgtatgtatacatgtgtattctgttgtgtgtgtgtgtatgtatacatgtgtattctgttatttaagcatggtatactgtacaagtttacatggaagattgcacaggcacagtccaaagcaggcaagaaggtgcttgttccccacacgaatcttccttttcttgtttgatgctatttggatttgtttgaaaggtagaattgtcatgtgatttaacctagtttttaaatgcctaatactggttcatttcgttgtcagcctattttggtttat

SEQ ID NO: 68093 - DNA, 1059 bp, Cucumis sativus
  Intron number 3 from transcript Cucsa.359910.1 (locus Cucs a.359910) derived from phytozome v7.0 (chr-ID scaffold0358 8; pos 692819 to 693877)
atacggtcatcggaaacctcacggcggtggtcgaagtaagtgccaatctcaatgctttagttcaaatttcaaataatagccattttttaatttcatccaattgcgttaaatttcttattcggtggactgaactttaaaattttgcttattttctagaatttgttttacgtaattgtgaataatatttccaaaaaaataaccaaatgtcaagtgacaatattactatatttaaaattactttttaaaatatcaatttttacttaaaactttaaaagtatttaaatatttttactaagattgattagaaaattcgtagtaaaaatatcatacatgacaacaaaaaaatgtttttgggaattttgatgcatgagcaaaaaaaattaaaaacataggaaaaaaacttaaatgaaatagaaattttttgatgaattttgctaaatggttaatttttaaaaattttaattttttttaattgtatcttgtcactaacaagctcttatcaattccacacatatatttttaaatatatgtatataaatatataaggttctattttagttttatatttaatcaattatcaatgcgaactatttaaagaaaaagcagaaggtgttagaaaattattaattatcaattaatatatttaaaaaaattgcagacaccaattctaaattgaaatttttttaaaaaaaatatagagattaaattgaattcaaataaccaaaataaaattattgaaaacataaaaattaaggactcattccatttttgaacttttttaaaaaatcaaatctataaacacttatttcccctcaagtgaattcaagtcttgattgtcttaaaaattaaaagaaagcataattaatattaaaaataaaatatccaaaaccgtagttaaattgaaagaaattcttatcaattaattgtaataaatcgtttaaattatttgcaaaatatagaaagaagaagaactgaaatgaaaaggttgaatgagattgattgattttgatgattatggggataggaaatatacaaaaaaggaggaaggaaatttgcgtt

SEQ ID NO: 68094 - DNA, 961 bp, Cucumis sativus
  Intron number 2 from transcript Cucsa.369210.1 (locus Cucs a.369210) derived from phytozome v7.0 (chr-ID scaffold0364 3; pos 28696 to 29656 reverse strand)
agtgcactatccaagattgaagacattgtcagagctactgagtttattggtcaaagctcaggtttgcaatttcatttttcttcatttttggttattatttagttaatgatatagtatcttttgggataatcttgttttttttaaaaaaaaaactgagagaaacctctttattaatgataataaatgagatttaggctcaaaatacaagagtattatactaagagcaagagaactaggggagaatacagtcaaagactaaaacagaagctaaacttaggcaacaaaaaatggcaatccaaaggaaatcagtattcttttgagaacttatgtacaccagttaattactagtttagccgtgaactttcaaaattgtgtttttatagtttatgaaacttgttgataaaagttacaaaacattgaaagtttagaggcttatgatctcttttcaaattctgggacctctctttagacaaccctaaaacttgaaccgtcactcttgtaatttgacccttcattaaatttatcataccaaccaaattaaacttttgggttgattggttagttaacaatattggatacgtttttctttatgtacataagcacatatgagatgattatattgtagagcttcttctttggcctatttaattttttctggatagtcctattgttgaaagctaatgagaaaagtttgtcaatccgaattgggcttaaatatatctaaattgctccagttatgtatggtttggaatttatagagcttggacttaatgcttaaattacacattttattgatgaaatgaaaagagactaatgtttgaattacaaagaagctagaaatcacaagaactagggatcagcatgcttaaatatatctagcttggacttcttctatttgtttggaaatatttttgacgttggacaagctacttagtctgagtattgcaggaaaatctctcaa

SEQ ID NO: 68095 - DNA, 567 bp, Cucumis sativus; identical to SEQ ID NO: 63772
  Intron number 2 from transcript Cucsa.202420.5 (locus Cucs a.202420) derived from phytozome v7.0 (chr-ID scaffold0137 6; pos 411582 to 412148 reverse strand)

SEQ ID NO: 68096 - DNA, 545 bp, Cucumis sativus
  Intron number 1 from transcript Cucsa.320140.1 (locus Cucs a.320140) derived from phytozome v7.0 (chr-ID scaffold0308 0; pos 38391 to 38935)
cccaatctcatattatctgtactcttctccatctctaatattttccgtaattttccctctttagtttgcattgcaccaattgggtttctgttaatttttagtctgactactaacttgtttacaattggtactgaaaatggacttgtgtatctagagctatgtgaagtagaaaatcatgcagcttgaacgttttcttaatggctttgggggtttgggaactagtaaggctcgaattttatcctaatttttgttatcatttttggcggggttttaatgttctgtaatcaaatgcacaattttttttctaaaaggggttgatgcaagtgacaagtaaaaggctctataagtgctaatttacgttgttgatggtttttttttaatgtactgcagcttgaattttgttgctatgatgaggtttttgatgaaatgttgtagggttagacagttttggtaggaacatgtattgctatggattttaatgtatgttgttgctacatgtttgttttctagggtccgccaggaactgggaagacaaccagtatttt

SEQ ID NO: 68097 - DNA, 288 bp, Cucumis sativus
  Intron number 3 from transcript Cucsa.320140.1 (locus Cucs a.320140) derived from phytozome v7.0 (chr-ID scaffold0308 0; pos 39185 to 39472)
aagctgacaggtaggtttcaacggatataatgctagggaagcccaaacactttttttggggagagtgttcttgtcaggcatgcatgcgaaaaaaagtgtcctattttattttgtattttcttttcggtttcgaacactcatgggacacataaacctataaaattgattgagaatttgaaacaagaattttctttgtcttcttttgctctgctcttcagtttcttactttgagtcctgttattaatttgttacttttggtggtaattatgattgtgaaaataatccagc

SEQ ID NO: 68098 - DNA, 781 bp, Cucumis sativus
  Intron number 1 from transcript Cucsa.217780.1 (locus Cucs a.217780) derived from phytozome v7.0 (chr-ID scaffold0165 8; pos 27767 to 28547 reverse strand)
atcaaggagctgtcgttttaagacaggtattgacattaaatgatcaatttttcacaatacttccaaaatctggtgacattctaggattttgtcttctctttttttcttttctaccatattattttccccttgaaattggtttaattatatgaacaggatacaataaggagtacaggaacttttgggatggggaaggggaagggatgatttggttgagtttggattgccttttcaatggatgcttaaaactagagaagggattcgtttcctgtaaaaatatattattaagcaagccgtagattgtaatagagaagaatggtaggaagtttttgtgccttgaaaacgtggtaaaggatggaatttctaagccccttcgagaccccacttatgattgattaggtaaatgggttaagaaacaatgatttgattctctgaattttaatatgcaattttctgaatatttaaaatttcatcaatcgtgatggaactcagctccatgtttaattttctaatctacagcttcgactctgtttagcaaaatgcatatgctgtgtaaaataccaggaagttattgtggggtaaggaaggatacagaaaaatgatcagcaatgcctaaaacgcgcaaataaacttgtatacatcatttagggatgcgtcatgtagtttatcatttgcagaattgaattgagctttactgttaaatgaaatatatagggaacttaccgaatgtgtttttgtgatgaaaggcctttgccaggagaactagagttgtggaaaataa

SEQ ID NO: 68099 - DNA, 791 bp, Cucumis sativus
  Intron number 1 from transcript Cucsa.240660.1 (locus Cucs a.240660) derived from phytozome v7.0 (chr-ID scaffold0204 7; pos 770046 to 770836)
ctcccacgaacactttcggatcttcgtgtgcttaagtatgtgttattctcttcggcctcttttcgtttaggagacatattacgacattttattgtcttttctccccttgtgccgtttagtattttttaaatcagtgttgatttgttatgaacttggaaggcaagcgttgattgagggttgcttttttcatcatttcttttattgtctgtggaacagaatggggatggacatggtttgctgaagtcacttttgagtattgaaggaagtcgatatccaaacggttatggggatcctgagggtggaattatgtataataggctcagcacctgttggttggagttggttttggactaaaaccaatgcctaccactgacatatcggttggttttggtcggttggattagtttcctgagttcttttgaacacccctaatgtttgcacttctgaagatgtggctttcttgcctactcagaatggatgaggaacatcttataggttatttgtgtgaaatatgattaaaggatttacataacgtatcatcttaagcttttggttttgggagtagtttaatgtggtaatagagttaggggtcctaagtctgaatcgctcaatctttcttcccaaattaatattgaaaaatgcttgttgggttttgtagtttatcaaaatgttcaagcggattattgttatctgttggcattttgttcctgatcaatctaatttttaatgcttgattgttattgtgctttatatctctttttaattgtgttccagggatctctttgcaaatt

SEQ ID NO: 68100 - DNA, 464 bp, Cucumis sativus
  Intron number 1 from transcript Cucsa.341810.1 (locus Cucs a.341810) derived from phytozome v7.0 (chr-ID scaffold0335 6; pos 4247781 to 4248244)
ctacaacaaaattattgataatctattgttaaaaggtaattatctcatttaatcttctcggtgattttatttcctaaaatcttttaaacaacactaaatatattaagaaaactacacaaataatatgaaaattaccacaatgagtttaattttcatttgagtttttttatttaaaagcatataacatttttacttttggtgtgtttgagtttaatttttcccttagtttctaacaatcttaaaagcttaaacattcatgacacttttttcaaatcaaacacctactacatatacaattaaaaatgtagagagatatatattgaaaaaagttaaatttttgtaattgtttcaattatctattcgacacaaacgtaaatttttttcaaggagttaaatttataatttaacttagtaaaacgaacatgacaggcatagagccatttgtgacgatttatcattttgat

SEQ ID NO: 68101 - DNA, 303 bp, Cucumis sativus
  Intron number 3 from transcript Cucsa.341810.1 (locus Cucs a.341810) derived from phytozome v7.0 (chr-ID scaffold0335 6; pos 4248596 to 4248898)
ctaaggctgttagcctttaccgcacccattttcaagcaagttgattcctcttctctttttccatatcccatacaaaattaactatcattatctaaatacactttacattttttaaatttatggctactcatattatatttggtttagtttttaaactcaaatgttttatctctaggcttgcttttagtaatatccataacccttctgtctaattctaattatgtatacatttatacaaaaacaaataatctgacaagcttaacggcaggtaaagcaaggtggatcaataggaataacgatatc

SEQ ID NO: 68102 - DNA, 514 bp, Cucumis sativus
  Intron number 1 from transcript Cucsa.257730.1 (locus Cucs a.257730) derived from phytozome v7.0 (chr-ID scaffold0222 9; pos 4951522 to 4952035 reverse strand)
gaggtatgagtatctgactatgtatccttgttttgattttgaaaatttgacttgcgaaatcttgtagatagagagctgatttgctgtgcttgttttcgttgctattagcttttcttttttccagtcgagtgttctgtaattacaatctagagttgctttgactacagcattttcttcacagctgttcgatctacgggctattttttttttatccctcttgaatgttgtttatttatcatatttcgaagtacgattgtgggtttatgcatccctgtttaataaatcgagattggtgctgttccaatgttggtgcattcagcgcgttaggatgaatcggtaggatacttggaaatggacctcgaacttttagtgttttactggatagaaattatttttgccattttctctccttctccgtatgtggtgtgcaataaccaagcctcggttattttcttccatgttttatatgctttggtcagtgccgggaagagttcgtgtggctgttagattacga

SEQ ID NO: 68103 - DNA, 707 bp, Cucumis sativus
  Intron number 2 from transcript Cucsa.279450.1 (locus Cucs a.279450) derived from phytozome v7.0 (chr-ID scaffold0262 2; pos 47667 to 48373 reverse strand)
taaaggatagagttgcagttaaggtaattgaagaggtgagttaattttcttttcttgatgcatcttctggattcactgttgcgttaatttgattaataatgttgattttgttgaaatattgttgagtcgttttttgttctttggaaacagctcggtagaaacttaaagaattctaattggattcggtatagtataggcttctttatctcaacagaccaattatatctgtaaattgcaaagtgagattgaaatttgtcatatttaacctagaatcccatccatcagtgccttatccacttatttttcaataagatcactcgtcaagtccttcaaaaatgaaaaaataaaagaggtgggagggcgtaccttgtcttaaattcttaaagctttgactccgtcgataaggaagattgaagatatagtatcttaaatgtaaccattgatctagaggtgggaggggctaccttggaaattaatgtgttgcacaacaccatattttaattgcagcacaatcatgtgttaccccatattaatcccttactttcaacatataatgtgagcttgttaaattaaaaacgcaacaagtcaggaggatggcatcctcacaggccgttatggaaaggaaattcatcatgctgttgtagacattctaatatgaggttttccttgtaggccttagaatctggtaagctggttgagggtggtgt

SEQ ID NO: 68104 - DNA, 686 bp, Cucumis sativus
  Intron number 1 from transcript Cucsa.307280.1 (locus Cucs a.307280) derived from phytozome v7.0 (chr-ID scaffold0297 7; pos 502608 to 503293)
ggaatctcagaacactcgagttgatctgatcaacggtaacgtctatcactaactctgttatttctttcattgtatctgtttcttcgctgtttgttttttcaattcacttcgttccgatggattcggttgagttttcgatttctttctttgactttagtttccgtagaattttttgtttatcgatgtaggtagttcgttctttgagttcaaacgaactgcaatcctctagagttataactaaaccaggttcatgtttagtgcgaatcgttggacgtctgatttgcattgagcgatttttggctgatagacgtccttttattaatcgttttaacgatccagttaggctgtacatcaatcagctatctggttttcgaaatctactttgaattttgctctgcattgaagctgtatgataaacttcttcggtacaatggcgatttcaagactgacggtttgaatatagctagaaagaactatatcggattgatccagaatacacaatcggatcctgacatacttactaattgagtcaggcagcgagatgcttatctatttgttaatctggagttcatcatgtccttgagtttccttgattctgtttctcatttgttttttggagttttcttgtgtgatctgtttttcattttgtagggaaactaaagacaatttcctccttcagtgaaacc

SEQ ID NO: 68105 - DNA, 689 bp, Cucumis sativus
  Intron number 2 from transcript Cucsa.397210.1 (locus Cucs a.397210) derived from phytozome v7.0 (chr-ID scaffold0414 6; pos 49234 to 49922)
ctgggtaacttttcgtatttgtttatgattaaattgatggtctaagggcatctttgagagtgattttgttttgtcatgtttcaagaaccactcttgaacatgtttttaatcatttcaatgcttggttttacactttttaaatgtagtttttataccattgaaatgattaaaagaaacaaccaaatgccatcaagattgattttgcttgtcacatagtcgctagtgctacaatcaaagagttcctcctcaatccatcttttggggagaaggattttttttcttttcctttttggcttgtgaaatcttataggttttgtagggtgaatggattcgtagggtgtttaggggagtgtatagggattgttcggagatttggcccctcgttcgctttcacatttttttgtacgatttaattttgaagacctttcgtatttattctatagacactattttgcacagttgggagtctctttttatagagagagcccattttttgttagtttgttttttgcatgtttttgtattctttacatttttttcttagtgaatgttgttgaaagaaaaaaaaaaacaatttcaaaatcactcttttatagattgtccatgacattgcttagaagtgttttaatgactaactggaaggacatgggattgatattatctcaggtgtgacttaaggataattagtg

SEQ ID NO: 68106 - DNA, 750 bp, Cucumis sativus
  Intron number 2 from transcript Cucsa.355700.1 (locus Cucs a.355700) derived from phytozome v7.0 (chr-ID scaffold0357 7; pos 217330 to 218079 reverse strand)
gagaaaggaagccgagaactgcgattgccttcaaggtattatctctgtctcagatcatgtgcttgattagatgtggttgcttggatctaatgagaagtgtttaagttgaggcctttagatttaaaattagtcgttttcctactgtgccctttatttttcatttctgaatgttcatgtgggatgagattttaagacatgattgagagtgtcaataatggatccaatactgaagtgcattttactcccacgtgccttgaatctttgtttgagttatagtatagaatattattaaactctttcaaatagtatggtctcttctgtgaaacaacttccaaaagtgccaaaaagtgtgttaacgtcttcttttgtttctttaccttttgcttttaatactgtttttaaaaaagtgtacttgggtatgtgtagtgttaagcacttctgagcgtaacttcctaatggctttgcttcttgtaaggaaaggtcttgccaaagtcaatgagatccatagttatttattaattagttaatctgtacatcagaagacgatttttcttcattttcttacatcctaagatctgagccttttcttctttattgacgagacatttacaacgaaccaatacctgttttctttatgtcagtttgtttttgtttcaactttcattaagtgttcttaactcagtttacttgcttggcattttttgtgttctcataggttttcaagtgtgccattcccttggtggaggaact

SEQ ID NO: 68107 - DNA, 461 bp, Cucumis sativus
  Intron number 1 from transcript Cucsa.355700.1 (locus Cucs a.355700) derived from phytozome v7.0 (chr-ID scaffold0357 7; pos 218439 to 218899 reverse strand)
ttactccaccgcctggttccgccccaacttccccggtaatttacaattcttcagatctggttgccacatttcatttcttgcttatatttaatgtgggaattttcatattggcgtttcttcgaactgggttttgctttatgatcacattcttgtagcaaaatgccatgaatctgttatttgattcggtttttttggagatcggtctagctttgtggccatattctggcatttgaatgccattaatccgtgatttggttgaatttcacttccgatccaatgtttatgctgatcttgacatctttgcattcaatgcagaggagttttgtttcgatttattactgatctcatcttactgatcttgatttttctatacttttatgtgtatgtgtgtattttctttaatttcgatgccaattggactatgtggttaacttcagagtgttgttgtgggcagggtaaag

SEQ ID NO: 68108 - DNA, 364 bp, Cucumis sativus
  Intron number 1 from transcript Cucsa.273480.1 (locus Cucs a.273480) derived from phytozome v7.0 (chr-ID scaffold0251 1; pos 584965 to 585328 reverse strand)
ttaacactagatccgaggtaaatctcgttattttttcacgcctacaagtaattttgttttgatttgtgagtgctactgttagaaatggaatcgatgtggctgatttcaatttttatgctattttgtcttcggatgtgtatgtcttgttttctgatccaaataacaaatttaagtctatttgtcttgtgattcatgaaactcgcatatctgcatgtttccagagttatgttttgttctattctgtttggtgttcatcaatttgggctaatttgttcatttctttttcttttgcgttttctgtataaattagggttcattgcatgcttattcatattccttttgctacttgtaggttactggctac

SEQ ID NO: 68109 - DNA, 1001 bp, Cucumis sativus
  Intron number 1 from transcript Cucsa.273560.1 (locus Cucs a.273560) derived from phytozome v7.0 (chr-ID scaffold0251 1; pos 652480 to 653480)
tataggtggcagcctctccattgcgatttatccaggtaaatctgcacccctcggtattcgtatctttactccccacttttctctttcgccaaaaaggaattcactttttgcctaaatttgttgaattgcaaaaagtattttttggatttgtttgcctaaattttatttcaattacatcattcactttttattttaaacatcttaactcttaagcatatatcttaattagatttgattaacatataggtaatctttctctttgaattttttggattccatccacgtttcttcacatttattgtattaagaaaatggcacttaaaaatctatttccatgtatttaatatgagatcatacttgatgaataatatattataaactacaattacattttcttttctattagcgaaagtaaatataattagaaagatcaaacagtcgactgtcaatgtgtttgattaaaaaagaaaaaaaaaaaactttacatttaaattagttagttgatttgaaaaattaatgttgaataaattattagaccaatcagattgttataatttataaattatggtttaaattaagaaatgaaataaaaacaaagattcctttcacgtggggtatgttctcacttttcggctttcgcgatctacgccgagggtaagattggaaaaaaatgaaaatgtttgtcatttgctttccttttcacccctttcctttttacatcattccttatatatccctccccagctcacgtccacaacggatctttattttgtttctaaaaattaaacttactctaccacaagcccttcggttagcttctcgtttctctaaaaccatacatagaaataaaggttttgagtttttgttttttttcttaaaaaaggtttttaatttttttttccttttcctttttaaaggttgtgattgatttcaaaaatatttaaatatttacactttatacatataattatctaaatatattatctacatatctaggttcg

SEQ ID NO: 68110 - DNA, 598 bp, Cucumis sativus
  Intron number 1 from transcript Cucsa.255720.1 (locus Cucs a.255720) derived from phytozome v7.0 (chr-ID scaffold0222 9; pos 3593053 to 3593650 reverse strand)
ggtatctttcttttcttcttttcatcataccctttactttgttttgtgttttgaattggctgtctagagattctgtttctgcttttcactatactatacataccctttgtttaattcggtgttttgaattgattgcccaatgaaaattacatgtcggaaagatggatatcttataatctatattaaatacacgatatacttctgaattagttataggatgaaactctatgattacctaatattgtctgtagaacctattcaatttctattataccatacatacaccttattggttctgtgttttgaatcgatcgtttcacacgttggaaggatgaagagctcatgatctttataaaaaatacgatatacttttctcattgtgaattagttctggtatgtaacttctccatggttatccaatattgcttgaagaacaaggaggtgtttatgggtccatagaagctgtttgtgatttttcacgatacataccctttatgtggttctgtttatgagtttgtagaatctgttctgaattctgaatgattagaatggaattatgatagaggtaagaaattgaacctgacggatttggaggctt

SEQ ID NO: 68111 - DNA, 963 bp, Cucumis sativus
  Intron number 2 from transcript Cucsa.283930.1 (locus Cucs a.283930) derived from phytozome v7.0 (chr-ID scaffold0265 3; pos 883509 to 884471)
aaagcttcatctgcaggtaatttgtccagaattagggtttagtacaaaaaaaattattttcctttttcaaattcaaatgtcatctttgaaatagttatggatatcttgttggtttgaatttagtaaagttatcaccttagttcagggacatgtttcttataatttagttcattttgggaatgctaatattaaacttgataattaacctaagggaagttccttaggttaaaaatagaattagaatttttcctataaaattgggtgttcagctgtgtagaagatcaagttattagaattaaaaaataatcttattccaacggaagtggtttacagttttttgaaagaaaaaaaaagtactttacaatctatttctcagccacactcaaaatcccagttacccattttggataaaatttccaattttgccaaagcacaaaaccctagttcatttattagggattttctttttcattcagaatctaacgttataaatacagcatacagggtatttgtaactttttttaagaaaaattttaaaggctatttgtaattataattttagggttagtacacctttatcaaatttagattctttttcatttactaagttttaaaatattaattagtgttttatatataatcttcttaactattctgatattgacatcaaattctgaatcctacacttttgttgaatttctgccaaaataattaaaaattagagcttattatatctttcacaaacttttcttttttaattattcaataacatgctaatagctttatgtcatttgaactatggtaacatataattttctatttgaatttaaggttgcaagtcagtagctaatatatgcatgaataaataattaataggatggacaatatatacagaaattaaaatcaagaagaacattaatcagatgaacctcttgtttgcaggattgaaattgttggaactag

SEQ ID NO: 68112 - DNA, 660 bp, Cucumis sativus
  Intron number 1 from transcript Cucsa.396100.1 (locus Cucs a.396100) derived from phytozome v7.0 (chr-ID scaffold0410 0; pos 1424747 to 1425406)
ctcacctgacaactccgctcaggcaaccgctaccggtaagtattttttcccttcttcccttagccgcttagttggtcttcaccatcttaaaaattaaagttaaagtttatgcatggaaactacaagaaaagctttcaaaaagtttatttatttttcgaattcgactaaaaattcaactattgctttaaaatttaaaagtgttatgtctcaaccttaggctaaatcattgttgaataacgcattgttaattttgtatgtgtttcttctttaacaacagctttaaatctaattacgcacaaacaagtgaaagccatattgggaacattaacaagggaggaagtatcttcaatctatgagatccacaagccctccaaaaatatcccaatcatatccttatcttcatcttccttattactaccaaattcaaaatcaaatcatcagctttcgtcatttcttcaaatgggtaatgatatcacccaccaaatccgttgcatggcagccattgttggtgaattccgatggcgaagagtcaccgcactttatgagattaaaaatgaagactttaccaccaacagtatcgccattttaaaactcctatccgattcacttcgtgatgtcaattcagagattgaaaatcacatcggtttctctttatctgat

SEQ ID NO: 68113 - DNA, 547 bp, Cucumis sativus
  Intron number 1 from transcript Cucsa.382200.2 (locus Cucs a.382200) derived from phytozome v7.0 (chr-ID scaffold0386 6; pos 290888 to 291434 reverse strand)
agaaccattaaagatgtatgaaagtttgattgattaatggcgtacttgaatgtttgtctcctattttaatttgtgtccattatttggacaatcatagtattgtaggctctttttttcttagctcttgatagtaagtgtttgaattgatcccccaagatatgctggatgtgaccgtgctggtacctcctgttatccaaacttatgatctttgctttgtcaatgaaaagagactgtatcatttttaattatttgcttgatgtagctgaatgaattcatcgtagtgtggggtgattccaatcttctttatgattttactgtagttctaacatgtctttatattgaccaaaagatagtctcctttcagtttaggttaattaatgtaggttcaatttttcttttaaactttttgtgactttgaactaccactcattcttagttgttgaggttttatttcactttagtttctatctttcctgttatgccttgttgatgcttcccattatctaaatcttgctgatgttttcaatttcatgtaaaatcagagtag

SEQ ID NO: 68114 - DNA, 474 bp, Cucumis sativus
  Intron number 1 from transcript Cucsa.302140.1 (locus Cucs a.302140) derived from phytozome v7.0 (chr-ID scaffold0295 1; pos 366522 to 366995 reverse strand)
gccgccgaaggtatctattctttcttcttcttctatcgccaattttcattttttaagatgaagtctcgagtatttctgtgccggtgttcaatgtgcgttattttttaatacccttttgaatttgatgccttaaattgtaaaacccctacagaattggatgtgttctgaagtattaggagttaggactgtgtgatgcctcttatctattggtttcaattctagcttttgatcatttcctgcaggagggagtttcgtaatgatccttgtttcttcgataacatttatgaaattttgtttacttatgagattttcttataaaatatatgtggtctttgccacaggcttactgaagttttttgtgcaagtaatgattttttttcagtttaatgcttttcttagacaacagcctaccttttcactaatgcaagttatattaacgaagaagatgtgcttgttttcatcttttgtttgcag

SEQ ID NO: 68115 - DNA, 506 bp, Cucumis sativus
  Intron number 1 from transcript Cucsa.202150.1 (locus Cucs a.202150) derived from phytozome v7.0 (chr-ID scaffold0137 6; pos 290169 to 290674)
aggccttcaaaccttctcctcctcaacatactcaggtattcctttctttctttcattttacttcacacatataaacaactatcaaacttcttctttctcgtactttcatctccgttccttcctccataacttgagcttagtaccattatcttttgtcatttcgataatctagaaatgttttatttattctatcttcatttcgattagttaataaatataagctctcaaaagagtaatacgaacaagtgtatgtcaattatggttaagttatgctcgctttatcatgtttttatatattctattgttgaaattcatcaactaaataaaattatgtattttttcttttatttaattgaaggtagtttagtttagttttaagaaacttttcagtatgaaatttgtttttaaacttggaaaataaattaattaaaaatgattagaaatttttgtaggaattggacaataaaattggttatttaaactaagaaaaatagcattgtgcagaa

SEQ ID NO: 68116 - DNA, 750 bp, Cucumis sativus
  Intron number 2 from transcript Cucsa.239420.1 (locus Cucs a.239420) derived from phytozome v7.0 (chr-ID scaffold0204 6; pos 241412 to 242161)
atttgcatttagatcctgctgaggtacatacttcctttacattcatgattcttcacatggattaactttgttgtgtatattttgcattcatctttagaactttgccaataattttctgcacttctaagaaattaattgttggaagtaccttaatataactgtaacaaattatgtatgtgtttgactagacagctgtaatttctggttttgctgcattgccatggctgatcaaacctctctatgggtttattaggttgaagttccccctctctcttttactcactattcaagactcaaataagttcctctcttgttcattttcataataattgttaggttattgcagtgactccgttcctctttttggctaccgaagaaggtcgtacttgattttatcagggcttcttggtgcattctcatggagctttatggccacccttgttaatagcaagtatggtgctgctatgtatatacttctcgggtctctttctgtggcgttttctgatgttgtatgtctttactaatattttttgtgctattttttttcaagataattttctttcatatgtaaacactttgttccatagataattatcttactaataaatctatcaaaagctttctcttctagtctacattgctttcttttgtcggaagttgcaacatgaattgaccatggaattagtttcatttcatgcgactgaaacttgcttttgactatactgaacattaatgtaggtggtagactca

SEQ ID NO: 68117 - DNA, 618 bp, Cucumis sativus
  Intron number 2 from transcript Cucsa.283120.2 (locus Cucs a.283120) derived from phytozome v7.0 (chr-ID scaffold0265 3; pos 347374 to 347991)
tgtctagaaagctgaaattatttcctgcagataaggtaagaaaatgaactacttttggattaatttttcttctagtgaattactgggtgggctcgtcacttttagtttgtgtgcgtctttaatcacatttgggtctatggttcgtctattttggggaagcttttatagcttgcgggattttgcgagaacttatgagttttgtaaggtgaatggaattctagggtgcttaggggagtggaaagggatcctaggggagattaagtccggcatttgttttcatgtttctcattggactttgatttagaagacctcatgtaactattctatagggactattttgtatgtccttgtattctttaatggaagttgttttcattgtaaaagtccattagaaaagaaagattagctttgatcatcacgacctccatctacgtcaatagttttctgtcctgcttgttatgtgttgtgttgaattgggagagtagcatccgatatgatcttttctttttgtgagtgtattttgatggaagaattaacagtgttttttctcttttgtgagatgcacttccggtcatcgtcataccaaaatgaaggtattgagctggtttttatatctaa

SEQ ID NO: 68118 - DNA, 723 bp, Cucumis sativus
  Intron number 3 from transcript Cucsa.391990.1 (locus Cucs a.391990) derived from phytozome v7.0 (chr-ID scaffold0406 2; pos 293809 to 294531 reverse strand)
gcagagacgccaacttgtggcatcttagtcacgaggtatgactctttgagattttacaactcttttaagtctaagtctttaaacactctcttcttctatttcttagtttcttgttttagtatctactttttactagcgctttttaaaaaatcaaaccgttttgaaaactaaaaaataaatttaagaaaagttgttttttgaaatttaaaactgaaagaagcaaacatattatcaatttggtttttggtttctaaatattacttacaatcattacaaacatattgttttttttttattatatcgtctactttctaggtgcttttaaaatcaaagtcaagtttttgaaatttagctaaaatcaaaaaacaaaatagttcaagacaggttttgaaaaaaattaagattataaagacttgtttaagtatcttttaaaaatctaaagtattttcaaaacttgttttttttttgtttcatataatttgatgaataattcaagtatttttgtcaaagatgaaaactaaaacttagaaactataacgaaacaaacacagattcaaaaacagagaactaaaaacaaaaacgttgtcaagtgagaggtaagttcactaaataagatatggaagcatttaaaaagttgtcattcgcaacttgctgcccagttgagttgtctcaagaaaagagagtcgatcttgacgttcttatggattgtaaaattgtagggag

SEQ ID NO: 68119 - DNA, 623 bp, Cucumis sativus
  Intron number 1 from transcript Cucsa.305160.3 (locus Cucs a.305160) derived from phytozome v7.0 (chr-ID scaffold0296 2; pos 26462 to 27084)
atcagggcttcgtcggaaagttgcacccaaaaaaggtaacccccacccttccctttgcttttctctctctatctctctctctctctctatttctctctctctctctctttttctctctgtaatttctttcattttgtgctgttagggcttctatcctttgccatttcgatcgttacccagatgaaatctacgtgagtagtttcttttcttcttatttttgcctttttatgtccttttccttcaaccccttttgggggttttcaattgggttcttgtaattttgctgtttcatgggggtttggctctgatttgtggagtttagagcttcaaaaatgctttgtattttgatgggtgtttgcgttttgggtttgtttcttgctgtttgtgggtttttgtcgtatcaattttgcattcccccttattatgttgtccgattgttttggaattatggcctttttgcattcttccttttcctttcttctgcttgggatgtttatttgtgtgggaattattatagatactacttgtgttcttccttttttttttttttttgcagtaattatgtcttctttgggttttatgatttaattgttgtgttgttttcctgaatttataggttggat

SEQ ID NO: 68120 - DNA, 772 bp, Cucumis sativus
  Intron number 1 from transcript Cucsa.201750.1 (locus Cucs a.201750) derived from phytozome v7.0 (chr-ID scaffold0137 6; pos 25121 to 25892 reverse strand)
gaacatattatcaccgcctttcatctccttccagagtaagtcttctgtttgttcccttcattccatttcttttctttctgttcatttttatagactcgtttgattttttgtttttttgggtatcaaaagattagagaagatttgggttgcttttggttatggttagaaattcagtgatttagaatttatgtgctgagtactcatgtagttttttagtttcgattttccgtatttgaatctaattaggaaatgttgtgaattgtttgaatgtttgattttggccatttgggaattgttctgctcagttcattgattaggaaaatgtttttaaattctttgtttgtacttggttgattcttgtatattactattcatttgtcacatctgtcattttgctgtcttcggcatgagcttgtcttattagctacttcttgtatagtctttagtttctttagtggaggagagtgatcatctgtcccgttatctatggaatagctttccttttgagggttctattgaatagttggtgagcaaagatgaatatgcagatgtagccaacttttttcgtttgaagttatgtacaccgtcgattctatcttgtagcattgaatttgagcataacttctatattaatatgtattttctgtgaatttcttcctctttcctcccccttatttgtttacattttctcaacgcttattagaaaatgggaggtttaatataaaaccaatatgaaattttctgattaaggtgtggttgatttaacaaaaga

SEQ ID NO: 68121 - DNA, 958 bp, Cucumis sativus
  Intron number 1 from transcript Cucsa.308200.1 (locus Cucs a.308200) derived from phytozome v7.0 (chr-ID scaffold0297 8; pos 388186 to 389143)
aggttaactcagccctccagactaaattcagccaggtcccgaagattccaatttctttctctctctttttttttctcttcttatgttcttctctgcaagatctctcttcttttgcgattttgtttggcttggatgtttcttattttaattgtttttattttaggaatttttgtgcttgtgtttaatttggtcttcatttcgtgtaaatctggtttgattttcatctcggtggattgataactgagaatcgtaatgtgtcgtattttgtgggcttgagaggctgctgttgatttagttgtggtctgtctgattgaggaatcagaatggaattggaatttggaaataaaaaatgtttcttgttatcaaggaaatgtttcgaacttgttcggatccagataatgttatatgcatcagaggataagaagaggctatataattctttattggagcaaccacaatgtcttcggtaaacttagttggacatttctattttatatgactattgtatcagctactatatcaggtatggattacttattgcatatagttcaagtgcaaattggagtgttggaacatggctcaaatagtaagatgtcagcacttctcttatgagttatcggttttaatcgctcctgtgtgtttgaaaaagaagtgcaattggaagctaaatcgattgctcataaagatgaccctgtaattttctgattttcttttctatcaagttgatcgtatgaatgactgaggaatgcttttaattgcgttgtattggcgttgatgaaatgaaattttccactcacgagggagggattgaattcttttttcctttatgaagaactactctattaatgaaaattgcttccttattgactttgccaaaaaactttcaaggattgcattattatttactgtttatctctgtgtaggaaccagagcccatagactgggaatattacagaaa

SEQ ID NO: 68122 - DNA, 396 bp, Cucumis sativus
  Intron number 2 from transcript Cucsa.341880.1 (locus Cucs a.341880) derived from phytozome v7.0 (chr-ID scaffold0335 6; pos 4320971 to 4321366 reverse strand)
gagtctttgagatcaattctcactgaccctgtgacgtgagtttttagtgtttccattatgtttcattattatttggttgagcctgttcatcatgtagaagtgtgaactttctagttgcacttgtgatttagtttgttttcatgaaggagatatgatttgttcttgctttttctcttttttgcatcttttagttaatattctgattaatagggttagggtatagacaatttttaactgataataaagactttgatttgattcttgtacaaagttattttattttggtcacattctgtggtaaaaattcttacttctcgatttatttttcgtctcaatttttttctggttatagatttgcttagatttgtttcttttcttgaaaccaggggcgcgctc

SEQ ID NO: 68123 - DNA, 712 bp, Cucumis sativus
  Intron number 1 from transcript Cucsa.310930.1 (locus Cucs a.310930) derived from phytozome v7.0 (chr-ID scaffold0299 5; pos 637368 to 638079 reverse strand)
gcatcgatataatcttaagcgcaaggtcttctttctatctctacatgtaatgtttgtgtcatgctgataattgaaaccaatcgcttaggttttctattgccgcagtaggttgatgtcgtttgttactgatatgaaatcgttttgttttttttcttttcccgttgctagttttgtgtttctttctgcttgcttgttggttttggcttctggagtatcgttgcccaatttcatcgattcggggtgtttgtcttctttgttgaatattttggtgtgaatatgtgatatgttgtgttttgggggtatgcatatacagaatttcgatcagtacgttttttttttttttaaaaatgaagttcagctcaaatgattgttctaaagcattatacgtggaagtatggaacatatcatctttctggatttccattaaatgcaaatgttccttttcttttcttcttgtaattttgtcgtaggtacccattgataattttgtttattgatttctcgtgagactcttggtggtggttaagcagcattgttctaaggttcactagatttcatcttgttgaagatacatataaggccaaacatattccgtgggataataattttattcacaattgaccttgctttagtatagtgttttggacgtgtctctttgaaaatacatcttatatcatttatctaattatattgtgaataaatcaggttgcta

SEQ ID NO: 68124 - DNA, 570 bp, Cucumis sativus
  Intron number 1 from transcript Cucsa.212260.1 (locus Cucs a.212260) derived from phytozome v7.0 (chr-ID scaffold0154 3; pos 60385 to 60954)
gccaagaaccgtgaacttgaagtcatccactctaggtaactaataattaaaagcaaagcttttcatattctttaataagactttttatacatgtaatctcgttaagtcaagtattttgttttcattttctctttcaaaatttagttcctaaatatttattcttttacgttgttatctttttttgagatcaaaatttgaattttttttgtacttgaaaattaaatttagaggatgatttcttcttttaagagttttttttttttttaatctactctctaaacaatactattttctaaatttgtttaagtttcttaaactaaaaaaataatattatttttaaaaacttactttttattttgaaatttgactcgcagagtttaaattctattttgaaaaatacaaaatttataagaaaatatacagaaactttaaagtctaaactattcaaagggagtgtttagatatacaaaaactcaaattgagtttgatttgaacttaattcttgggtttcaaacaaataaattagatgatgtttcccttgttgacttggtggtttgcttcaggtgggct

SEQ ID NO: 68125 - DNA, 777 bp, Cucumis sativus
  Intron number 1 from transcript Cucsa.279030.1 (locus Cucs a.279030) derived from phytozome v7.0 (chr-ID scaffold0262 0; pos 107215 to 107991)
gacgaattttagctgctttacggagggaaaggcaggttagccctctcgctctattgtttcttgattgtcatctgtgctttttcaataatgatgtattttgtttctgtctttcttttctctgttttttattataggtttgtctctgtggaaaatatgtataaagcaaaatattcttcaacttacggcagtaggagtttcattttgatgactttcatttgcttgcaagtaggagttaactgagtactcaaacttctttgaactagtattttttagccataaatgggtatgatattaaagtgaaaaaatttggaacgatcaaataattacgattgtttctagagatcagattttagtatagaatccttaagattctaaagcaaaaatattatgttagtaaggtgtttaagactgcgaaaggatggagaattaccattgagttctttgcagcctgagttattgaacaatagtttgaactattttacttatcaccatcagttggagaagtgtagttcaacattttgtttgtccattttcattcatcggtctcaagtgactgtagttgaaagttcatatgattgacaattgaattttttctggttatgtggattggtggcttttgggagctttactagtttcagtcgataagtgattgaagtaaaggagtatcacataggctacttgggcagattctacaaaatttgcttttccctttatatccttgataatggttgatttcatgcagttgcaacaatatttgcaatttctggaaatcaagtt

SEQ ID NO: 68126 - DNA, 738 bp, Cucumis sativus
  Intron number 2 from transcript Cucsa.340970.1 (locus Cucs a.340970) derived from phytozome v7.0 (chr-ID scaffold0335 6; pos 3347943 to 3348680 reverse strand)
gtcaagggccggagcaagagctgcaaaggtacttcaattttatttctttctctattattattttgattttgatagtgattagttgcttttttaattaaaattttcttgtgtcaaattttagaccagctttgttcttcagatacattcgtatgcttcacttttagacaattttcctgaacttaagattgtgttttatatttttaggtaaataatttgaatgaacttagatttctttaacttcaaataagtttactttttataaaatattgattttgttataaaacgattatttcaaaccatcaataacaagtgtagggtttttgtacagatttgaatccaaatattgaaaagtagaaataaaaattggcatggtttttactttgaattgaccaaaatttgaaaaccttttttcttttatgtgaaaataaaaaaagttctcaaatcttgagtagaagttgactactacttctaatgatatgttaggacttataaaaaatggtcttaagtatttaactagaaatattacctcacataaataagagattattgtgtcattacacagtttaacataaattcttattaaaagtcagctagttagcatagttaagtattgatattttatttatttttaatactataaacatattaaagttgaacaaacataattaaattattattaagcctgaaaaaatttgtttgattggtcttttttgtaggttgggaagggattatcaaaga

SEQ ID NO: 68127 - DNA, 556 bp, Cucumis sativus
  Intron number 1 from transcript Cucsa.238450.1 (locus Cucs a.238450) derived from phytozome v7.0 (chr-ID scaffold0202 3; pos 1008993 to 1009548 reverse strand)
ctattgaacaggaggtatgtcggttttgtgaatgtagaccctctgccaggtctctaaagagtttaatgtactttctggtttgtttgttagatcattggaagtaactcgaagatagatatgatatagaaaataattgaagtaagctaagaagggaacttcctccatttaattgaattagagttgggagaaaaggtgatccttcctgtgttgttctgtactagttgcaatttctttgttactttttaaggttttacgttatcattttcaaattcccatctttttgtatagaccttacttgaagaggatctgttctataggttgtacatttgtgtccttgagttctaattcccattttttgtataatagcttaagctgcaatagttgaagcagtatcttttgagatttttattgtgcctaggtgcaatatggaagtttttgacttttaacttaggttctcaacatgaattttgttccacattcaattgtaagtttgcaaccataatgttgtttaattatgtcaggtaagaattcacaagttcttggagaaaaagaaaga

SEQ ID NO: 68128 - DNA, 861 bp, Cucumis sativus
  Intron number 1 from transcript Cucsa.271090.1 (locus Cucs a.271090) derived from phytozome v7.0 (chr-ID scaffold0250 0; pos 37195 to 38055 reverse strand)
gattccttggaggaggttttgcctgtcaggttggttttctttttctttgataatcttgtttctcttgttttggatgatatgggctacgtgcttgcgcgatcttagtttggtaataaattttatggatgatctggatcgagtttaggggagatgaaattgtcggggaaggcttgattgagccttgaaatttagtactttagttgtacaatgcagttagagattggggattgttaatctgccctgtagaatgatggagtcgtttgatctatgctttgactattgatcaattaattttgtttcattctggacttattactgggattacgtttattttctggcggtgactagtatttaatactcttggaagagtcattagtctgggcatgaataagtttggcttgtagaaacattcatgagttaactgtatttttcggtgagttaataatgagaaaagagagcatttcaagctgaagattagcaaatggcatcgttttttcaatgcactttaagaattcttttgccatctttattgcaatatgttttgtggatattgtgtttctgaggtgtttttaagcttggtcagaaagaaatcattgctttgttgagcattgtcactgtcaaaattgttctgcgacactgcaagacattgactacttttgattttagctttatgatttcagcaacactatctctacttttgagatggaaaaaaggatcgagtatccattatacaatcaagtttttatacatttttgcagcagaaaaaacacaaatacacgtattttatttgttcctttatctaataaagaattattactacatgcagaaaaggcatctcaaagttttatagtggaaaatcaa

SEQ ID NO: 68129 - DNA, 785 bp, Cucumis sativus
  Intron number 1 from transcript Cucsa.288710.1 (locus Cucs a.288710) derived from phytozome v7.0 (chr-ID scaffold0269 8; pos 254658 to 255442 reverse strand)
ttttcttgggatttcactgttcttgatacttttgggtttgttcctctctgtttcttcttctagttcttcaatcttttcctcttgttttctagctctaagtttggatttggggttacattttggtttatttgaagtgggtttgtttggttatactttgttggatcttccatttcatttgcattgtcagtaatttgtagtgacagcctttcttgtgactttgttgccaaatttattgatagaagttcactgtgtatctcttctaacttggcattttcttttgtgaactttgaatgtatattgtgttagaacttgttgaatattacttactgttaggatcaatgagcagtcagtttggagaccttttaggaatttccatttaacaatgtaaggcttcagcttataacgtgtgtttacttgcaatgtcttcccagtgttagtaaaagggtattacataaatgataagttttctctaaccaatctgaactaaactaattcttattctacctatttggtaagatatttgtgtgctaggactgatagaaatcatgaaatagagagtagattggagctcaatgtaagtgcattgcaaagcaacttgcgtttaggctttattgttttaggaggaacgaagtacataaagaatgaacccttctggtagacagctgtttatttggtgatcgaatgtggtgtttttggttttcgtatccaccattgttcttattttcatacttgaaataatgttgcacgtttattgaatttggttgcaggccattgccaaggaagta

SEQ ID NO: 68130 - DNA, 986 bp, Cucumis sativus
  Intron number 1 from transcript Cucsa.384860.1 (locus Cucs a.384860) derived from phytozome v7.0 (chr-ID scaffold0390 4; pos 285663 to 286648 reverse strand)
ccttgagtactgcatagactctaatcctccttggggtataacccttctcccctttttcatttttctttatagttttctcttttctgacagttttccatttcccttctctctgtttcaccttagactcgttcttgaaaaccactcattgcctttcatgtcctgaaaatggtcggttggttttcacactgatgattagaatgatgggttgttttttttttctttttattgacatgaactgtagtagggaatggtggattttgctctattcttatgagttttctccccatttttgtattggtctctgcatttgcttgtgtttgagaagtgtacgtattgtgcaagtttcttctgtttaggttgttcgggaatttcttttgagggggaatgtggacttcaaatttaggtacattattgttttgaaaaacaattgtttttcgtcgttttgttgttgctgtcgctgagattattttaaaagaatggaatgggaatctgacagcagggtaggtgatgaggaatgtcttattattccaagtttctaaaggttccttctttgcatgctaaactataatccagctttcatttttcaatttgatacataaaaactgctaacctatttgaggatttctgacatactctgttaaatctttgccaaaactcagcattttttttttcttgaatgatctcaataataattgcttgtttgtttttgtcagcattctgacattgaagtgtttgggtggctatgacttttgttcttttacttttcttcttcatcccctattaaacaaagcattgttttgtgatgatattggaatttacatcaacaattcatttgtgaatggctatggtccctgaaactcaattatcagattttatgtgtgtttctgatgcattaaagaaatgcctgatttacttttctttttgagtttataaaatggtgatattttgcagcggaaaccattctcctagctttccagaattacatt

SEQ ID NO: 68131 - DNA, 371 bp, Cucumis sativus
  Intron number 1 from transcript Cucsa.342330.2 (locus Cucs a.342330) derived from phytozome v7.0 (chr-ID scaffold0335 6; pos 4679391 to 4679761)
tgtttaactcagtggttcagcccttagcgccgtcggtgagatcgcacccaacgttttatttttttgtttgttaggttattgttgatttgttctctgcacccacggagaagaaaatgaagaactgtttgttctcttcattggatttcttcttcaaattagtgttaatgaaaatataaaagcaatgtatacctcacaaatttgtaacataaatagattgaaattatgaatagaaagtagcaaaatacatattagtagagatttttctctgctccagtcgatcttctgaatgtatgagttgcagttcatttgattatctcatttgtgccttttgttgcaggaaatttagggtttgttatttgctgaagaaaaga

SEQ ID NO: 68132 - DNA, 947 bp, Cucumis sativus
  Intron number 2 from transcript Cucsa.395930.1 (locus Cucs a.395930) derived from phytozome v7.0 (chr-ID scaffold0410 0; pos 1293149 to 1294095 reverse strand)
gggaactggcatttctcttggttcaaggtatatttagaactactagaaaattacttccacggaaacatttttctgaaaacatctaataaaatgcgtcgctgatagaaaaataattgaaacatcaaatggtcagaatgagaaaaagtaaactatatgataataacctaccaagatttacacaagacacatgtcagtatatatccaaacctacgttccaatttaaggttgcgatttgagtgggttgctgacgaggacaatgaaatacagaatactacttttaatatcagtttatatgtcatcttacgttctgtacatggttagacatctatggtagttgatagataaaaataaatgaagttgcatttttggtgggcaatttacacccttttgtacgagcagatagtaacatttttcttggaatctacactttcacaattgatacaaccttgacctagtacactacattaaggaagacctagcgtagggcattcagatgctagtttattttcttatttttaaattgttttgattaaggttggttaataattttctccctgcccattggcctatctttaacacgatgttgtttatactgaggaccgtagtcaactaagttcaacccaagtgtaaatgataacctcctattcactacagtgctctgctactgttggtcgtatagataaatcaagttctccataatattggaagaaaagtggagttgtctgaaatagctaatctaactcttacttcatgattgcacattgtgtcgtcgccgggttgcatttccagaatcattgtttatatacttgcttgaattttgttttctcaaatgcatggatgattttgctataaattatattgaattatcctcttctgatggccattatttttcgtcctttttgtttgccacagctataattttggttgccgttatctactattactct

SEQ ID NO: 68133 - DNA, 590 bp, Cucumis sativus
  Intron number 2 from transcript Cucsa.255420.3 (locus Cucs a.255420) derived from phytozome v7.0 (chr-ID scaffold0222 9; pos 3431787 to 3432376)
tgccacaagcatttaaaaaagtaggaccagatatttcttttgattatggtctgttgagctaaaacaaacattgcgaagtttgtgtctgcttgtgcagaatagtctgtttaatgttgtctagagatcgaagaacaatggtgtttaaagagatcaaatttaaaaattgcaaacagtttgtattgtttgatcgccttcttacatttcagtttttttttaatattaagttttctttttgttctttttagcaatccagttttgaataaaatacaaaccaaagcatgcttttgtatgccaatgcatctgtgacttattttcaatgaaattgccggttctgctgagcattaaaatcaaggttcttgtgtttcatctagatgttcttcagtcattgtatttatgttggaagtgatagtatttgtgaccccagcaatctccagacttcgtcatttcattgacatgttacatcattctttcattttctattgatttttttgccacaatcttagtagatctagaaataaatcctactatctaacttaaaattctaatatgcagcagtcaagccatcacaactgaaaataaaccaggtattc

SEQ ID NO: 68134 - DNA, 535 bp, Cucumis sativus
  Intron number 1 from transcript Cucsa.251600.1 (locus Cucs a.251600) derived from phytozome v7.0 (chr-ID scaffold0222 9; pos 628434 to 628968)
aggaggctccaccactttcaattctgctactgttggtaagcctctttctctctaggttcataggttaactgtttatatgataatttgcatgcattataacaacatttgaacatgtcaacctgcatatttctcccattccaactccaccaaacttactgacatgacatggcagctttgtcatctagaataaagtttcttctatttcaagacatggtgcatagatttttctcctatcttccatttccaaataaaaaataaaaaatataagtttctcaaacctagaattattggtggccagcatcccagctttctttgtcagcatcaatataaaaatggcaatgtgtatataccgcatttcatcatatgaatttcatactatacattatatagctgtcaaaagtcaaatacttgtatacatttttattttttatatacattcctaaaacagcattgtgaaatcaaataacgagaaatacttgtttgtattccgtgacaatcagcggtgactggtgaaggatttatagctcgcggcatc

SEQ ID NO: 68135 - DNA, 967 bp, Cucumis sativus
  Intron number 1 from transcript Cucsa.378940.1 (locus Cucs a.378940) derived from phytozome v7.0 (chr-ID scaffold0381 0; pos 390077 to 391043 reverse strand)
aggacccttatcctaattgactctggaatctataggtcattaacttccataacacatttaaatcttccagctacatcgattcttggcaagcgagggcagttaaaatattttgctttcaatagaagtttttgattttgatgtgattttagtctctctttaacttcttctaaaccatcttttattttcgtcctagaattttctaagtcctattattacctttatcaagtttagttaaaacgttaaatcaaatttttatatggatgttcttctagacaccctaaggatcaatgaactactccttaatatgaacaaaaacgttacgtctgtctcgcacttattgccttggccttggtataacgttagagatgtcttgtccatcgtgagatggttgtagctctaactcgatgggcatgacaattttttttaaaaaaaaattctcaccctttcgccaataatcgccctcggtggtgccatccaattgggatattcaaacatagttctgtcacaatttttgaaaaaacattgtgatttttaaacaagacatgaaatgtccttgaagtatatgggtgaggttcttcttgaagtggtacgcttaagtatcggggtgggagggaacccgagaggccgaccggtaaaagggtgaaaaaaagtgaaaaccgtgatagacattaccatcgggatcgaactacgcctatttcacgatgggcaagatgtccctaatgtgatatcaagtctaagattgcaagtgtgctatgatataagtaaaatgttggatttcatatatttttaaggagtgaataattaatctaggagtagaacctttgagagatggccatcttacaaaaacctcgtaattaaagggtatgaggttcataaactcgctatttttttcttttttctttttgttgagttaaaagaaaaattgttggcagggagaaggtagtgatagaagccaacaaaacaaact

SEQ ID NO: 68136 - DNA, 954 bp, Cucumis sativus
  Intron number 2 from transcript Cucsa.364430.1 (locus Cucs a.364430) derived from phytozome v7.0 (chr-ID scaffold0361 1; pos 1900788 to 1901741)
ctacttctgtaagggaggtatgttctggatattggtggagaaaattagtgtacaacaaattgtgtaggatatgtaggtttcttctgctgtgttgcatcctagaggatttttttagagcaaaaagaatcaaggaataacctaataattaaaatgtgtctgccttggatgttcctgtatgcaatatgttgttccttaaaagaacaagcagaaaagcacttacttgtatgcaatatgtcggcatcggatcgtatgaaaatatatacaacttttttgaactctttattgtaagtgtagcatgatcgatatgtaacttctttctatcagtatcggtttcaatatggaaaccctttgcctttgtatgtgctaattagggagttaaacattttcggtgggacggtcttcgcatcaactcaatgagtttggaattttaactttagaatgaacttaagagagttcgaaatagagggcttatagatccttacttctcttcctaaggtgcttgtcatggctctttgaagagacaaatatcctaataactaaactaataagtaagatgtttcttctccttcaaaaaaaggaactgttgaggtattctttaggtcagctctgattttttaagctttgagtcttttgttgcttctttttagatcactttggaagctttccaactctttgtttagtgtttattaaaaaagaaaaaggatcacgctgtacttagtatcttgcaatataacataagaaaataaatgtttaatcgataagatagatgtaggtattgctctgagaacttctctcaatctaattctgattttgcattagtttccaagattcctagccagtgtcgaagatgctctagttttttttttatgataatgctctagttccaggtttataatgaagaagtgtaattttggtgcagcttcttgctccactgaagtctggcatttccaaaca

SEQ ID NO: 68137 - DNA, 553 bp, Cucumis sativus
  Intron number 1 from transcript Cucsa.249860.1 (locus Cucs a.249860) derived from phytozome v7.0 (chr-ID scaffold0221 9; pos 8796 to 9348 reverse strand)
gaattacattgctgaacactttgagggcagatctggtaatttccatttaacatctatttccctttgtagggttcttttaaaaagaaaatagttttgtttctgtagtttaaatttttttatgatttagttgataattttcaacatgaagatgaaatttgatgtcaattatattaataatagttgacaaagaggaaacagaattaaaacttcacttggaaaggcaaagtttatcacattctaaacccattttacatatcatatgtttcaataatagtgaaatgttaaataacaaaacaaaaactttaataatatatttatataccatattttataaatataaaagtgatcttcgtctattaaatttataaactaatcaatgatctaacattatatcaagtcatcttctccgttctttacatttttgttaagagtccaaataatgtaaatcaatgataatagttattattaacttttaaatgatagggaataataatggttaattttctccgactaaattaattttctttggtgtaggaaaaagttgtagattgag

SEQ ID NO: 68138 - DNA, 524 bp, Cucumis sativus
  Intron number 1 from transcript Cucsa.356100.1 (locus Cucs a.356100) derived from phytozome v7.0 (chr-ID scaffold0357 7; pos 832877 to 833400 reverse strand)
agaatcatcctgacaagggtggtgatccggagaaggtaacatgatttcttatttttttgttttttttgttttgaattgtctctctgctttcagtttctgttgaatctgattttgaattctgttgaagattttaatgaataatgatgtccatattttgcttctttcggtggttcgttttcttttctttgtggattatggttctagtgttgatattacaggaaactcaatcgtctggaaattatttaattttacatggattttgtaatttcccgctttgtaagcttttttctctatctagcatcgtttcctgtgaggctgtgaactgggcagaactcagaatctagtgatatttatgttttttaatctattgtacacttgtaaggcaatttggcttgtgggtctaggtttttgttttttggtgctttaagtttcatacatacaaccttggattttgatgtgatgctttgcgcatatgctgatgataatgactttgttatttcagtttaaagaattggctcaggctt

SEQ ID NO: 68139 - DNA, 562 bp, Cucumis sativus
  Intron number 1 from transcript Cucsa.313410.1 (locus Cucs a.313410) derived from phytozome v7.0 (chr-ID scaffold0299 5; pos 2578211 to 2578772 reverse strand)
gatccagattctttcattcatcatcttatttcaaggtatatttcttcatctctatttcactttcttttgccttttgattattcttcaccggtctgacattattatatcaatctattcaagtatattattataacgatacctttataaatgtgatgaaagtgatagagatgcatgtcaaatttaactaagatattttgttgcacctattgtttttcgtcttatatcattttgcttaaaaaatgggtatcgtggtctatccacctaaggtttcaagctagcttttaaatagagaaaccatgaaaaccatgataagaaaactgtaaaaaaccaatacgattttatttttaaagaagcaaaatcaaagatttacgccccaccttataactaatgggttattttttgcttttgaaaactttagtttataattactcattccgtccctatctttgtttactttattttctagttactaatattttaagaactcatctaaacttttgaataaaacagagggtttttttttccttaagaactcattctgaccaataatttctaagcagaa

SEQ ID NO: 68140 - DNA, 275 bp, Cucumis sativus
  Intron number 1 from transcript Cucsa.255520.1 (locus Cucs a.255520) derived from phytozome v7.0 (chr-ID scaffold0222 9; pos 3482622 to 3482896)
agtatcatagtcctagaaaccttctccttgccgtcaaattacttttcttctctcttttgatctctcaattgcacttgattactgattagcatttaagtttttccaatgaaacagagtttttaattataatcatcttttgattttgtgctccaaatttgtggtttatgaacttactagatgttttgaaattattattatatagagggaaaaaatgaattgaattattatgatgatgaacaggtaggagaagtaggagagttatcagaaatattcca

SEQ ID NO: 68141 - DNA, 1003 bp, Cucumis sativus
  Intron number 1 from transcript Cucsa.365570.4 (locus Cucs a.365570) derived from phytozome v7.0 (chr-ID scaffold0361 1; pos 3410185 to 3411187)
gaggtgtgcgatttaacaaaatctgagctgccgaggtcaatttctcttctaaacctaatatctgatttgtaatttcccctcatcctcttgcccttgcccctctcattgcgatatgaaatttgatttatgttctttgtttgtaatcttctgattccaatcgccatgcctttctgatttccttcaaattttgtttcactttgtaaaaaaaaaaaaaggagtaaggagtgttctatgtctgctatactgaactaataaactcttcaataatgcttttggtggttttggggcttcaattctcagttctttgcattgggaggatgaggattttgtgtccttcgagatactttaatttttgtggcatggttatgtaatgatgagaatgcctgttcttctgttgtttttggagtctttcccccctgaatgttggtggaattaggcttcccctttttgaaattattttccaaggaagaattttgtatttgatttctttcactagtgaagttaaattgtttatttatttctgcattgactattatgatatgccttctggaaagaattttctgccgttatctgcatgtgggatacttgaaaatgattttgtgatcagtatttccttttctactttttttttttcaaatgcatttcttttccggtggtgctacccaatcatttctatcttgttccttgcttgaaattttcgattgttatattaatgtgttaatatgatgccttttaatgtgacgacattttgtattcagagtgaattttgtaatgtgataaatactgcatcttcagagctaaatagcatcacgtctctttaactcgaatgattctggtgatgccatctttcaggactctattccatgtaattgttctgacttctataagtttgagttcaagaaatgtttatgacattaatttggaatctccattcgttctagtgccccgattttcaacctgaatccaagaaactgaaccatctgttccacagcaggaacacact

SEQ ID NO: 68142 - DNA, 308 bp, Cucumis sativus
  Intron number 1 from transcript Cucsa.242300.1 (locus Cucs a.242300) derived from phytozome v7.0 (chr-ID scaffold0204 7; pos 2051320 to 2051627)
gatcgccgccccattcctctcggtgaatatcatctccatcttttccttttcattgtatcttctcattttctattctctatgctggtacggacggagttggatgaaaattttgtacaatcattgaatcatagactagttaatcgcatctggctgtctttttcgttcgtaaatttgcttgtcttttgttttgatgaattggacggaaatttgagtttgtcgataagttaggggactggaattattttgattttttcttcttctaatattctacagattcggcatcatcgacctttatacaatctctcaac

SEQ ID NO: 68143 - DNA, 253 bp, Cucumis sativus
  Intron number 1 from transcript Cucsa.374700.1 (locus Cucs a.374700) derived from phytozome v7.0 (chr-ID scaffold0373 5; pos 194206 to 194458)
catcgcgacaaactccaatattggttgaagaagtgtggaaaacacaaacaaataatgttggacacactcaaagcaagttttcaaagatagataagaacaagataaaaggaaggtaggagaaatcataaaagaattgaggaaagaaaaatatccacaaagaagatcaaattcagttagagggagatcaagatcttattgaagttgaagggacgaagttaaagccgtttagaaacacacttaaggtgctttcgaa

SEQ ID NO: 68144 - DNA, 888 bp, Cucumis sativus
  Intron number 1 from transcript Cucsa.236660.1 (locus Cucs a.236660) derived from phytozome v7.0 (chr-ID scaffold0201 8; pos 580516 to 581403 reverse strand)
ggtctggcgctacctcaacttcttctgcaattgaggtgctttctctcttgcgcgttcttcttcttcttcatttctcatttcctttgaagtcactccttatcgtgctaaacatgcttttgtttttttatatttttatctattattactcgtgctcagttcacttgaatatggaaaaggtgacaattgaaaacgtacttttgtagtttgtaaatatttttctccattggctagtacgtctaaagcagaattcttcaattattgcgtttcggatcattgttcttttaaaaaatcgtcttcatgtttaaggttgtgtttaaaaactgatagaattgaaaggatttgctgttctctatggtgtcagtagttgtcgaggagcagagctggaaatgttcaaaacttgtggatagaatgtaaacgcacaagattctgatcattaaaacattctctcttattcaacgctttcccgaagtattttgtctgaggaaagataccaaaggaagtaactaaatcgagactcatcaaggaactagctgtgaatcagctatgtagctttgcttgtttgttaactattatgaaccaactatgttgtaggttttaataaatcatatgttgtctgtcttattaatttcatatggttaattccatcatattttgctgtgaaaactgaaactagctatggattatcttcatttaagtaatgtcataaactttgatatagcctcctttgcttttcatattttcttaatttttccgttcttaagcataagcgcatctggttctttgaacatattaattttttttcttgaatttggtcttattaaattcttctctaatacttttaaattcaatgtaggtctccaagcagtttgcagattgcatttccttacc

SEQ ID NO: 68145 - DNA, 456 bp, Cucumis sativus
  Intron number 2 from transcript Cucsa.348740.1 (locus Cucs a.348740) derived from phytozome v7.0 (chr-ID scaffold0348 7; pos 167302 to 167757 reverse strand)
aattaggtgttttttctttcgcttattttaatacttgcttctaaactgaggactataatcattttcttttctttttttcctttatggtgataactcgatttcctgttatatgttctaactcaattgttaacttgaattttgggattaagtggttagctaatatggcatcagattaggagattcttaatttgagctgaattgatccctgggatgttattttctcccaaattcgtgatgttaatagttcatttgttggtttttatgaatcaaagtgatgaccccatattgatctataaaactttggtggattaatatggagctccatgtttcgttttcaaaccagcatgagtttttcataccatttagttttcttgaatccgtttatgcattttgtaagctgacaagttttttttccgttcaggtccccaagggccacaattgcaaaaggtacttgag

SEQ ID NO: 68146 - DNA, 996 bp, Cucumis sativus
  Intron number 2 from transcript Cucsa.283580.1 (locus Cucs a.283580) derived from phytozome v7.0 (chr-ID scaffold0265 3; pos 643850 to 644845 reverse strand)
ctggagcagatatcttggtttcttcatcttaccaggtttgcaatgccaatgggctcagctttctttgtttttgtacttttcaatctgtgatcgctttggagtgtctttttttaaaatgttctactcttgtttgtttaaaacttgatggttcgaattggattttttaatgacgatgaacagaacgagtgaggatcaaactgatcactcctcttgaattgaaatcaataagttcataatgaacgcttctgccggtcgtgaaatgatgaaccaaatttgatcccctgttcatcgaacaggatcaaattggataaatttcaatcaacttaaatgaattggattgaagttctttccatgaagtaacatttctggaaattcacgttgttataattagtggaccaatgtacaggaagcagacagtatttaatatgtggaaggttaatgtttgtgtgcttaataatatctaaccacatcggtttagctccattgtcaaaatccctattctaatgtatcattacctatgtaagatattaaatatcctgtaagttttccaatgttaaacgttgcaaaattaagtgatcaattcaacagattgattgaatggcatttaaaatgacattttgtttgttatgctaatgtaaaagatcttcatttttccatttaaaatgaaattcagttttgtataactcagaatttgtatatatcaatattattgaatttatatacccttttagtttcataactttattgttccgtattagaattctttttacaagtttgtggcttatagttccttaagaattccaacaagctttaggaattgaaatgttttctggctttatttctcataatttttttttatagaaataattgcttcttttagaaattataaacagaataccaacaaatcagtattcaagccagttaactattctctcttgttgaacattttattctattacaggccacaattcctgggtttatatcaaaggggctgtc

SEQ ID NO: 68147 - DNA, 695 bp, Cucumis sativus
  Intron number 1 from transcript Cucsa.312830.3 (locus Cucs a.312830) derived from phytozome v7.0 (chr-ID scaffold0299 5; pos 2126367 to 2127061 reverse strand)
ctcccgcgcatttcttgatcttcgctccgaagaaggtttttcttttcaatctattactctctctctattcttgtaatttgttgttttttattggtagcccttatgattggttttcgaattgacatgtaattagaaacttcttgttgaatgctgctgtgttactgttttatgattgtgattgagcttcccactagatccattcactggattttattattttctgcactctgagctggctattaggaaaaggggttttgttctattcattgtgtagtacaaccacttagtagtagtatttttaaaaaaaaaatttttgtttgaggattatgaatttttcatgatcagggatgattttggatagaagggagcagtgctttaaatttggggatgtatgtgaagagtgcccttaacggtgtagtttatgaggatgcttttaacccaaccctttcatttgatttttttttgttgctgctgctgctgctgcagcagcaatgaattctttgttgttgtttatacctgatatcgattttgctttttagtacttcttgtgcttcttactgtattttttagtgaaatactttttttaaaaaagaaagcaatcctgtaaacgcaacatgtagaatgttgatttatcttatttgcagagttactctcctgcatcaggagggaaacagaagctggaaagctgccttcaa

SEQ ID NO: 68148 - DNA, 771 bp, Cucumis sativus
  Intron number 1 from transcript Cucsa.395600.1 (locus Cucs a.395600) derived from phytozome v7.0 (chr-ID scaffold0410 0; pos 1108558 to 1109328)
gctcgtgccaaagctgctgaagccgctcagagaaggttttttttcctttttcctttacctttaactttcattcccaaatgtctgttcatcatgcttcttctttttcaatcacaacgccttttcatttctattggggatttcgttgatcgttttgccttttcagtcggtccccacaattccatttttgtctgtgaacgtgaattgtttgggatgtaacaattctgcaggggaatgaattctgtttgaaaaataatcgcacaacagcttgtttgattagggttttgtagtttgtctacaaattccttataaatctgttgttttgaaagtgtgattttatttagtagtatgtaaaatttagcttctgttagaaacatgcctgttatcaaactgatctatagtctagatcagtttagttttataagccttctttttccaacaaaattcgtagtgccgtaaaggctaaataagaagtaagcaagaaaagagaaactaggagtgctctaatttgagctgattggattgcttccactaattttcaccttattaatgccatttggtttaagttgattgcttattcataccaaggatgtgacttgataatgtattggctaccaattttagattgaaatgggaatttcaagttaggaactttgatgggaattatccatgtgttttacacttcttttagataagagatccatgtgttttatactgaaagtgatataaatatttgcaggcaagaagagtttgaaaaatctgctgcaggaaggg

SEQ ID NO: 68149 - DNA, 988 bp, Cucumis sativus
  Intron number 1 from transcript Cucsa.210580.1 (locus Cucs a.210580) derived from phytozome v7.0 (chr-ID scaffold0149 0; pos 621 to 1608 reverse strand)
aaaatccttatcgattcgatcggtttcagtcccaggtacgctctaattttcaattttcccatctgttttccgttattatacttggctatatcaccttagttcatcgttgtactacttgggacgaaattaatcagggttttgtttttcccttttggattggattgaaatttgaggttgtggagaacgtctggattagagttattttttaaaaaaatcaatcaaacgtaggattcttttgttggttgattgtaatcgaaattgatagctggtggatgtcttgtgttgaaattaagtaacagaattttgggactttattgttgattttcatggaaaataaatttcccctgtacttgtactgacgacttgtttatgagttatagttcaagatccagttggtgatatacaaaccgtgaattttaggtctttgttttgttctaatgcctaaatgattagtaggatggattggccttcatgtggaggcaaaggtgtttactttttcttgtgtttgataccattgattggttgtttgttttagagcctgtttgggagtggttttgaaatggttaatggctttctttcatgttcaaaaccactccggaatttgtctttaatcattaaaaaaagatttaatgttcgataatttcacttttaaatgcaatttccatatctctaaatttaattttgaaggattaaaagcatatttcaagtcattttggatatgaaaagtgattttaaccctttcaaaataagtccaaacatgcccttttatatcttctggtgcaaattatttgttgttttctctatgtcactttccctttgcctgttactgcagatcaaaagataaaacctaatgaatcttgtcctatagttttggcatatgaaatacgatgagtatatcatgcagttatgatcaaagtttgcctcgtcatcttatgttttttgtaattaaacagctgcgccagcatctgagggtatagcacctgctatc

SEQ ID NO: 68150 - DNA, 903 bp, Cucumis sativus
  Intron number 1 from transcript Cucsa.309000.1 (locus Cucs a.309000) derived from phytozome v7.0 (chr-ID scaffold0297 8; pos 985367 to 986269 reverse strand)
aggaagaagccaaacggttggcacaaatttgggaagtaagttttataattaatctttcacgaaacgcatgtaaacagagtacaaggttttagcctcttttgatcgcagaattataatgtaaattcttatattgatttgagttaatttatttatgaagaaacaaaagaattagtcttatgtatgacaaaaggttcatgattttgaaaagaaaaaaaaaaagacgacttgaaatcaataggatcaacaaaatttgttcctggaataaaactgtaacggagtggaaaaaaagaactcggaatttcggaattatcaccaaaattctgtctcctccttttctcagttcattataaaatttcaatcttcttcattttaaattcaacacacattaagtggaaatggatgaaactaactttttacaaagtggataaaaaagattatggggaaacaccaagagctatccacaaagaaaaagatagggaaacattagaatctagattaatgtatttatagtttagtttgaacatccaagttcgtgttaattttcatgagattctgtaaaactataattacacttttcatttgggtactctttccaaaatttatggaagactgaaaagggattttttttaaaaaaaaactaaccatgtagactaattgttagattaatcaatagtcatgaactaaatttaaacattttaagtgaacatgaactgaacacattaaaagatacgagaactaaattaaaatttcaaccctaattaaaaaaaacaacaattatcatagaattgaattttgagttctcggatatgaaataaaatctccaatgtagaaagaaatatgcatttttttaaaaaaatacatggaacataaccaatgttgtggatgatcaaggagctggaggta

SEQ ID NO: 68151 - DNA, 806 bp, Cucumis sativus
  Intron number 1 from transcript Cucsa.391730.1 (locus Cucs a.391730) derived from phytozome v7.0 (chr-ID scaffold0406 2; pos 145207 to 146012 reverse strand)
ctttgtgagcttctctttatctgaattttcttttatacatttttctattctgagttctttatggttgattggttgatgccatgtcttttgggctctttctaaaacttggttatagcatcttctgttgtgggattttgtaacccattgcaaaatttaacacgttgtaaatttattttttgagttattggtgtgaattgtttgttcatgtcctttgaagttaatgaaaatgcgactggttagagttaccaaggtttgcctttatagcgttctggttttggttccatacttggtgggtttgtgcttttgaagaggagaaaggatgctaagattctctatactcttgatgatgctttaaagaaagttatttgtatctgtatgaaatgttattgctcaaaaagaagactaaaataatcgtttaaaactttttgcgggtacccttcaaattttcagttacttccatcttaaaatctcaataaattatgatccccacagacgactttggagtaagtgaagcctccctggagttagttagatgggctatgagcataatgcaagtagttgagttctcgataacaaaaaagttgatcaaagacaaaagtcaacagttgctcccttcagtttctcaattgttctagtatagttgcatttgctgtcattataattagttctggagtttatttgtaaattcaagatatgttgtgctctatcaactaaaaatggtagtttaaatatgggaatgaagcaattattttatattgaaatatcattattatgatgcagtgcagcttcatttccaagagttaagg

SEQ ID NO: 68152 - DNA, 327 bp, Cucumis sativus
  Intron number 1 from transcript Cucsa.267080.1 (locus Cucs a.267080) derived from phytozome v7.0 (chr-ID scaffold0236 4; pos 145893 to 146219 reverse strand)
tcggcatagcgattgttctcgccaaatcaatcttggtaagtactaaattacttttacaaatcaaggccttccaattgagagatcaattcttctatgctatgagaacttgaattcatgttaaaggtggaaattttgtcgtagctgtatgattgaatcccttttccttgtgtattaatggcattctatagtattgttcttgtctgtcaactcgtgatcataaactgctgctcagaatgttttttttgagattgagaaaaaaggaataaagggtttgagtgattggttatacatttggctcaaataggaaaggggggagttacccataat

SEQ ID NO: 68153 - DNA, 907 bp, Cucumis sativus
  Intron number 2 from transcript Cucsa.308950.1 (locus Cucs a.308950) derived from phytozome v7.0 (chr-ID scaffold0297 8; pos 926184 to 927090)
tggaagggattgaagcagagctgaacaaattcaaggtgcatatttctaattgaatagctctcttgactctgagtgtgcagttttgatcatttgattgtttctaacttattgaacattgaaatgaattatttatggagttctagtcttctactcggctttcgtagagcgtaaattgttctgtcattgttatctgtaaccagaggattgcttcctcggcataacttcatatagcgatattaatatttgatttcgaatttcttttgaagttatcttctataactttatttgaagtgcgttttaaatattaatgccgactgttctgagatactagcttgtttaagtcaaagtttaccgtaaaattttcctttctcttcgattttttcaaaaatcattcagaatttcatatttataatgaagctttcatgtgccaaggcacttgaacaaatctgcaatataatcctattcgagtaatctatgttctctcaatagctgcagtagtaaactggcctagaagattaacattattgagctgtcctttctttttcttctctattttctttttagaaattatttttggagcgagcataaattataaatctgattttattatagtaatgagtttctcctaggaagaattttccacttccatctcttatctacaatttcataatgttatttctacacgaaaatggaggaaacataatctaccaccgcaagtttgaacttaacagtcggctcgagaaatatactttgtttaagttgaggtgttttttcgaatgtgtttcatagctttcatctttgttgaagattggtttataatttgcgtgttttaatcttatgccttacaagaagaaatggtgcgtttattttggcagcttggctccaagcaatttggataattgcctta

SEQ ID NO: 68154 - DNA, 745 bp, Cucumis sativus
  Intron number 1 from transcript Cucsa.308370.1 (locus Cucs a.308370) derived from phytozome v7.0 (chr-ID scaffold0297 8; pos 504708 to 505452 reverse strand)
cttcgtccttgtctactgcactgctggcatttcaggttcgttaactatatcctgagcgtgtaactacgtgattaacgattttacatcttggtcgttacatacatattcttactttgagtaaagaaagtaagggataccattatagccgccattttgatgtaaaaaacgtagtttgttagatttttttttttttatacaaattgagaatagtagaatttgaactctagacctcttctcgacccctctggttcttacgttaagctaacagtttagtcttgttggctagtttgtttgatttaatatggaagagatgttaaacaaaatagcttatttagtaaaagaagaattttttctttcaaaatctacatattcatacattattggtaataaaaatatagtttaaagtctgggatttattcttcctatatgggtttgaaaagagaagcagaatacatttttgtaatttcctatattattttctaggtcccttcctgataaaacattgaaatatttcttcacagagcagagatctttaatattttacgctgtagatttttttattccttcatttaatgagacagtattgattattatacatatatacaaaaacaaatcagatcccaatcaaaatcaaaatatttttttgccaagtttaatgggtgattttcttaaaaatgattataatatttgtgggggaaaatgaactgcaggagggcacataaacccggcggtgacgttcgggctg

SEQ ID NO: 68155 - DNA, 657 bp, Cucumis sativus
  Intron number 1 from transcript Cucsa.307200.1 (locus Cucs a.307200) derived from phytozome v7.0 (chr-ID scaffold0297 7; pos 443907 to 444563 reverse strand)
tggaatttcgtgagtcttcggtttgcagcgctaaggtactgagaaatataacatagttttctcttgtctgatcgtaaatccgtctttacattcgtgatttttgatctcgttcttcatcgcattcgctttggctttcgtattttttggctgataaaagaggactagttacgacttacgagcttactagagaaacttagttatgtgttcaagattgtctagcatatataatagaagttttatttgtcaatggtggtttaatccgtggatttttcgggtcctgtgttagtctaggagcagtagaggttcgtttatttttgttcaaattgacggtgaatatagtttattttatatttagcttttatggtttgagacagacaattctcagtggaatgctccaatttctatcagattatcatgtgagttgcggattggaatgttcacctctgagtgcttttcaatctattgaagtgaaattgttagtgttgagctaaaatactgtttgttctcgtgtcttttatttaatgtttttcttgctgtgtagtttggttctgatcattgataatatgtaaattgttgaagcacaaaagtttggcaatcttatgcaatgttggatctcttgattatataggaaggtgtttactctattagagctaataa

SEQ ID NO: 68156 - DNA, 601 bp, Cucumis sativus
  Intron number 2 from transcript Cucsa.251300.1 (locus Cucs a.251300) derived from phytozome v7.0 (chr-ID scaffold0222 9; pos 426721 to 427321 reverse strand)
gaaaccaggttttctttgtttaaaccttcattttccccactgattgtatcggaatagaatggccttggtttctcgatcttccgcgatttaatctaattttagatatttgatatggttggtgaatataatcggagttcaattttgcatttgattagggatacaaacgcttatgaacatctctttaggttatggtgatagattggtgttatacttcatcttttcgagacaaaatgaaatagaaatctaatcgggtttctatttctcgaatcaggattatgatgggatgatagtctgttgatttatatgttcttcaaatcagttatgcatttattgataaaacattactttggaaatcattcatagtaattaaccagtttgagtaatatcttatactcattaacgtctagaacttccaaaacatcagcagatcacagtgttgatacaagaatttgaaaggacaccgtatgataattcaaaaacaatctaagttatgtcttttactttcagataaatttgggaacaattaaacatgttacaattaatcattgaagaagtttgttttgtataaagagtgatgagtcttaacttgtgtatcagattt

SEQ ID NO: 68157 - DNA, 610 bp, Cucumis sativus
  Intron number 2 from transcript Cucsa.321940.1 (locus Cucs a.321940) derived from phytozome v7.0 (chr-ID scaffold0308 0; pos 1769643 to 1770252)
aagctgcggacaggtaatgcttctatatgataattttgtttagaacttagactgtttgtgatgtaaccgtatacaaccaatgttgttcgattgttactatattgaatacatgctcttcacttaatatcaaaattagggggtgtgtgttattttgtgggatatttgggagtaaaggaaaaacagagtgtttaatgatgtgaagaggaaccttgatgatttttggtccttggtcaggttccatgtgtccctttgggtttcagtctcgagaacttttggtaattatcctctaggtaccatattacttagttagaaaccctttctccaagaggttttgagagctggtttttgttgctcttgtattctttcatttttttctcaatgagagcagttgtttctatatatatgtatatatctatattagagagtgagtgatagagttcttggttttaggatgatcagggttagttcattgtagtcttttgctaccttaagagaccttcattttaggaaatgtttacaggagataatacctgaatatggttgctttattcttattaatacaattttttatagcattcttactgatgtcgatatactctatgcagttcac

SEQ ID NO: 68158 - DNA, 564 bp, Cucumis sativus
  Intron number 1 from transcript Cucsa.212300.1 (locus Cucs a.212300) derived from phytozome v7.0 (chr-ID scaffold0154 3; pos 97305 to 97868 reverse strand)
ttgcaaatccaaacttgatagtcttgaaagaagaggttagaaatataagtccctgtttttaaattgacaggtttactatgtaataacaatgtgattttctgtatcttgattttgttctactatctgtatattttctttaactgaagtatgttgttggctcaatcttttatcaggtggtttgacattttcataaagcctatagtttagaactatctgaacactttttgtgtgaagacccatttctgtttttgtgagttttaggcatgataagtctatttaaatccttttgaactaaattaaggtggtgcgtattaatttgtgaacacctagtattgatttatattcattcattatccatgagtaacctttcaaagtaataaatactatatttggttttcctaatcttagttgtctatgcattataggtaatgaaataccttatactattaatatttccttccttttcatggagttttgcttgtattggattttatcaatctttttggtgaaaataatggtttattgaaagaaaaatatactggaagtactttcctattttatttt

SEQ ID NO: 68159 - DNA, 948 bp, Cucumis sativus
  Intron number 1 from transcript Cucsa.350880.1 (locus Cucs a.350880) derived from phytozome v7.0 (chr-ID scaffold0350 4; pos 306023 to 306970)
ttcttgtcggggaaccttcaaggaagaatctttgggtatgttttctgaattcactttctcatgatgaaattttgtgtttctgggttttgttttgttttaatggagattttcattttcatttctatggtcttctgagttttgaactgtatttaaatgattttttttaattataagatacgttttctgacaaatcaacccttagttttcaggtttgaatgcttcaaaggtcaatttttatgaccgttttgatgaaaatggttttaaatgaggtttgaaagtgtttcaaaacctgtagtcaggtggttgtggaacagttaaaaacttgaagttaaaccatatatgttcttagtaaatcgagtcagaaggattagcacatttaagaaatgggagattattattggaaagttatttttgcaaacctgaagtgtgaccaaaggaaattcaaaaagtaattcaaagaagggaatataagagaagctgattatgaaatggaaggttgtttctttcttcatccaaaaacaaaaacctcaatgcaagagaagtgttgaatgtgtgtaaaattttcatttctgtgaaagagggacattttggtactggatctctagctaggtttaaacttctttttacttgaattttgactggtaaatgatttcttaagttaacaatatgtagaggattgtagatttgaaaaattaaaaattctaaactcgaagttacaggcactgttatagtttgtttagtcgaagttacatgtaatgaaattgggtcttcgagtgcgcaaataatagacaatatagattattatataaactaagtagtcaggaaagttaaatctaaaggtatcacttctacaagattggaaacagtttcatcaaattgtattaaagattaatcttgtgggcgcatttgtcagatattgtgcagaaatactcaactaaacgaggcgat

SEQ ID NO: 68160 - DNA, 831 bp, Cucumis sativus
  Intron number 1 from transcript Cucsa.334650.1 (locus Cucs a.334650) derived from phytozome v7.0 (chr-ID scaffold0331 2; pos 103199 to 104029)
acccctccatcgatttcttcaagggtacgattgttgagcttttttcttcactttgttcatttttcgtgggttttcaatggaagttggctgtgtttcaagttcatttggtagtcatgacatctgaatatgattagtgtagagcggagaggagaagggttgagagttatttgcctgcttatagtcatttcatattcagaaactcatgtagttaaattaggatttaaagttatcctcctaatttgtctccttctttgtacaagagacaaaaattgcattgaaaatatgaaaagagaaagctctattatatgctggcgaagaatctccatcttcgttttaaagaactttatccaatctatcaaattccttgtcgaggtgagctgtccaaagccaatcaattagcactagataccggatttgattccataataaatgatgatgataattcgtcctcttaaatgtttggaattgaactattatacatataaaaactaaaagttacaccgtgagattttatccctctgcgaaaaatttatagcttcgcaatgaattgaaatcagaagttggaattggcattgtggatcagttatgtggagagtgttctctctagttcatgctgcaactttattaaagctccaagtgttatagctgaatgccattgtgggatatgcttgagctagcttaaaagggccttgaaatttaagatgcatttctaaatgttaccaattatctttatctaaaatgttttatgatagaaaaaagtttgatatgttaacctatagtttttttcctgtttcagtcaccaaatttgtctccaattggaccagcttacaa

SEQ ID NO: 68161 - DNA, 849 bp, Cucumis sativus
  Intron number 1 from transcript Cucsa.198070.1 (locus Cucs a.198070) derived from phytozome v7.0 (chr-ID scaffold0135 7; pos 1231821 to 1232669 reverse strand)
atactcttgatcgtcttagttctttgattctgaaggtacatgatcgcccctttctctctaattttatctgggttttctattgatttcttaatgcttgtgggttttatttgaattgaatgagtgatgtcccactcgctttcttgagaagtttaatattgttttgattcttataatcttttttttttttcttctgtcaaatcctatgcgatttctgaactgatgatttggttgattcaccaatgcctgcttgcttttagagaaaactgagcttgtgtaaagaaaagggataattggagttttattattgatttgtctgttgtggggtttggtattaatgaactggctatttcaggattatctcagagatgaatttggtttttggaatatgtttcatcaggaacggggttttagattgcgtactgtttgattaaatgacatggtttcttgtggaaatatggtgtcctctttaagttgtatttgcttgattaacttgatttcattaccagagattatgagtttttagaacccttctgatgttcttttgctgatttgtgtgatccattcttctttttcatcaaattcttcaccaagaacattgtttgtttttgcttgcctaatgtttgattaattgtcatgctttcttttggaaatacgatgtcctgtttaagttgtatttgcctgaataacttgatttcattaccacagattatgtgtttttagaacccttttgatcttcttatgctgatttgtgtaatccatttttctttttcttggaatttttcaaccaattgtttgactctttgcttggttccagggtggaattttgatctttataagcattagaatcat

SEQ ID NO: 68162 - DNA, 213 bp, Cucumis sativus
  Intron number 1 from transcript Cucsa.257680.1 (locus Cucs a.257680) derived from phytozome v7.0 (chr-ID scaffold0222 9; pos 4890358 to 4890570 reverse strand)
atcatgtattgttgagtgactttgttttcttaggtttgatggattgtttgattttactttacttccttgttcgtgttattcatcgtagagtgaaggggattttttggtttcttctattattgttcttgttaagtcttaaaaaatgaggtaagaactgtttgtttaattttgtcatggtattgactaatcttcttcttcttcttcaaagcagga

SEQ ID NO: 68163 - DNA, 362 bp, Cucumis sativus
  Intron number 4 from transcript Cucsa.232140.2 (locus Cucs a.232140) derived from phytozome v7.0 (chr-ID scaffold0198 9; pos 233721 to 234082 reverse strand)
taaaactagaagctgaaagtctattaaaagatcttgtaaggtaaccttcctatcatttcttgatgcctattatatcatttcttcaattggatggtgctttgattttgataagtaatagttacctgtttgatcgtctagtttagaaggtaagctgcttatcgttcatttgttcagtggacggtaagaataagggtcaccctttctaagggttattggataaaaaagttccaacaaaattgaagagctttgttatatcctcttttccaataatcgaacagtcattacttcagtttttttattgccattgtaatattttctcgctttatgatgcagctctttcacatctctgaacagtcttacat

SEQ ID NO: 68164 - DNA, 935 bp, Cucumis sativus
  Intron number 1 from transcript Cucsa.322330.1 (locus Cucs a.322330) derived from phytozome v7.0 (chr-ID scaffold0308 0; pos 2114171 to 2115105)
cggcttcaatcactcgtccagattcactttcttcggtattttctcccctttgattcgctttttatttttcttttcttcatttcaatgtttttctatgtcaattttgtagtttcttcatactctggctcttagagagcccgaattttagggttaaatgtgatcagatacctgtttttccaacattgtcttgattctgatatttcattgtgtgtatttttatgatattttatgcgaattgctctcttggtgcgggagtatgtttgagactggagaaattcatatggatttcttcttgttcttaccgatcggtgcatttctatttaattttctgtaatttttcccttgggattggttggtgatttgaaatgtttaattggagaattgggtgttcaggatcatctctcatttgggtgtaataataacatataccgtttattggtccttagtgataattgtcaatttctcttcgaagattgatggagaatcatctttatgatggttataccttgaaattttaaagcatgtatttccaatatctaatatctctgaggaagaacaaattacatcttttaagccttttggaatttggggtgtgtgaattgagtaaagtgagtaggattaaactccctaagggggagttcagtcgaagaatgagaccattgtcgtgtgagattagttggggtgcatataagattactcatgatttaaaaagcaaattgaaattgaagagaaactatgattcaaaatgagctgatatctttatggtgtgttatcttttataaagttccctcccgtgccttgcttttgccttttatgtcttaaaacatggaagttggtaattattgatcctagagggcatctgacctttctagtttctatccctttttgtttcttaaccttatattttgcaggaaaactcatattaagaagcagga

SEQ ID NO: 68165 - DNA, 550 bp, Cucumis sativus
  Intron number 4 from transcript Cucsa.257810.1 (locus Cucs a.257810) derived from phytozome v7.0 (chr-ID scaffold0222 9; pos 4995808 to 4996357 reverse strand)
tttgaagctgagagtcaaagtgacacgtttcaaaggttagggacttaattttcgaaagcagcgaaattagtttcttatcttcgttaaggagtggccactggtttaagctattataaatactaaactagtttagtcgttgaacttgaaagtttacgtcgatttggtttttaaaatctttaaaatatctaatagttaatccagatttcaaccttatgtttaatactttcataaagtttgaaaaaaaattatacgtcctcgagaagatatctattaggtacaagttaaaatttatgtctaatgaaaaccagatccaagatggtacatgaaattaaaacaaaattaaaagtcgatgtttattaaacataaaagttcaagaacaaagattatgaatcaaatagaaatctcaaagttcaaggaaaacttgtaatctaacttattcgttttcttttttgttctcttagaattgattacaacatgatcaaaattcttaatagttgtatgtgccatatatgcaggataaggaaggttgaattaaattttccttcgactc

SEQ ID NO: 68166 - DNA, 597 bp, Cucumis sativus
  Intron number 1 from transcript Cucsa.322210.1 (locus Cucs a.322210) derived from phytozome v7.0 (chr-ID scaffold0308 0; pos 1994279 to 1994875)
cctaagatccttgtcattgaaggcctgcacccgatgtaagttattgtatccccaacttctcctgttagaatatgagtccaataatgaacattccttttttggtcatctctgagccgctgcttaatcaattagttacgaaataccaaaactctctaggtgtgacatcaatatctctgtgttcatatacattttgagaaataaacttctccaaccttgagaaaaacgggcccaagggattgaatagatatcttcaattttacaacttcctcacccttcctcctgcatttgattcttattaaaagatcaccggagataaagaagttttgagtgtttttcttattttctatatctcactgatcaaccaaacgtagctttccacttcgttatgaatgaatcacttgaaataaatagtccatttccctttgcattttcatatgttttcatattctctgtgataactgatcaatcaaagtctaatcattccatttccacagcagaggggaaatattcgcaggccaagtaatttttatgagatttcatacatggatctacatttatgcaggtacgattcacgagttagggatcttctagacttca

SEQ ID NO: 68167 - DNA, 910 bp, Cucumis sativus
  Intron number 1 from transcript Cucsa.242390.1 (locus Cucs a.242390) derived from phytozome v7.0 (chr-ID scaffold0204 7; pos 2131198 to 2132107)
tcgtctttggcaaggtttgttctgtattttgttgttaatgaactcttcttcatttttgaagtgtttcgttatgctttattgataggcattggtgtagttgtttggacttacggaaccaattggttaaatagagcaatcagctgttctgtacttttatttgattgaagctcgtttcctctcggtaattatttaacttctggtataggtttgcatcgtgttttttcctcttattcaagtagtgaatgaagagtgttgttccttgcttcagaaatcagaggcatttcgatacttggtttgttggcgtgggtattttaatgttaggatgtaggtttatcgtttacaggactttaatttctctaatggagtaaaaatgtgaatctcatgcatcctgccaattgctgtctgcaatggagggagttcatttcattttaaatctgtatagtaacgcttcttattataatcattgatatcttaagatgtatgcatgaagatgatttgcatcagagtgttattactataattttgtgttttgaaatggaaagaactgtgacgttggggtatatcatggatgcatccataacctgataagtaaaggatactttttttctatcttcatcttgtttatgaaagctcatcattgtttgttaaaaccttttctattgtgcatccagtatgatgccatatttaacaggtagcttgatcaacatattgtatcgtacttattgtggttgaaactactttgtcaatttgatgtaacagaagagtcccaaatttctaaattctgacggcaatttaattgtcattattgagattactaaacatatctttagacttagatagatctaacaacaataaactggtgaaactttattcaggagacatccatagagttggtggttataggcgaaga

SEQ ID NO: 68168 - DNA, 654 bp, Cucumis sativus
  Intron number 4 from transcript Cucsa.339240.1 (locus Cucs a.339240) derived from phytozome v7.0 (chr-ID scaffold0335 6; pos 1914708 to 1915361)
agtaagtgggtgtttttaatttctttgtcgtcgctattaaatgaaaaaggccaatgttacagttattgtacacagtcgttgtacgccaaacataatttttcttcagatttaagtcaattttggagaagtgcagagatttaagttctagtatagttaattaaattttagattaaattaccgatctgtccttgtagtttggaataaaaaaatttatgagttttgtaaagttttaatttaatttctattgctttaataaatctcaattgtttctaaattgagatatgacacaaaccagggagagtaaattgataatttgattagtttgactagttaagtaggtagaactacaatcatacatactatgatattatattaaattaaagttttcagaattagaatacaaataacggtggagagtaggaaaaagtataatagaagaaaaaggaaaggctttttttagaaaacatgctactttgtaaaagaaagcgtacaaaaagtagagtagttaactgaatgcagagatagaatgttgttttagcataggaaagcaataaagtgtttatgatgaaaagttaaaattgacgtaaaatttggatttgtgtgctgtggtgtggaacagtcaaatattttggtttggggatctgaactataggc

SEQ ID NO: 68169 - DNA, 841 bp, Cucumis sativus; identical to SEQ ID NO: 67669
  Intron number 1 from transcript Cucsa.273640.2 (locus Cucs a.273640) derived from phytozome v7.0 (chr-ID scaffold0251 1; pos 709932 to 710772 reverse strand)

SEQ ID NO: 68170 - DNA, 485 bp, Cucumis sativus
  Intron number 3 from transcript Cucsa.312770.1 (locus Cucs a.312770) derived from phytozome v7.0 (chr-ID scaffold0299 5; pos 2078521 to 2079005 reverse strand)
ggtgcgtggttctttgataactatccctattaaacttattgtttcttaatacttcaaatttcagctatgttagccgtattttggtttggtagttgcatgttgttgatcatatgttctttattttgttgtttgttcatgattaagttttctgctgagtggaaataacacaaggagaattaggattaaagtaatttcctactaatcagggaatcaaagccaaaatactagtagtcatatacttctgaattgatgctgtcttcaactgggtaatatcactttgcttgaacagcttgctccctatgactagttatgagctgaactctattggttagaattggaaatgggattcaatcattttattattattaatattactcctggattcagtatctgtataatgctaatattcaaacaaaatcttgagaaaaagtttccaacaacatatgtcaaatacttttttgctaactggttcatatttttcagtc

SEQ ID NO: 68171 - DNA, 709 bp, Cucumis sativus
  Intron number 1 from transcript Cucsa.240440.1 (locus Cucs a.240440) derived from phytozome v7.0 (chr-ID scaffold0204 7; pos 450914 to 451622 reverse strand)
gcttcatcttgctatttcttctttttcttcatgtgaagttcaaaatttttgtgttgttactaataacgaatttcgattttagttttatatttctgaaatttatgctcgtttttttccagatttcttatgtatagatagatagaggttcatatagttgaattaaaataaaacgtttttaaccttttttttcttgtttttttcaaaactcttgcaaatatgggtagagaaaggatggtaaaacaaaggaacttaaatcatttatttttgtaagtagggttccatcgctatttagaagggaattatcaatatggtggtatcatgcactaaatcatttattttttgtaattaggaagtatctattgttgcttcttctagcctctcctttgttggttttatttctcaatgcttgtaccaatgaacgctctggttattgtttttcttttgtgccaatcatacatagtctattgggtttaggcacaagagggtgatgataggtatgttaacctaagtgtacctacccagtactcttagtcgacctacccaaagttttttgttaaaaaaatgtgaaagtaatattctataagctcaaatgtaaaatatataacggttatcaaaaggggcatcagtatcaatttttattggcaaaaaaaatctcacataaattaactttcacattttgcagtttgctgaaggaagaattgaatcttcc

SEQ ID NO: 68172 - DNA, 173 bp, Cucumis sativus
  Intron number 2 from transcript Cucsa.300720.1 (locus Cucs a.300720) derived from phytozome v7.0 (chr-ID scaffold0293 1; pos 257408 to 257580 reverse strand)
cttattcttcaacttcattctcgttggggtaaccggtcagttgtcttttcttttctcattttaatttattttttttattttttactttttaatggatcaaaaactaataaataattatacatacgaactttgattcaggtggtcgaaaatagctgaatttcttccgggaagga

SEQ ID NO: 68173 - DNA, 724 bp, Cucumis sativus
  Intron number 1 from transcript Cucsa.355760.1 (locus Cucs a.355760) derived from phytozome v7.0 (chr-ID scaffold0357 7; pos 284952 to 285675 reverse strand)
aatacccaaacccccaaagcttctcattcattgaggtaaatctgccatcacacccttgtttttccaccccccttttcccttttcttgccatttctgtgcttttctgatgaaatgagcatttccctttttttgttttttactgatctttagttccattgcaatgtactgctagtttgtttggattttgatttcttcaaatgggtttgtgcataatggtctctttctgtttgtttgtctttttttttttttggttcttgaatggtagttgtttattttgtttggtgggttcatttagaatctgggttttttttatattgaaaatgggtcctttttctcttcctgacttgttttgcagatctatgattataggaagttctctgttctggttttaatggaaaatacgcttgtttgttttctgtgattgtggtgttttctgcgattgggcttgaaaaagaagagaaaatatccttggatgaagagaaagtacccttggatttcagctttagcaattgttactttgtatttctttgtgtgtcagcgcgtgcgtgttggagtctttttttaaccattaattctacttgtttgttgagagattgacttcgtctatttttcttgagagatatcaattcatttttctatgtatgttagggttttcatcctcatttctgggtgccttattgttgttacaggaacaatagtgttcattatctacgtgttgttgagc

SEQ ID NO: 68174 - DNA, 793 bp, Cucumis sativus
  Intron number 1 from transcript Cucsa.291830.1 (locus Cucs a.291830) derived from phytozome v7.0 (chr-ID scaffold0276 6; pos 435385 to 436177 reverse strand)
tctcttctgcagttgcttctttttgaagattacaggttaataaacatatcaacatttctgattattattatcattattttatatctgttagtgtttgggctagcttacgcacacattgactagtctcataggataaccaacctgaccctataacatttggatgtcaagaaaactcgtattaaattaattcttaagcaggtgatcatcatggattgaatctcatgaccttggttagttttttgagactgtctcctattttaccattagaccaatccatgatggtttcaacattttttattattccagtggttaaatgtactcttgatgacgtttttttatcataaggatacctacaccgaataatttcatccgatgtttgacaaaataagctgataaggccacttctatcgaatacggaaaataattatactggaatttactgagatggggtttgaattttactattttgaaataagaacatgaggaaaattactattatactctaagaattgatctgaaatcagcaggagacccatagcaaatgtagaaaattatttacaaacttgacccaagtgaatgacctcttcagtctgcaatgcttattattattattattatttcccttcatctccaagctctgttcgactcattgaatatattaagatcaggagagtacttctaggaaggcttttatgtttccccccaaccccacaatcacattaggttaattataattaactcgaactaatagtttatttaattttgtgttattctagccctgacttggtgggga

SEQ ID NO: 68175 - DNA, 907 bp, Cucumis sativus
  Intron number 1 from transcript Cucsa.364850.1 (locus Cucs a.364850) derived from phytozome v7.0 (chr-ID scaffold0361 1; pos 2206748 to 2207654 reverse strand)
cattttcagccttggattttgctcatcttcaattggtaagtttcttagcttctaatcttcttctatatctgtttactgaagctctctaatagggtttcttagctactaggtttacttactgtctagagctactttctatatctacaatggttttctctacccttctacttttaggttttataacatttccttactttttggcttgtgttgaccatttcttacttttgtttatgtatggtttaaattttcatttagtttctgtgtttggtattccttgtggaagcacacttggtgaggaaatggattattgacctatttgactaatggggtttttgtgtttggacctttttcttgtgttctcctttttgtttcttctgttttcctggagtaccatttagttgtaacttgcttttgaatttgataatgcggtttcagttttttttcttttttgttttttaatccactgatcagctgattcatagcctattaacctatgttctgtttgcttgaatgattttgttggtgtctgaaatttatgttcagctgtttcggaaattcactaggccagaaaagaaatccattcttcagaaatgtcagaaacttaaaatttttgcacagtttttttcgtttggcttgatgagttttgcaagaggagctctttgcttactaagtttatcaaatcaaatgattcggattgataaattatatttgaacacacacaaaatttggttcacatcaggtctaaaattcatcattttgtgtctttgggaaacccagtatttaggctggttcttgtctttgtagagaacataatagaatatcttttatatgtttttgtgttccttgtttcattattttttcagtgtgatgaataacatttgaatgttgtctcttttatatgcagttg

SEQ ID NO: 68176 - DNA, 825 bp, Cucumis sativus
  Intron number 1 from transcript Cucsa.205340.1 (locus Cucs a.205340) derived from phytozome v7.0 (chr-ID scaffold0141 6; pos 427489 to 428313 reverse strand)
gctgtactctctgtctttggccttcttcacaaaaggtttgtcattattttttatgaaacgaatatgagaacaaattttttgaaataaaaagaaaaaccagttttttgtaatatttttattaattatttgaaaggttgaaaatgaaaacaagttgttcaagaaaagatttaagtttttcgataataattacgaaattctttttttttatttttttttagaaattgttttttctctaatcaatttttcaaagataatgaaacataaaatcttaaatatagttaaaatggtaggttaaacaaaagacaatgcaattaagttaggtaattattttgagtttaatcaaatgtaggggtagatttaattttctttctttttgctatattcggttttaattaaatgtaatagtaaatcaaattattctatatagaaaaagaatgttagagagtagtttataagagatttggattgaatttctatgatgtgacgtttcttttgagcctcttttagaaagtgattcggcagtctattagaatgcccatatgacaatggaaatcatatatgaacaaacaaatatgcatattaattaggccctcttcctcattcatttgttttttttgtttttgaaaattaattcttctaaaaaaatttatttcataactgattcatttttttttattatgaaaataaatatcgtaataaatattttcgttaactaaacttgaaaatatgactttttttttctttcaaacttataaattaatttacatgaaactgttcatttctctctccgataggttgggttccgaagaagaagaaaaggccgac

SEQ ID NO: 68177 - DNA, 882 bp, Cucumis sativus
  Intron number 2 from transcript Cucsa.340800.1 (locus Cucs a.340800) derived from phytozome v7.0 (chr-ID scaffold0335 6; pos 3182282 to 3183163 reverse strand)
ctcccattctcaaacaaactaagtttaaggtttgtattatgtcaattttcgtcagtttacagttttaaaggttaaaaatttgtatcatactgtttaaaatgtaaattggaaaccaatcttgatgcttgtgagaattttttatcattttatttgattataaaactgaactataaccgtctgattctagcaatcatgtttgcctatgtaggtaaggttttatgtgtgtgtttgatgttctctgagtgagctagacggactaggctaataggtgtagaatactaccgacctaagagctgaaggaacgaagcttaaactctgttgttacacaagtattagatcccatggataaaatgccacatccttatcccgtgcaaaattcacgtttccatcaagatatcatttttgttgggtgtgcgaccaaagtgacacattgcacagataagggaaaaattatgtgtatattagtaagaacaactatctccaataagtatgagtaattttaggtgaaatataaaacgaagtcttgcgagtttatgcccaaagtggataatatcatactatcgtgaaatatttggagacactagagagtattaaaccaccaattcatccaaaagcttaatctagtggttgaaggcaaatttaattatgtatctctaacatagggttgttgtcctaacaattatcatgtgtataatcaccaaaactttgttgaagatttcataaggattttgggggccttgttagattctctgttagtttctctcaggttttgtaaattttatacagcagctcatccatgaatttttatctttttggaatttggttttctacagttgcaagtttatagaaaaaattcattcacatatttcatacatttgacag

SEQ ID NO: 68178 - DNA, 692 bp, Cucumis sativus
  Intron number 1 from transcript Cucsa.234380.2 (locus Cucs a.234380) derived from phytozome v7.0 (chr-ID scaffold0199 9; pos 303447 to 304138 reverse strand)
ggatcataagttcatacattgaacttcagaacgtattggaggttgtgttgtggcgattatcctgctgtttaggcatttactcaaggccctgtagacatgattttcattgatttgcagctatgttgttatcttgcattcagtggttcgggtctttcatttctgatgaggactgagttcgggttttgttagtgttgggaagggatctttttttggagggttttatttaagtcttttgttctttttttgataagtaataaaataacacaaagttcgttcatcttggtacggtttccattttgcatttcttggacttatggctttctgtagaagagttattgggataaagaagttcatttagtattttgtttctggtaatccaattcccttggaatacactgttttggttatggtatgcatgattgttaaaaaccgatgataggtgtttcatgtttccctatgatggtttggttggacatgctagtttagggaaatagcttttttggaaattgggatgcataaaattggaatttgcgaggcttctttgttattttgatcctgtggaatatgatcatctctttacttcaaacaaataatatacttagccttacgctgtaattaatttatttatctacatattttctgtcatgtaaattctagagggaagagaaacaagaagaagagctggaaattac

SEQ ID NO: 68179 - DNA, 497 bp, Cucumis sativus
  Intron number 1 from transcript Cucsa.331990.1 (locus Cucs a.331990) derived from phytozome v7.0 (chr-ID scaffold0325 6; pos 168056 to 168552)
cgtccctcgcctttctaaccgttgttgcctttcaggttttcttctccatcgttataactctcttactgcttcttgattctcactttctcagtggttttgtgtgttttcttctcatattttactactcttataatcttaacatcctgtctactcatttgacttggcaacttcgctttcaattctgcattagatttttttttctcccgaacgttaatgggaaaaccaatggcatcagtttaaagtacatatgtaatgttcgttataaagggcggtttagtttttttttctgatcatctcaattgtttttattgttttcaagtgaatcggcaatgtatttgcaactctccttttggatttgggtgttaaaaattctctccttgagttattttatccattagcgtggagtggagtgggaaggatacgtgggtcagaaattcattttgttgtattttgatattgcaggggcaaaaggttcggtctttacagcacagttgggt

SEQ ID NO: 68180 - DNA, 943 bp, Cucumis sativus
  Intron number 2 from transcript Cucsa.331990.1 (locus Cucs a.331990) derived from phytozome v7.0 (chr-ID scaffold0325 6; pos 168695 to 169637)
tttattgggagcaatctgggaatcccactggtcatgtgagtatattctaccatccaaccatgtttataatttcccctaattctgaaaataattgtctttaggttgcgctcacatcgattaatctcatgggtgaactgggctaactctatcctacaacatttgggtgtcaagaaaactcgtaggaaattaattcataggtagttgatctccctggtttgaacccatcaactcttagtcatttattaaggctgtcttcttttttactattttgcaaaaccaagatggttaaatccattctaatacaaccatccctcatttatgttaaggtacttatcaatgttactttggttgttgaaactgttgtgcaagcaagttgaacaaaatttgattaccttcggtttgtaaagaaatatcagagcgcacttcactcagggcacgctcctagtaactatgaaaaatgataaaaagtcgacagatgcagcttgctgtatagtctaggattctataaaatggacatgctcttgaagagttgcagtctcagatgacatgtatcattgctgtaaaataaaccatttagggggtgtttgggaagctgaaatgtaattagaattccttgaaatcagaggggtgttggaatgtttgtcaaattgagggtggaacaaaaacatgaccgtaaagcatgaaaataatggaaaataggatttaattgtaaattgctgaaatgattatgagtttaatattacatttcaggttcaaaactttcaatccaaacatgaattttggattacattacattccaattccaatatgggtgcccaaacacaccttgaatgttcttctttacatggccttatcaagtcagtaaattgttggatgtgttcacttcagattcttattaattatcatattgtttaactgatcatgcagccagtggtctttctac

SEQ ID NO: 68181 - DNA, 498 bp, Cucumis sativus
  Intron number 1 from transcript Cucsa.253830.1 (locus Cucs a.253830) derived from phytozome v7.0 (chr-ID scaffold0222 9; pos 2333346 to 2333843 reverse strand)
ttgagttcctcacaagtcaagctgttgttgatgtacattgcctatctgaactctagattctaaaatggacttcacatttagtcttctaatgtttaatgtttgctgcttctctttctttgtttgtttttttttttaaacaagaaacaaaaaaaaattatgaaagagactgatgtgcctctctttctttgttctaccttctgttttctctcgtaacatctcatgtgatggaaggtaaaaaagatggcatctagtcattccactgttcgttggctttgaattttgattaaactccatgtttatagctctttaaggacttgaaattctcaagctcacaaattttgtttcttatagaaataatttccaaatgctatattcctgaaagaatatttcttcgtggttgtgactattattatgaactttctgatttcaaacaacctcctttcatattcttctttaacaaaatcttcacttaggctgcaaggtataacgatccacggg

SEQ ID NO: 68182 - DNA, 803 bp, Cucumis sativus
  Intron number 2 from transcript Cucsa.273170.1 (locus Cucs a.273170) derived from phytozome v7.0 (chr-ID scaffold0251 1; pos 212956 to 213758 reverse strand)
gtgcgtttgaaggttagtagtttaatctagattctttttgtccctcaaaagaattggacagagaacagaagattgaatttggatggaaaatttaagaagactgaatttggatggaaaattttggaagattgaatttggatggagaattgcaaaagatttttcaaggtgttttttggatttggcttgttggagtggagttcaatttgtggtgtttccataattctttgaccttattgtaccatggactttgcacttattagaatattgatcatgttctttttcttttaattttttaaacacactatttttcaacccttgtatcatatgtttttttggtggatagggatccctcagatttatggtccctcgattgttttcatgtttcttcgtgggtttcaatttcgaaaatcttttgtaatttatactttaggcatggtattgctttattgtagtcctttcttgcatggggagctccccttttcttgggcttcttttcttctatatgctcgtgtattcttttttttatcctaaatgaaagttaatcattttgttttaaataaatgtttttagggcaatgttttgttgatgtatatcgtttgaagtactgctggtgcaacatgttctaagtctctatttcatcaaaaaaaaagaaaaagaaaaaagaagtctctaattgtaatgttatcttttgcttctgaaattataaaaaaagcttggttaactaacttatagatgaactttgatcagttccttgtatttttatttttattttttggatttttcagtcattgaagacgaagaag

SEQ ID NO: 68183 - DNA, 742 bp, Cucumis sativus
  Intron number 1 from transcript Cucsa.273170.1 (locus Cucs a.273170) derived from phytozome v7.0 (chr-ID scaffold0251 1; pos 213824 to 214565 reverse strand)
ccaaagttgctttacaaagaagaggtttgtccttttagttgcttgaatctgtcttatcctgattattctgtctgagtatcaagtaatttgctcactaacgaccatttttataaaaaaaatttaagtgtacagttaggcgtgcttcacaattaagctacgtctggctcttcaacgcgtatggctttctctttaagttcgatactcttttttttcaaaactaaagaaaataaaatttgaacaaaaagttggtttaaagatgtggacatggaggaatatggaaataagatcaaacaagcggggaaagtatggagctctatgagtctgaatgatagatggaagtgatagagatgggaacttatttggtgatgagatgttttaatttaggcatttgatatgtgattatgtgtttgaccttaaactttgtttgtctgtaaaaattaatcctttattttactatctcaaacttcatgctaatttctaattttatatctatacataaattccatacaatgagtgttttacttcattggatagagctcttttttattttattttatttttttgactttttaaatttgcaattaagctcccaaaaggactatttttcttcagtgcactccatgcttttagaattgttgctgattgctgacgatacatgattcattgaagattgatgactaaccattttttccttctatctctatcagatcatagagagaattctagagttttcccgacgcca

SEQ ID NO: 68184 - DNA, 915 bp, Cucumis sativus
  Intron number 2 from transcript Cucsa.235650.1 (locus Cucs a.235650) derived from phytozome v7.0 (chr-ID scaffold0201 2; pos 258943 to 259857 reverse strand)
ggtttttcaagatataatcaaatcaaataagctgaaaaaaatagagaaaaaacaacattcattaccctttggggaacattctgctacaaagtaatgccttttgatttgaaaaatactgggacaacatatcagcgagcaatgattacattttttcatgatatgatgcataaggaaatagaggtgtatgttaatgatatgattgcaaaatccaagaacaatgaatatcatacaactatactccaaaaattatttaattggttgacaaagaatcaattgaaattaaatccatccaaatgtacatttggggcaacctagggaaagctgttgggattcattgtcagtgaagaagggatcaaagtagacctagataaagtgaaggctatcatggaaataccatcccctgaaacagaaaaagaagtttgaggtcttattggaagattgaactacatatccagatttatctcgcatttgacaccagcatgtgaactaatcttcaagcttttacgtaaaaacaatccagaaaaatggaatgaggattgtgaagaagctttcaacaaaattaagcagtatttgtagagcccacctgtattgataccttcaactccagggtgaccgttaatcttatacttgacagtattagaaggatctatgagtggtgttctaggacaacatgacttatcagggaagaaagaacacgctatttattatttgagcaaaaaattcaccgattatgagtcgaaatactcaatgtgagagcgaacttgttgttcttacttcaaaaaattcaccgtttgaggcaatatatgttatatcatacgacatggcttatttcaaaaatggatccaataaaatacaattgttagaaatcgtcattatttgggagaattgcaaaatgaaaaattttattgttagagt

SEQ ID NO: 68185 - DNA, 790 bp, Cucumis sativus
  Intron number 1 from transcript Cucsa.322710.2 (locus Cucs a.322710) derived from phytozome v7.0 (chr-ID scaffold0308 0; pos 2371344 to 2372133)
tgaagaaatctcgatcatcaattaggtaaaaagttattagtttttctttacttcataacgattcaatggcgattcttatcgttttttgcctttaaagtcaaaagttgtatggctaaatcaagcaaatttgaacccttcttttattggtttttttttttttttttttgtgggtttaaagagtagattgatgatcagacacgtattttgtttgatattccagaatcttagaaatcccaatagttttttagggtttgaaagagagaatgtcctttttgggttgtagagaatcatttcaaatctatactttaatatttcttttttcttcaattctttatttgaaatggaattttctgcactatcttcttcattttgaggccattaattgcaattttgctaaggcttttgggatctagaagttaatgggtttgtgtgattttgaaatatagtaattggatagagaagagataagtggcagtggaaactgtgggatgaggaataaaacccaccacctcctttgccactttgaaaaaaaaggggaaaagagttttctagcagatatgcctcttgccttgaaaaagtgggaagtgacaaagggagcagtatatttaaaaacctccacccaattgcacacattctcttcttgacacatacactcagatttacaccaaaaccaggccctttctgcaaaaaaaatgtacatctttttatagctttagtattaatggcagaagaggataccccatctgaaacttcttcttcttcttcttcttcttcagctctcacttctcca

SEQ ID NO: 68186 - DNA, 721 bp, Cucumis sativus
  Intron number 1 from transcript Cucsa.321730.1 (locus Cucs a.321730) derived from phytozome v7.0 (chr-ID scaffold0308 0; pos 1553557 to 1554277)
atttcttcactctgttgacttcctggctatcgaaagtaagcacctttaactttcatgcacctttttatgtttccattctccatttttcttttttgggtaatgaattttgatcatgtttactgctgaaagtttggttggattggatttctaattcagtgtcttcttgcactttagattgtcttgttcttttttgttgttggtttatcttcttcagctattttatgtggtctttgtcttgtttttggtttttaattgaagatgatggtgggtgcatttttgttagttatatcaagttgtttgcagtttggtgttgttgggtttatgcattgaagcatcctttgcaaattgaatggaaaaaatccatttaaattaatatagttgtgttcaatatgtatttgattgttactatgctttaactaaaagccatttcttatgatcacttatgacctgtatgataacgattttgtttttgaaaatcttattgaagaagtttgaaagtgaaaagaaaacaagtaatgttcataaacaaatagttttttttttttttggtactttaacataacggtatatgttactttataagcttaattttggtatatgggaaactcaaaacaaaattgatttcaaactgaatcttcgttgtgtaatttattttattttatttttatttgaagtatcatcagtttttttcttgattttgtttccagaatagaccagcatt

SEQ ID NO: 68187 - DNA, 716 bp, Cucumis sativus
  Intron number 3 from transcript Cucsa.321730.1 (locus Cucs a.321730) derived from phytozome v7.0 (chr-ID scaffold0308 0; pos 1554732 to 1555447)
ttaggcaacgcgcaataaccaataagtacaaagaggtattgggaaatttttatgttaacgttttcatgtgtgacataattatagtgctatgactttcttcatcacaaggacattttaaacattagaaagtagaaagagaatgaagtctaggctttgctccttcttgccgtcatggctcttaagctattcctataacttactttcagttccttggtgctcgaagccttttgtatttgctgtagtttccactttccagtgttcaaattcattctgggtaggtgcgctgtaaaagtttctttggatgttcttttgcacgtaattacggggataataataattttatccttacacccggtccattaaattagtctaaacttaagctttcaacttctttgaaccctaaatttgaataagtgataattaaatttctctcttttttgaaaagtttggttaattatgagtattctggtggttgggcaaaagtattttcttgagtatcgatttctcttgttatatttgatgttactatatcatatatttatgcatttaactgaatgtttgtggggatgaaaaggtagagagctactgccaaagggatctttaacttttggtttttccttctggagatgtacttcatctttttcttatttcaaaaaggacattttaaaaaccgtgtgctcttccagggcctgcagaatatctttgatcaacagaag

SEQ ID NO: 68188 - DNA, 928 bp, Cucumis sativus
  Intron number 2 from transcript Cucsa.197560.1 (locus Cucs a.197560) derived from phytozome v7.0 (chr-ID scaffold0135 7; pos 922636 to 923563 reverse strand)
gaattgtcgaatcctccttcttctgcctcaaagaggtactggctccttgtcttgatgctatttatcttttatatgatattttattgggggggttttggtggatatcagtttttaaattaatttactttgtttactctaattttggtcggtcgtgtttggttaatactatcattagcaatggaggaaatttagggttcctaatagtaatacctaatcgtttttttagagggaaacgatggaagagattgagagagagaagtgtaaggttctaatgagttgaaacaacgtgtaactttttcgaagatttaggaatgtaactttacggtaatctgctaaacctgaattaagatatgatctgattgacgaaacatgatttttctagcaaactatcagtattattgtcttgttttctttccttgtgtgattaatggttaagtcatcatttccatcccctcttggttggattaatagaaaaaaattgttcttgctcatattccttagtgttgatgatgttaggaacaaccaagtatcaatctcctagatactccacttatctccacaatagtatgatgttgtccataggcataaacctcttggttttgtttttgataaatgtcttataccattgttcatagctgtcatctccttgtaaacccttgatcacgcagtcatttagtcaatgtgagactattctaaataattctatttgctttaccttttgaataattgttgctgtggtatgttcactagtatgagattgcttcaatttgaatgctcgttttcccagtactggtttcatttcttcttggatctacccaagttattttatcggagatgttcattggaaattgcatagaacttgaaattgattgacatctggttgaaaaattcaggggaagatctgtgtccagtgtgagcaaaagtgttg

SEQ ID NO: 68189 - DNA, 546 bp, Cucumis sativus
  Intron number 1 from transcript Cucsa.352200.1 (locus Cucs a.352200) derived from phytozome v7.0 (chr-ID scaffold0353 3; pos 120419 to 120964 reverse strand)
ccgagttttcccgcccgattgaatcttctagccgggcacttaccctacttacttctttcgcatactttcaattatcgttgttttttttatgtgttgtgttgttccgattaggttttgcttatgtgatgtttcgtatctgcaatttcatgctatgtcaccgttactgcactgtttctctttattttcgtgttaaaagtgaatatatatatattatatatacgaattaaacaattgtaagaaagaggaagtggaagaatacagttcttctttcgcacttacctctcgtgaccggaggtttttgttttttattttgtgcggctctgtttggatcgaccttgccctttgtcgatggaattactagggctgtgtaaggggtttgaaactgtggagaataattctggaaattcagcacgagttttgattgttcaacattatgatttgtcattaagatcactaatagtattgtttttgcgttgtttattaagatagaccatgtactttccgcgggaattgctgataatgcggtttcggttttagggcactcat

SEQ ID NO: 68190 - DNA, 197 bp, Cucumis sativus
  Intron number 1 from transcript Cucsa.248890.1 (locus Cucs a.248890) derived from phytozome v7.0 (chr-ID scaffold0220 8; pos 77111 to 77307 reverse strand)
ggtgctactcaacaagtaagattaagagattttttctcaatttttccttccttttctttttggttcttttctttgattcttctgctcccctgtttctggactgtgaattttgttgatttagaatgttttaacttattgggttttcttcttcttcttttctttgtggtgggtttggtttttaggtggaggagagggaa

SEQ ID NO: 68191 - DNA, 577 bp, Cucumis sativus
  Intron number 3 from transcript Cucsa.398190.1 (locus Cucs a.398190) derived from phytozome v7.0 (chr-ID scaffold0415 8; pos 751216 to 751792 reverse strand)
aggttccttagctttctctccatacacttttaatttaaattgtttttttccatcttcaacttctttcacgtattacatgctattaaattttatgttgatatatagatatttacatgtgcttgtacatttcacctaatatataaatgttacatcaattaatttattacaatatcatagatattgatgacatacaaaaatagaaatattattataaataccgaaacgtacaaaaaaatttaaaagtatatagcaaaattttgaattaatggattaataaaccttcctacagttgaatattttttaaattattgttagttttatttttaaatctccatccacctcgatattggatttaaaattgaagttttcaagtcactaccatattctatacatattgtaggttttatttcgttgaatctctctccacacatatatattcaagagaatattttgatattttgatattataggtgaaagaagtgaatgattaatctttgaaatgaaaatttaagtcttatttactaagcgactcatgtttgcagattaatatcttgacagaggatattcaaaagtattg

SEQ ID NO: 68192 - DNA, 490 bp, Cucumis sativus
  Intron number 1 from transcript Cucsa.255360.1 (locus Cucs a.255360) derived from phytozome v7.0 (chr-ID scaffold0222 9; pos 3381308 to 3381797)
tggtaactattaccttgtaatactctacttcttcttcttctttctttttactttcaaaacattcattctttgattaagtactttttcttaaccttacttttcatctttctacttttacgttttttactaacatagttgctactaatctttttcttaccagtggcaaaaaagaaaaaaacaaacctaagtgagatagttatttactaatcttcgatgtttttgtttaattaggaacatttaaggcattaacttgattactatagcaattagtattatacctatgtgttttaaatttaataattgtttatgtttggttataaactattttagtccaattagaattatatttatttatggcattggaactctaacagctcagattatgatggttagaaacaacatttattacaattagaacaattaatagactattgacaaaaaaaatttatgtattttttgagagcaggattgaatatttgaaatcaacaaa

SEQ ID NO: 68193 - DNA, 946 bp, Cucumis sativus
  Intron number 1 from transcript Cucsa.267200.1 (locus Cucs a.267200) derived from phytozome v7.0 (chr-ID scaffold0236 4; pos 282285 to 283230 reverse strand)
aaagctgtgaatataatttggtaagtgttttgtcgattctattttttaaccaatatttaaagtgaacttgatactgtatgtcacgtggttgctaatgctcacatctttcgcttttgcttctgatcatcttgatatgtgcactttatattttgaatttacacattttctttaggtaatagaataagttttgaatgttaataatgtgattttgtggttaactgtaaatgtatatatatactatatggtaaaagacaatgtggcatctacttgggtttgccccatgattaaggggtgtcctgatatcttttgggtttccaacttctacctgcctatttaagatattaactattctatgagttacataataccaaatattgtaggcatctgccccttgtttttatattcaatccaattttcggatgttgcattcattttccagttatgaggaagttcacgcctgcagaaatggtgaagagcagtgaggagaggtattattaacaagaaagaaatagatggtagatgataaggaggaataacttgaataccgtttaactcatacttaaaagtttgtcatcactaggataattcaaaatccttatcttgttttgccacatatcattatttgcttggctttttatatattgtcaattgttatggaggatcatgatgaacttcagtgagattatatcttttgatccatttatgtgtgactgatgttgcgattatgcttccatgtgatttccttattttcttgtttcaattatcttccctgtgttcttttcgagacacacacacacacacacaaaggtttattttgtgtgtgcttgggttttttttctccatatcaatattgtttaaacactaatcaatgaaatgaattattgttataacactagatgcttctctttctgcttattgccaaggttcatcaagtgtattcactcat

SEQ ID NO: 68194 - DNA, 419 bp, Cucumis sativus
  Intron number 1 from transcript Cucsa.314020.1 (locus Cucs a.314020) derived from phytozome v7.0 (chr-ID scaffold0299 5; pos 3149200 to 3149618 reverse strand)
ggacgtcttggggcttggtcaagctgtcatttccccatttctttttctttttcttcaactaatttcttcgctttcgtttttgggtttttggtgctgtttcattctatttaacatactctgataactttctgatttgacatactgtgcaaattattagtattgtattcagccgtgctacttggttcaaggaaatgaattggagtaacttttgattgagtctgttacagtattactgtatacattgtttatttagtgtaaaagttttgattttgaacaacttaattcaaaaacccttgtcacatcgctgtcaacagaattttgtagatcataatgtttattggaacaactgtttgatatggttgggctaattcttacgtctttcattgttgtggcaatgtgttcaggtagatttttctggt

SEQ ID NO: 68195 - DNA, 659 bp, Cucumis sativus
  Intron number 2 from transcript Cucsa.259190.1 (locus Cucs a.259190) derived from phytozome v7.0 (chr-ID scaffold0222 9; pos 5804279 to 5804937 reverse strand)
tcagggaatttcttgttttgacaaatacacatcaggtaaaggctctgcccttaactatttcctaagtttatgtttaaactataccatacctaaaagctcaaaaattcatcttttacaatcggtggaatgatttcttaaacatctcttgtatcctaattggttgagaaaaatctcaaagcaaatacgtaataaaatattgaaaaaagaaaaggaaaaaaaaaaacccccattattttcttaaaatcataataacaaatcaatgtccaaataacactggcggtattacctattaccctaaactgcaggctgctgtatgaatcttcgactggctgttggttgaccaagacataaataatgtttatatttctgggaaattgggattaaagtaatacctgaagaataatttttctttttttaaaaaaagttgactttttagatggtgaaggaatgacaaagacacttgacatttcttcactgttgcacgtctcttaataatcttcaaacgggatcaaatatgctttgacattgcttgggaacccaccccgcgccctcgcacccacactcacaggaaaaatgccattcatgatatattttgcaagaatatcaaagttcatgatacccaattaaatgatagtaaccttaaatttcagaggaaaaca

SEQ ID NO: 68196 - DNA, 845 bp, Cucumis sativus
  Intron number 2 from transcript Cucsa.201890.2 (locus Cucs a.201890) derived from phytozome v7.0 (chr-ID scaffold0137 6; pos 113895 to 114739)
acttgattaaggagctggataggctaactggtctggtgggtaattctgttcggccattaatgctgcttaattatctgtggaatttagcgactattgagcatctgcatttcttattgtacttgtactgagcttaagctgaacttcagctactactttctgaccagcggttcaagtattacattgattgaaagttcttttttcttttttaataataataattaattggtataaatatccttaacggcatcgtagactttaatatgcgtagggaagaagcggtggttgattgttccatggaggtacttgaaatataatacattacgtgtttttttacttcaaggttttccctctcttgaaggaacattaaggcatggagaaattcagtatgggtttgttgattattatattttatataactggcatcttgttacagcttttttggtaattgttaaacaagtacagactgctgttgtttttttaaaattcaaggacaagacaacctatggaatagatattgttcaagtaactaagttcatagaggctgttcttttcttttttttcctatcttttgtttgttttttctttagaaaggtatgagtggatacctggatcctaatactgaagtatttaaatcaaccaaaatttggttatttatatttaattatcactgtgagatgggataggatgatttaaattgcatatatgcatgttatttgcaattaccaaagagtttatggcttaaccaaaaattggagttgtggttatcagttcttggctttgaattttttatttttacaccccatcttttagctgcaggtaccgttgcattgcaatttgtgttgatt

SEQ ID NO: 68197 - DNA, 886 bp, Cucumis sativus
  Intron number 2 from transcript Cucsa.263940.2 (locus Cucs a.263940) derived from phytozome v7.0 (chr-ID scaffold0233 0; pos 35117 to 36002 reverse strand)
aggtctggtttaatgcacatctcatcttcaaggtgactattctggctaataatctaattctattctgctgttctctgtttaagacttaactgcactctctatgttagagttaattggtgatgattataaaaatttaatgagagatctttctgctgaggactttcctattcattaatacatcggtagggaagtcctaaacagaatggcacgttactttctctggaataaagcattgctgtctcattgagaaattggtatcatgtttcttttttgatcagctatataaataatcttgtagtttccttagatactgactacctgctttatagcatcattgaagcgaataggtctttatttatttattgaactttttagctgtgaagtcatttttcattgagaaaaatggaagaaataagtagatactagttgaatttgtatgctttaaccataagaaatggttcttgtatgatgttgaacgttacaaaacacatatagattgggtagcccccacataactgtgtaatttgtgtccttacaaatcgtcctcatagtgaggttgttgtatgatggcctcaaattatagttaaacttttattttgagaaaaatgaaaagcttttaagagtttgctttgatttttgtacaatatccacagtttctttcttttcagtattgtacttctttaatccatcttgatgagtatatacctaacaattttgaactcctgtaggattattttcttttttgttgtttattaacttgtttgcatgtcgtttttgaatgagataatgtgatattggcattcctgttactgtcataatattggtatcatttgcatttcccactttgccagcacaaggacttgaagcgttttttactatcaccatt

SEQ ID NO: 68198 - DNA, 524 bp, Cucumis sativus
  Intron number 1 from transcript Cucsa.284960.1 (locus Cucs a.284960) derived from phytozome v7.0 (chr-ID scaffold0265 3; pos 1507048 to 1507571 reverse strand)
actggaaagcccaatctttcttgtgaaaaacgcaggtttttttcttactattttcttatttatattcgatgcaacaacacattgttttggatgttcgttttgtttttagtttttgaatttttgaattttggcttttactccgagtacattacttgtgtatgtaaagctttctttgtttgataatcatttgttgctttttaagttttgttgttcatgattgttttcaaaatcaaaagccaaacttttaagaaattgagataaaaaggctggattttgtgttttgtaattaagcagtgttggtgtagaaccaaggtggttagtgtatgtgtatttagggttgatcaaagccaaggtttagtaattgtggttggtggatgtgtatatttgatgaagtgataaaataattataatgttaatactttgatgagttgatgaagtgataaaataattataacgttaatcctttttcttttccttatttattggtagctttgaggaggtaatcgctagatttgctcaacaaa

SEQ ID NO: 68199 - DNA, 618 bp, Cucumis sativus
  Intron number 1 from transcript Cucsa.300620.1 (locus Cucs a.300620) derived from phytozome v7.0 (chr-ID scaffold0293 1; pos 175030 to 175647 reverse strand)
aatattaagggataagataactggccaacaacaaggtattttgttcattttaagtttaattccattttattgttctgctgtttgggttgactagagtattatcagctcactttgatcttcatacttctggagtacggctgcaaaattgacatgttcttgtttatttgaagattttcttccacggagtgttcaggagtgaaaattgagtttgatgagaggcccttgtctattggagaacatccccttttcaaagaaaattctattttattgaatcactgtcatcttattccttctaaatttcttaataacacttgtcagttcttatatatgattaagacctgctgtggccgttttctttaaaataaaattttattgcgctgttgcatcaagttgaccatgcttcttttacagatattatctttaattggagttcgttgactgaagtatcatttttaaatgacagcttcgatatatatgaatagtctctaacgttaatatccaaatggattatggttaatgtgtttgtctttatgctgtcattcataagaataatctaaaagcacatccatgattttctcttcaggcagttgttttgtgaaatactctacctccgttgaa

SEQ ID NO: 68200 - DNA, 795 bp, Cucumis sativus
  Intron number 1 from transcript Cucsa.259140.1 (locus Cucs a.259140) derived from phytozome v7.0 (chr-ID scaffold0222 9; pos 5770926 to 5771720 reverse strand)
ctgttttcaagaacgttagagctcccgttcctcttgtcagttttccgatccccactattctttcttatttcatttctcaacgccttcccacttctttttctttttcccccatgtctcatctctggatccacccacttcttctttctttttttttttttttttgtttctcgattactttttaatggattctccttctcgtttcacttcaattgttcctttacttgcttgttttaattttttgtttcctttctttttctctttctgtctctatttggtgcggatttctgtagcgtttttctttttccccttctccgaatcgttattgactttcttttttttttttataaattgatgcaattattatggtttaattaatgagatgcggatttgatttaatttacttggtttttttttttgtgattttgttttctggttatttctggaacgtttttccttgccaaataaagcctaattttgtttgtttatatttttcttttatggaattgcatatcctaattgagatatgatcttgaggctgtgagagttaaaggtgatattttgcttgcttcttgtttctaaaggtgtgtgagaataaggatgtgtctctttgatgaatcttctttggttcttgtgaaaaggatataatctgagttcttgattttgatcttaatttctttgcagtttcgttaattgtccaagtttggagggtttttgtggaatttgtctaatgattttcaattgggtttttgcattatattaggtttggtcactggtgaggagatttgatcagcccca

SEQ ID NO: 68201 - DNA, 895 bp, Cucumis sativus
  Intron number 1 from transcript Cucsa.362260.1 (locus Cucs a.362260) derived from phytozome v7.0 (chr-ID scaffold0361 1; pos 205242 to 206136 reverse strand)
tctctctgctgttcttgtttcctccaagttccgtaactttctctcttgttttagttcttccttttcctttgttgaatctgcattatggattgtgatgggttcttctgtcctgtgcttgatggtgtgttttgatattagttttcaggagtgttgtgaatgtgttgaagaggttagtgtgagaggctagtcagagatacattaggattattggttgacattagtaagccacattatgtgcaattaactagtggtgtcaggagttgggcaacttagtggatcattttggtaggaactttcatgatgggatatttagggagagatcttgtgcttgaaccttttctgttgcttcccattctatagtccggttgtgtggattataatcttcatttctttagggaattgcacaaactagtcaagatatatactgaagttattacaacttgaaagtcgatgagaattgtttgatttttccactatttatgaagtttgagtcactagtccaattacacctatgaatttgtatcgaactcctttgccaaaaccaactagcctaaaaatggatgacattgaagtacatgacctgtatgtggctgccttgatgagtaggaaggtcgagcagaataggatgctgatgagttttgggtttggagagattttaatttgaaagtaagaaaatagcttgatgagtgtatatttttcattgattttgaattgtgtattatgcgtgatatatcactttccttgattttttataatgggtattgaaataattcacaagataaacgagtacagagaataatgttgttgctgatgtttgttataatccttagcagcaccaaatgtgatgacttcatgggaacgctttccatttcattttctacaggaaacccagcaa

SEQ ID NO: 68202 - DNA, 845 bp, Cucumis sativus
  Intron number 2 from transcript Cucsa.288950.1 (locus Cucs a.288950) derived from phytozome v7.0 (chr-ID scaffold0269 8; pos 446532 to 447376 reverse strand)
cagaggcaaaggggctgattacaccaggaaaggtatatattaagaaacaaatgcttcatttctttcaatatcatttgacaagaaaaattttataaacatatcacatagacaaaagagcaatatttgggtgtatatctgcacatatttctatgcatcgatctcatggtcgattatcactacatacaaaaaagaaagttcaaatattttaagaaaaacatatgaagaagaatttgtcacgtggacaaactataattgaaatttttattaggatgtacgaacatgagtatagttatgtgatacacccaagtacgtactaatagaaagaaaaagacatgacacatatgtgcactacatcatttttcctcttttcaaccctatacctccagctttttgttctttcaataacgatttttttcgctaacctaaactccagatttacttactttatgtttttagatttcatcacttgagcaacacaaacatacacattaacataatatttgttttcaaggtaaaaaaaacacttcaaacttcaaaggatgaaatgaaactttcaaagtttggacgtatcgttcagttctaaattgtcaagagtacaatatacagagaaaggtaatatatatagtattctttttaataataagtcattatatatttagcgtacttaacatatacgttattagtgaatcacgtataaatcactagctcaattctttttattgttcacgttttttgttttctttatttttctattccgtaacaaataggtgatcttactcgtactttatgtactttttgttacgaaaaaagaccgtgttgatcgagattacaagcggtaacctagg

SEQ ID NO: 68203 - DNA, 693 bp, Cucumis sativus
  Intron number 1 from transcript Cucsa.288950.1 (locus Cucs a.288950) derived from phytozome v7.0 (chr-ID scaffold0269 8; pos 447380 to 448072 reverse strand)
ttctagtgttaaagataggttagagttttttttcttaatgaattgaagtccgtttttgaaaagtaaaacggcttaaataaactagataactaatcttttgcttacgccacataattgggatctctatgctttgtgtttctctctctctctctcccttacacgtcttcttgattcccccctccctctctcgtacatgtttgtggtcatgaccattcgatttagatattaaatttatcttcaacaattgttcacgctcatgctttaggtgatcattagccgattggttattagccgttctaacaaaaccctcgcactcatgcctctagccaactttcaactatttgtcgagagcaagaggatttaaggagaggaaaacatgaagatttgctttatttctttcagtgtttgaaggggagaaagaaatagtagtagtgcatagatatatgagggagatgagagtgagagagaggggagggagaaagtagtcagcatgatctaagtgctttgtgacataactataagcaaaatgttgttttttttcttgttttagtataacaaagatttggattaatattgtacaaaaatctccaaagaaataagaaaaacgtcatcaaatggaacctaatgttaattaataatgtgattttacattaaagttttgggtgtgtaggacagcctacggtttgattcaag

SEQ ID NO: 68204 - DNA, 687 bp, Cucumis sativus
  Intron number 1 from transcript Cucsa.285310.1 (locus Cucs a.285310) derived from phytozome v7.0 (chr-ID scaffold0265 3; pos 1733832 to 1734518 reverse strand)
gcttacagaacagcacggaaagcatatctcctgaggttggtagttataaccttgttttctaaacgtttcaatcacaatatcatattgagttttttactcaactttgacaaccaacaactgtagctatctcctataaattgtttggagggagaagaataggagaatctttagagaagccatggcaggcaggtcattggaaagttgagattgggttagattttttttttttctttttaatcaaacaaacctctcacctcacgcacatgtgtagagctacgctgattttggccagtgggttagatttaacttgtcttttgttggtgtgcttgtttttgtatggtcttgatatgttttagatattatttaaaattttccttttccattcacccatcagcttgatgatttaagagggtatcacagctgtcgaaggcagcatgtcgtaaatgtcttgttcaaatcctgcatcgttgtttctttcccatattgatttccactcttttggacctttcttcctaattcaaagcacactgtgaggagggttagaaattatattaaattcgtctttaaagtttacttttgaaacatgaaatgatcctagtgacatcctcttgacttaatggatgaaccttttttggaaagaaggtacgactgaataattcattttactaggatctcagtttacaccct

SEQ ID NO: 68205 - DNA, 696 bp, Cucumis sativus; identical to SEQ ID NO: 64149
  Intron number 1 from transcript Cucsa.254680.2 (locus Cucs a.254680) derived from phytozome v7.0 (chr-ID scaffold0222 9; pos 2901336 to 2902031)

SEQ ID NO: 68206 - DNA, 233 bp, Cucumis sativus
  Intron number 2 from transcript Cucsa.219800.4 (locus Cucs a.219800) derived from phytozome v7.0 (chr-ID scaffold0165 8; pos 1418708 to 1418940)
ttgatcctggctcttccttcctcgagctttctcaggtttttgttggttaccttgttaattgctgtgattcttgtttttggcaggagaacggcttaatttcgttttttcacttgttttgactggaaaaactgttatgttatcaattattaactgatcgatgacttgttattattattattatatttctatcgttctatcatttgtttgatctgggtcttctttttcatttaagt

SEQ ID NO: 68207 - DNA, 656 bp, Cucumis sativus
  Intron number 3 from transcript Cucsa.282890.1 (locus Cucs a.282890) derived from phytozome v7.0 (chr-ID scaffold0265 3; pos 188960 to 189615)
tttagagaaacgaggggtaagtttttctttcttttcttctcttctcttttcttttgtttttgggtaaagatttgcatatccctaattatatatatacaatataaaaagttagtttagaaaatgttaatacttaaattttaatttttagaaattatataaaaaaatcaaacattttaactctaagtctaaggtaattataatggacggtaattttagggacgataatgaagtgtatagcatcattttaaaataatcgtaaatataacggtttttaaggataaacccttattatagttcaatttttaaaaacgttactatatatatttataacttttatagttgttgtttgacaactttagtaatttgggagagttgagttgaatgagtaaaaaaaatataatcaacctaccttttggttcaccaataattaaggatgttttctcactaaattactcaaatttctcacttgcgttattcgtatcaactctcccggattactttcctacaattatcaactcaacctcactctttgtttttatcgctaaccaaatgccccgacgcagtccatgacatctctagttttggcggaactcttaagaacctctgcctcgtccccttgaggtttcttaactcgttgttaatactatgtcagttgg

SEQ ID NO: 68208 - DNA, 491 bp, Cucumis sativus
  Intron number 1 from transcript Cucsa.391820.1 (locus Cucs a.391820) derived from phytozome v7.0 (chr-ID scaffold0406 2; pos 192105 to 192595)
taaagcttgggcttccacttgtcgtggggacaacggtaggtagagtaattaaagcttaagctaattacttcatattatcttcaacattctttttcttttgattgtgtgataagaaaaagaaaaataaatttggatttaagaagtaaagatatagtgacagatttaaactattttatacttgacatgtactctaattaatcttaatttgatcattttttataattacccttaaataatttggaaatcacttttgttcgttttaaaaaagaaacattcaactaagtttcatccaaaatttatatgtaaaattacgtggaaatgtttaattctttatcaattttcaatcaacttcaattagaaaagaaatagcaaccacctttcattttatattcaattactccataataataataaagtatgtatatgattgtctaatctgttcttcctcctcaacagagtacccgatagtgccaaacttcgacgccacggac

SEQ ID NO: 68209 - DNA, 1030 bp, Cucumis sativus
  Intron number 3 from transcript Cucsa.283970.1 (locus Cucs a.283970) derived from phytozome v7.0 (chr-ID scaffold0265 3; pos 905639 to 906668 reverse strand)
acgctattacttcaggtttgcatttcaaatgttgttttattttgttttatgaaatgcttgatcaggacgtataattacattgatctgcttcttactactggatttgagttggagccttctcttttaagattggggatgggaagatgttcatcgcttaggtttaattattctagaggtgtgatttcacgtagctggaggcccttcttgtgacgggagtttcccttttttatgtggacttggtttttatgtccttgtattctttcactttttctcaatgaaagttgttattttcgtaaaataaaaaacaatagtttattatggttatactgcttcaccttatgcaagatagtgtgtcttggttcatggtaatgtttggttgcacggtgtaatttaaaatgaaaaaaagttttgaagttgtccgtgtgggattctatgattggattgtgagatcattcccttgcttgtaaaggaggttttttttatggaagaatgaaactgaacatacttcatgtgcactttatttccctagactcatctgttgctctgtaataattgttgttggacttggatcacagatatagtataacattatgtgagtaagttagtcccttgtatgaatggaatttagcatggtgcactcaataccttcaacttctcatttttcccctttctaacagcattaagatcatgggaagccaaagatattggaatggctaagaatttatgttttcttctccacaataagatggaatattacaagcaactcctcagcatactacttctccttctcttgaatttttcattgataaagcttacaatttgtttggtatctctattaaatgattgttcttgacaaccgttgagtgtattgtcaagatatatttgtttttgttgactgccattgatacatattatgttcttatgtggtttaggtgtcttaatttcataccaccaagataatgtacatttccctcttatttttttttgtatttcagattctgggaataagcttgaacgagttataatcgcc

SEQ ID NO: 68210 - DNA, 814 bp, Cucumis sativus
  Intron number 2 from transcript Cucsa.240360.1 (locus Cucs a.240360) derived from phytozome v7.0 (chr-ID scaffold0204 7; pos 302968 to 303781)
cggcctctcgtggttgctttacttcattcccggaggtcacatctctatatatccactttacatctttattctaaatcgtatcaaccttttgagttccatttctttctcgttgatataaattggaaacaaaaaagaaaaaaaaggttttttctgtttttattagtttgataataattatttgaagttgtgaactttatcaaagtaggcaaaaaaaatttatgcttttagtttatatgatttaaaaaagttttgtgataactgatctttaaaactgtttttttcactaagttttgtttcccttcttttcttttttcttcttgttcttcgtttgatttcaaaattttgacatatatatatatatatataaaataggctaaaacaaaagtataatttgtccatgaacttttaacctttgtaggtatggttttttagaaaaataagaaaccacttttacaaaggataaaaagttcatagagaattcttaaaattgtctaactccataaagttttgaattttatattcaataaattttcaattttttttttattttgtttaatagataaattaatgaattttttttttagaataatagaaaaatacaaactattaaccactaaagacaaaaaaaaaaaaaaggttattatacttgattttagtaaatagtttgtccaattttacccttttataaaatgaaaatttctatcaagttgttggattaatagagacattgggttacccaaagtttaaatgagatattaaacttttgttaattaatgaatgaataaatgaaaattttggttgcagatattcatta

SEQ ID NO: 68211 - DNA, 541 bp, Cucumis sativus
  Intron number 1 from transcript Cucsa.342360.1 (locus Cucs a.342360) derived from phytozome v7.0 (chr-ID scaffold0335 6; pos 4713145 to 4713685)
gcccgaggattttactttcttgaccaagaacaaaggtaagctaaaacaaacccctccccattttcttttcttttcttttctattttaaattttaattttggggtaatgtatttctaaaatccacttttaattataatttgttttcttgttttgaaaataacaacaacaacaacaacaagactaaaacttttgcactcaaaactttgttctatgtttcacaaatgtagccaaaagttttaactgagtatttcaaggaaaagctactaagaaagtatattactgatatctaattgagtctaaaaggaggagacttcattttcaactttggttatagtttcattcattcaccaggatggtttgttttacctttctataagatttaattaagagcgatgattttgattaattaattaattaagtacaacaaacacatatacataaataaatacatatatattaacttagaggaaagcattaaattagttaaaaattgatataaattgtaatgtgatgtaattctggtttatgtgattaatgcagg

SEQ ID NO: 68212 - DNA, 739 bp, Cucumis sativus
  Intron number 2 from transcript Cucsa.252210.1 (locus Cucs a.252210) derived from phytozome v7.0 (chr-ID scaffold0222 9; pos 1173672 to 1174410 reverse strand)
gctgcagtcatctcaaacttccctttgccattgaggtttttctagcaatcatcttttattgataaagatcttactttctcattagtttttgttcttcctgctccttgaaggtagctgctgcaacctgctttgagtttatgtgaacctgtgataattgatagaatgatttaattgggttgttttcttataacattaagaaaatcaatattcaaactaaatccaaaaatcatttaggccatgtttggttccttccgggacatgataatttaaactatgtttggtagccgttttgtttgtagttttgtttttctaaatgtaggcttgttttcttcgaattttcttatcatgattttcacatttattaaagaaacatttgaattcttagtcaaatctaaaaacaaaaaataagcttgagaaaatgactttttttagtgtttgaaactcagcttgatttttgaaaacattgatagaagtagacagcataatatgcaaattcagtgctgaaagtagaattgataagcttaatttttacaatgtaaaaaccaaatgattatctgatggggcattatgaattcacaaccaatagctagaaagttaacagtttgatttgtcttgcacttttctcttgtagttctgaaaatccacatcttttctcctttcaatagaaaaacaaagcaaagtttattggtttatatttacagcattcctgcagattgataaagcatatcctcgtgatttc

SEQ ID NO: 68213 - DNA, 878 bp, Cucumis sativus
  Intron number 3 from transcript Cucsa.337460.1 (locus Cucs a.337460) derived from phytozome v7.0 (chr-ID scaffold0335 6; pos 540536 to 541413 reverse strand)
atgtaagtttcatatttgttgataacgagtaatgtgattgagaagcatttctaaatactggtacaccagtttcctgacttcgtggcattcccttacccgcttcctaacatctaggctgtagcatagacaacttttccattaaaggaaaaaaaagagaagaagaagaatccttcaatatcgttttttgtaaggcactcgaaatcctagattgtgttcaatacgattcacagctaaggcagtataacacgagtagaaaattgttagttaaggaatatttgtaagaatttccgcacagcaaatttcattgaattttgttgcctattgttaagagaaaagacctaccctacatattttgtaaacaaaattttgaagttcatgatgccttgaagttcttaattcattatgtttgttggagttcaacaaggtcgaatacagaatatgaaatttgaatatgcctccgttgtaattttaaggaggttcgacatttttccccttattcttttgcatgaataaaaagtttgatatctatatgcggcatttcttgaggaagttgaaccttggaaacttgacttggcatcttgctatctgtgtgaggcgtttatggggattatattcacgactaagcatataatacatctacaagttcatggtctggcctaacataaaaagaatagccttggaatgacaataaatctatttactttgaagttctgaagttgttaaatatgcagatcaagcgaagtttaataaattggctgcattgtgcattccaaaatcaaagtatatgctttataacttgtgaaagaaagttaagcgcctcgtgctcactaatcaattttacaggtaaaatacttaccaaccgaatatcttcaaggagt

SEQ ID NO: 68214 - DNA, 1049 bp, Cucumis sativus
  Intron number 1 from transcript Cucsa.281420.1 (locus Cucs a.281420) derived from phytozome v7.0 (chr-ID scaffold0263 9; pos 30048 to 31096 reverse strand)
ctgagacttcaataaccacactttggccttggaaggtaatctagttgacgcagcccatttatttttatttctttgatagatttatagaacacgcctgttttgagattgaataatttgatgtacatatgcaatcgcttcttttgtttatcaattacattcatctattgcatgtaacttatcaccaatacacaaactaaacttgtgtatagatgtagacgcttgttctccggtttaaatgtgattttcaatctaaagttcaaaatggctttaaactgaattcacaaatgagtttgagtgtataacatcttgatgatacatgccaacttcttgttctcagaaattactgagtgccttcatgctttctttactggattggcaaattattcgttggtgttgttaaatgtggaacataactttctatctgtaacaagatgttgcctatatgaaacaagatgttgttgctcatttagatgaagaagacgttatctaacttgattaacggaagttttgtgaagcatataacctcacgagttgaaatttgtgttggatataactctatggaaaatggttttcagtagaagagaagcggttgggaaattgttatcgattgactaactccatcctaattctggacattcatggataaaattttacatctatgattattagacatgggcacttttagggaacctgggggttgaattaaagacttcacagatgtgttaagagtgccagtttggcagagcagatgtgagtcagtatcagagattgatagtgggttgaaactagactccttagtactcaagagtctcgtctgttggcacgtctttaagggcagtcctacccgttaggaagcaagagtcaagctcatctgccaagagtttgggtgttctgttttgacattttaatttcctttttctaattgtagtgattttaacaaatgtataagttaatggctctctttctctctcttcttttatttttattttttttaatattacttttaataccatatcaggtacgtgaattggctgaaaaggaacctgaag

SEQ ID NO: 68215 - DNA, 912 bp, Cucumis sativus
  Intron number 2 from transcript Cucsa.393910.1 (locus Cucs a.393910) derived from phytozome v7.0 (chr-ID scaffold0410 0; pos 41590 to 42501)
catttaaattgttggaagcgttcttcggggatcaggttatttttttgttcaatttattacatgcatatattttgaatgtagagaactattgatctggtgatgtataatcgagaatgaatgtgtgatcgtattagaattatggagaaagaagaaaacagagtttgaacacaaaaggggttgacattttattcaataattttgtccgaaagggggagtggtatgtatgagtaccaactggcgattgtgagaataataaccagacgaataactttaacaaactacaataattcgtaatttatcatttaacaatatagctgaatttcatttgataaatggttttcctagctgtacgagtttaggttttcaatcacttctctccaagctctttttttagagctaatgtttttttttggaaattatcaaataaatggcactttcctgctgtatgtaagttctctgggtttcgcatttgaaatgtttagcagcattaacataggcttgtttggtggtatgttttagagcttttgtattagaaactgttgaactagtaatacacatccttttatgggaagaacaattttggttgttaagaattataggtggtccatgaaaacaaaacgaagaaaaataacagaaaatggtttaaaaaacagtaacccaaagttgttttcattgatttctgttttttcttaatgttttaaaaacaactagcaaacaactgatgaatcatgttttcactgaaattggacgtattttgttgcatcattagtagtgacggtttctgaatgcgaaatgttgagttgaacgatcaaaatgactagaagaactttgtattttatgtagtctcactctgactctcactattataaaaactgaatgattgtgtttctaataaacagaagcagttttaca

SEQ ID NO: 68216 - DNA, 514 bp, Cucumis sativus
  Intron number 1 from transcript Cucsa.268940.1 (locus Cucs a.268940) derived from phytozome v7.0 (chr-ID scaffold0244 4; pos 93878 to 94391 reverse strand)
attttcgacccaaatagtatgcaatttggcggttaactgttctttgtttattccagttcttttcttttctttaaatacgtgaattagggttgaattaagcgaccgcttacttagtcgaatctttgatgatggcacgtagagatcacgatgaattagtacatgatagaaaaacacgtttaagattttgccaaaattttaagtagagagctaggtaaggatgaattagcttaggtgaaactttgtgatcatcttatgattggtacaatggttacaattttacttgtttccaattcagtctcctattttctgaactgagttagaggaagtggatgaatattcaacagtagcattacaaatgtatttgtttcgatagcccatatgattttttttccttttgggtaggttctgttttgcaatctgaacggactttatataaagggtcggtgcttcattgtgatttctttttcttcagttgctgctaaaataattttggtggaaggaaagagacgaatgg

SEQ ID NO: 68217 - DNA, 919 bp, Cucumis sativus
  Intron number 2 from transcript Cucsa.341450.1 (locus Cucs a.341450) derived from phytozome v7.0 (chr-ID scaffold0335 6; pos 3840892 to 3841810 reverse strand)
tgggctctgctacaaatctttcttacaggtcggctatataatttcttcttcttactaaaagtatatatatatatatataatttcatgcataaaatttgagttacattattgcttactaacaaaagattggataaaatgtttgtggtgaaatctatatctatatcctactaaatgttaggtcagtatttaattccaactgttacttttttcctgtaaaaagttaaaaatatttaatgtaattaaatttgtagaactcatcacgttaagttttcttatcaatctgtcatttgtgaatctgcttgttctgcagtgaagcgaattctatttcctacttaaatttcaagtaaatcgagcattttttagtataacagttgaggacacgaaggattgaacttaaagcaggtcaatttatattatactaatattttatagttcaacaaaaactaatttaatttgagatgaagatttgattggtgttcaagacttgggttggtcaaatacaaaattttgtacgatttgtgtttgggtcacgttaagaagatatgggcgttttcgggaccaactatttttaaaaaaaaatgaaaaagatgttcaatcaaccaaatttagtgggcaaattaaacaaacccaaccctcaaaagtcaaagttcatagctttggataattgaatcaatttcttgttcacatctaatttcttgaacctctatgattgaatcaaaccaaaataagcacttaatttatcctacctaattcaacttaactttaataattcaatttggaattgtttgaattatttgaattttttttcgtcttttaccatctccaactttagaaagaagtacaataaattgcttttttctataagaaatgctaacagatatatgctttggtttgttgtttcctttatgaaggtacaaag

SEQ ID NO: 68218 - DNA, 517 bp, Cucumis sativus
  Intron number 1 from transcript Cucsa.341450.1 (locus Cucs a.341450) derived from phytozome v7.0 (chr-ID scaffold0335 6; pos 3842289 to 3842805 reverse strand)
tttctttcattccatttccggccagaatccttcaggtaaaccactttcattgtgttgtttttctttgtttcttcattttcaatttattcatctctttttctattattttcttttgattttaaggttaaatgagagaaaaaatatcataaagtcatatgatatatatatatatctccgtaaatcgacgttgttgttctaccagaatttagtcttttttatcatatacgactttaattatccttctcatttacttgcaacttgaataactgtaatttatataacaagacgtaaatgtgtcttgttaacattttcacaatattttgagattttacttgtttgttttgtgttatttgctcttcatgaacttcgtaatatttgctattaagaattcaaatgttctttttaaatggataaaatcatacttaattcaataaattgtggtgactggtgaggatataattataaaacacatttggtttcaggtttcatcagtttagactgtggaattcctccgaac

SEQ ID NO: 68219 - DNA, 995 bp, Cucumis sativus
  Intron number 1 from transcript Cucsa.345770.1 (locus Cucs a.345770) derived from phytozome v7.0 (chr-ID scaffold0344 3; pos 58196 to 59190)
cttctctgtttgaagccattggaaaggtatcacataaaatgctatatgcttctctttcttgacaatgtggattacacaaaatgctcgccttagattattattggtccactgattaggaccctcttgctttttttatctgcaagatgtgttcttctttagtttagtatataaaactcggaactgactcagtgagttgggtgtacaactcgaaggtttcaaattgtttttttctgtttgttaatgcaaatcacatttgcataggaagaaaatggatgagtttttctttatcctttaaaaatttcatttcaaagaaagaaagaaagaaagaaagaaagaactccatcttcctgtgacaagaattaaaaaagattatctttctgaaggtggatgctgaagtgggatcaatcaattgaagcaaaactgaagtgaatcagttctttttcagaagaaaaaagaatcaaataatatttttaagattatttccacctcactttgtgtcagaaaagcagatattagattaccttcaatagcagctactaggcaagttatgtggaggaggtgggtgggtgaaagatttttcagaaatttgttgccttaaagaagagagaggaaagaagtgagagattaaaaaaggttgattaaaaagcaaattatccaataattgttagcaaaagaaaaatggtagttgttgacctactggattaggaaaaatggaaactcatacataaattcaagagtttttcaaaactttttcatggttccagctcaaaaggaaaattttgattcagacattagagactgccgacagctcacatgtatatatttttttttctggataatctaaatgaaaaatccaaaaaccccaaaaaagaagggaaagaaaacaacaagagttgtaaaaaacacaagagcagtaagattagatttgattaaaatgaaaaagatgaaagtaattttacttgatgatgcaggtagtttcaacagaggcaagagca

SEQ ID NO: 68220 - DNA, 681 bp, Cucumis sativus
  Intron number 1 from transcript Cucsa.307480.1 (locus Cucs a.307480) derived from phytozome v7.0 (chr-ID scaffold0297 7; pos 588147 to 588827)
ctaatttcctttctcaagaggttattttggtatttccaccacccccatttacctatgtaatgcttatggttatccatggaggagatttcttcttctggattattttttcttcttctccctttcttgatttctttgtcgtctaaatcattctttaaacaaattttacgacacccaatttccgacccatcttcacaaacctttaaatttccattttttttcattgccagcaagggaatgtctcagaaaagattgaagaatgtatgttgttttagcttttagcggtcgaaattggcggcaaatttttttttcttctttctctgcttcttctggttatcgcatgatcgggattgggtttgttttgattttcttttcatttgataatgcatttatgtccagtgatgattcgtttcaagattttgagttctatgtcaaattaatagaagaatggtttgttcatggagaaaggatttgatttttggattttagttgtatggttcattctgttgtttgtgattagattgaaaatgatggatggaaagtttttctttttggttcaacagtttcaatataaagaattggttgcttttttagggcttgaattgactctattccttttgcctttgtaattgttatttttctcttattgttcttgaatttaaatgtagtaaattttcttggtag

SEQ ID NO: 68221 - DNA, 610 bp, Cucumis sativus
  Intron number 1 from transcript Cucsa.282580.1 (locus Cucs a.282580) derived from phytozome v7.0 (chr-ID scaffold0265 3; pos 28446 to 29055 reverse strand)
agcattcctccatccttaggttacattctgcaactcaatttctcctgttttatatttgcttccttttcttttatgtctgtgtttccgtctttgaaaaattcatataaatcgacatttgacttctggaaacaagaattttgaatggtcacttgattactccatatttgtttgtttgtccagaatattgacttagaaattgatattgattgtaagtttgttactctttctgagatcagttgtggaattcttgcgtagtttgccgtagaatatttggcataactcgtggagaatataaatatttcgtagtttttatgtagatataaacttcgttttgttcaagaactctcaaacaaggtcaccatagcttgaagacgtacatttttatgttctttacgatcttcacttacttttattaaccattgccccaactttgttagctgatgggatttaaatctgtttacgtttttttgttctttttttagcatttgagtaagatcttcttctcattagcaacgattatcttttcaataaacaaccgaaattgcagtatactcttaaataatagttgtggatgacctccgtgtatttccttgttcatagattttttaag

SEQ ID NO: 68222 - DNA, 758 bp, Cucumis sativus
  Intron number 3 from transcript Cucsa.357470.1 (locus Cucs a.357470) derived from phytozome v7.0 (chr-ID scaffold0357 8; pos 536154 to 536911)
ttcagctggatataatcactcttgtgttgttacaggtctgctctgcagttggcttgatttgtttgagtggtgactaaaattgaactgctaacttcttttagaagtaatttaatttgtattggttagctcaagtccctagtttgtactttggtaaagcagcctagaagcatattgcatccctctcaacagaaaagtaagatcgtatgactcaatgcttctagggctattttgaggaatgataaccctattggatattaggcatagaagaattttggatgaggttgatagatgttctggaaatattttggacaatgtatggtgtgtgtgtgttttttccctccttcaggtggtcttctttcaataaaaacttttgcaactataatcgttccaccaatcatgtaaactgaggagacctttttgtaattcctatgatataaataatatatattttaattttctgccttttatatatttctgtataatgttaaaatgacatataagatataaaatattactgttacagttaagtttcttaaaaaaaattctttgatacccttcagtaaagaatcatctgggtgtgggtaaggtactactgttgtatataatggatcattattcccctagttaactgctattggatattgtgaatactatgaattattatttttattctattatataattctcaaaaagcaattatccattaacttttcttttttagctttttttgttgattcatatttaattctttatagctg

SEQ ID NO: 68223 - DNA, 472 bp, Cucumis sativus
  Intron number 2 from transcript Cucsa.312690.1 (locus Cucs a.312690) derived from phytozome v7.0 (chr-ID scaffold0299 5; pos 2027006 to 2027477 reverse strand)
tgcaaattcatacacccaataacagatcatcatcagtacctccaaaataaccctccaactactactactactacaacaacagcaacaacaacaaccttctttttacctaattctctccctactgagaataataataatcatcatcatcaaactgagtccttaaagagtttcttcccaaatcctattcaaaataaagtttagttcatttcttttcttttctttttatttattcatttagtattttaattacatatatactgaattatcagggatatatgtttagaggtaaaaccccttttgttttcgggaatgtgtaattatatatatgaaaaaagaatcattacattacattggatcatcattgatcatggttattgcagttgtgtgagacatcatacccattaggccaagagagtttttttttttttaacaatattcaaaacgcaggagagatcgagaggtgcactgctag

SEQ ID NO: 68224 - DNA, 224 bp, Cucumis sativus
  Intron number 5 from transcript Cucsa.338070.1 (locus Cucs a.338070) derived from phytozome v7.0 (chr-ID scaffold0335 6; pos 1066079 to 1066302 reverse strand)
tagattctcaatctcgtggccgagaattttgccaagtaagaagacaaagagctatatgtttcctctttgctttgattttttttaaaggttattagaaatgtgtgaatagatgtacaggttgacacatccttaaataaaataatttcattggaataaaaaataaagatgatcaattttctttatcatatacttgaatttgattatataattactatgatttatag

SEQ ID NO: 68225 - DNA, 960 bp, Cucumis sativus
  Intron number 1 from transcript Cucsa.220170.2 (locus Cucs a.220170) derived from phytozome v7.0 (chr-ID scaffold0165 8; pos 1686194 to 1687153)
gaggatcgccataatccacccagaccttggtataggtaacaacatcagttttctccactgtttcaattgctgaatttcgatcaacatctctctttttgttagaattctctgtattggttagaattctgattcattgaagatgattaagtatttacacggtgttggatggcctggcctgtaagcgcattaggatatttttatcgatttttaaaaaccggcggattgcaccggcacattatgtgaatttggttcttgttttgtgttgattcgtgttgtcactcttttctcctaataatttaaattgccgatttatttatttgtagtttacgtgtttgattcttccgatggtaatttgttagtaatacattggaaaaggtggtatgacttttttgagcaggttaatcttccagttaccgattgagaatacattgaatggattaaacgtcacacaatctcaaattttaaattttgatttccgtggtaatttaacacacattttgacggaatttcaccaaagaagctataatcagtcatattttctagttgtcatctccccgtctgtttctatacaataatagctgaaaacaatgaagggtattaatttctcaacgattatccggaaaacagaagaaaactaagaatggatttcttaattcttagcatgcaacttaggcaataaattttccaactgactgaaagtcgagtcatgcaaataataattctgagattcaatcctaagtttttatttttgatttcttaatatatatattttttatatttttgttcaactttcatctattaagatagaagatatttaaaattagaatcaatggacgacaaagtttcttcttgttctaattttgtatccatgaatatattttctaaccttccgagttcattgccatagaagtttgtaactgagtatagtgtttacaggtggagctgagagattgattgtag

SEQ ID NO: 68226 - DNA, 956 bp, Cucumis sativus
  Intron number 2 from transcript Cucsa.301840.1 (locus Cucs a.301840) derived from phytozome v7.0 (chr-ID scaffold0295 1; pos 96068 to 97023)
gttgcttttgaagatataaacccttctgctgtcaggtattttgaacggaacctcttaatctatagaatgaacccttttttctagcgtttgattcagttttgctatagatatgaggcttctgagatatcttctgggttaatttcatcttcattttttcattgatttagcttctttaggaaaaaaatcttctacttttgtatacccatttcgtcggttgcttgatattcaatggacaatctacatctagacctggatagcaaataccaatggcggcaggaaaaatttagaaagaggcaatgttttagatctttgggcaaaagtaatgctagacggacttattgttaagggtcttttacattttaagttctgaactgccccaaaatatttccagatacaaggttgacaatgtacattctaggatgtcattatcaattgaagtccttgataatctgctgagttcaagagctcttgtcgcttatttcgatcatacttttttatgattcttccacttgttggtttttaacatttatgacctgtttgtagtaggttctcagtggccatctacgaccttcgtgaattgccatctcgaaggtgttgaggatggcctctataaggccactaaatggtgagtgtcaattgccattgtggattctgtaaaatctggaaagagatatatgcatcacgtactaagaaacaaagaaatagtgggttcattgtcatcttttgatttgactctcatttttcaatcgtttgtgtttcttctgttcgagtcatttacaagaattggtcaactcattttcaatcctttgatttgtattaggatgcactagcaatttccaccacaaaaatgttagatgcaattgatcttctgttattaaaggcatctataaaacattcttacttcggattgccattttgtaggcatttcttggtaattcccaaggagcacattccca

SEQ ID NO: 68227 - DNA, 927 bp, Cucumis sativus; identical to SEQ ID NO: 65732
  Intron number 1 from transcript Cucsa.337610.2 (locus Cucs a.337610) derived from phytozome v7.0 (chr-ID scaffold0335 6; pos 667427 to 668353)

SEQ ID NO: 68228 - DNA, 643 bp, Cucumis sativus
  Intron number 2 from transcript Cucsa.256620.1 (locus Cucs a.256620) derived from phytozome v7.0 (chr-ID scaffold0222 9; pos 4193108 to 4193750 reverse strand)
ggtagtccattcccagtgttctttagtgcaggtactcgattgcagttttattgtctctagtggtttaaagtttgattaatctattgagtgcatagaataccttaagtcctgaatgtttcgtgcgatagttagaattaactaggatagtttgatgatacaaacttattgtatgattatgcctcctcaatcccctgccccgtagttgttgtatgattatgcttcatgaatatgaatgaaggagttggagaagaaagataatgcatgtgaatgccaatagagggaaaagagaagcttctaactctgttaattggaatggatgggctgactggggaaccaggtgggtgggcggtgtggcaatgctctttcccttcttttcatgtgatttttgtcatagttctttagatttatggatctgaaagtgaaattaaaatgtacagggggaaggggaaaataaatagttggtatgaatacttattagatgttgataacttatttcctaggatttcttgctttgctctccctcatttctaatcgaatcatccgttctatccactttgcaatgcaatgttatctgatgatttggcaatttgttctacgtcaccaaccagggacaagttcaggtggactcctgggattagctccg

SEQ ID NO: 68229 - DNA, 415 bp, Cucumis sativus
  Intron number 1 from transcript Cucsa.257490.1 (locus Cucs a.257490) derived from phytozome v7.0 (chr-ID scaffold0222 9; pos 4766001 to 4766415)
atacgataagattgctgccgtggagaagcggaacggtgagcacttgctacccacacgttgcaatcagtaccattccatattccaacttgtttgtttttgttataagttaatggtttcatgtatgtgtatatttaatggttagaaaatcctaaaatttcattgaagcaaaaatttagtttatactttttggttcgtaacaaaatactatataacaaaattaagattgtttttttatatttgatttggtgagtacatattattcaaaatggaaaaaaaaataataataacattaaaaaagtgaacaccaaaatagaagaaataaagggaaaaataaagtaaaagacacaaaagaccttcatgtcacgaatagaaatgaaaatttgaattcaggacggaaaagattggggaaacggaa

SEQ ID NO: 68230 - DNA, 364 bp, Cucumis sativus
  Intron number 1 from transcript Cucsa.246950.1 (locus Cucs a.246950) derived from phytozome v7.0 (chr-ID scaffold0218 8; pos 17564 to 17927)
ttctcgccgacttcactctaaccggtatctctcttctcttccactcccaacttctcatgaaaattccacgccatttcttttgtttcttcattcaacagccctagaatttcagtgattattatatgccttgaatgccgagtgattcgtgaagacttcatttccgaggtgttttcttaacttatggtgttattttgttctacttcgaagtatgtctatagggtttgagattaattgtgcacttacagttggtgtatctgaatacttactgttgatttttgttatttttcaattttgatttattgtttctgtctgtttgtggttctttatagagggcgaacgtgagttcttctttggtctcgcgact

SEQ ID NO: 68231 - DNA, 361 bp, Cucumis sativus
  Intron number 1 from transcript Cucsa.213280.1 (locus Cucs a.213280) derived from phytozome v7.0 (chr-ID scaffold0154 3; pos 1020570 to 1020930)
aggtaaatgacgtacccactgtaacttgatcataatgcagactacttaagttacctacttctgttacgtgtcttttgttatcaatctagtgcagggtgttgtccaagaatattggtttatgtttgattttttccctaattctgtttaaggtgtattatcaacttatcaatgagtactgaatggaagcatcttgattcttgtctttgggcctttttttctttattacctatttgaataccatatgtaacaaaaacgctactctttaaaatgcttattcaaacctgatttccataactcatggtaattgcagtgctttcattaattaggttttcccccctgtaaatcctgttgtcctcaacca

SEQ ID NO: 68232 - DNA, 809 bp, Cucumis sativus
  Intron number 2 from transcript Cucsa.256190.1 (locus Cucs a.256190) derived from phytozome v7.0 (chr-ID scaffold0222 9; pos 3872981 to 3873789)
tcagaatcggtacaaaagctcttctaaatagtttttctatgatagttggaactctttcaatcgttttagtgcctgaaacaatctggatttcttatagtttcatctcattcgttggttgaagaggtcagtttgaagagtcatatggtatgatgatgggatcagctaaaacatgctttttattttttattatgaagcatcgttggatattatattaaaatcttcgtccactaagttaggctcttgagttgaattgttgatttacaagtcgtatggtgtgatgggatcaactaatacaagttttttttttaattttttattatgaaacattgttaaatattatattaaatttactctcatccattagcttaaactcttgggttgaattattaatttaagatgatatttgagaaggatgcaatgtattgagttcaagccactaagttgttgtttcttcaccatttaatgatgattttcattggttggatatttcctcgtaattcaagtctacaagtgaaagaaaatgttagatattatattaaatttgcactcactcactcgcttaagcttttgagttgaattggtgatttaaaaaatatgtaattttgtttgaaaatggttcatgactttaattggacataatgaaaataagggtaatttctaaaacactatgtttaattagggcggccgcttttatgttgttcctatcagagattgctcttagagtaaagtattatttccctttaatttggtaagtatgttttaattctcttgcaggtctcgaacctgaaaccaagtattattatcagtgt

SEQ ID NO: 68233 - DNA, 794 bp, Cucumis sativus
  Intron number 1 from transcript Cucsa.242340.1 (locus Cucs a.242340) derived from phytozome v7.0 (chr-ID scaffold0204 7; pos 2099387 to 2100180)
gaactctgctggcttcgtaatttttgagttttttctttcttttcattttactacgttaatgtttttcatccaatttatttctttattttacacaaagaaatttatgattttaaaaaatgatattgcttcaatttaccatgaatgatttcaaaactatttaattttgaaaacaagttattttaaaccaattaaaaagacaaataaaatatattttaaaccatcttttagaaaaaaatattttaatttttttaattcaattaaaacgaataatgatataattttagttgaaaaaaaaagtgtggatgttagagattaaatttattaaaaattaaatattccaaacttgtgagttttattttagagatattttttaatattttatcaacgataaacactaatacaatataatccaaacttttataaattttttcatttaagaaacggtggtacaataattctttcatttttcacgtacgcattttgaaaaaacaaattaaatcgttaaatttatttgagatttttgttaacggttattttaaaaaacaacaaaaaaaactaatatatttacaaaaataacaaaatatcaatgtctatacaatgaaccataaaataaaaagatcgactatgtattatgatagatacatataataatatatttttatttatcacatcacaaatagactataatattttactatatttgtataagttattcttatttaaaataattttcaatttcacttatttgtgaatatacagttcgttggcgggtagagtgtggatcgaaaatccaa

SEQ ID NO: 68234 - DNA, 575 bp, Cucumis sativus
  Intron number 1 from transcript Cucsa.397240.1 (locus Cucs a.397240) derived from phytozome v7.0 (chr-ID scaffold0414 6; pos 65553 to 66127)
taagctccttgtggttatcccttctcatcaatcaagtaagattcatttacttttatgcgacttgttaacgtcaaactggattaaattctttgtgtaagttcttggtccattatgatggaaaagagtatataagttttcatacacgttttgattgcatttatgatgtccagatgagatgcttgtgaaataaatgttcgtctcagcatttattttgagtaatagtaattgtttcttttggggttcttaaatgtcttcctatttcctcgccaatgacttcaaatctgtgaagagctagatcactctttgaattcctcggaatcaaatgctcaagaaaagattatcacctaaacacgaggatctttagttaaaatgagataggaatttgcaactttttgagaaaattttacaaaatgactaccccactgatgataatgtcaaaatatttggttgaccaatttattacattcaactatttaagttcactactattgtgtctgttctgttctttctgcctttcaattaatctttttccctctgatgtaaacgttttgacgggaaattttatctttacaggt

SEQ ID NO: 68235 - DNA, 610 bp, Cucumis sativus
  Intron number 1 from transcript Cucsa.219020.1 (locus Cucs a.219020) derived from phytozome v7.0 (chr-ID scaffold0165 8; pos 908127 to 908736 reverse strand)
gaattcaggtctatctcttttcattttcttcgttgttttctttcatttccggcggtttaatgatttagttgaatatatatatatatatttaatctgttttgtgatttgttcgctttttgtgtcttttcttattgcatgtttgcttgatcgattcgtaattaagttttaaactgtacttctcagttgcttgattttggttttgtaatattatgattatgatcatgttctggttattttggtatattttttatgcttttgttaattcttgtggatcttttaattttggatgtttgataggatctgtttttggattatttgattataagttcttgttttacggttgttgctttttctatatagaatatattagatagcgttgtgttctacctaatgtttcttcaaaattttacggagtctgattgatatttgtgaaaatgatttattgtttgttattggagtttctagttttggaaatgactaatgattatttgtaggtttggagttcaatgcaaatgtgcttgtattctttctttttctttttctattagaatcgtaattcattttgaatttgagtttcattctgtctaaattttgtggtgtaaacagcctg

SEQ ID NO: 68236 - DNA, 673 bp, Cucumis sativus
  Intron number 2 from transcript Cucsa.394740.1 (locus Cucs a.394740) derived from phytozome v7.0 (chr-ID scaffold0410 0; pos 536446 to 537118 reverse strand)
ctctggctaggaaccttgccgctgttatttaccgtgtaaggtttaatcattattgaagatatttttctccactatcttgtttttgatgtcgtgtcgtacccataaattgccattcatttatagtgaatgaaatgaaaattaaaccttcttctgtcacaagtgagtataattatatttttctatcaaaaactttatattcttgataaatgaatagttaaagcttgtgttatgataagcgaatgtgttttttagatataaagggaagggtctgcgtctttatattttgttgatatcagatcgtatgggattgttgaatgtttgggagttctagcaggtctggaggaagttgcaaattgcaattagtaaaatttggaattttttttgtgaaaaaataaatctattggtttattattggttatttgaaaaacgcaatgcattacatatctaaaatttgttatgagcgcatcacactgtgcacctctgattgaaaatctgacatcttatgcaatgttcaatttttgacttagcgtggattgataatttaggaaacagttgccagtattttacaatttcttgtcactttatttttttgcataatcagtccattttcctgagcaacaatttattcaaaactttatttgagatactaacactcgatctaccaatcgatagg

SEQ ID NO: 68237 - DNA, 524 bp, Cucumis sativus
  Intron number 1 from transcript Cucsa.394740.1 (locus Cucs a.394740) derived from phytozome v7.0 (chr-ID scaffold0410 0; pos 537214 to 537737 reverse strand)
gccaatgtttgttctatatcctttttattacacctttgtttttaccttttcactttgctttctttctcttcaatcatttttttcttatttatgtgagttgttgctgagaaactatctgtaggctctatactgttactcgagcttctatgtgaagtgaaatggaagcagtgcttatttgattagaagaagggagaaacaattctataaatatagaaacctactaaagcacaattccagtgttaacttaactagtgcacataacttctcaccactcaaaaacttccaactgctcgtgagaattaggagctacaaagatcatgttattgggcattaattgaatagctaacatatgttgaataataagtttatttatttatttatataatatctctttttagttatattgttacatgatatgccatcaaaacaagttttcttttattaactcaatgtatagcaggaaattgctggaattatcatatctttctcatggtctcttttgcgtttactatgcaggtttattt

SEQ ID NO: 68238 - DNA, 702 bp, Cucumis sativus
  Intron number 1 from transcript Cucsa.285280.1 (locus Cucs a.285280) derived from phytozome v7.0 (chr-ID scaffold0265 3; pos 1707829 to 1708530 reverse strand)
gcttatatttaccaaggcgttcttcaggagactctgtaagctattttcgtttgttatgatttatttttattattattagtttctattgagcaaatgtctgttgttgttgatattttcctgacgactctgatacagcataaactttgttttcagatttttcatattaggctttctcctttgtaatttttgttatcaaatatcttgcttctgtttaatatacttgccaacgctgaatgcctttcatctagggaaatctggataacttttccgtggaatcagatgttgtcatttattcttcatgttgtttctgccaaattcctttgccattatattcttacctttaagatttctgcattttttggaggattaacagtagtgtgggtagcctatcattttgcaccggtctcgtatgtttaagaaaattttgggagtgagcatctataacgttgggtttttattgttattaatattatgataataatatgatttgaggattagtaatcgttctggcaactgttttctcattgaacttgatcctgaggaaccttttttttacatttggaaaagtcaatctccggaggagcgcaaatccttgttgttattgctttgctcactaacggattcaattccattttgatgatttaagtcatcttttgattcattttaggtccacgaagcgctttggttcagacgggaagagat

SEQ ID NO: 68239 - DNA, 847 bp, Cucumis sativus
  Intron number 1 from transcript Cucsa.338460.1 (locus Cucs a.338460) derived from phytozome v7.0 (chr-ID scaffold0335 6; pos 1343205 to 1344051 reverse strand)
attggctctgtaagcacctctatctatagatctgtgaatggtgtttagagttattgctgattttcagatcttatgtggattttcagcctctttagtttgtttttggggtcttgttggatttgccggggttttaaacctttagcttgaagttttttttgttctgtttggttgctgagaaaattggggggaaattaatttctatatgagttgtttttgaatgggttctttctcaactcaagataacttcaaagggattgactgtttgtgctgagaaatgagtgattgagtcgtttctctgtttattttggatgaatgtggatgagttaggaacttaggattgtttgtgttcttgttattttgtttgatccatatatctcttgctcatgcattgacatctaaatacaatgtagtgatattttcttataaatcaactgagtactttcttcatgttttgttagaaatttgctatgagatcttttaatttagtccaaatatgcctaagcatgaagttactagcaaacgagtttactaacaaaagcaggaatgtggctctggcttgtctgtaacctgaaaaacacagtgttctccaaattaacaaaaaatactttcggtttttcgttagatggggagtgtttatttgctccttagttactagaaaatgagttcacttaacaaaagtgggaagatgtctctagattgtctataaccacacaatattctccgaaccaactacaaattcctttggtttttttttattcgtttttcgaaaccttacatagagattagtaacaattggagggtgattttgggtcacttccttacccttgttgtgtactagtttttgtgt

SEQ ID NO: 68240 - DNA, 811 bp, Cucumis sativus; identical to SEQ ID NO: 64966
  Intron number 1 from transcript Cucsa.286330.2 (locus Cucs a.286330) derived from phytozome v7.0 (chr-ID scaffold0265 3; pos 2408545 to 2409355 reverse strand)

SEQ ID NO: 68241 - DNA, 982 bp, Cucumis sativus
  Intron number 2 from transcript Cucsa.205680.1 (locus Cucs a.205680) derived from phytozome v7.0 (chr-ID scaffold0141 6; pos 696430 to 697411 reverse strand)
ttcgtaataggtttggtttgctactgtctttttcttctgttttgttatagtatgcatttcttcctttattggtttgttttttttaatgtgatttagtttctctctttagtaatggagttatatgcctaggggtttttgtcatctgtttgttctggaaatttagatggttaatgctagacacctttttagagagacggattattgatgttagggaccataccctggctattaatgtacagtcgtaattacttccgactgctatgttatgactaatttttttttggaatcaactaggattaagaaactatttcattcattgaatgaaatgaatgtatttagaattttgtgtttggatggtaatgaaaaaagaaacgaaagataagaagttactaatatagacttttaattatgatttcttaactgaaattagtatgacaaggttaaataagcaatttacctcaaaaccctatgacatcatgcaaaccccgactattttagtgaagaatattttttcacataaaaacgagatgtgaaaccattctctttgttgcagtaacaaacaacgaaaattgtttgaaatccctcaaaattgtgagattcccatgaaatttaccttggggtttattattcattttttggttatattttcttctatttcaaacgttaactgttactttttatgttacatactttatagcttttctttttcttatttttgtcagttctttccttaccgtttttggaatttttttggttatacttcccattggctagctggctggatgaagaagatatttaaagctattttgttggcttttgatgtctacatatcattctatggcatttcctgatggttgatattattgttttaaaatgaataaactattctagaattatatcttgtactttgatgaccttgactgtgctttgattctatctatttgtttctttttttcttttttaattgctagctacaagccag

SEQ ID NO: 68242 - DNA, 526 bp, Cucumis sativus
  Intron number 1 from transcript Cucsa.257990.1 (locus Cucs a.257990) derived from phytozome v7.0 (chr-ID scaffold0222 9; pos 5117624 to 5118149 reverse strand)
aaacgacagccgcatacgcacaaaacgacgaagaggtgagcaataattcaaagtacttcacacctataatggaatttgtcatcttctatatttggtcaatcttttcctaccctacgatccgttttattttcgttgagatttagaacgagcgattgtgaaccgttagattaaatcaatttctcttatgacaatactagattcgcccgtgtaataagaaacgacaccgtatgttttaaaaaaaattagggtttaattaaaataataataataataataataaagtagattttaaactaaacttagtagtatatttgacttgttttctagatttttatcttttgatatcatcatcattattttttacatgttattgttcatatttttctatctaaatccttaaattttgtattatttattatccgtattaagtgaaataaaaaaaataattgaaactatttactaaatataacaaaatatattgaaatctttgcggctcatttaagttttttacttgttttacaggtaa

SEQ ID NO: 68243 - DNA, 877 bp, Cucumis sativus
  Intron number 3 from transcript Cucsa.383360.1 (locus Cucs a.383360) derived from phytozome v7.0 (chr-ID scaffold0388 2; pos 331191 to 332067)
tgtggaccaagacagcaacaaacgaggctgctcaggtttgcccttatttcttttttgttctttgtggcgcttgcacattttgttgatttttttatgtagtattgtacatagttagcttagcttgtcatccacgagattattgcatcttctcaggacatactttgttcattatcatcttatctctgaggcttggcttatttcttcttgccaactatggtcctttctgagatcctgtgtggtgttcatgaatttctgagagatgccctattctttgcttatgaaaattaaagtttttgctgtgaatcttttgatgtgtggtttaccgattgtggtttactcctattttttgctttcttttggcctcattttatgctaatctcttttggactggttttcttttttactcggaaattggcttctctgataataaagttctgctcaattttgtacgtttgtcaaaggattactgtccttcatgcattttttcttgtttgttcttagcatacatttatctatgtcatcagatggaaatccattgcatgaataatatgttgcctttatcaattgcatttattagatgacatttagaaaccaagtttacctcaatcagtaagactaaaggggaagaggttttaggccttgtcatgttcaattaacccatggcattccatctgtttgtagttttgctagtcaaattgtttgcaacatttaggaaatgttaatgtgaagtaaatatgaaaattatatttattttcttttggttttgaaaattatactctaaccattccctttatatgtgacaagctatctgtaaaagccgccaaactctgttctatagacactctgtgacttcttattctgttacatttcgatgcag

SEQ ID NO: 68244 - DNA, 683 bp, Cucumis sativus
  Intron number 1 from transcript Cucsa.219090.1 (locus Cucs a.219090) derived from phytozome v7.0 (chr-ID scaffold0165 8; pos 950534 to 951216)
cccaactaatcaggtatctatctatctatcttttctgtcgattctttttattcaagaatcccgattttatgagaatggtgagggtgaaccccacttggacagcggcttagttctttaatggaaagtctccggacaaattttgtggttatctgtgcggaaatatctattctgttgtgaacatttgaagtaattttatctgggttcatttgattgaccctctattcagtctgtacgcatgcatttttgtgtaaattgctgcagtaacaatgaaggtcatatgtttttcttttgttcgttggggtttaggaagaaatgggttcgtagattaattcatggcgtgtatagtattgatgaaatcaagaccttgtagaaatggtgatcgaatggtggatggaagacaccgcccccattgtgtagaacggtgatgatggggatttttattttttctttggagaacatggttctcaaaacggttgtttgaattgtaagttgggtgcgggagcagtaactatttggattatgttgtttctttgatgtagagcatgcacaactattagataacatgggttgtgaggtctcctggttttttcaagttaggatcctgaacaataatggttggttgaatcaattattttcttattttattaggatactcaagttgcaggtttattatcacactaaaa

SEQ ID NO: 68245 - DNA, 700 bp, Cucumis sativus
  Intron number 2 from transcript Cucsa.219090.1 (locus Cucs a.219090) derived from phytozome v7.0 (chr-ID scaffold0165 8; pos 951246 to 951945)
gcatttgctcactcgtatccaacagttggaatgtatgtcatctcccatttcttgtacatggtttttaaatgtgggcaaaattgcttcaatatattattttgaacatctcttgtacttttgcatattagttgtactcgaagaaatagtgctgaggaatactttcatttttaaaaaatttaggacactttaattaagatgtacattttcaacaatctatatagtttttatatcctaagaaaattcaaagttaatgggttgatgcatttatatgctgaaaaattagtttgatttcacactcaaaatttattatttttgtcatatatgtgtcttttttagtctattcaacaagtgttctaagcatgtttgacctatgtgctatactaacaaatgtttgttatcatatacacatgccaaagtgtccaagtgtctaacaccagtctgacacaaacacccagccaaactaaaatgtttgtgtttcatagtgtgcaacatatctttatcattattatttgtttgcacaaagtttttgaggctcaaatttgacaattcggagtcttctgcttatttttatggtagggtactagggtttgtgtagccatttaacttttttagtttttgggtctggggttttctatagtttattttgctacatttatttaatgatgttttaaatgctgatttttacatcccgcagagcgtg

SEQ ID NO: 68246 - DNA, 871 bp, Cucumis sativus
  Intron number 2 from transcript Cucsa.263940.1 (locus Cucs a.263940) derived from phytozome v7.0 (chr-ID scaffold0233 0; pos 35117 to 35987 reverse strand)
cacatctcatcttcaaggtgactattctggctaataatctaattctattctgctgttctctgtttaagacttaactgcactctctatgttagagttaattggtgatgattataaaaatttaatgagagatctttctgctgaggactttcctattcattaatacatcggtagggaagtcctaaacagaatggcacgttactttctctggaataaagcattgctgtctcattgagaaattggtatcatgtttcttttttgatcagctatataaataatcttgtagtttccttagatactgactacctgctttatagcatcattgaagcgaataggtctttatttatttattgaactttttagctgtgaagtcatttttcattgagaaaaatggaagaaataagtagatactagttgaatttgtatgctttaaccataagaaatggttcttgtatgatgttgaacgttacaaaacacatatagattgggtagcccccacataactgtgtaatttgtgtccttacaaatcgtcctcatagtgaggttgttgtatgatggcctcaaattatagttaaacttttattttgagaaaaatgaaaagcttttaagagtttgctttgatttttgtacaatatccacagtttctttcttttcagtattgtacttctttaatccatcttgatgagtatatacctaacaattttgaactcctgtaggattattttcttttttgttgtttattaacttgtttgcatgtcgtttttgaatgagataatgtgatattggcattcctgttactgtcataatattggtatcatttgcatttcccactttgccagcacaaggacttgaagcgttttttactatcaccatt

SEQ ID NO: 68247 - DNA, 928 bp, Cucumis sativus
  Intron number 1 from transcript Cucsa.242540.2 (locus Cucs a.242540) derived from phytozome v7.0 (chr-ID scaffold0204 7; pos 2271086 to 2272013 reverse strand)
tcgttcttcggattaccgaggtactcgttgctcgttctttcttgtatttgtaacttctgggcgtatcgatttttcgtttgattttggctgtaacgagctttttgtgaatggggttatgtttgtttgttcgtttgtttgcatgtcaagtcaatgagagaaatgcccacaatctggttgtttgtttgtctgtttgaataccaagtcattaacgtctatgtttctacaatttagaagtgggagttgggtttttttatggtgatattgcgatgatatcttggatttgtgaaaaaggtagttaatggctttctgagattcgaccattaaacaaaaggagtttgacaggtagaagcttacagaccaaatgattctgcttgtcatggtcggtttggtgtcacagcaagaacagctccagttgtaagtactttttaactcaaccgatcgctgatgggatgttggaaatgaaactaaatttctaaaatatacccaataacaaaatacgagattagaactcatttatggactgagacatgctaataaacgatgtccatagagaagatgtgctccactgccttgagttatacgacactccactccaaaaatacaacagctctgaaaaacttctagtttccagggaaagtgaaggagagagacaataagatctgaaagaggtctcttctctaggactctctgaagttctccttcacaataaaatgacctcgatatccaagttaattaaccgctacctattccacttcttatttgataggagggtggatagaccggttaaaagatagaaagttaataataaaaattaataaattaaaaatatcagacatgggaaactgaagaatggtggatatctaaatccaattattgtagatgctttcattaacaagttgtatggacttgtagtttggacctggggggc

SEQ ID NO: 68248 - DNA, 639 bp, Cucumis sativus
  Intron number 1 from transcript Cucsa.338020.1 (locus Cucs a.338020) derived from phytozome v7.0 (chr-ID scaffold0335 6; pos 1016224 to 1016862 reverse strand)
ttggggagcctctgtcggtgttccacttcctcaaggttacctccgttttctctcttttcccttacccgttttttccatgctttcccattcctctgtttctctaaatttcactttttttttctttttttttttgtcaatgtatgctggcattcctgtaatttgggattcagatccactgtgttatgaactcttttttatactttgccctgaacccattttggatttcatcttctaattgctgctgcttaaggattgttcggaattttacttccttcctctgttttttgtgtttacagtattgtcgtgtagatctggtgggatttttgttttcttggaagacttgtgttcctagatctgatgtattttaatgggttgttttctattttaagtattagatctatctgggtctgaattgttagcttatgtgaactttactcattggatctttgctgcatgtgttacaaaccctttgttcttaagtcttcttcactggcttgaatttcgtattgcgtttttaatttaacatggtgttagctgtttccgttacttgttgactattggatttgggatttgagataagagtagtgttgagaggatctaattgaatttcgttacgtccgcgatctcttgagcagaaca

SEQ ID NO: 68249 - DNA, 852 bp, Cucumis sativus
  Intron number 1 from transcript Cucsa.292350.1 (locus Cucs a.292350) derived from phytozome v7.0 (chr-ID scaffold0277 5; pos 63027 to 63878 reverse strand)
gaaggctcagtacctggcgccgaaaagagtaagttctcctgtaaatgttattaatactgttcaggttgaattgcctaggcatccttttacaaaagtttcatgggaaccttagcttgaatcattgcttgtgaatttgcttaatgtataaacgagttttgaagaatctaactgctatcccggatggctctcaaagatgcttagattgtgagcgtttataagattagctgcaaagttttgattgtatggaaaattgtacttccgtgggaggtcatattgtggttgggatgggtttggggagggaactacggacggttgcgtgaatggacttgttaaatcttggatgttctcaaggatagagagttttaggtaaatccagaccattttttttctatttaacttcataaatttattcaggtttaattttgaattctgagttgcagagtaggggaaaggttttcagttacactaaaatttaagtgcttatgtctaatgttctttctatcataggtattaataatttctttgtgcatgcgaaggtaggaactagacttacaagtttgcataaacgaatgttgttgatgtatataattctttacttccaacaacggtaatacacacaaatatcttgcttattttttaacttctaggagacgaacttatatatttatacttacagaggtgaacaagtccacgtaatgtctgcaatggaagagttgctgccgtcaattggcacatctgttccatctccttcagttcttgctgttgtcatctgccagtccgattccatcctccaaaatgttgccaagctttgttctgatgtacgtcattctcattctccttctcctgatgcag

SEQ ID NO: 68250 - DNA, 690 bp, Cucumis sativus
  Intron number 2 from transcript Cucsa.338830.1 (locus Cucs a.338830) derived from phytozome v7.0 (chr-ID scaffold0335 6; pos 1552156 to 1552845 reverse strand)
gagaagttaaaggtataattattattattattttggcctaatttcaatatattccccaaaaaaagttcatttttgtgcatttactttatattaaaaaaaaaaactcgaacccaaattctaccgagtagaaattaagactaccatgtatataaagctacaatttatatgtattttccatgtttaaacttcttgtctttctgccttactgtatgtgtaattaaaggaatggatcaccagagattgaagagtttgttttagatccaaccaaattgttcggattattaattttgtcatgattctattacctcctttactctcctttttttttccttcatattttagtctttcatgtttgattagattcccatttggagatgcagagttttggaactttaccatttttttaattcatttctcattgaaatttatttccattctaaagaaaagtacgtaggacccacaaacacatttcaaaaataccttccttcaataatgtacatctgtgatagtgatatcatgattagtttttccaggttcactgttttttatcagattccaaaatttgattgaactcaataccaattgtcaataacaaaaatagtccatccatctatcttataagtacaagcacagtatgaggttctttgctttttttagtgtattttatgcttgtgaaattttgtgtaggaa

SEQ ID NO: 68251 - DNA, 959 bp, Cucumis sativus
  Intron number 1 from transcript Cucsa.359210.1 (locus Cucs a.359210) derived from phytozome v7.0 (chr-ID scaffold0358 8; pos 217367 to 218325 reverse strand)
cttggctgagtcgtgaattcggattgacaactaaggtatattagagctctcaacttatttttcaaataataataataataatattagattttgttaaaagaatttaaataaaatgtctttattaatttgaataaatattattggacaattaatttggtcatatatcttaatttattttaagttaacataggatttttgttttaggtcatatatttttaaattattaattttagtctactttatctaggtttagtcatatattttttataaaatttaattttactatttaatactttttttaatctataactttttctataaattttgaaagtaatttttttatcttacgtaattattattcgaatagattcatttaagatttattaaaatatagagattaaaataaaactatcatatctacatagactaaaataatatttaactacaagtattaaaaagataggatgtttgatttttgagtttttttagaagcaaatgtactttatcaattagctttgaaattattatttttttaaagtcaatttgtcatttaagattttgaaaaataattatttgatacttataattagtttttaaaagtatattataaatgaaaccgtttttaaaaagttattattctgaggttaaaaaggggttttttctttccatcctaataaaaaaaaaaccactgaatacaaaaactagttagacttaattttttcatttttgataattcttctttaaataccacacaattatttataggaataattaagaaaaaattgggtgaaatcttttaaacctaatttaaaatttcttccagatcaaacggtatatagaatttaatttaaaaaagtttctcacgtgagacattctaatttttttccaaaatctaattttggttatatatatgcgtgtgatcagttcagtggcaaaccgataggaataattgggttagg

SEQ ID NO: 68252 - DNA, 645 bp, Cucumis sativus
  Intron number 1 from transcript Cucsa.266280.1 (locus Cucs a.266280) derived from phytozome v7.0 (chr-ID scaffold0235 2; pos 796755 to 797399 reverse strand)
gagtttccactgtaattactctccctttctttgaattgaaccggattgttgatttccttctttttttgtttccttattgaactggtttatgattattcagttcctttgttttacggtaggattcgatatcgccgtttggttagtctaggatttgaatgacgtaaatgtaaaactagagtgataggttaattttcatatcttcttggacgacttttgatgaaataatagaattcggactactcagcttaaataattaacaaaatgtgcatacttgtctatagcttggtggtctaggagtttttgcttcatctgagttcatttcgaagaaaagaacggtttgaatgtctatagggcgagctagttcgtattcttgatggttctcttattttctagcatctacgttgagagatggtaggttgtgctgttagatacccaatatttcgttttcatcctccgactttgaatcaacgaaatattatttaacttttaaccagattcctcgttgtgtgtttgtttccttgttatttaaggtgcacttttccgtggattattggttatgttccttattgatgtacctctaaattgattaaatatgctctattggtggcactcttaactgatattagaaatgacagaaaattggag

SEQ ID NO: 68253 - DNA, 467 bp, Cucumis sativus
  Intron number 1 from transcript Cucsa.304160.1 (locus Cucs a.304160) derived from phytozome v7.0 (chr-ID scaffold0295 1; pos 1883273 to 1883739)
ttgtcgagaaggatccatctggacgatatatacgggtatttcttttaattcttttcttgggtttaccttttgatgttttcattacttgtttcttcttagcttaattcattgccttacccactgagatttgatttgatggaggaattatttttcatattgttccctttactgttttaggttggtgtttggttcctcaattttagaatgtgagttatcttaatttagggattcactagtgctgattatgagttgaattggtttttttttctttttttctttttttgcttttgtaagggaagaatttggaatttggtagttttcttcttctttttttttttttttgccaatggttcggtcatcgattacttatgttttagatttgttctttctcttttgccttatggttttgatgttttaatctattttgacttgatccttatttggacctttcccccttttttttcagt

SEQ ID NO: 68254 - DNA, 589 bp, Cucumis sativus
  Intron number 1 from transcript Cucsa.199070.1 (locus Cucs a.199070) derived from phytozome v7.0 (chr-ID scaffold0135 7; pos 1888864 to 1889452 reverse strand)
ctccctcctttctgcggaggagctcgccatttcaggtctctcctctccctctctctgtttctcttggttttctatttcttttaacaacattttttgttttatgcaaatctttctgggggttgcctttcttcttttctgcgcaattttttgttccttttttgtgggtttgattcctaaaggaagataatggattttaatgttaatttgactataaccttcactgaaggggaggactgatggagatgattttttaattttctacccttttctttttgttttccctcaatttttagctctcttctccaactattatccgtttgttgtttttgttgctcgagaggaggggccctctttgagctttgtgttggacatatccacgtctttctcaaatctgttaagagagaaaaggaacacttgatttacacgtaaacagagtttaaaatcgatttttctttctacttggctgaataatctaagttgcctgaaaggtgtttgtttgtttgtttgtctgtctgtctgttttagatctttaaatttgtaaggaggaatatcagagagaatgaacaggtgggtttatgagcagaacgcc

SEQ ID NO: 68255 - DNA, 634 bp, Cucumis sativus
  Intron number 1 from transcript Cucsa.240560.1 (locus Cucs a.240560) derived from phytozome v7.0 (chr-ID scaffold0204 7; pos 597291 to 597924 reverse strand)
ttgtgccacttatcaggttggtagaatgggagcgaaaagctatttgggttttgtttgtttatgttatctattttagggtggtttcttgtgggaagaattcgcaatgggatccatagttgaataaccccataagcataatagagtccagtggttttactttttctgagtggggagtttccccgaattcatgtgagttcattggaagtactgtgattttcaaagtcaagtaacacctgtgccttatttgataaaattttggttttttatttttgaaaattgtgcttgttttctcaccatttcttaccaaaagttttgaaatccccaacataaacatttgaattcttggcaaatttctaaaaccaaaaacatgttttaaaattttttttttccttcaaaatttagctttgatttaaaaacgctcctaacatgtatgcaacaaaacatagaaactaatcgaagtgatgtttatgctttatttttcaataacaaataaccaaatggttactaaatgggacttcattaacttgaaaattttgagaagggccttcaattggctagaaggacttttcaccacacctaactcacccttcatctcacaggtggttgaagcataactcattgtcatatccccaga

SEQ ID NO: 68256 - DNA, 647 bp, Cucumis sativus
  Intron number 3 from transcript Cucsa.298390.8 (locus Cucs a.298390) derived from phytozome v7.0 (chr-ID scaffold0290 1; pos 43991 to 44637 reverse strand)
taaggttggtcaaatcttttatcatttttcattccttcttccttagttcttatctctgtggacaggttctttgtaattttgtaattgagctttcatagaacacttagttatttgttttctcacttaaaaatattatttttttctctgtttcttttgaaatctaagttccttcatggtatttcttttaagtgtgaaaaggaagttattttaaatatcaaaagagttttggctgctcattagtttctttgcttttctgaacaagtgaatcttattcccactttgaacagaaaggaagaggaggaggaagaagaagaagaagaagaaaaagaagtagaaagaatagaaagggatgcaagatatgattgccataggtgggaaaaaaggtcaaattcctcaacattttagtttgaaattactgcaacctacaatatagataaaaaaaaccccaattatttactggtaggaaatgccactattcactttgagaaaggtgtaatatattttaacatctgaaatatgtatttatgtgttacacatttggtagccaatagaggtttaatttgtttacttatttattcatataaatttttttggttatttattattttacaggctggacaatcttataattgaggcaattactaccc

SEQ ID NO: 68257 - DNA, 884 bp, Cucumis sativus
  Intron number 1 from transcript Cucsa.319650.1 (locus Cucs a.319650) derived from phytozome v7.0 (chr-ID scaffold0307 8; pos 338950 to 339833 reverse strand)
cttgtgtttcgtttcgttgccagtagctggtgggtttttgagttttgttgtttttgatatgtgctgtaattgattgaaatattagaatactctagatctgttaacgttactcttgctcatttgagtaccattgtacttgtttatatctatttatgaagtcctgtttttattagtctattgttggtgagttgaatagcaagaagttgatttttatctgtctaattttttagtttttacaacttctatggagatgcttgatttcattgctaatccgttaatttatcttggttgtttattttcctctctttctgtttttactctcattaagttcttcattaggaatggggaatgtggttagttttctttaagggaaggcgaggattggcgttgttcagtttccctgcttttataattttgtccctggaataattgtatttggcttctctttgcaacttttatgccgcaaccttctcttgtgattccaatttttaggtaaattttggataatagattacctcaactgattgatccttcctatcaattggtttcttgggtgttctctctctgccttggtgtgacagatgggaaaatgtggagttcttgatcggaaatggtcctattcttatgattttctcattttatcaacacatctatgatctatttctgctgctcccatttacatttgaaatgtaagaggttttaaatttcaaaacgttgtgtgtattattttaggaaaatgcagctttttaatctaagactagagagttaagccatctaatttgcggatggggaatatgaaaatgattaggtatctggatatgcataacatgtttgatcgaattagtgctcaatttctttgtgtaaataaatggtctacaggaata

SEQ ID NO: 68258 - DNA, 1037 bp, Cucumis sativus
  Intron number 3 from transcript Cucsa.307350.1 (locus Cucs a.307350) derived from phytozome v7.0 (chr-ID scaffold0297 7; pos 534633 to 535669 reverse strand)
ctcaacgtgtgtggatcacccggaattacaaggtttgcttcttcatttctgggttccgagaccttgttttcttgcctacatttagtcccgagtttcagatttgtggcgaactggtctctaaatttcataatggatttctaaactttctagtttgtttctacttttattaagattcactaatttgtcgaacggcaaatcaagagttttaatgtttattggacaccaaatttagctttgtgtattacagatttggtgtttttaatgatgttgaatacatactgaacttagttattagatacaaaattgaacgttgagggattaactgaatactttttttatagtttaaaggtttgttagattcaatcatgaaaatataggagcggaacttgtaatttatagttttatggcttagtgatagtttaattagtatcagaatagaggttatcacacgtggattcctgattatccacaggttagaggaacctattattttctaactaaaataggtttctgggtcatttgtaaattggtcacatgggaaatttgactttattattatgaattttgtgtctttatcggaaaattttctaactaatattttctaaccatccacaggttagttttgtgttttgaaatttgtttaaggtattaaacaacttgatttagaagaacgaggttaatttatttgtcagtttgtgcactgtcttgttatttgcggttacatcagctggatcctctcaatttcatcttcatgcatataaaattaaatatgccttgtggtatcaacttaattgttttggatttagtggtatggtagctgacaattctcttcaacgcttaattaatttcaacacgtgcttgtctctatccacggatctaattccactctgaagtgctttagttagttgaattctttttggttcttggttttgtttttgtttttgaatttcgtaccatgcattctaaaaaaacgatcatttactgctttttcgttgggtgcagggactacaagataaaattaagctagttcctctcaa

SEQ ID NO: 68259 - DNA, 798 bp, Cucumis sativus
  Intron number 2 from transcript Cucsa.237580.1 (locus Cucs a.237580) derived from phytozome v7.0 (chr-ID scaffold0202 3; pos 407677 to 408474)
gaaaacaggtatctttatatctatgatcttcttcttctttcttgctttcacggtttaaacggtgatcttgttggtttcgagttttaaaatcacttttgtcatgtttaatatcaaaagagcaaagccaaacgatgattaagttgatagttgtttggtttcataaaattttaaaaatgaagcttaatcaattatgatcattacgttctacttataaatttttttatctacttagtcaaattttgaaaactaaaaaggaaaaatagtcgttttgaaaatggttgattttgtttttaaaatgccactgagaattcttgtgttcccttatatcgtaaagagttatgtgtaaattctaaatttcacataaaactatataaccatctaatcatattattataccaaacctataacctaaatgttgatattttggagtaattttgaacaccatgaacagatttcatccatttcaaaattattttcctaaacgcacctttcaaaattaattgttacaacttcaaatggatatgttaaccaaattattacaaaccttacaaaatttaggagcaaaaagttttattttcaatgaaagtagaactaaatcaaaatcgttcttaaaaattgataaagaataattagtactttatcgtaatctatcactacctatatactaactaatagcgataacaatgtccgatatttttttgtatttataaatattttcaacttttgaatctcaatgtcattatactatttctgttgtacgtagattcctgtctctgagctggaaggaaaattgatagg

SEQ ID NO: 68260 - DNA, 639 bp, Cucumis sativus
  Intron number 2 from transcript Cucsa.222420.2 (locus Cucs a.222420) derived from phytozome v7.0 (chr-ID scaffold0173 5; pos 3172 to 3810 reverse strand)
tgactgtgggacattattttccaggttcatatctcttttattgttcttatgaataatcattttcactttagtttctatattggataaaaatatatattgtgacaataaattgcattcaatatattcgtgaaagttaaatttgacccgagagtttgagcttaataaatattgagttaaaagttgtgtgttgaaaagaaagtatgtttacatggcatctttatgtttaccaaaaattccaaagacaactctggacggtttctcttgacctaaaaattcatttgtcgtccactgtttttctttttaatctaagtagtgtgtgttgtagtgtcaatttcacatataacgacttgcattcgtcattttttttttctaccacatatctacagaaattaatgtgttagctaaaactaggtagggaccaaattcaacctaaaaataacctagaaagcaacttaaatgacaaatttaacccgccccaaacaatagttctctattctctagttgaagtacaaattaaatgcatgaaatcataatgcttattcaataaatttgatttactatgaattaactgatctttgtgtttttacttgtattttgtacacagaaaagatagcttcattactcacagagcattttgtg

SEQ ID NO: 68261 - DNA, 522 bp, Cucumis sativus
  Intron number 1 from transcript Cucsa.231840.1 (locus Cucs a.231840) derived from phytozome v7.0 (chr-ID scaffold0198 9; pos 43110 to 43631)
agcaagtacgcataggaaaggaagcgagaaaactggtatgattttcgcttttttacgactttccatttctactttcatttgatacatttttttgtatgtgatttcggtggaattttggatttgatgcgtgggcatatcggaacatctttagggtttcttctgttgcattattatggttattgttagagtttcttctgttcggtgattttgggaaaactcgcgattcattcgttagggtttctgatatttatgtttgattgtgtctggttatttgtttaatttcttcagttttgactagttatatttcatttgaaatgtggaaattgctaataggacgaataatcgaatgttttgattttatcattctcttcaatttttttcgttactcgtttcgtgtctttttagaacaaatctttgggatatttctccttgttatatatagtttcagctctgttgttcctgatgtttctagaattttgtttggtagattgtggtggattttactgcttcttggtgtccacc

SEQ ID NO: 68262 - DNA, 747 bp, Cucumis sativus
  Intron number 1 from transcript Cucsa.385270.2 (locus Cucs a.385270) derived from phytozome v7.0 (chr-ID scaffold0390 4; pos 626303 to 627049)
gtttgagctactctacggtaggactcccttcaaaggttcagcaaacgaggacacattaacgaacatagtatctcaaactctcaagttccctgattgcccattagttagttttcatgcaagagacctgatcagatgtctgctgacaaaggagcctgaaaaccgattaggctcgacaaaaggagctgttgagattaagcagcacccgttttttgaaggcctcaattgggctctgatacgttgtgcaacaccacctgagcttcccaagttttttgatggtgcaactagtacaatgccagtagattctggggagaatacaaagcgtagagatctcgaaaatattgaaacggatgcagcaatgttcgacctgttttagcttttactttctctcaagggaacaaagatgttttcgtttactaagctctctcatcctcgttatagcttataatgtaaatgtctacgtgaaaggataagataaactatatgatgtaaagcgtgatacatgaaatagataaatttatagcgtgtctaaaggaaaaactatatcttttccttccctctcaaaatatagacagagtatatgaatttatcgtcaatagattctgctaattgaactacaaagagattaaattcataatatctaatcgttgaagaagatcaaatcttgcataattttcatacacaaattaaaccaacgtagcattatctcgaaaaggaccccaaaaacggttggagtttgaagagttcagg

SEQ ID NO: 68263 - DNA, 516 bp, Cucumis sativus
  Intron number 1 from transcript Cucsa.204990.2 (locus Cucs a.204990) derived from phytozome v7.0 (chr-ID scaffold0141 6; pos 153667 to 154182)
atttcttggtggtgctgttgctctttcttcgccaggtaatggggttatctcctttatgctgttattgggtttttattttttcggttttggtatctgggtttgttgatttttgctcctttttgaggttttcgcttcctgggttgttttggctttgtttctttgtgaataacgatgaatgtttgggggatttcttttttaatgagagatttgtatggggttgtgttttggcttttgatttggaggtgttgtgattagactgtttctttttcttatattaatggttttttttgttttttgtttttatttcttattgttgagcctgcaattgattgctggtattgtattggtattgtgtttttttttgccaccggttttgattccttgagttgtttttttctcaaggtctttcttttctcttattcttattctgaagttttcgtttggatgtctgttaatgtggtgatttgttctgagtttaagtgttgtatatttatctttttggttcgtgttttagga

SEQ ID NO: 68264 - DNA, 478 bp, Cucumis sativus
  Intron number 2 from transcript Cucsa.363640.1 (locus Cucs a.363640) derived from phytozome v7.0 (chr-ID scaffold0361 1; pos 1229203 to 1229680 reverse strand)
cgacttccctttctgctcaggtcactgtgttacaggtatggcatctatattttttgtagcttatgaagaaggataatgaacaggtggactgaactatagacaaaacatgaatcttttatatatcttgctttacaagtctcatgggtggcctgtagctatcatttggacttgttatggtgatggaagaaagaattggtaacttttgacctttcaaatttgtttgttttttctccctcactttcaagacttattgtacagataatgagggctttgtcagtcttgatgactaaaaaacaatggagaaaagtgttttttgtttttgcttttgagttgagtgagggtatttcaactttttggtttgtgttcttagatgagaggatatgaacgacttcttgatatgtttcaaccggttgagctatgcttaataatctactttggtgcagagagataccactggattgactactgagaacagaga

SEQ ID NO: 68265 - DNA, 520 bp, Cucumis sativus
  Intron number 1 from transcript Cucsa.338800.1 (locus Cucs a.338800) derived from phytozome v7.0 (chr-ID scaffold0335 6; pos 1539143 to 1539662 reverse strand)
ctaattgtactggcaatcaatttgatttcactaaggtaaaattcaaacatccaaaatatataatctatctttttttaagtttaattttcagttggttaatgtatcatatattattattatttcttgtttaagagttaatggatagtttatggtagtcattcttttttgtttttgtattcgttcttatattttaaaatgatatagttgtttcttatttatcaaacttctaaaacatctcttcatctcttatctaaaaacattgacaactaagtttgattttctgtttagaaaataaaagtgttagcaaacatactacagtgcttcaatttaaaaaccaaatgaaatattataagaaatttgaaaggaattatacatgattattaagtattatgttttgaaaatttattaaataatcggttttgatagttaaaaaagaaaaagggtttgcaattctaaagattgaataatgtgtgggtgtgtttcagattgcacatttagaaaacgatctaaacgtagtttg

SEQ ID NO: 68266 - DNA, 868 bp, Cucumis sativus
  Intron number 2 from transcript Cucsa.285080.1 (locus Cucs a.285080) derived from phytozome v7.0 (chr-ID scaffold0265 3; pos 1560104 to 1560971)
agaaaggggatattatttgtgagatttgtcatcaggtatgttcacttttttttattgtactttgttattttaagttcgtggaatcatgtgtgcatttgacatcaaagattcaaagttgttctagaagagatgttgttggacttgcacccccttttgggatatagcaacggtttttctgctggtgtagagtgtttgggttgaaagaaatattagaatttttagaaatgtcaattgaccttggtttgatatgccctataatgttagatctaaaacttcgttgtggctactacttctcaggctttgtgaaattattagcttgtttgattcttttggaccagagtccctctctttggatgaacaccctttgttgggaggtcgtttttgtattgccctttgtttttccataagctgggttcttgtcaatatatctatatatgagttcgtgagagctcgtctgacttcttaagtggacacgtattattccattcaatattttgtgtatgggccatgacactatctggggaaagcatcttgaaagaaaaacatgtttaacgtaatggtatttccattggaaaatgaagtcaagaaatggtatatgaccttacttgaacgggatatgttctataggttgtacatctgggtccttgagttctagggagacaagaaatggtacaggctgactattgaaagataaaacaatttaaataatgatgagtgtagacgcgtgtatatatatatatatatatatatggaaacaattcagctacattgaatgccatattttttagaggtttcaacttacctgaatttatatgcttgcatatgacgcacagccttaccaacctgattatacagctccgccacctcc

SEQ ID NO: 68267 - DNA, 638 bp, Cucumis sativus
  Intron number 3 from transcript Cucsa.299720.1 (locus Cucs a.299720) derived from phytozome v7.0 (chr-ID scaffold0292 0; pos 186220 to 186857)
gtactgacggaaagttgaaagctaaacacaggaaggtacaaaatgatatacatacatgatttttaaatcctgtgatggaatactagtattcaatgacgcattagaaatatttccttatttgattttggatgtgggaagccttgatggggcacttcgtttatttagtgtgaaacttttaatgtgttcctaatagtttcacttatttgatgtttacatattggtggtagatgatataatattgaatttactttcagtcattagcttaagtttttttatcaataggtgatttaagacttgtttttcataaaactgattcatctttttctaactcgataatgctgaaaagagtaaagaattcatacttgactttccactggtaaatttaaaatctccacttttagggtgttcctcagtttgtcttctgaaacatttttcgagtttctattttgttgttaggagatggatttaaaatggttattaaatgcttcaagtgttctacaagagaacaagttaatgttgtttagattaatcaaatttgtttgaaggatggttttttcttgtttaactcatcactcacgagtttattgtcattttcatctgcagattcatctttttgatattgatatccctggaaagat

SEQ ID NO: 68268 - DNA, 497 bp, Cucumis sativus
  Intron number 1 from transcript Cucsa.251180.1 (locus Cucs a.251180) derived from phytozome v7.0 (chr-ID scaffold0222 9; pos 299813 to 300309 reverse strand)
ggtaagtaatttaaattatgtttcattatccccttgtttcttgatattattatcgttgtaatgttctgaatctgtaatttgatactccaggcgatcgagagtttagaggagttcttcgtaaaatctctctaacatgctattcatatttgttactccataattttattttgtaattacaatatatcttatatcactctaaatgggaagattttcctctctatttccttatctgctttttctttctctgtttgcatttgaacattttcttttgatggaatgcacatcttcttaatttggaatatgatgtggatgctaagaatatatcaattaagttgaaatgtctggatgcacctcttcatcctgcttaaaaaagaaattttctaatttctacctacctagctaacacagtgttatcatttttaatattaaatatttggtttttcctttaattgtttgttgcaggaaggtgtatcaggagtgtggagaagtattgagtg

SEQ ID NO: 68269 - DNA, 716 bp, Cucumis sativus
  Intron number 3 from transcript Cucsa.316120.1 (locus Cucs a.316120) derived from phytozome v7.0 (chr-ID scaffold0304 1; pos 49137 to 49852)
taggaatctctctcttgtttacactcttgctgggggtaagaatcacccaatttatatctcaaggaatttgctctgtttattttttgttcacattcattcaaaatgtttggttctcgttctttccattttattcattttagtccatgtatcttcaaaacgtctattggcatgtttgggagttattttgtgacgattaaaattgcttttgacattttcaaaatctctcgaaagaggcttttgatgattcaaaacacatttaacggtatgaaaaatgtgtttaagagtgtaaaattgaacactaattgatttgagcgattaaaatgtgttttaaagtgattctgaacttgaaaaaagtggttttaacaatttcaaaacttttccaaacatgcactgtattagtcctacttttggaaggtgaccaattttgttcctatttacaaaattttaacaccaagttcatacacaaataaatactttgaatataaattaaagcttagtgaatgaagtagcatgctaacattttaattgaaataatcgagatgaaaggaccaacatggttactttttgaaagtagaggaattaaaacagatgttttgaaggtatagcgaccagaataaacgaaaatcaaaagtgcaggatcaaaataacatcaaatcctttattgttttgttgattttgctgaggacttgcagttgattgtattgattgtgctgctg

SEQ ID NO: 68270 - DNA, 593 bp, Cucumis sativus
  Intron number 1 from transcript Cucsa.342920.1 (locus Cucs a.342920) derived from phytozome v7.0 (chr-ID scaffold0335 6; pos 5226178 to 5226770 reverse strand)
gagatttggttggtattcttcgcaggttagtttttttctgaagggttggttaatctaatttcattcgatcttttagcctctatatatggagatgtggagatatggcgatgggcttttttggatttttgtttgaagtattgattaatgaaatatgagtttgttttcttttccaccctatgtttggccacctataattgaagttatgatatgacacaagttaaattatttaaatcctgagagatgctccgttacaattataataatcataatattccacttgcttgaaacaactgtgttgatcatgtcatattttatgttggagaacaatattttaataatgctccacaatctcgtttataacatatttatttgaagttcgaacaaaggtgacaatggtgatgatcttagatttatgggtttacaaatgcaaacgcctagtgttggatttctcgaaactttctttttgtgaaaactaaggccaatatgtacagaaatatgtttggtcaaactggaaccaaatcatgtgattttccatcctcactttgaacaattctgcagcatcgagatattcaagcataataaggaagagagga

SEQ ID NO: 68271 - DNA, 666 bp, Cucumis sativus
  Intron number 2 from transcript Cucsa.237050.1 (locus Cucs a.237050) derived from phytozome v7.0 (chr-ID scaffold0202 3; pos 102175 to 102840)
cctatttgggcttgtctcaaatatattccacacaggcatgcacttcgatatatcttcaccctttcactatcttctcaatgcttctttttctctgaattgatgaagttttttttatactaatttcatgtattacttgctataaactgtgtataggtttaaaatgctatataattagtcctcgtataagatctctgcagttttaaatgtttaattttattcaatatgcaaaatttaagattgattggaaatcctaaattacatgaatcaaatgattgatgtgagtgtgtgtcaaatatatattgaatgaaaagaaatatgcatggatggtctgattactgggattttctttttcgtttttgaactttgatgaaaaattgcacaaatcgctcttgaactatgaaatttgtcacaattacactctccaacactaaatttttaatttgatctatcactcttgaattttgtggattgttacaattacaccatttgaacttttaatctgatcaattagtctccccgtagttgagttaatttgtcattttttatcgaagtaacatccgatgaaattgaataatgatcttgcgaattaatatagggatctaagaactaacatagggttttattttgacagactcctaggagcttcattagttgtaccaagtgtga

SEQ ID NO: 68272 - DNA, 803 bp, Cucumis sativus
  Intron number 1 from transcript Cucsa.345720.1 (locus Cucs a.345720) derived from phytozome v7.0 (chr-ID scaffold0344 3; pos 1257 to 2059 reverse strand)
taagcttgttgaacagggcttggttccttttaaaggtataaattaacttacaatctacagctcttgttcgttattgtttttattattttctatatgtcctttcttttcgtccactgattatttatgctgtagtgattagcactgtgccgcaaacatatcctatcaatgcttttgaaattttgacatataattcctataattacatccgtagtagctttgaagatatttttgggtagatatctattgatgtaataataatcactgatgaacattaattttatgtttttgaattgtttgatctaaaaaggagcatatagcttagcttggattggcttttatctcgtttttagatttaaaaaatgatgcaattttaccttataagttctagaattaattttgatttagttaaaaatatttttaaatcttacaattccatctctcagattttaattttgttcttggttttcaagatttaaacttcaaactttggtttttgactgtatattaatgaggtgttaaatgtttattaattagtattaaaagtaattgtgaggtgaaaattttaaattgatttgttctccagatttgataataatattttttattatataataattaaaaaaaattccatgatacatggattgatttaaaagtataagttattgataaaaataaatttaatattgtattataatagagacttaaacacacaacctctattgaccagcgtgcctctgatattatctttaatcgcctggatataacatcttctgctcacaaattaatttgtatttcttttgtag

SEQ ID NO: 68273 - DNA, 863 bp, Cucumis sativus
  Intron number 1 from transcript Cucsa.266970.1 (locus Cucs a.266970) derived from phytozome v7.0 (chr-ID scaffold0236 4; pos 13239 to 14101 reverse strand)
tttcccatttcgtcgccttctctcttcatctcaaggtatgtatatttcatttcttctacttttctttctctgttcatctcttgggtttgaaggacttttgaagttgggtttgtttatttctttgttattcaatctcttttctttttagagttgttgtttttttctcttgtagttcgattttataacggtttttgtgggctggttttaatttctccgttttctcacatctttcacaaagaaaagattgaattcgtgttcgattttgcaaataagaagttggttttttctctcgacttttatatattcgattcgatgagattttctacaccgttaggatggatccaagaagtgaagtagggatgattggttgaaaaattgtattgagaagttaagattttaaagttccctcctaacttgttactggattgtataattcgttcaattccttgtcgttccatctttatttctgtttcgcttttcgtgttgctgcgtatcgcttcccatgttatcttcctcccctattgattttgggtttcttggagtttctccatttcctctttctatttttctacaataatcgtttttatttttatttgtttccaattcctgggctatcttggaatcttatccttttctcctgtgtaaataagaacccgtattcaatctcaattcacagttaggttttcccaaatgagagctaaaaagattgtacggagaagttgaagattttaaaattttgttcatgaattcttctaatttaacattttgtttggactgtttgtatatagatttggttcttgagctatttatgttttgaccttttcaccttactgaggccatgcgttgaattggtttcttaacag

SEQ ID NO: 68274 - DNA, 705 bp, Cucumis sativus
  Intron number 1 from transcript Cucsa.212640.1 (locus Cucs a.212640) derived from phytozome v7.0 (chr-ID scaffold0154 3; pos 437791 to 438495)
gccttcccacctccaagtatctccattctcctttcttttttctggatttcagtttccctttttatattgggttaaaaattttgtgttgtttactttacctgtatctatacccgatatctcggatacccagttcctgaaattgctccggtagctttcttgttagcttagtacttgatttcttatcgttcttttggttgttttggcttttctggttataaaatttacttttgaggtagttttgggaagtttctgaaactgttattgattctgtattgtgatttttatagggttagaaactgccgtttgcgtcgtgtttagtcattaaattgcactgcagtctccttcgagttgtaatcaaatattgaaaagcgatgtgtgcttatataaggctctatttcttttcttaagatgtatagcctgttttctcttttttttttttcttttggaagtcttagaatcaaagcattatggcagaaaacaaaattttgtgtaatgcgtttagttttaaaacgagggaaaataaggagacaaaaaaagtagtttggcagcagcattgtggagactcttaactatcatctagagtttatcagatatgggagtggttgaatagtagtttaggtaaataagcaaaagagagtaggtatactcatattttttatgttggttgtgactatttctctatattataggcacattgattactgt

SEQ ID NO: 68275 - DNA, 679 bp, Cucumis sativus
  Intron number 1 from transcript Cucsa.368640.1 (locus Cucs a.368640) derived from phytozome v7.0 (chr-ID scaffold0363 9; pos 503299 to 503977)
cccatcttgctctttacgacgatatcatttctaaggtttctcttccttttacctgttttcttctctggtttcttgtcgatttttccctctagttctcccatgttcgtagatagtattagtaggtttatttaaattcaagtttctgttacttgttaataatttgaacttggggttgcgtaccggtattaattaggaacgatccaatcctaaaaaataaataaaacacagcatgtcggtgatgtcacaaaccactatcgtattgggatacccctttcatcataaaattatgaagttccagaccagatattcattttaatcacctttttaaaaaaatttaaattgagagccagtcaactagtgattaaaaatgaaaatctaataatcaaaatctcgttagggacgcaataatgcattttaggcggtgctagagtgcactatgttgcatgtttccaaatttctatattgttggctccaattttgctggcattctatcttaaattgtgtttactgctgaactttgtaatttaggaacttgggaacaaaaggaggtatgataagttttttgactgggaaaattttatgttgctgtcctgtcccaatatcctcaaaagttgcttaaacccacattgtaactccttgtactgtttgtgttgttccattcagtccttccacagcagac

SEQ ID NO: 68276 - DNA, 714 bp, Cucumis sativus
  Intron number 2 from transcript Cucsa.368640.1 (locus Cucs a.368640) derived from phytozome v7.0 (chr-ID scaffold0363 9; pos 503981 to 504694)
ggaaagcttacctcttcaataaggtgtaagttcttcttgattttagagtttggacattgattaacacactcttgtctcctcccctaggtgcatgtttgacaaatggtttttataagcctgggtcgtttgtgcaatttgtgtttggattgtatgaataagtaggttattaaagacttgtgtaacccatgttatggttgtcggtttcatattatgttaaagtcgatgtatgatgtttttaaaaaagttataggcttcttatgtgtggattgggttgatcagaattttgtaaggggttaacaaactcataactttgtgttctcatctttgtagcttcaagttagcaagggtcttctttaatagatacaaaaactttgcatataatgatcagtagtttgatgttaatgtttcataacagaactcgtgggatttgtgagaatacataggagagtgattttactgaaaattcattctcaaataatccaatgcttcacaatctagttacaaaaactatgtcaacaaatgaatctctttattcattcaaatagtgatttacacgcatacctgtttgtattttcactttcgaagtgtttctcattctaaatcgttattactttctgataacggtagaataagctagagtttctctaaaactaattctaaaagtgcctcatctcatagactgggttctcattgtcaaaactttctccagggtaa

SEQ ID NO: 68277 - DNA, 739 bp, Cucumis sativus
  Intron number 1 from transcript Cucsa.271480.1 (locus Cucs a.271480) derived from phytozome v7.0 (chr-ID scaffold0250 0; pos 329038 to 329776 reverse strand)
accttcctggtgttgcccctgaggacttcgagaaggttagtttttcttaatacgtttgtttgagatttgcttgtgttggttctttgcgttgttgtggattttttgggttggtcagtgaaattactgcttgatccgtgttgtattgttggatctgtggtcgttgtttgggagctgctggaattacgcaggtagtttgtgtgtggcggaatccggatctggaaatctcgtttgtcgtttttgttgttgtttatggtttttgaatcgttgtagattcactcgaatcttgagcggggttgtttgtggggaagtttttagtgcatcgtaccaatttgtaagtgttatgtaatgtagaacatttacgttagctaatttgagggcgcttactcctagattcaaccgttgttttggaagaaaggtatgaatcgtagggaacacggagtattccgagtggttagttatttcgttgtttacttgttttatctaggggttggtttaagtcagctgggactatcggttctagatgttctttaaacggatgaagatatcgtgtttccactctcattctacatgtcgtatataagaatgtattatatattgttgttggattttgctattgttttccttgtgttataaattataccagaattatgttgaattttgttcgatccagtagaatgtgcccactggatttcagatctaagaaattcttgtggtacttttcacgtttggatgcagggag

SEQ ID NO: 68278 - DNA, 1026 bp, Cucumis sativus
  Intron number 6 from transcript Cucsa.394050.1 (locus Cucs a.394050) derived from phytozome v7.0 (chr-ID scaffold0410 0; pos 130762 to 131787)
gcatagtatcaaagcaagttggtgcaagcgagcaggttagctttcaaggacaacttcaacttaatcaatagtctttgagcagatcattggttattttattttacaacctttatcaatggattgacatttcgttagtttgtcgatgttgataactatcttcatcgcactaaaagaaatgttgcagtttttatgcaacctcatttactgattgagtcaaagccatagctgcatagataaataaacccatttggagaggaactatgatacaatactctaggaacttgccttggaatctaccaaaccaaacacaagcctcaacgcctttgcactacttggatcaaaccaatgagatagtttgaaggattacaaaggcaggtaagaaagctagttgctatctcaaagttgaaacactcaacaattttggtgagcaaccaagcttgaatgccgtaggacataaagcctaaacacaaggcttgcaaagggtccgaatgcactaagatcattctagagagagaattcaaatatcatttaacttaaacggtttaaaacaagaaccttagttcggtttatattaatagttaagggatctaatctaacaacctcttaaatcatcccatcgtaaaaataatttaaaaacctattccaaattaattatatgctggtcaaagatattttctgactccaaaccctcacatcccgtctcccactctagaagagtcagtgaccctcaagcaatgaaagaaaagaagtcatatcagttgccttccctatcagcaaaggtgtggcgtaactcgaacgagaaggaacaagagttctctgaaggaaattaacaatcgagtgattttttttggaaataataataataataaattaattaacaaagtacttaaactcaaattgacaatccaatcaaatcaatttacaaaatgaaaatatataaccatattatttatgcatccccttctcacatgatgtttgtttaacaatattcctggacttgattgattatcagggtaaggctcaagg

SEQ ID NO: 68279 - DNA, 692 bp, Cucumis sativus
  Intron number 1 from transcript Cucsa.205460.1 (locus Cucs a.205460) derived from phytozome v7.0 (chr-ID scaffold0141 6; pos 535902 to 536593)
gccaattctcgtacgctttctttctctctctctctctctctctctctctctctttttattaagatttgattctgttgtttcactctgttgattgttcaatcagtctacatggtgttgaatggagttctattgtttcgatttcatagtctgtagtttgtcttgtatctcttagatttactagatgataaaatatgttttgggatctgaaaatttttaccctaggttatatgcgtttgctgttcgtaatggtagtgtttttgtttctgttctcgctaatagtttgaactctagttacttatctgttaaataaatcctggttctcctcttgcgctgaatctaattatcatataatatttgagttatgttgaatcatttgcatcagattgctagttggtgatatcttcctgttgtataggaaatcgtttggtattcttgaacaattttttatgggttaacgaagttctaaaatttgttcctcttaggttcttaacacagctaggaaggtacttttatattgaacttgtttcagtcttcccccttgttattcttctaaatcccaaagccctagttttttattctagcgatttttttttttttgaatatgtaataataacagaacggtttatgattatcttgttaattaatgtctggattgttgacgataggtcaaaatataaggaagctggtgaagg

SEQ ID NO: 68280 - DNA, 607 bp, Cucumis sativus
  Intron number 2 from transcript Cucsa.352930.1 (locus Cucs a.352930) derived from phytozome v7.0 (chr-ID scaffold0353 3; pos 598064 to 598670)
ttgctcagctttaactggactagcctttgaacttggtatccttttttactcttaattcctctaatctatatttcccaatctttttcttttcaacactaatttattcgtatcccattatctcccttaggatttcaacttttatgccacaaagaaaaaccccctattattaagaataattgtattcatataaatcacataaattatttttaactttcttccaattagattaggaatcaattttgcagttcaaattttttttccttctaatgttctgctcatctctttaaaacataatatatgaatttgacaattatttgggtttcattgccaaaataattttaattaccttaattagtagagcttgaggtattattatatataaattttctagtttaaaaataaaataaaataaattataatttaaagattaaagaattattctatcacatagtgtatataagaaataagacatgcctatcaaataaagaatatattttaaaaataagtaattacaagtttcgattattccgaagtgttttgattgttataatttatttgataatgtgtttattgaaaggtcccataaattttaagattgaggagtaca

SEQ ID NO: 68281 - DNA, 494 bp, Cucumis sativus
  Intron number 3 from transcript Cucsa.265650.1 (locus Cucs a.265650) derived from phytozome v7.0 (chr-ID scaffold0235 2; pos 68055 to 68548 reverse strand)
gagaaatatttgaagctgcattaggtacatattaatctcacctatatacgttttgaagaccaacttaccttagctactgaaactttaacagagaccctcgttgataacctcttactttttgttttaaattaagcttattttctctcattgaattcttagtcaaaaaccaaaaataaagaaaaataagtttcttaaaaccacttttttattattatcattacttatttagtttttaaaatttagtttggtttttaaagatattgttaaaagtagattacaaacccagagcctaattgttgtcaaatgggacgtgagttaatttattccctattttcatggatgagatctctcctcctgtccataaaaacactagaattatgcatggacaaacgagtcaagttggaattaaggtatagtttctttttgtagaagaatgagatagaggattgtttgttgtagatcaacttggagtgagatctgacaaagctgtgcat

SEQ ID NO: 68282 - DNA, 196 bp, Cucumis sativus
  Intron number 2 from transcript Cucsa.265650.1 (locus Cucs a.265650) derived from phytozome v7.0 (chr-ID scaffold0235 2; pos 68594 to 68789 reverse strand)
aggaagctgttgaaggatctaagtgtcttagatatgtaaggatgtttcgctttacaaattctgtctgtttttgtggcttcatcttttctttatacttggcatatatattcatctcatgagtgaatgaaaatacaagtttcttcctttgttaatgtttgatgaatagaatagataagaatttgatttttcaggtttg

SEQ ID NO: 68283 - DNA, 934 bp, Cucumis sativus
  Intron number 1 from transcript Cucsa.219270.1 (locus Cucs a.219270) derived from phytozome v7.0 (chr-ID scaffold0165 8; pos 1110227 to 1111160)
aagaacgtcgtcaatctcctcggttttttaaccctgtaagaaggattaaacaaattttgccagattctgggtttatgttatttgacaattttttttacttggatgaagtatatattaaccggttgagaatagttggatttggaagaactgtttataacttgttttgattgggaaatttttaagcgtttccgacttaaaatttcttctaaactgtagaacctgttgggaatatgttgaaaatatcatatttgccctaatttatcagcttaggttgttggtatggttttacttggttcatgccctaagaataattgcacttaactatggattgatccaacaaacgactctattgataaccgtttaattttttggttttgaaaattaagcttgttgcttccaagttccaagtatggatttctttattttgtttatgttttcaatatccgggcttaaaggaataatttttagaagcttgttttgtttttaaaattaggcaagatgaaaactattggaaagaaatcgtttgaaaacagggacagtttttcagaaaccaaatggttattaaattgatctctagctgccaagctattgatttgattattgttattcttcagtgatcattctgttttccattgccgtgaaataattagaaccagaataagtcaacttggtactgagagtgacgatggatataacttttcaagttttattagcttctaaatgctactttgctattaaactatgatttaattggtatgtgttcatggaaacataatttggttacaattaagaatgcttttctttattattattgttcttttttttatctgggttgtcatctctgtctgaattttaacttcaattagtttggaggcattaacactatgttttcgttgtagctttccgttgatcgatcacctgcacagtctgactc

SEQ ID NO: 68284 - DNA, 519 bp, Cucumis sativus
  Intron number 1 from transcript Cucsa.338350.1 (locus Cucs a.338350) derived from phytozome v7.0 (chr-ID scaffold0335 6; pos 1284297 to 1284815)
ggaagttcgactacggtacggatctgaagcccaaggtcagtatttctgttttttctttttactttgtttaattacttttcatgcccttggatttgtggggtttcgctgcttaatcgatttcgcgggatttcggtgtttggatttgggtgtggccccaaatttgatcgaatcttgttaaggtggctgattggtttggactgccactgtttgttggatcccattcaatgcccttcatttaatttttttttttatttgaatgggtatgtgtttgattttgacgaatgtctggtatattatttatgaatttttgcgtaagacgctagtgatttactgagcatttggaaattgtttgaaatttcgatcatgtacgtgaattttatcgttttttacttggattatgtaatattcttgccttgctagttcaacaacgttgggaaaagagatttagttgtttttgttgcttatgtacctagacagctatgtttgacttatctctctgaattcttgttcttatcagat

SEQ ID NO: 68285 - DNA, 885 bp, Cucumis sativus
  Intron number 1 from transcript Cucsa.240650.1 (locus Cucs a.240650) derived from phytozome v7.0 (chr-ID scaffold0204 7; pos 751984 to 752868)
ggatattcaaggtaatttattatatattcattacattcattcacaatattatttctttcatagtcaagtttttagtggaagggttagctagcttcagactcataaatatatatatattcattttccaaacataatccatttccccctacttggactttctcattcactctataaaaactaggcttcactttttctctttcaaccatttttgaaagcctgagttcttttgctttgttttcatactgcttttccttatgtgcaaaatcaatggaatccactttgtttagtaataatccactcttcataagtattgtttattatcattatcattattattgaaacttatgttagttcatttcttcatatttttttgtttttgttataaataataggctaaacttgaagtttctaaaaacttattcttttagttgattttcaaattttgatttaattttttagaatgttttctcaaagtgtataatacagtaggaaaactatggacagaacacccatgtttaaagcttaattttcagaagaaaaaaaatctaaaaaatcttatagttatattgattttataattacctaattaagattgtttaaatttgaaaaaaaaaattagaacaattgaaccaattcaaaagtattttataattgctaatctaactaaccctaacatgtatatatccttttagtactgttctttttactaatactcttgaaagatgacagagattaattaactaacggccgcatgctttctttgaagtgattctgaaagtagttctaaattgttaaaagtagtttctattctatcaaaaatcacatcaaactcacttttaaatttacaacgtatgatatgtgcagcaaattgtaaatttggttacg

SEQ ID NO: 68286 - DNA, 1060 bp, Cucumis sativus
  Intron number 1 from transcript Cucsa.303310.1 (locus Cucs a.303310) derived from phytozome v7.0 (chr-ID scaffold0295 1; pos 1268396 to 1269455 reverse strand)
cttttttacgaatcgattgagttcagcgcgaaccggtaaggttccagttcctagactctatatctgttcttttttcaatttgattctggtgactgttgcttgatcagaagctaaaatcatgtattcgtgagtttatttggctgtttgtattgatttttttggagctgaggtggttttggattctccggattatttttctgtcggttttactttgattatgtatttgtttgatttacttgtttgcatccgtttggaattttatcggtatttaattgagaatacgatcttttcggcttcttgttactttgttgttgtcatgttatcgcttgagttcttctttgcattgacgctggtctagtttgctttattggattcattgttgcttcggtatgataaatgaatatattgttgtgatttcattttagagttcttgagattcataatggataattgaagatgattctgtctgtactcggggctatatttgttctttagaattaatttcttcctcttttagtttcattcggtcctctaattacgatcaattggttcaaatgatagaaggtttcaagatgtaatgctcctctttagctagctacgggagctgaattctttagcggaaaatggcttttcccctcagattcatgctttattgaactactttttttgctctttccttcatttacggtctcgcaacattcccgtttccttcgacaaaactaataaaataaatatgaagaacaaatatcatttttgtttgctccttgtttaggttctagttataattcttagtgagattttcaactccaatgttgagtataaactaggtcactgtgtacttcttccaatgataatctatgtttatttcatcatatttgccactagcttttgttaatctgtgattctctgaccaaattttcaattatctcttgtcatatacacttgtagacctgtcatgtcatgtctcctaatgaagttttttatttttcataaactgcagtcacattgatttataatgttttctgtatcagggttgagagtgacattgcgacttctacca

SEQ ID NO: 68287 - DNA, 798 bp, Cucumis sativus
  Intron number 1 from transcript Cucsa.372090.1 (locus Cucs a.372090) derived from phytozome v7.0 (chr-ID scaffold0370 3; pos 268664 to 269461 reverse strand)
acttccttgcaggtctcaaccccaagtttgacatagtgttttgattacttctgctactgactctgttgcctttagttctaaatcttctacccatgatagtgagaagaacaacgggaaatcgatccctatttgtgagcattgcaagatatagtgacatactaagaattagtattggaaacttcacggtcgtccttcaggaggtagaaacgtccctcaaatgataaacagaattcaaggcgtgcttatatgagtgagtatgttggaacctctcaatcatctggctctactgtaaactaaaatggtcccaatccaccctccattctaggagccattgctcagttaggtatgcctcaattccttaatcctatcagcatcgatgcgaagaatccccaaaactaaacttgagtgctacagatcacttcataggttcctttgagaattttgtgacttatattccgtgtgcttataaagaaaagctaggaagcatagatatcgacacacgacacggggagacaacaacattgacacggtgacaaaccatttttcaaaaaagtaggacacgacacgttggggatacatcaatttttaagtaaaaaaaattaaatatatgtcatacatttaaacatattacataacaaagattccaattaaaagcatcaacataacaagtttagagtcataaaacataacaagggcagagagggttggtggcctggtgaggagaatcgaagaacagtgaagaaacctaataattaaaaaaataaataaacctaataattattgcaattagaccgatta

SEQ ID NO: 68288 - DNA, 868 bp, Cucumis sativus
  Intron number 3 from transcript Cucsa.332660.1 (locus Cucs a.332660) derived from phytozome v7.0 (chr-ID scaffold0326 4; pos 414972 to 415839)
gtgcagtgtgagggctgcaaggactggtacatcttcttgacattatggaaaccaactaatgttggcttttgtgtattgaatccctgaattcttttgtgtatttgcactttccaaagtgaagtgtttaaataagcaattggaggcttgaatttgtttgtaaagagactattcagggcatgattaattgagagtgaattttggataagttttgaggtgacactttttttagacgaactttttgaaaagagcactagtttagtgcttctcacttttaattttaaaattttatttaatttttttttagtgttttcggatctttcaaaatcaccttttgtcatctgaccaaatatatgaaaattttgaaaagtacttttaactagttaaatgtcagctttctgaaactctccttaagtttatatgatttaacaaataaaaattatttaatcaaagataatgttctagatgcactgaaataaattttggcatcaatggatgcatcatagcattatattagtcagtatagagatcaccttaatcagttaattagccattgctctattcatatgtggagaagctaataaaggtttaaattcagtgtgatgtacggtcttttcttttatgggttgttaactgtatcaatgttgctagaaattgaatgttgacgtgaactctattctattagtctattagaacatcataacttagttcttattggagtggctatattatatcattcttttttatactggaactatttagagagtctcaaactcaagagttcagtcagtctcaactatttattgttttctgaaaccacaacgctcttatgttgcatttggtctttaggtaccatcctgcttgtgtaagt

SEQ ID NO: 68289 - DNA, 749 bp, Cucumis sativus
  Intron number 3 from transcript Cucsa.343190.1 (locus Cucs a.343190) derived from phytozome v7.0 (chr-ID scaffold0335 6; pos 5457738 to 5458486 reverse strand)
gcagcagctttaaagtcactggaaaacgcaagaaggtacagaaatggtaattgcagacttgcgaactgtttcttgttatttttcgattaagtgatgttaatttctgaaaactaatttaatatttgattttatatcattttcttattttcaaattggaatgattcaaaatatattttggaatgattttgaaaatgatagaagtgattttaattcaagaatcactcgtaaacatgctctaaaacaacagtcctctagaaactaagttaaccactgcatagacattgtggtataaccttacttactgttatggtgctgatttggccttgtgtgagttatgttactttggattttatgaaatgaaattatcgtcactagatagaagagtatgtcaatttcctataaaattatttatgaactatatcataattcaccatttcatagacaatgtccaaggacacaattgtacaacccataaaacagatcctgttcaactaaggttgtacagattgatacatgtttcagaaccagccttggcttgtggagttcttttgtgataatggaggttgctttctcttgtagaaattttggtgtaccataagaaatggcatccggatgctttacattatatgatagcccaactttataaaaatttctttttacagtttctaattttaactcctgtcttgtttgttaatctgaatacttggattttattttctgtgctgaagtcactagtattctattgcaga

SEQ ID NO: 68290 - DNA, 481 bp, Cucumis sativus
  Intron number 2 from transcript Cucsa.320910.1 (locus Cucs a.320910) derived from phytozome v7.0 (chr-ID scaffold0308 0; pos 769024 to 769504)
ctacttactattgtaagacctcccttaacttcttagacctcactggttgttaaaaacatagttcattacaatttcctatgggctttgacaaagctatatttttccaactaaatagtaagtaataagatcaacctctacttatttggatttattaagctaaatcagaagcaaaatatacattttttgtctttgattttgaagaataaatatgtttggtatctcagttttcaaaacatatatttttagttcttgagttttgttagaatatatttttaattataagaataaatgttttgataatcttttaacctattttttgaaaatgtatacagaaatataaaactaaatgcatgtattctacaaaattgggagggacaagagtcaatcatgaaagactaaaagttttagtaatttagttgaaaagtatatatttggggatggatttgatgaatgattattgtaaaacagacttaagattgcg

SEQ ID NO: 68291 - DNA, 687 bp, Cucumis sativus
  Intron number 1 from transcript Cucsa.339550.1 (locus Cucs a.339550.1) derived from phytozome v7.0 (chr-ID scaffold03 356; pos 2148743 to 2149429)
tgattgatcttgccgctactctccccctcccacaagtatgcttcaactctttatattacaaccaaatttacatatttaactatgctcttgaataaaccaaataaggggacaccccggatatctataggtgatttcaaaagagatttttagttgaaaaataatatgtttaaagatggtaccttcttttgcatcgatacaaactagtaaaaactatcggaacaataaaataattctcaaaagagatagtttattacattcccctcataatgtaccgaaaaagatataaataatggttaactaactatctactttctacctaaagagaatgatcgaaagagtttctagaatgtcaaaagatattatcaaaaaaatagttgactattgaccatccaagatcatctagaataatatggcacggagcaacaaaataatgtaaggacttttctttccaagtaggaaaacatcatgtcaaagattttcaaaaaagaatacaaagttgactatgtagctaagtttaaaaacaaaagctcgtttggatgtttagagcaataaattcgtatttgaattggtctattcataatagctaaaacattagtaacttcgtttataaattagagttcgaatctctcttttaaccataaataaaaaagaaacccgttaacaaatcttcttttgcaacagatagtg

SEQ ID NO: 68292 - DNA, 750 bp, Cucumis sativus
  Intron number 1 from transcript Cucsa.331940.1 (locus Cucs a.331940) derived from phytozome v7.0 (chr-ID scaffold0325 6; pos 120287 to 121036)
atttagcctcctcctccctttcagcttaccgatccgtatgtctgatttcattcatcctcctttttctatttgttcatttcttttttttatgctctagatcgatccttgggttgatgtctttctgttttgagtttttgttgattttataaatctgggagctacttgtgcttgttaatctgtacgtttggggctttttgtttataaaagaataattatgtactttagaatgatcatttcggttttagttatgatatggaatatgattatacgtgctctgattagaaccgtgggttggtactttaaatgttttagtctcgttggatctgtgtgtaacgtatattgttgcgattgtttactgatgaacatctcgtggcgggaaatccatgaagagtcctctgttaccatcgggtctatgagaggttttagctgaaatagtagatggctgttaactgttttgttggactattatgttaatggatgcttggtaggagcttgaagatggttggatttagctgtggtaattccataatattttcattacacgaattagttatttcattaacttcgcatcattgtaacacgtctctgacccccacctccctcccgcttgcaagttgtttatggctttgatctatggccagcaatctcaatcaattattcaatgggagttttgtcatcctcgagtttgatatacacaaccaaaattctcagtattaaatgcttatgtgtatgtggtgcagttgagtagta

SEQ ID NO: 68293 - DNA, 702 bp, Cucumis sativus
  Intron number 1 from transcript Cucsa.350600.1 (locus Cucs a.350600) derived from phytozome v7.0 (chr-ID scaffold0350 4; pos 91339 to 92040 reverse strand)
ttgaagttcaaaacactaaaactaatacggttcaggtttttgttgcttcttccctcttaacttttaggtttagtgatacatttatattgttttgttcctccattatatactggttcgagctagattgcacccactacttttctgtctttactccaatcacacaccaagaatatttatatatttatttttctagaaaagaaaagtgagagagtaagataattccaatcatatctttcatatacagttgctaatattcatgaaaaagtacataaaaataattttctctacagctaagaaacaaaaaataacctctaacttttacatttattacaaaaatatcattattctctaaaaaaatatttagcatatgtataaacttttcaaaactatccttaattttatatacatatttatattaaccatcagcatataaaaattttgacctttcataaacatttcaaagctattatagaagttaaaaataatcatttataattttggatgaaaaataggaatatagaataggtgtaaccgtgtgagtccatatttttcgttttagaaattttgcatgcacagctagaattttactgtaagattagtatcgaaatatttatggaagatcaagagtaatattattacaaagacgactatattttttatatggcaggttcatcaagctgggtttgtggtattgtgcattgg

SEQ ID NO: 68294 - DNA, 580 bp, Cucumis sativus
  Intron number 1 from transcript Cucsa.313830.2 (locus Cucs a.313830) derived from phytozome v7.0 (chr-ID scaffold0299 5; pos 2997846 to 2998425)
aatccggaatagtaagctcgatttcttcttttcgttgttttctttgttttttttttttacgcttcgtttttttagttgaatttttcgattggaagcccttgttttgttgtcgtttttcctgaattgtgttggatctggtcgatgcggaagatggaactttctttttctggaaaaatgtttttgtgttggtttgtttaattaatcgaggatttttagattgtgattctgttttgttatgatttggttgaaatctgggtgatccatttgagatctcaatttatttggtgactcttttgatttgatgtttcttttctgaatggttgaaggtgtgtgaatgtgaatttggtttatttttatgatcagcttgtaatatttgaatttctgaagagttctttaattcgtttggaattattttcgtcattctttaaatttaattgcacggttctatataatatttgagtcctcaaggaatttattcgtttttcgctgtaggagttggtaatcgagttgtgatattaactagttcgttcttcttgtatctacagcgactatttgtttaagcttctgcttatcggagact

SEQ ID NO: 68295 - DNA, 962 bp, Cucumis sativus
  Intron number 1 from transcript Cucsa.234260.4 (locus Cucs a.234260) derived from phytozome v7.0 (chr-ID scaffold0199 9; pos 202318 to 203279 reverse strand)
gctgagtttggacgacgaaccgctacaagttttaggtacaacccatttgtcggtttgcatttatcttctactttattttgagtattatatttgaaattattgttctaatttctcatttgggtttctttttctttttcttttttttccctttctctaaaagaaaaaagtggtggggttttgattttctgtttaatggtttgcttttctggatgcgttaatgggttgttgttgttgttgctgctgcttgtttttaaatacttgtagttaaatactggttctgtctttctttcttttatgggtggaataaggtttctgaatcgtttgttggttgattttggtagtagagagtgaaatggtggagggttttaaaagtggggagtctcttaatcagaggttacctgctgaagccccggaaattgaagaagattcaaaatctgtgggttttgggggattataggagattaatctcgaggaaacgaaatgacggttgatcaggaggattctgaagctattgaagaggaaaagaagaagaagacaaggaaaaatgttttagtggggattaggatgaatggggatagcagagacctgctcaattggtcgattgttaaagttgctgatcctggggattgtgtcattgtaatctatgtttgtcaaagttctggtgcgtttttcttttctttttctttcttcaatccccaaccttcgattttagttattttacatcggatggttactttatggtgtatagttttggaatgtgatttttccctcttgccaaacagaccgtgcatcaaaagataagcccttatttgatgaattcttagaaggatacagaagcctttgtgatgtaaacaaggtttggtttggaatttttgctctatatggatacaatggatgaattgaagtttttggtaatgtttgttatctttggatttgggtgttaggtaactttcattgctcac

SEQ ID NO: 68296 - DNA, 231 bp, Cucumis sativus
  Intron number 2 from transcript Cucsa.341740.1 (locus Cucs a.341740) derived from phytozome v7.0 (chr-ID scaffold0335 6; pos 4159631 to 4159861 reverse strand)
caactgttgttcttgtcacctgtgaggtaactaaaggtttgcttgttcttaggtgcacttgtatggtattgggaaataactaacttggtcagtcttttgagtttattaatgtgaagttaaaactaataaagtttcttcatagtttgcttactagtgatgatactcctattctttgcatacctttacgagaactaaacttataattttcttttcatttggtttaggatcttg

SEQ ID NO: 68297 - DNA, 884 bp, Cucumis sativus
  Intron number 1 from transcript Cucsa.365830.2 (locus Cucs a.365830) derived from phytozome v7.0 (chr-ID scaffold0361 1; pos 3716042 to 3716925)
ggtcgaacgggtaacgtctttgattcttttccatttctccttctgttcttctgggttctatgtgcttcctgtctccattttgtttcttcctttccaatgccaaactctagagggataatattctgcttcttcactttcttcagttaatacgagtaactactttttttttttttttttaattccaccaatttacttcttaacttcgctctttacttgattacgattagcatactcatctgaaaaggcgagtgctctccattaccgtgtgccattttgaaattgttggcctaattttgtaattgtgagctgttttatgaactgctaaaggaactaatggaacgtgtttcagtcatggtagtcgtagatttgattgtacggttaagaaaccgagaaatgaggtccttagatctatatattgtttacatcggttagcaatataagatttacatggtttgaatgatgcgtttcactagtcaaattaatcgggtccacacttgagtgggcttaaacatacgacacttgatatactattcagtccaatcagtttctgtcttaataggcttttggtcatccatcgacatagtttctagttaactgttgattctagtttatattcccatttgtttgctgttatcacggtcctttacagttgattctagtttatattcccatttgtttattgttatctcggtcctttacagatgctggactacaatgtgcctggaggtgggaaataatcatgcgaaagattctgttcattgatcatattattggacatgtcggactattcatggacattttttatgaggaagtaagctaacttctaatgtgaaatcatttttcctgcaggtaagcttaaccgagggctctcggttattgatagc

SEQ ID NO: 68298 - DNA, 681 bp, Cucumis sativus
  Intron number 2 from transcript Cucsa.239340.1 (locus Cucs a.239340) derived from phytozome v7.0 (chr-ID scaffold0204 6; pos 192939 to 193619 reverse strand)
gaggattccaagaatccaagagccggatagtcctggtaacttctcttctgatttcttatttcagtttcgttgacagtattgactgttttgagtcaacatttgaacacgtctgtacttatcaaattggctcaaaactttaagggtttaaactgaccatcaaatttaccataaccatgttaatcagactctcacccttatagctattgcaagtttgagatttaaaagctcactggttacaattaaaagtttgagagttaaaattaacataagacacattgttcattcaataggtttcaaatatttattaaatttattgtagaaagcaatattagttttagagatcaaaataagtagagctttttataaaaaaatatttaaatgctaacttggtttgatttcagattctttctaaatataaaattgataaaaagaaaatttaaaagtgtatattttagtaagctaggccttctttttttcgtttaaagaatagtgtttagattatatcccatcctagtacattgttttatcgcaaaacaaaacttaggataaagtgtttggatgaaatgaagtttttaatcaacaaacaagttcgaatcaacaaataagatcgtcatctttcactttaatatttagtagctatttgttataacactcaaatgtttgctttcaatcatgtagctg

SEQ ID NO: 68299 - DNA, 1007 bp, Cucumis sativus
  Intron number 1 from transcript Cucsa.259700.1 (locus Cucs a.259700) derived from phytozome v7.0 (chr-ID scaffold0222 9; pos 6084769 to 6085775 reverse strand)
gccctctcttacatcctccgcccattctctttcttgtaagacccattcctccacttcctatcttcttcttcttctcctttcatctcttcaattttcccactattttggatttttgcgatgaaaatgtacagagatttcgtacttgcattttgggtactttctatttttctatattcacaatgaattttgctctagattgagtttgctcttaatacaactccatgtttttgggcatctgcttcctatcgtcttgtttgccttgcttgccttgttgcttgtagaagaggagtgcgatttatcgcctttagtgatctctcccttctcatctcctcagtatttccccgtctgcaagttcgttttttcgtagttgagcctctctaagctgttcatttgcagaaattatatatatattttttatctgttaaaacagtgatataattaaattttattgtaacctcttaatttaagcctttagtttcagtggtgagttaacgttgtatagtgtaagaattcttatgttcaaacctctgaaattttatttcattcccaaatatattgactttcacctatatatttcctaaattttcaagatcacaaataagggagtgaaagtgattccaaaattgttgttgtcatttttaaagttacctgtaaaatgcttttaaattttcaaaaccaattttattggtatgagaaatgtgttttaaaagtataaaattaaactttgagtggtttaaactgtgtttcaaagtcattttaaatatgaagaaagtgattttaataacttcaaaatcactctcaaacacatacttacaatattagtatagttcatttatttacttaagcttttgggttggatagttagtcaacaagatagagtggtaatttgactgtttttcaatgcatgcctcattgagttgggttgaatattgtattggttcatctctacctgttcctttggttttataagtctattgatgcccactggcagacagggcattttcagg

SEQ ID NO: 68300 - DNA, 466 bp, Cucumis sativus
  Intron number 1 from transcript Cucsa.275510.1 (locus Cucs a.275510) derived from phytozome v7.0 (chr-ID scaffold0258 1; pos 463374 to 463839)
taggtggggatcaggtgattttcgcagacctccaggtgagcaattcattcatttctgatttctttttgaattatttaggttttatagaatcaaaagatatctacatctcttcccctgttgagttctttatggagactcgtagttccgaccatatactactattgttttgcttaattgaaacccaagaaaagtttttcttctgttcattaattaaattctggatcctctctttctgatagatctagttgaaccaagggtttgttatatattcatgattttataaagtattggtggttagatctgaggtttatcgcctggattcgtcccaactagaaatcttagttttgctacagaaattgctcggattattttgtttcaaattttgccccatgttagatcctttgcttgtattgactgtgttttcttttccattttcctgttcttttttgaaatatttctgaaggtc

SEQ ID NO: 68301 - DNA, 617 bp, Cucumis sativus
  Intron number 2 from transcript Cucsa.320930.3 (locus Cucs a.320930) derived from phytozome v7.0 (chr-ID scaffold0308 0; pos 778813 to 779429)
atcaggtacccaagtcagctcattgttgtactcttttttctgttttcgaacaagtgattttgatggcaagcatatccatattttgatacaaaactgtccggaagacattgaacatcaaattgaaatgagataaaataatacacgggaagactggataactgtattgggttagaaatatgcgtgttttggttataccacctacatgcttcattgattgtgtgatcatcctcttcttttttattgatattcttggtggatgatcatgaaagctgttatctaaccgttggcagtagaggatgaagttatttaaatttatagaggattgatttgttttccttgagacaaacttcttttggaaaaattggaaaaattggaaaaattggaaaaattggaaaagtacagatctacaggagtttgtatgaactgttttttcctctcgttggattcttttagttgagatcggtagtaaggattagaaacaaaggcaccattaactgttgcagacagataacgggaaaaaaaccacggactccaagagatgcattaattatgatatctattggtctcttgttcttatttcagatttggagtttgttggcaggttgaatctggcttga

SEQ ID NO: 68302 - DNA, 395 bp, Cucumis sativus
  Intron number 2 from transcript Cucsa.281970.1 (locus Cucs a.281970) derived from phytozome v7.0 (chr-ID scaffold0264 1; pos 125016 to 125410 reverse strand)
cgcttggtagagttctctgccatccagcgtcttatgtaagtattttattgctgttgagtctaattctgatttcttcctgccccatctttttccccattttttggttttttttttttttaatatatgatttaattacgtttatcattttgattttgtaccctgcgtctaagcatttcaaaacaaacgcatggagaaaaagggtacgacttaaattgaactttgtgccttctctataattcatttccaatacgattaaggtgacacgtattacgagtggctggttatggtatttaatgatgcgaatcagagttatactagtttagggtgttttctttgataactgaacttaagatctactagatttgcatttcttcaggtttcagcttctacaggga

SEQ ID NO: 68303 - DNA, 326 bp, Cucumis sativus
  Intron number 1 from transcript Cucsa.212370.1 (locus Cucs a.212370) derived from phytozome v7.0 (chr-ID scaffold0154 3; pos 172689 to 173014 reverse strand)
gtgtcttttagggttagatttataatttgttctttgatttcttctttttgtctaatgattgatgctagaattaattttttcaactttcatcatagaattgccaggattttgggcaatgaatatgtgattctcttgttggtgtatttgatatttcttgtctttcgagcaatttgagatgttttttctttaccacatttttgttgcctagtttcttcagaaccaaaatctgggggattcgaggtgtgttgaatttatgtctttggttttttggttttgttttttcttttgcagttccaccaatatcaggttgtgggaagggctcttcc

SEQ ID NO: 68304 - DNA, 534 bp, Cucumis sativus
  Intron number 2 from transcript Cucsa.238460.1 (locus Cucs a.238460) derived from phytozome v7.0 (chr-ID scaffold0202 3; pos 1014734 to 1015267 reverse strand)
gtcaatctagtggaaaggtatgaaatcttattctttttcgtgtcgatttgattctgttagcaacttttgtaggggatggacatctttggaatctcgggatctatggctttgtttttagctttgtctgttctattataggaagagaagttaagagtgttatgatttttttcttgtcatgctgcttacaagagggattattgaagggagaagtaggaagaaatgctctctgttttctctgtttatgcttccaaacccatgcatttcctctaaaactgatgggtgaggagatcatgttaacttttgaacctacagatgatagggtgtattgagaatactacaaatgactaaatataccatgttgaataagtttgagctatctttttggttaactaaaatttaaatagtatcttctgagtcgaagattattttctgattgaaatttgaagtctgggctttagcgttctaccgagttggatgtagctgacttttctttctggcattctccctttctccagccaagtgagcagaatactt

SEQ ID NO: 68305 - DNA, 871 bp, Cucumis sativus; identical to SEQ ID NO: 67716
  Intron number 1 from transcript Cucsa.257020.1 (locus Cucs a.257020) derived from phytozome v7.0 (chr-ID scaffold0222 9; pos 4428048 to 4428918)

SEQ ID NO: 68306 - DNA, 346 bp, Cucumis sativus
  Intron number 1 from transcript Cucsa.241540.1 (locus Cucs a.241540) derived from phytozome v7.0 (chr-ID scaffold0204 7; pos 1509812 to 1510157)
caggttggatttggattaggtggtcgcggtaggaggtattaagattattggctaggttttttttttttcttcctcctctgattttctgttgtggctcaatacaattttgtcatttagttttgtttatgagcattgttactttctgctaagctagagaatatgaaattttcatattgatttcaagtaacattcttcaatagagagatttgattacaaaatttttgagactgtgttgtttaaatctgttttattgccggttttgtttattgttcttgatcagttcattattctttatgtttaaatctttgtttgatggagtttatgaagtagaagaacaccgtattga

SEQ ID NO: 68307 - DNA, 779 bp, Cucumis sativus
  Intron number 1 from transcript Cucsa.321370.1 (locus Cucs a.321370) derived from phytozome v7.0 (chr-ID scaffold0308 0; pos 1171771 to 1172549 reverse strand)
tggtcctaaatacggtgaagtgagttccattaatgcttagtttatgactttttttccttctaatcattgccttaatctgtttctgttttttcagtgtactttctaatactgtttgcttagtttagttagatcgttttcaaaggttgtttatcctagagaagaaaacacatatgtttaaccacacgatcttaatctctgaagtggttttgttgagtatgaaagaaggcaaatcgtctgttcttccttcaaccaatgagagagagggagtttctttttctggtcattatggagcaatttctgtagcttttattaccttctgattgtgtattatggacccggaaccaagttttatgctctatttgtgtagttgagccatttgatttataatgcgcgtttaaccaagttttatgctctatttgtgtagttgagccatttgatttataatgcgcgtttacttagtttagttagataatgtcaaatggtttttatcctaggaaaaacccatctgtataatcataaaatcttaacctctgaagtagttctgttgagtatgaaagaaagcaaatcttctgttcttccttcagctaatgagagaaagagaagttcaggtttgtcaatatgagagcagttcctgtagcttttcttgtcttatgattgtgcaatatggacttcaatcaacattttgtgctttgtgttgtgtagttgagtcagttgaatttatttgtgatttatctttattgacagtgctggctgaagaagcagaaggatacactggttcc

SEQ ID NO: 68308 - DNA, 735 bp, Cucumis sativus
  Intron number 1 from transcript Cucsa.286250.1 (locus Cucs a.286250) derived from phytozome v7.0 (chr-ID scaffold0265 3; pos 2348904 to 2349638 reverse strand)
tttcaacaccactgcaaccgccactggaggaaatagtgagtttgattttgtttacttcttgtgatattgtttgatggtttggcattttcattggatttattattattattttatttatttatttgttgttcaattctatctcatatggtctagacaggtattttgtatgatgccctgctttctctttagttcatgaattgtgagttgcttgttgccttaggtactgttgggaaaaatcttcccattgaaggaataagcataaaaataatacagcatttaaaaaggaaagcaccaaacatagaaaacacaacttatgttgacaaactttgaagtggaaaaaaacaatgcgctactgtaaagaattccactatgacatagagtaattatctctcccaacaattacaagagcactctctcaaaacttttaaattactggtatctttttttcactctcaatctagagaatatgtaaatgaaattttactaaagttagctcattgaagcttaaggttttctaaatggggcaatctgaaataaaagtcatatatttcttctatatttccttaaacctttttgatgtggtataacactcttctaatattttgtcaaaacccaatagtcttttctattgatttgcttagtttggaaagatgtcatcctcagacatggtagctaatagttcgtttaataattcttacagacagtcgtcgtctggcgataattttggcttcagta

SEQ ID NO: 68309 - DNA, 545 bp, Cucumis sativus
  Intron number 1 from transcript Cucsa.385700.1 (locus Cucs a.385700) derived from phytozome v7.0 (chr-ID scaffold0390 4; pos 968029 to 968573 reverse strand)
cattgcgttcattggttccaaatataactaaggtatcatcaattaatccttacattcataatagttaataagtttagacaatacttgttaagaaaaaagaaacaaaggaatgcattttgaatagacatgagaaaatgcattaacgagaatgagataataaaaataataataattattattatcatcgtcatttaaattttaagttttatctatttccatttaatgtgagaaatattgtgtgaggttggaatactaattattaatgattttgaaatagttaattttttttttttgtgttcaaaattgtgaggaacaacgacccctacatatctccacaatgatatgatattgttcactttacattctcatgacttttcttttgattttttaaaattactttttacaaatgaagatagttgttctcacttatatctatatatccatgatcatcatttcattcactgattgcatgtgtataaccatttaaattcgagtttggaatgaaatggtaaaatattgaatgaatgacatggagaacaatgcag

SEQ ID NO: 68310 - DNA, 764 bp, Cucumis sativus
  Intron number 2 from transcript Cucsa.254360.1 (locus Cucs a.254360) derived from phytozome v7.0 (chr-ID scaffold0222 9; pos 2697999 to 2698762 reverse strand)
ggcaggtatgctgtaaaatccggcagagtttatcttccttccatctgaaaatattgtacaatgaggataccttgaggccagagggagctttttaattttcaatagtttctgttcttttatttaaaagtcaattatctcttgctctattctacatttgtagttcccttccgagtgaatttatgttgctagtgctcgagtttaaattctcttcactttacaaatcaatatgtagaagtagaaccataagttcatataaagtactatttagtttgattttaggtgattttctttttaagacatgcaccaaaagttgtggatttcttgtaggaaatactcaattttaagatctcagagggtgcttgatgcctggtgggcttgggatatttggagataccatcgaaggtcttgggtttaaggccttggtttaaaaaatattttttgagcaggcattggtgtggggcaagccatgagcacaatctgaagagtggagtccttgacactcgagatatcccaaaagaacatatattttttttatgaaagaataacttgttagttgttacctcattatcaaaagataaaaacctagcttaaagctatttaaagtttgtgaagtgcgtgtcctgtctaaagaaactgggttgcttttctagggcacagtctgatatgtatcacttcaatgtttgcggcatctcaaagcttcaacatctcgtgttctctccgccatttattcctttaatcactctgtagtttgttctggcaggagc

SEQ ID NO: 68311 - DNA, 1006 bp, Cucumis sativus
  Intron number 1 from transcript Cucsa.199730.1 (locus Cucs a.199730) derived from phytozome v7.0 (chr-ID scaffold0136 5; pos 7693 to 8698 reverse strand)
aggtatttttgtcagcattctctttgttgttcataattgttttggtttctgattcatgtaagcatttaggtttaactagttacgatttttgcactctcttagtttcttttattcgattgtactgttttttgagttttatggttgctataataatgggttctgtataatttaatctaatgtttgagtaatgtgaacttttgaaagtggatggatgatcttttggaagtaggtaggcctcttttctttgattctattgttttgagttttatggttgttagaatagtgggtttgttctgaataatctaatctactattcgagtaatgtgaacttttaagacagtggattgatgattttgggaagtaggcttcttttcttcaaatctactgttttgagtcttatggttgctaagataataggttctgtatattttaatctaatgttcgagtaatttgaacctttgagaaagtggattgataatcttttggaagtaggcttcttttatttgattccactgttttgagttttatggttgctagaacaatgggttctaaatgattttatctaatgttggagtaatgtgaacttttgatagagtgtatcgataatctttaggaagtaggcttgtattcctttgattcttcatgaagtttcagcatgtgatcgtttcagttataccccgtgttttaaaaagctgtctgaggcacaaggcttaggtttggtgaaaatcattgtgccttttggctcgaagacctgtgtcttggagatttttctttatttttaagaaatggtaattattagaagtcttttctttttcattttcattttttttcatatttccacttcaactatgcttcctctccttaataaagtacttttatctaaagtgcacctcatgaaaactctttttgcgctttgtgcttagcctaagattattgtgctttattggggccataccttgtgtgtaatattatcttttgatttccctaaacagtaagcttcagagtg

SEQ ID NO: 68312 - DNA, 974 bp, Cucumis sativus
  Intron number 2 from transcript Cucsa.388500.1 (locus Cucs a.388500) derived from phytozome v7.0 (chr-ID scaffold0396 7; pos 888638 to 889611 reverse strand)
aactccaggacgagcttcggaatattgagaaacaggtttctctttgtttccttctcaatagttttttttttttttttttagattttctctacttactgatttatgaatatgaacttaacatacattctgtcttttcaatggattctaaagacaacacacgaatttggctccttcccccaacatttactttctatgcaatgaaaattcagaaagtagtctagtagccacctcttccttcacggccattttgcttataagggttgaatgttcctcccctacccttttgatctggcttgttgcctcccagaaagcgtagatgatagtctgttcgaacttttgtctagatgattgtgtaaaaggtaagctaatattttgtggagaaatgctattaaagctctcctttggcatatttggaaagaatggaatactaatattcagtcaaattacttagattcacaaccaagccctacagctagagtagactacattatgagaataattggcaaagaaggttgattgagaacactgtggagagacatgattccttgaaatatcccattcctcacaccacttagaggttttctcttgaaatatcctttggcatatcacgtacactaaagagttgttttcactacattaaccagcaacaacctagctttacttttaagccttagcagcgggagtctattctccctttatactctaccaaaaaccttaaaatattaatggtcttcaaagcttcctcccaacacgccagtgtagaaagtaattttccttttccttttaatttttaaacaagaaacagagcctgtttgttagtatttcgatctgtgaagttacaacaaacttttatccttttttcaggagaagttaaagaaatatagacgagaatgtcttaattggctttactttcacagttccattttccatgttactatagtacttatattctgtaaaatctgcaggtttacgac

SEQ ID NO: 68313 - DNA, 973 bp, Cucumis sativus
  Intron number 1 from transcript Cucsa.353850.1 (locus Cucs a.353850) derived from phytozome v7.0 (chr-ID scaffold0353 7; pos 184049 to 185021)
ttggtccgttgggaaaaggtaaaaaagactctgctcttttcttctaatacggtgtttgttggcaacaatcagcaatcaacaatcaacaatcaacaatcaacatggtgaaaaagtagtgaagtccatatcaaaaaaataccaaaattcatctctctgtctttcacttggccatcaaaaggccagatgtagagtagatcactcgaacaaggagagaccagaatttcaatcactgtaccatcttatcaatttctaagccgatttgattcctgccacagctccatttttcctttcttctctctcttctttttcacttttccatatggaatctcgttttgtttttgtttcaatgctactgtgcattccttttctatccatttgccgctttttactattccccctttctctgtggtttttgctggtttagtgggaatggtatgcacgaaacctctgcaattcgggtgatctacttccctttcttctttctttttcttgggtcttccttcttttgttctatacttggttacaatttgctcagttgaagttcatggtttggtaaaattgctcaggtctacggatttttcttcccgatcgacactgttgtgtttggacacttgggcatttagtactaatgctcaattcttcaactgggtacatccaattacttgttgtctatcgggccaggatcattatttcttatccttatttgtgtaccgcgaagttgtgattttgtctaattttcattcagtgctccaggaaaattatgcctgaattggctgattcttggacttattgaagtagaatggatgagtaatcttagaggaggtgtagcttgtttaaatctttgtgctgcatgactgatatgatggtaaaggaaaattttgtgcagagagtagatgacgaggctaaagcgaatgattgttcgactgttgggagtgaagatttgggttctcagtctcgccatagtatagggaag

SEQ ID NO: 68314 - DNA, 554 bp, Cucumis sativus
  Intron number 2 from transcript Cucsa.256340.1 (locus Cucs a.256340) derived from phytozome v7.0 (chr-ID scaffold0222 9; pos 3974895 to 3975448 reverse strand)
cggcagattatttctcaggcttcgtcttcatctacgtcgtcgtttctgaattcactgtccaaaaaggctctctactttcgtctctccgatcatttgcttttcattggctctggaaattcggtaaattcatactgcttcatttatccaaaccttgactttgaagacttaaaactaaatctctattttgagttcaaaaaatcttgtgtttgaaaaaactttcaattacatggatataatgagatatataattatatgaattacttatggaatataagctaaaactctttcaaggaccaatcaataataatgtaggcttacactttgatatttaagccttttaaaaaatagcaaattattgaaattatttacaaattattacaaaatcatcaaaaccctctacatctattaaagttttttttttttgctatatttttttattcaaaacttttgaaagaataattaaagatataaatattgttttcacacatattggtattaaatgttgttgttgttatttagttacttataaaatagagttattgagagtgagatta

SEQ ID NO: 68315 - DNA, 501 bp, Cucumis sativus
  Intron number 1 from transcript Cucsa.256340.1 (locus Cucs a.256340) derived from phytozome v7.0 (chr-ID scaffold0222 9; pos 3975602 to 3976102 reverse strand)
tttccgacttttaaattttacattcgaaaactgaagtcaaatataatttatactataatttaatgaataacatactataatattaaaaagaattattctaagagactggaaatttataaaagtgttcaaaatttttggaagaatattattgaaagacggtacatcgcagtgaaaagataatttgaatgatgaaatttatataggaaatcaatgagaacagcaaaaaatatggacatttttatgaaagtcagagttttatatgcttcctttcaagtccaattaccccatcaggctcatggagttcaaccactcggcacacgtaatattttgattactttaatgacaaatttttaatggaatttgttcgagtagtcaaattgacacgcaccgaccctcggcggagatgatatatttttgcgtttattccaacgattacttggtcagttgactttctaagagcgaaatcaaaactaaagaagaaaaaaaaaagccaaatcggag

SEQ ID NO: 68316 - DNA, 834 bp, Cucumis sativus
  Intron number 1 from transcript Cucsa.320100.1 (locus Cucs a.320100) derived from phytozome v7.0 (chr-ID scaffold0308 0; pos 6861 to 7694)
gtcaaccttcgtcccgttcgtcctggtatgtttatttttttaataattgcaacattataattttattttgagacatttttaaatatagtaaaatgaatcaaaatattttaaaaaatataacaaatattctatgaatgatagagagtgacgtacttttattagtgtcttagtgctgtgtttgtgagataatacaaatttttgttatattttgtaaatattttaatctttaatcatttataatatttttttaaaaaaaatttcgattattaatcaatattattggctaagcatatttattgagtttctattgtttttaagtctctgtaacaatataatatatagtcacacattctcttaaatattctaaactataaattactgtttctttgcaggtcatatcctttttctctctttattagtcttactttttgtgggggaaatttaaaataagtttgagattgaatttctagttcttttttaattatttgataataggtagctatatgttttttttcaatgaacttgaaggttcttcagttgtttatatcgaccaccggaattttgaaaatagttttcgaaggtaagatgaggtggcagttaagtatctttaattttcattatttaaagtacatttttgtaaaaaaaaaagtttaattcaaccgacatcaatatatgatgagaacgaagacatttactatttaaatctccacacgtttgttttaatgaatgaaaatattaagttggaagagttgtttttgggggtaaaatgtgaaaattgaaaaagtggtttttgactttaacaaataaaaacatgtattagtgattccaaagcga

SEQ ID NO: 68317 - DNA, 906 bp, Cucumis sativus
  Intron number 1 from transcript Cucsa.338490.1 (locus Cucs a.338490) derived from phytozome v7.0 (chr-ID scaffold0335 6; pos 1362487 to 1363392)
tgaggcgttcgaggcctagaaaacctcggcctaaggtgaggaagttccttcaattttacattactgaatgcttcagtatgaatagttttgagaagccatttctaacaattgttactctacatatcttttgtgagactttttgattgtgcttcaaactataagagttgctagatggagtctatagcatcatatattggcagcttaatttgaatgtgtcatgcctcaggttactagtgtttgtcataattttttcaggtgattctgaataacaactaaaaggtatgctcaacccactccatgatgatagatgatttaggcttatgttaagaattcaaagatcaaacaaagcaagtaaatgtaaagagtaaagaaatcgacaaagagatttatatggttcccgccgtgtattagctagggccatgttcatgggtagagggagagggttattattagagttacaatactagattatagaatttagatgtacctctaaagtcggaaagttaatatagtgcacccattcaaatcctaaggctaaaattgtaaataacagaaattcgaatacaacctagtttagttcatgaacaaattgtgtttatttggtctctgcactttaaaagatgtctaatatgttcctaatcctaaattattaattatgtgttgaataagtttttaacgtccaattttctttcccattgctttgtgttgaactttattagtaacgttatgcataaatttacaatatgtttggcagctttgactgtctgtcgttgggaagcctttgtaatttgtgatcatttttttaatcaaaaccttcaagattgatcgtcctcagtcctcactctgtgttgtaaattttcttgtcacttagatccctggtcctcctcctcctaaaggaccaactat

SEQ ID NO: 68318 - DNA, 933 bp, Cucumis sativus
  Intron number 1 from transcript Cucsa.375400.1 (locus Cucs a.375400) derived from phytozome v7.0 (chr-ID scaffold0374 6; pos 422292 to 423224 reverse strand)
gttctgatcttagtggcagggttctcctcaggcatgtcatacttgacaaacagaacttttttttagttgtcaaatattcgaacatccagagaccaccttaaagaaattgtatttctggaaaggaagatcttggattttctcagcttagtcaggaaggctgagagaagtattttgtttcattgagaaactaaagtagatactttgaaatagatccacacaaaagaatgtctttcacctcagagagaagagggctaaatacatggcttttcatttctttcccttttttcttttgacggagtaaaatttcttttaaggaactctatttctaattttcttggtatttttttctatggctaatactatgtttacctcagaatttttcatatttactttgatagttcatgattttcttgttcttcatgattttcatatttgataggagcctactgtcagacccccaattcgattgtcccccttgacacctgcaaatatggagatctgtgctccaaggtactcattcttttctatattaaaaattacttcttaatatcttgttgacttgagcttcagttctagattgctagattgctggctctaatttatgttccccttcctgaaaaggtttgacgattaactctacatctggaacttattgaagcaatgtatcaagaagaaagcctgttctgtattttatttttctgttcttgtaaaatgttgtttcaattgaaatggatttaggttattgtctttaatgtagatgtgattaatgctgatttctgttaggtctataatcatgaacaattggacattatctggtagctccaaatcattattttcactacgttggagaattttgagaacctgatgccgttattacttattttataatcttggttaggacttgtctggacaaccaagttttactgagttcca

SEQ ID NO: 68319 - DNA, 646 bp, Cucumis sativus
  Intron number 2 from transcript Cucsa.277150.1 (locus Cucs a.277150) derived from phytozome v7.0 (chr-ID scaffold0260 1; pos 32779 to 33424 reverse strand)
acaagaaactgttagctttctaatcccttttttcttcttcaatctgttgttttcattccgaatttgctttctgttgttcatatctttaactttttacataaatacattgaactggtggcgtgaaagtgttaagtttgctactagaatccgtgtattttgtttgtttttcccatgcttatatctctgatttcaatactacggctttctgaaactagggttttggaaatgtatagtaaaatttatggcttcccttttgaatggtggagcagtgttgaaatcgttaattcgatgtattttctgtgttagttgttgtgttaattttttagccttgcaggtatggaaaattttagataggcttgtttattgacatctctggaaatttagctgctgtgacatttgtcagttttcattgttggattagtggtttgtttttctccttattgttttttgcaaaacaagagtttttaaagcgataatcttttcttaattttatttgatctggaagaaagattttagccattccctttttctgtttgcacatttatttatcatcatattttctttagttttactttcgtaatgaactgaaattatttcttcaatttgtttagtcgtgctttctttgacaagaagatctcccaggaag

SEQ ID NO: 68320 - DNA, 553 bp, Cucumis sativus
  Intron number 1 from transcript Cucsa.277150.1 (locus Cucs a.277150) derived from phytozome v7.0 (chr-ID scaffold0260 1; pos 33445 to 33997 reverse strand)
aaggtttgtccctttgtcgtgggttttggtcctcctcttcatcgtaagttttcgtcttcctcttgtcggttttgttcttcagatctcaatcttcaatctcgttctccataagattagtagaaaaccttatgtttaatggaggagttcaatctcattctccataagattagtagaaaatcttatgtttaatggaagaggtatatttttgtttgatgtttaattgaattaaatgtaaataaaataaaataaaaaatttgaaagaaaatcaaaaaataaaaaacagttataaaacacaatttttatgttttgtttcgttttttaagaaacaaagaaatacaaacacatattaaactcgtcattgtttcttattcaaaaaaaaagaaaacgagaaaccgaaaacataaaacaaaaaagaaaaaaagaaaaccacgttaacaaactggttcttagatttctctcttcttggatctctccttattttctcttcaattctaacttggaggtctcgtgtttttcagtgtaatatcgcaaatccgactactggttgtcagaa

SEQ ID NO: 68321 - DNA, 566 bp, Cucumis sativus
  Intron number 2 from transcript Cucsa.356510.1 (locus Cucs a.356510) derived from phytozome v7.0 (chr-ID scaffold0357 7; pos 1322896 to 1323461 reverse strand)
taaagacagaacgagcccttcaagtcaaacagaatgtgagagacatgctgaaacctttcaaatcaaaatccatctagtggaactttaacgatactgcactgggtctttttcggatagttttattccaaaacaatctatgtcttcattcaaacggattcaaaattgttcaactatggacttcaaatgtcttcaactataaaccgcttctctttgatgtaatgagtagtaatagaagcttaaagagatgcaaactctcaaaaggagagagaaaaaagacatgaagaaatacaaccacgttgagatacacttacaaacaactacgaccaacagccctccttcaaattctgaaaaacaaaggctgctgcaaagctactggagaaaccaaaaagacgaccacctacccacaaaaagattaacaaggagcaaactgaccgctgaaaatgttgggaagaagtaaagcaccggggctggatggattcacgaaagaattcttaatcaaattttgggataaattgaagagtgatttgcattcccttttaaagatttctatgctaatgggaagctca

SEQ ID NO: 68322 - DNA, 531 bp, Cucumis sativus
  Intron number 2 from transcript Cucsa.302630.1 (locus Cucs a.302630) derived from phytozome v7.0 (chr-ID scaffold0295 1; pos 731220 to 731750 reverse strand)
ctcttgccatttctcaatccattaacaattctcaggtaactcttcttcttcttcttctttttagtttaatgaaaactccttttctagtttgtcaaatatttgaaaattgatagttttgttttagattataattatgtgaaacgtgtttttttattcttgaataatgcttctcatatcagatacttattgatttttttcttcttttccttttttatttagcttgaagacacttcttcaatattttttaaaataaaatttaccaatatttagaaaaaaaaagaaaacaaagctatagttttgaaaacttaaaaatagtttacaaaactatatcttctcggtattttgaatctgaattctattttaaaatttggttagaaattcaagtttttttaagaaaagtgaccgaatagagttttgaagtcccaacaatccaactatatgggaactttattttctggaatgggtgttaaatacaataaaaatgtaagtattgatgatgatggatgaatatattattacgcagttacaagg

SEQ ID NO: 68323 - DNA, 634 bp, Cucumis sativus
  Intron number 1 from transcript Cucsa.231790.1 (locus Cucs a.231790) derived from phytozome v7.0 (chr-ID scaffold0198 9; pos 4376 to 5009 reverse strand)
accttctcctcgcagcttctcaaggtttatcgttcatattttcgttttatgtattttgattttcatttcatttaactgtgcatatatagttcatagtcttgtgagaccttttgttcgcgtcatataaaaaataatcgaaacagtgtcattgtgcgttcatgttagagcaaaagtgagagttaggagaagatagagggagtgaggaatgtaaacacctaaattcaaaggagcaaaagcaagatcctaattcatatatgcgcacaatttccattttgattatttcaagctgatcgtttgaccttaacataagattaaaaaaatgcttctaaaaaattaggtcagatattaaatttgaaccttctaaaatgagtcatctgtaagaaaatccattatttcacgcattctatattgtaaaaaaaagttttacattcatacagtctttctacaaatctaataattcaaaatcatacaacttgcaaacatgtgggatatattttttttttgtgggatatatttttttctaaacaaaaaaaaaatcaacagtacatgtgggatatatttttttttcttgttttgtttatgtttttggtaaatctcagcattggagctaatagagaagagtgaagtgaaagca

SEQ ID NO: 68324 - DNA, 1021 bp, Cucumis sativus
  Intron number 1 from transcript Cucsa.273040.1 (locus Cucs a.273040) derived from phytozome v7.0 (chr-ID scaffold0251 1; pos 36635 to 37655)
ttggcaatacttgttactgtaacagcgtcttgcaggtttcctccttctttaccggatgcatgatgcttttaccttcaattctattcttcctttttctaggatcttagttggtttcttcttagggttttgtttgttttgcgatgcatccaacgctattttaaggctagaatgccggtcgatggattggattagatttgcgagccttcgctatatgattattcatttgattgaataatcatcgtggtcttaacattcttcatcaatcaagtaattgcatttttaatttgtagtatgtattacccagggactttttaacctaatattagttgtgtagtttcttagtctgcagggtaagatttccctacccttgcaacttttccctgtggaattatctgttagttgtcttcggaatccacgctcatatttgtagtattgggatttgggggacaaatagaaacggtggtgagattttatattatgcattgattgcctcttatcttttcaaactctgtattattttatatatttcacgagtacatcttaatctcattttgttttacacatgttttaagaaatgccaactttgattatacgaatgcagattccttggtttgatgtatggtacttctccattttttttcctctaaattttatatcaaagtgtgttattcaaagtgtaattctctatgcatgtgttattcaaagtgtttacaattagatatactcaattgtgagaagatgattcatcgtttcactttaaccacaaaaggtatttatgttcatgacttttatgagtttctacagtttactgatacaacagatgtcattttagtctcttttaatatcatctttcctcgtgtttatgttggattcctaaagcatctgctcaatatccagcttgaatccttgttatcttctttgatctgtcacgtaacattctgaaattttcaattgtattatactcatcatttttctttaatattcaggcactgtatttttgtgttccttttcgtgagcaatt

SEQ ID NO: 68325 - DNA, 1010 bp, Cucumis sativus
  Intron number 2 from transcript Cucsa.250540.2 (locus Cucs a.250540) derived from phytozome v7.0 (chr-ID scaffold0221 9; pos 656351 to 657360)
ctccttacatctttcctcaaaaaaagttggtattctagctcaatggacttttgactttttacgtgtctgaaaatacctttagttgaaatgttatattgtctctatcaccgtttttgtattattaattgtcaaattttaatctttttttattgggttaagtaacaacaatgattttttttaataaaaggacactacataatatattttcacaatttatagaagaaataataaagatttagccttttttttaagaaaaaaagtaaaaaaaaaagactaacattgactaattatttaatgtttattaaaaatacataaattacaaaatttgatatttgaaatggccaaaataaaacaaaaaccaaattgttgttttttccttcaaaaatattttgttgaaatttggagagttaattatatcaaagaaacttttagtttataacaaaaataaactctatccatcttcgtaatcatccctgataacaaaatcattttctaagaaaagaacgaaaattttatcagatgaaacttgtgattcgacacttaagtgagaacattacttttttaaatagacaaaaacatttcttttctttaaaaaaacggaaacgtcgtgtatgttagtttactttgagctgtctttttttaagtttggacctgttgtgacttatataatttcagtcttggtaaaaaaatgttgttgagttgtcttttggaattcgttgacctattaacctgtataatttacgtctttgtaaaagaccattactgtgttgtcttcctaagttcattatcctattgatatgtataatatcaatttctttaaaaagtctaaattgagcgaaaacaaaaaaaaaaaaactagaatgtttttgtaaattagtcatttaaattgtgagatacaaaaacattagtcatttaaatggtgagatatatactaaagttatttttcttattattaacaataattaatccttaaagttgaactaatttataatgatttgattcaatagatc

SEQ ID NO: 68326 - DNA, 1002 bp, Cucumis sativus
  Intron number 1 from transcript Cucsa.348590.1 (locus Cucs a.348590) derived from phytozome v7.0 (chr-ID scaffold0348 7; pos 45385 to 46386)
aggtacataatttttgttcaatctttaacttactagggtttttgttttcattgttcttcttcttcatcttctcgtgtgttaattattctttgagcagaatcatcaccttataagaatttaaattctctgagcatataatctttcaattcttagaattgaagactttaagagacagaaaataggaaagaaattagcaagatcatcttcgaacttattaatatttcttagattttcgtaaaatcgttggccatgggatattgttaggaggtattttaatttttttttcaagtttaataacaacgtctagatttgaaaccatatagatatgtagaatgttttaatcaattgaaatatattcataattctttagttaaattatgattttggttcttttaatgtcgatgatcaatttaatataatctctatagtttgatgaaattttatcataaattatcaaatttaattctaattataaatcatcgaaactaaataattggaagaatgtaaatgtaaattaaagctgagagagctattcacaattttttatgataaaattttgagatgaagatatcctaccaaacccaattatcttttattagtgaattatttgagaaaaattgtccaaaattattaagtgaattattttctagtaaataattgtccaaattattttttatcaaaaattttcaaaaagaaaaacccaaaaacccctccccaaaattctttttttaatcgagaagtgtatgaaaaatatatataagtctatttggtctcttagattttagaatatagtttttttattttcaaattttcattaataaatttaatcattctttgagtaatttttatctaaaattttaaattaaaataaacatttcaaaagttgggactaaaaagataatttgattaaatgaaaatttataacaaaataattaaaatctaaattttgtaattgtttaaaatttaattattggcatttgtaatgtagggataaaaagtaat

SEQ ID NO: 68327 - DNA, 900 bp, Cucumis sativus
  Intron number 1 from transcript Cucsa.240950.1 (locus Cucs a.240950) derived from phytozome v7.0 (chr-ID scaffold0204 7; pos 1143871 to 1144770)
tgatcgtcggtggtggtgtctctgctgtaagtttcttctccttcgtctatcgttgatcgtctgatctgatttctgtttgtaatccttaactttttttttcatatcgtttttgtttttcgcggttcttttgtctgattcagatcattttatggtcttttgattcttatgttaatgttggatttatgagtcatgggtataaaatctgaggcgtctaagcatttgcttgaattggagttgagttgttgatgcttttgttagtgtgatctgtagctgtggtacgatcgtgactgattctgtttttttatgtttcctttttttgttttgttgaaagttactctaaagatgggaagcttgtttcttatactcgttattttgattttgaacgtattacgtactcgttttgttttggctcagtgaggaaatgccgtgaatttttttcattgatttgtttgttatccgagaagctagttttctggagaaatgtgtagtggttgaaagttttgggaaatttatgctgttcgtctacaatttaactgagtgagttagtttttgacatagaattgaatggaactattgtcctctaagtttaacaagctgaaatgaagcttgagatatctttttaatttaacttgtcaaaaaaggtaaggaaaataaaccaatatttatacaaataaacttttaatttttgaggtaatgttaccattttgtaatttgtgtctgattcttttgctgtcatgccattagacgcagttatttgtttgttgagacttggggtttttcaacgcgtcatctttctccgaaatttatgctgaagggctttcaagatcgtcacctatctctctgaggaacaatttgttatttcaatctttaccaataccacttttcttggtctgcagggat

SEQ ID NO: 68328 - DNA, 737 bp, Cucumis sativus
  Intron number 2 from transcript Cucsa.338560.1 (locus Cucs a.338560) derived from phytozome v7.0 (chr-ID scaffold0335 6; pos 1406056 to 1406792 reverse strand)
ttaaacgcattgccagagacccctcggaacgtaagatttcttattctttcattttttttacaaaaaattattgaattattttaattagcgtcattatcttgttttctatgcactgtggttgttcgttgaatatgaattctattctgttgaatgtcttcttttaaagatcaattatgtacttcgtttcatgatttgaattctcaattgtgcatttgagtcgaataattcattttacaagggatttggtgagatgcattatgtttgcatattcattagtattctttgattcagcattttccattttaagtaaacaaatgctgattgtgagcgagatcttgttgtagctaacttgaaaactgtattattgcgaagtaataggattttcgttttacaccttttaggatcttaaacatgcatatttacgctcaataaaattacattagctttgaggaaatatgcaattttctcattaatatagataccaggtcctaagaccccaggagtacgtcgatgtaattttgcaagtttactgcagacttgtttgtgctttattggttttttatgcttgttctcccttatgaacaatgtatgggcttaggctattataagcgaattccaacaattctgggattagaatgaatatttgtttttggctcctagcaatttgtttatccttattaaagtgtttctgatatgctacagagactggtgaatctgtgctgcttcttaaaggtccc

SEQ ID NO: 68329 - DNA, 581 bp, Cucumis sativus
  Intron number 1 from transcript Cucsa.382050.1 (locus Cucs a.382050) derived from phytozome v7.0 (chr-ID scaffold0386 6; pos 168125 to 168705)
aagacgagttcctcgatctcactcagagtttgaatgaatcatgaagtagagatgaacatctaggaatggatagtgtaaagaaaatgaattagagtgtagaaacaatgtaaacattttttctatgtgcaaacccgatttgttgaaactgttgtatactgtccacaattttttttcttcttttattgaaagtagatgatatttgtgaatgaaaactcattcttcctttcctcttacccttcacattgattgtatgtaaaatttatttctttacttcttttttaccagaaaaaatgccaatggcttcttctgagaaggagctgatgcaccctactttagacttttctttttaactctttttttctcttttcatttgattttcaaaaggtcaagaaagacatttaagtttcttccattaacttaatttatttgattaatgttataattttcaaagtattacttgaaacaaaataatctgataataagattctaattgtgttcagctagaagcttcaaataaacaaatttacagaatgctttaatttggagaggaagctcgctttggaatttcaaacatagcttcc

SEQ ID NO: 68330 - DNA, 500 bp, Cucumis sativus
  Intron number 1 from transcript Cucsa.272470.1 (locus Cucs a.272470) derived from phytozome v7.0 (chr-ID scaffold0250 0; pos 998019 to 998518 reverse strand)
ctgtctccaagaagcgaagaaggtattgttactgaatcttttacgagatggcattctactatttgtaatcaattatgtggtttcccccgtgttaatttacagtttctttaaacaattatagtttctgccatgaaaacctttttttcgagtcttctatttgtagtggtactgtatgtatttaattttctcttttgagattaacaattacttccaataagtcaccatttcacccaaatattaattgaagtttgtggacatttaggatgcttaattcgaagttatcatgtatgtttgaaacaccgataatgcgggtagtaaatgcctcgatcgtatgggggtgaagttgactctgtgatatgaacaacgaaggaggatagtaaataattaaacatccagcgatcattttacatttggatatcagctgtcataatatatgaatgtggttcaaggggtaactacaatatatgaatttgaattttacaggcagctgagaaataggg

SEQ ID NO: 68331 - DNA, 830 bp, Cucumis sativus
  Intron number 2 from transcript Cucsa.259290.1 (locus Cucs a.259290) derived from phytozome v7.0 (chr-ID scaffold0222 9; pos 5848223 to 5849052)
gaaaacagcttccaactctaaaaggtgggcattatgcattggtctcttccttttctcttatggtgaatcttttcttttattatgtcagttctgttaacttcacaccttcctccctccccttcccctttttttcttttttcaccttgtttttagccacaacggttgggagtttcttttgcttgggtctgaactagtaacccatcctataggactattttaattatgaaaattttctcttttaggaatcagcatgccaactgagcaatggtcagtctttaagagtaatattcctgctatagcggaagctattttgcagatgaaaagaaataaaaggtgagggaagcatgatgatactgttgtttcttaactttcgagttacagttcatcaaatttattttattgaaaactctgaagttctatgctaggttttcaggtgttagtatccaatctagatcccaaatagaatctgtatctaatattttttgtttttaaggctaggttgataaccattttgtatgtttttagtttttggtttatgaaaattgtgcttagtttctcaccggttttgcatctttttaaggaaacatttgaatttttagtctaattccaataactaaaagtctaaaacaaaattttagaaactactttaaaaactcagcttggattttggaaacaattgttagatttagataacatcttaaagaaatttagtgtttataaacttaattttcaaaacaagctatttgttttgtttggttgtagcatttaaaatctggaccatagatgtgtgtttgaactatttgattgtattatatcatgtagatctgaac

SEQ ID NO: 68332 - DNA, 760 bp, Cucumis sativus
  Intron number 1 from transcript Cucsa.394670.1 (locus Cucs a.394670) derived from phytozome v7.0 (chr-ID scaffold0410 0; pos 507565 to 508324 reverse strand)
ttaaaggtaaacttctgctatctccgcctgtgtactgttgtagagcttatcactgaattcatcagaggttaattgattttggggtgaagctgatgcacgagcgtagtaattaatttgaatgagtagaaagtttttgggttacgaagattttggtgttttgaaacttctgttttagaagcatgggaactatgttttcgcgtctgaccgttgcgagcttatattttcttactttggttaatggagtttatttctgtgtctgactctatcattctgtgtcaacagttctatactaattcttcttctctagtgtttttcctattttctaagttcaaagtgaaattaagtcgaaattctagctgtctttgttatcattcttgttttgaaaagttcgttgtttaattattaagttgtttgataaccgttagttttcggtttatggcttttgaaaattaattttttaaataatatttcttccactatatgattctttcttttgttgtctgtgtagattttttaaatctaaactaagtttgaaaacttagtaaaatggtttgaaaatctttgttttcaaaactcagctatgaattcaaatatttcctagaaaagataaaatccactataaagaaatgatgaaccaccgtagttaacaaatgggcctgaatgttacgatggtttttagttatacctttacatttgaacggataccttgatgcttttgcttgcagaaaagatagagaaggaacatccactgtgttttcct

SEQ ID NO: 68333 - DNA, 538 bp, Cucumis sativus
  Intron number 1 from transcript Cucsa.318760.1 (locus Cucs a.318760) derived from phytozome v7.0 (chr-ID scaffold0307 6; pos 273907 to 274444 reverse strand)
cggtctccgcccttcgatccttgactccaacgttggtaagcatcgctttcccctcatatttaatttgtttcatgaccttcgtaacccaacatgagacacttcctctagatttcccccatttcgttcttcaaaactgaagaaatatttgaatacccataatcttgaaatcacaaaacttcacaaataaatggtaataatagaagctggaaggttgtctgctccttcaatcttccttgcttgccaattcactatcttctcctcaacttcattatatcaaacgttccctttcaacaaaattaaactattagaagattaagcatgcggaggattctccagctgaacataaatttccaccctccattctacttccaaattttcataatacgctccgtcttgttccaatttggacgtatttggaaaattatttttggaattgatcgacatttagtaaatttttggagcttttgttaataacttatgaacttatctatctggaatttcagatattgggttttagaatctaccttaataagaaaac

SEQ ID NO: 68334 - DNA, 751 bp, Cucumis sativus
  Intron number 1 from transcript Cucsa.283210.1 (locus Cucs a.283210) derived from phytozome v7.0 (chr-ID scaffold0265 3; pos 429012 to 429762 reverse strand)
gttggagttttaatttcgagtgttcgcatcaatcggtgaggtttttttcttttgctgcttttacttgattggcgccgtattctcattcctttcaaatgtatggcgtgcgtttgacttagagtttagcttctccagcgggaattagtgtcgggtgcagtcaagtagcttttccagttacttgaatttagggagttcttttaactggattggattttatgtgattttattccagttaagcgttttatggagaaatttcagtgtgaaaatatgtgactcaacaattgacaaagttgtatcgttatttattggttatttcacgttggctgcgactttcgtcaggtgactggtttattggtctaggtatgtggatgtcgggccggatgtgacaacattgactacttgtttagtcactgttcttaagtaaggagaattttggatggatttttctataccatcaacaaatttgctccttgaaaagtagatgatttagtgtctctactcgttttttgggactgaattttagaggctaggttgaaattttcagagttactgagcgatactacctgtttttggcccttctgatagtagatgattgtttcttatttaatcatcccgtgtttttgtagtatgtgagcatgttctttgatttgatatgtttcatactttttaattaaattcttagcagactgttatgataagtattgaaatatgtacagggtattgcaccttctgtaaacattgatttgtggaa

SEQ ID NO: 68335 - DNA, 920 bp, Cucumis sativus
  Intron number 1 from transcript Cucsa.385020.1 (locus Cucs a.385020) derived from phytozome v7.0 (chr-ID scaffold0390 4; pos 434519 to 435438 reverse strand)
atcctgccactgtaagttcatcacttaaacttcctctttttccactgatgattgtaattttgttcaatacttctaatggggtttgcgtgttttggctgtttgtgtgttctgaaggaacattcagtttcttctattcggagatcgtgtttccttaccccgttctgcatcttgaaactggaacagggttttttttttttttttttccttttgaagcgttatgatcacctgagaatgaaaggaggaggcccttctgtgttttttggagaaaattgtgaagaagtgtacccatttggtttatgttttattctatgcaaatgggtcttcattttatttgcctgatcttatttgaattcctcattgagtaatttatatataaccttcaataggagatttacaggatgattttctacccttcgtagaaccaatgaaaatcatctcttgctagacttgggccagcccttatttttactcgagcgaattagtttcttcactaacattcattcatgccttgaaaaaagggttttgtgatttctcatttattaggatgaattgatgaagtgctactatagaatgtaggtgagtagatttctgatgatggtttttcaactagtgttatgggattcttttttgttttctgacaaaccactttgtttgtatagcgacacaatatgatttattgtgcatggtttgatttaataacttatttgtcataatttagatgtttaaatttgatacaaaatctgtaagtagatgaatgagactgagattgggtccaagtgaacgatcatatttattcgctccctcttaataaacgggttttgtgtcaaagatgttgctggtccattctaggtgttttatttggcttttatgcttgcattaactttaaccattgtttgaatttcagattaccagttgcaagc

SEQ ID NO: 68336 - DNA, 951 bp, Cucumis sativus
  Intron number 1 from transcript Cucsa.364540.1 (locus Cucs a.364540) derived from phytozome v7.0 (chr-ID scaffold0361 1; pos 1991279 to 1992229 reverse strand)
gatcgattgactgcgtcttgtagctgatcagaaaggtatttcgggaacccctttaaagcattgtttgttttgattgtgaataagacagtatttagattgtggggtttgttttgacgtaactgaacttttgggtgggagatatgaacttagaaatcgtgggtggagattatatttagaattggataattggatttatggttctgattggactaaagctttgttggctgaaatttagtgagatttcattgctggttttgttgcgtctatcagagcctccttgaatattagaaacccacctaccttcatgacaattatttgtagatttctcatatgagtgtctatgaagtctttagccttgattgtagcttctggggaatggtaagagttgagttctcgagtctttaatcgtgtaagctttgttggaatgacatgaagtatttagctgtcttgcagtgagatcgataggtttgaatgtaaatcacaagaaacagaggaaaaaagaaaggaaagaaagatacagtgcaacttctgaatgtgcttaacaaagttaaagatcaataaatttttaccgataccggagacaggatctttcatttgaactttggagaagatggtgtatgagaatggcgaaacaatattcaccttttgtttccaattgatatctttcttcaatgaaaatgtatgatgaagatattgttatgtcttgagtatcattactggtgttaaaacagagtgcaagcataagaaataaatgagtgcttgaaatagttaaagtagaaagtgaatttaagtacatgattattcaacctcgaaatttagtccacttgtactaatctccatatgaccattgaaaataacgatcttacaaaattttccggaaacacgtacatgctagtatctaccatgtgaccttcatccttctcaaattcaggtcttctgtcatttatctta

SEQ ID NO: 68337 - DNA, 572 bp, Cucumis sativus
  Intron number 1 from transcript Cucsa.299600.3 (locus Cucs a.299600) derived from phytozome v7.0 (chr-ID scaffold0292 0; pos 132743 to 133314)
ttaattaagcgcttcgttttactgtagcaacgtcggtatgagattgaaatctcactgtattctctcgcacttcacttgctgtgtgtggtatcttcgcaattttgatatattaattattacgtttcttaggaattataaattcgaattaagtgatcttagcatccgtatccggttcttttgaatttggcttcctactagtaatgtaggatattaaagaaagagaaactatgcagatgttaattgttcgaattatcttgcttgcgtagctcatatttgttttccgtttcgttaaatctttccattaggaaaggttattataatgttcgaataaactaagccaaagagaaaattctgtaggtgctttaaatccccttatggaaagagtgcaatgagcgtaggggatgtgcctttttctcggcctttgatcttcagcatttgaattgtgcttctagattcatttgttttctcacttttttcatcttgccaggactgtttcaatttagatatgcagttggacttctggacttattttatttatttattgttttattatttttttttcatggaaggcg

SEQ ID NO: 68338 - DNA, 739 bp, Cucumis sativus
  Intron number 2 from transcript Cucsa.282850.1 (locus Cucs a.282850) derived from phytozome v7.0 (chr-ID scaffold0265 3; pos 178517 to 179255)
ctctcactttccatttcttcaagcgcgactttgaggtaatctatttctttctgattttgtcaataaatcaagatctggaatatagtctaagccttgttaatggatttatgttgttgaatgaaagttcttgctctgtttgtgtgattgattctttactattcgttttcttttgaagaattagttattcaatattgtttgattcgtttttggtactcggtcgaacgagaatcagggattttttgagaacgtgttgaccttcctctgtacttttcgatttgatttgaattctttaaaagtagtttgatctatttttggatcttggacaagaagcatagttttgttgacattcaatttcttgatgaacttcatgagtcatcatcattaaaatcttggcggataagctcaacttgcgtacgaatcctccatctctgttacaaaccatttttaaaatttgagggactaaaaggttgtttcatctcattaatttttaaaattttcttctctctcttccttgtgacatttctctttcttcttctagtaaactattagttaaaataatacttctttcctcacttgggaactgctgcagagatcttattaagctaaactaaagaattaatcaacaattaattaattggaaaaacaaaactgaacttcgcagttcgttggaaaaactaaatgaaatcataaactcttataaattctacaggtactatttgttcacaaatacagcggcaag

SEQ ID NO: 68339 - DNA, 962 bp, Cucumis sativus
  Intron number 1 from transcript Cucsa.212710.1 (locus Cucs a.212710) derived from phytozome v7.0 (chr-ID scaffold0154 3; pos 496400 to 497361)
ttattggtaaataaaacatacttatttatctctgtctcatcatcatgcaatcgatataatttgtaaattcactctctggttatttttggaatgcccatgaaagtcgaaacttgaaatgatgtaaaacagtgagatctttcattgattataagtcacattgttgtttcaaccttaatatttgtccacattttgaatgattttccgtctagtgattttgaaatttttagacaaaaatcatatttatttcgattgaaatatgacaattttgaaagaatatttattttcattttggtcatcttcctgttttgaagttttattattggaggttctcatccattttaaattgagactctataataataaaacatttttcatgcaagaattacggtatgcatgtgaatatctttttgaaatttatagtaaatttgctaattgatcatttttctttagaaaaaagatcaactctgtaaacttcaagtttgatttattgaaataaaaggttattaaaattagataattatatagagcttccaattttgaagtataatattaagtcgttttgggagacaagtaaacttcaggtttgatgtttttttcttaaaaaaaaatgatgaaatttaagaaattagaagtttgcatttattaggttataataattgatattgctttgaagtgtgtgtggctgtctcactttaaattaaatgcacatgttgcaaattaattcccaaaaattaattatgatgcttccttcctctaaaatttttaatggcatttttgcaattttttattttttaacgccatctttttttttaattttaatatgatggattaattaaaaataaataaataaaaactagataatgatacgataaatagcaattttaggaataataatcatatttgaaatgacgatctttctatcatttatgaaatgaaaaatgcagcggagctattaggatttg

SEQ ID NO: 68340 - DNA, 422 bp, Cucumis sativus
  Intron number 1 from transcript Cucsa.383150.1 (locus Cucs a.383150) derived from phytozome v7.0 (chr-ID scaffold0388 2; pos 109400 to 109821)
ctggccaaaccaaaggccagacccaggtcattccaactttctattcctttcttttgctttttacttgaaataagttttgataactctccaaaattaaatcttacattattagttagtagcctcgtacctaaattttatatttacttaatggttagatatctcattttagttttcgtacttttatagtttaattattgattagacccgaccattttcttgaattgaaatcttcacttattttttctttttttgtaaaaagttaaataaaaccgtttaaaacgcactcatttaaccttattcgattttgtccaattttgaatttttttccaaatataactttgaaattgtaaaatcttaattttttttcataatatattttgtttttggggtttggataatgaggggcaggaaagaacagaaga

SEQ ID NO: 68341 - DNA, 716 bp, Cucumis sativus
  Intron number 2 from transcript Cucsa.383150.1 (locus Cucs a.383150) derived from phytozome v7.0 (chr-ID scaffold0388 2; pos 109935 to 110650)
atcaagaacccaatagtcttctccaacaggtaatacttctagaatgcatttaatcattccaaacaaatttttaatactgaaattcggtatcaactgtaaatttataatcttcggaagggaatcaaacaaatatatgcctgcaaaatagaaaaaaacttgcatcgatgtggtgcttgaccatcaatactccgacaatcaagtccctctaactgtttaaagagagctagagagtataaaagttaataggtatttcaatgtccatcaaatgacatatcattgttcccttgatttataagaaataagtcttgtaccggttatttactaattaatccttgggtaattaattaagttattacttagtaacacaagcatgtgcaaaagtaaaacacttcacctagtcttttctgtcataagtttgagccctatacttagatactatgacttgatggccgacgattctatatacgagtccgtctttcaaacttctactcttcaactctctctaaaccattattaacttgatcgtcggaatgttggtggtcaagcaacatattggtactagtttttctattttgaatagcatttgtttgattctctttctaagattacaaatttacagtttgataccaaatttcagttatgaacaaattcaacattgattttttttacataatttggtttgtgatgttataattttgttgcagactggagagaag

SEQ ID NO: 68342 - DNA, 826 bp, Cucumis sativus
  Intron number 1 from transcript Cucsa.312870.1 (locus Cucs a.312870) derived from phytozome v7.0 (chr-ID scaffold0299 5; pos 2194043 to 2194868 reverse strand)
aggtactatttcgattctttgttttttctgcgttggagttttcttgtagcttcacgatattgttattcgcatcttttcaagctgatcattctgtatcattacgttcgcagagatgtcgtacgttgtttcgttttaccacagttttagagaagtgacaaacaatttttgttcgcgttcttgccttctataatttttgcttcttctatgcagcttttgtactggaaaaaagtctgacttttttggaatctaaggatgaaatggttgaatggataaacttttttcttgctggaaattttatgaactatttgtctttatctatctattcatttaaccttcaattttgtttgtagttgtttttgtcctcttaaattaggacgctggacttcggcttgaactttgaagaccttaattgtattttaaaataaattattttggtattatatagaggttgaactatcgaattttagcaattccttatcgaactgtcgttttagtaattataattctatctcgcgctgttcattactgaagcatgttggctttgctgatatagttttaaatgaagctcgtgaatcaattcgattaagttgtttcttcttcccaatttcattatgttcttctgttaattggtcaagagtaaaaataatgataaaggcagtaatctttcataactggaattcttcaagctcatggttccccaatagcttctgtagttcgaatatcttgtataatttcaaaactgaaatttaatccatgactacttgtagaatcatatttgttatctcaccctgattatagtattcacaggtggggaagacgaatctga

SEQ ID NO: 68343 - DNA, 939 bp, Cucumis sativus
  Intron number 1 from transcript Cucsa.367010.2 (locus Cucs a.367010) derived from phytozome v7.0 (chr-ID scaffold0362 5; pos 475866 to 476804 reverse strand)
tgatcgtgattacatcaactctccttctcctctcggtagccctcttgccatttttggttcctctggtatacaattcttcattcccttttctttttctttttcatttactaacattttattttatagtttgaaatataaagtgtggttttgattacttcttgttctgcttttttaatacatctctagattttaaatttcatgtctcataaatttctacattttaaaaattttagacaactttttaaaaaagaaaatatagtttcaatcatacctttatttctttttaaattgaatcttacctttatacaattgttaaatatttagtacatttcatgcctcgtctctaatcgttcaatcataacttgtgggatgacaaattttctttttacttttttctaataattgaatattttatgcataagtgatggaaagaaattaaaaaaaaagtgatgtctgaaatgcactcagatattactttttttttttgttattagagagatttgatagaccaatttttaccactggaattataagaatgtaacgaaaactaagaccacatatgcataatttctactatttatccttaaacttctttaatttaaggtttaatttagcgtatatcacatttagtgaattgttcgaatatataatcaactaaatttaaaagtataataatttaaatgaatattttaaaattacacctaccaaaataaaacaaatagaaaataacattcaatttttaagaattttgtataaacaaaaatgaaattacttgtttatttttgtatttaatgatacatttcttctaaaaaaattttacatctcataaatatatatatttggttaatgagttgtttgtttgttagttgtaaagtaataataataatgtgagtgcataaattaggggaaaatccaaaggcggtgaagacaaagctaagg

SEQ ID NO: 68344 - DNA, 552 bp, Cucumis sativus
  Intron number 3 from transcript Cucsa.271800.1 (locus Cucs a.271800) derived from phytozome v7.0 (chr-ID scaffold0250 0; pos 599569 to 600120)
aagactccactgatattggaaaccctatccaaccagtgcgttcgctatcagtaaactctttcttggttacatttctactttagtcagtttattatgagtacggtattagaacgacgagtatctctgagagaccgaggtgattttgaacgacaatgcgtcacaatggaattagaaaaagaaaatcgtttgtgcacttgttttcttttcgtattcacctgtattcttcttgttcctttgagtattggtgttttgttgaggacgtttagagattgatcttaatgcatactttagatttgctgtccgagtacctactcaaccatctttcagatttcaatacataaatttatttatattattaattcattcttgaatttacttgtgctctggtatttaggttcttaccatcaagaaatgactaattgcatcaaggactggattttttgaattgctatttagatcatgctttctcttcctttccaatccctttcatcgttgtttcttttgttgtttatgcaaggtcaggattttctgttttggaggagtgtcttgaat

SEQ ID NO: 68345 - DNA, 771 bp, Cucumis sativus
  Intron number 1 from transcript Cucsa.251950.1 (locus Cucs a.251950) derived from phytozome v7.0 (chr-ID scaffold0222 9; pos 1000876 to 1001646)
tctcttcctttgcttctctctcattcttatttctggtaagttcacgatctctttcactttgctcctcttattacccactttgatcttttttgagtcttgacagatttttttaaaaaaatatattgtttgtttgttttttctatcaaaattcttacgtttcataacgtttagttaattgacaaaatgacgatgtcatgtcgattaaaaaaagcaagctagaaataccttcattacatgattgtacttcaacaaaaatcaaagcaagcatcgtttaactatcgttcaattgtgttagtaacaaaacaaaggtgtgtgattcatatcttcttaattactccctattgtactgaaaaaaagaaaagaaaagaaaccattgcattgttttgaagtttagtgataataacataatctaacttgtgttttcttttttaatatttatttttctttcaaaaagtttaggaagtcaatgatataaatctattgagctgtctctataatataatacgaacggtcaaattatgtttgttttctcaccattcttttaaatcatagttttcattttttgtagtacacgattgaattcttagccaaattttaaaaacaaaatcaaatttgatttacatatctttatattttgttcacaaacatttgtataaacggaatacttgaaaaaactacaagtttgattttagcgacaagtttagctaagctcacttttacattgattatatatataacaataaagttttttctttgtatcatgatatgtag

SEQ ID NO: 68346 - DNA, 859 bp, Cucumis sativus
  Intron number 1 from transcript Cucsa.353130.1 (locus Cucs a.353130) derived from phytozome v7.0 (chr-ID scaffold0353 3; pos 762220 to 763078)
aggacaatttcaaagaacactcgagtcttagtcctgtaagttcttttttttctttttttttttctttttgcctttttcttttccgaggttgagtgagaaatagaggaatggataattgtcctttgttcatttaaaaattaataatgaagatttgtaatttcattattattttagataattgagaaattaatatgataaagttcaaacttataataaaaacttttctttttctattctttgaaaaaaaatcttccatccagatttttcataaagagtaaaattaagttttttatttttattcctcaaaattaatttgagaggaatgaatgtggctaatctctcacctctcacaattattgcattcaaaacagtaatttattttattgataggaagatagataattaacatagattagataattaacatagataacatcttacttttgttttaaatacaacaatcgtagggttagagatttattttacttggtgtatgtttgttattataactagattatatgtattttaaagtgaaaaattttaaataaagagatacaattaaactcctttttttttctttttttgtggtttgtgattgtaaattttccataaacaagattaacacaccatttaattaatttccatttaatttcttatcctcatattccatttctttttgtcacacttatgtttattgaatataagaaatatataggaagcaattgattatctttaaatcccttcatcattaaatctcttttacattaatttatttctcttagattttgacatcaattaatccgtttctaatcccaacaaaacagaagcaaaagcaggatttggctaggcaattaaacct

SEQ ID NO: 68347 - DNA, 593 bp, Cucumis sativus
  Intron number 3 from transcript Cucsa.395370.1 (locus Cucs a.395370) derived from phytozome v7.0 (chr-ID scaffold0410 0; pos 942911 to 943503)
gagagggtggtaagaattttgtggctatttattcttttcctttttggtccagcaagaacagggttttgcaatgttattatttcattttctgaagttgtataaaggccttggatttatattgcgttctctgtttatttgaatttaaaattttactagaagctttagtgatgcatttttggccagagtctcacttgagccttgatttgtaaactcaattttaatgattgaggttttgtggttgccgttccttggacgagtctagtcgcctacccctctaatccccatagaggcttttgccaattcaaggatagtttttgaatgaaacaaattgtttaaaatttttggtaactattattcattattcatcgtatgatggactttgaaccttttagctatcctgaaacatcccaatccattaccaccacgacactcttggggttcaaaacttccaatttctcaccatgactcgtcttatcttctttggaacctttatttcatttctttctcactttggatttggatgtctcgtccttttgctcttagtctgattggatatctctgtgcattgtttaatttaggagcgcataagacgg

SEQ ID NO: 68348 - DNA, 297 bp, Cucumis sativus
  Intron number 1 from transcript Cucsa.302350.1 (locus Cucs a.302350) derived from phytozome v7.0 (chr-ID scaffold0295 1; pos 522444 to 522740)
cttgtcgtttttcaggttctctctaaaccctagaatttctgtttttataaccatttccttcactttttttctcttgatttgttataactaaattactcgatgatggaaatcttctggcttattatatatgtttattgggttagttctgtagaattgatgtcttaattctccaagtatgtcttatatatgaatatttgaattagcatatattgttgttaattgcctaatatcattggtgaaagtgaaacaatgttggaactatggaacttatgatacttttgaaacttgttgcagcta

SEQ ID NO: 68349 - DNA, 940 bp, Cucumis sativus
  Intron number 2 from transcript Cucsa.302350.1 (locus Cucs a.302350) derived from phytozome v7.0 (chr-ID scaffold0295 1; pos 522894 to 523833)
ccgtgcctttattataatttacgaatgtaagtttctctatttctttcgtctttgatcggactttttactattagagatatagatgcataatatttagtgggctgtacgtactatcctcatgttggttcccaatttgagctatctgaatttcatattctatcctctggattccaaatgaaaaatgaaatgtgtatattttgaatgaaggggcttgcctatctcttcttatatgcccgggtaagttggtaacacttagtagccaagtcctgttgagtggatagcgggtgaaagcatctaagtactgaattttacaacctttccttttaaatgtatgaattgcttcaagggtaattgcagtggtaacacttttagggataataatttagtgtatggtaacatttataaagaattagaaatataacaaaatctattagtgatatactatatcgttgatagatttctaccagtgatatggtctattattgatagactcccaccaatgatgtggtttatcattgatactctttgggaactagatctaaattttgccatattttcaaattattttgtgttgtgctatatctacaaatactttggaactaattgctacatttgcaattgtcaaagcacctaaaatttctgagatttagattaatagtgttagttttcagataagttaatcttttgggatggttaagaatgtaaaggactagggacgtctcatggacaatccctttgaactttcatactacagttctgtgactggaacttgaatggatatcatttgagataagccaaactttcgtatttgagattgggttggtgcacgtatggtttattacgtgacttgtttgttgttggtaattcttcatgccaacttaaatccgtctaatgtgtgttttctcatgatttaggtacactcaacgaaaacacttggtag

SEQ ID NO: 68350 - DNA, 504 bp, Cucumis sativus
  Intron number 2 from transcript Cucsa.251890.1 (locus Cucs a.251890) derived from phytozome v7.0 (chr-ID scaffold0222 9; pos 964488 to 964991 reverse strand)
ccgaggaacgcctttcaagttcaagctcggggaaggtaatttcgtttgtaatttgatgtcatatgatgattgtaaatgtacgtaattttctttgtacgacacaattctctagcacattctggttagttgaactcggatacaaatactgatcccagtgttatatttattggatttcttttcttttcttttcttttctttttctttaatcttttgtagtacatggtcgtttctagttgttcatccattttgttttttttttcatgtagtggtcttttagttaataagtttgaagtgcatcaaatttgctacgaaattgactatcaatttgcgagtatgaataggtatctcgaatacaaagattgatccagccacatatttattggaattttgtcgatcattcttaatccgtggtcatttctagttgatcttgcattttttattcagtggtcatatagctcatatcatgttatctatcttcatcaggccaagtgattaaagggtggg

SEQ ID NO: 68351 - DNA, 784 bp, Cucumis sativus
  Intron number 1 from transcript Cucsa.255730.2 (locus Cucs a.255730) derived from phytozome v7.0 (chr-ID scaffold0222 9; pos 3599332 to 3600115 reverse strand)
tcatattttgcttctccttggatctaattcttgaggcaagttgagaaaagctgttctttgctttgtttattattattattattattattgttattgttatcgttattgtttgttgttattattatacttctcttttccttttcatcatttcatcttttgttttgtacttgtttattgagcttactttctgtaaaaactttgtgttttggtttatgggttgtgggtttctctcttaatcatgttttagcctttaaagctctgatttcctttctggggttatagaaagactgttcactgtgtcttttgccctattttcccttctttgtttgattagattgagtttctttcaccttctgggaaataatcgggagccattctttatattgatggagatgctttccattgattcttcgtgtgtttctcaatcttttgattctggatcgcatttctcctttcatagttcaatccctctgagtaagtttctgatttaggagattcagagcaggttcacttcagcttcaacatttagcagtcaatccaagacagacttcaaatgattgaccatggaggacgagagagaggatgaaagttccatttccttacatgttatgttagtcacagcccaaaactcaataccacatctcattttcagttcctagatttaagtggctgttgacgttgttgtttatgaaattgctgtgttactcttctttttcagattcgatccacgatttatggtcttacgagaatactttgaatcattgtgtacaggtcttaaagagct

SEQ ID NO: 68352 - DNA, 591 bp, Cucumis sativus
  Intron number 1 from transcript Cucsa.362420.1 (locus Cucs a.362420) derived from phytozome v7.0 (chr-ID scaffold0361 1; pos 292861 to 293451)
ttggagtaagttttcataatttactcccttatgtttgtgtgttattacattaattccactttaaaaggttacttacttacactgatcttcatttaataaaagaaaatttaaagtttaaggttcaaataatcacatgtttagttatatctttatttttttaccagtagattagttaaccgtttgtacatccaaatgagaaacaaaacctcgagtttaacattcaaataatcacacattatttactattatacctttggagttgagaataacaattttatgaataattaagtatataatttttttaaaatatttttatatatgttaatattttaaatttaattattgtattatgccattattcataatttattacttctatggtagaattttaaattttcatctacatctcattttttttatcaccaattaaacctatttaatagatatataacttttatttgtttataaaaaaaagtgacattttcataacattgaaacctcaacaattttataatctttttacgtagaagactttatttttatcaactcaaaagcttaagttgatataggtagatttgaccggagggtact

SEQ ID NO: 68353 - DNA, 965 bp, Cucumis sativus
  Intron number 1 from transcript Cucsa.234900.1 (locus Cucs a.234900) derived from phytozome v7.0 (chr-ID scaffold0200 4; pos 143624 to 144588 reverse strand)
agagattctctacgtttacaaaactgccctgtctggtaagatttaaaatattgattttgacggaaatttgaagtcataattatataaaaatgacagaatagaaatacggtgtttctattaactgacaatagaaagatccaacctcagacttcaaggttgataacagttaaactatgtttatgtttgcaaatatcagtatctagcattacttttataagaacataattatacaagctgttgggaaagataagtaaatatacttcctctaaaacccttttttaagtattttgtctgcacacttctctaatttctcaaatttatcttgattatgaaagttataaaaatcccttttaatactaatttgaaataagcagtttagtgattagtacctgagagtcgttataaaatcacttttttaaggttcaaaatcactagaaacatacttttacttgtttaaaattaatttaacctttaaatttactcattttaacatacttttcatgttggaacatactttttatgttgagaggttgagcctcctactttgaaaagatcaaatagactcatacttcttataagatagatgaactactctttacattatcaattgattttgagatgaaactcgatactattaaatatggtattggaagctccaaagccgaaagaagcatacgttaagatgttgagaattacatactgagaacaccaaaagaaggctcagactccttatacataaataatttttaaaatgcatgtcaaaatcactctcaaacatatcattcaaaatactaagaaggctaggtaaaattgaaacacgcacttaatcgacatgatatggtaatattttattgaccatcatattttatcatcaatatataaatatcattcttctgtatacagaaatttaagagcttgattaattttcaggttttgctgcaaaactcacctcaaaaaagcttcat

SEQ ID NO: 68354 - DNA, 765 bp, Cucumis sativus
  Intron number 1 from transcript Cucsa.319820.1 (locus Cucs a.319820) derived from phytozome v7.0 (chr-ID scaffold0307 8; pos 503765 to 504529)
gaagggcgcctaagaattttctttgaagcttatttgtaagtttgactgttatctcaaaacgtttttcaatccatcattattaaattctagtaatattattagattttcatctactatttctttcagtcagaagatttttcatttctttctttctattttctcttccattacaatggttcatccggaatcgggggattctacataaaactattgggcgccaaccttgtaaagattaaaattcagaaaacagagttcccaggagaggggtttaccattctttttttagttgggaggacaattatgcttaattaagtcgtataaggtgacattgaatcattcatataatggagactgtttctttttttttactcattgaattaattaacatctcaccagttgcaaatttttccaaatttcttggacgcgtgaatttagaaatgaacttcatgtttgattcatgcagttgaaagtgtttatttctggttattatggagctttccctcttttatcaccacccctttttacatgagtgtgatagtcatgtctttcgttagaatattgcaagttgtgaatgattgaatttgttatttatgaggccttcttgtgagaactagaaccttaacgtgtctgtttattggggttaaaccttagagagcatagttattcgtttattggtgcattgggaagtgcatctttttttcttttctttaccattctctctattcatcaggtggtgggaaggggaccaggtggatcagtgattct

SEQ ID NO: 68355 - DNA, 876 bp, Cucumis sativus
  Intron number 1 from transcript Cucsa.360030.1 (locus Cucs a.360030) derived from phytozome v7.0 (chr-ID scaffold0358 8; pos 792105 to 792980)
atatagcctggtaatatcgctaatttctttttggttttctttctgatcttttaatctttttttttcttttagggaattgcacaatttgtgggtttttaattccctatgatctgtcgaagatcgattaatcagtttattactcagatagaattcctattgtgttccgtaggaaatgcgtgtctcgtttgttttggactgcgttattgaatgattttgggatttgattgcttttccaattgtactaagtggtgaaatggcttaggttcttcgggatcgggtattttttatgtgaaacgtttatttgtaaccaaattaaagcgataacgacgagatccacatcgatgttttcttgctttgagttataattatctctgcacgtttatggggtggcattgtgggttcgaagagtttacagtatcggtgtagtaatgggatgtgtgaattatactacagaaaatggcaatggttggaaattggaataacttccttttcgaatattcttccaagggtacttgtaaagtttgtaaggagttatattcaacttgtgaccaatttgggttcagataacgatgttagagcctggaaaataggataattagaagatgaatttgttaaataaatgatttttcgatcttgcatgtcaacaaattatgtctcaagaaaagcaccttattcatatttttgttgccagttactaattttccccctttgattaatgaccttgtcattattattatatgcttgatccttagaggagttatatacatggaaatgctccaatcgtactccgcttgtttgtcaccatcttatgtaagttatcctggctgacctagtacaatgattttatcctcagttgggggacatatcaaattaaag

SEQ ID NO: 68356 - DNA, 560 bp, Cucumis sativus
  Intron number 2 from transcript Cucsa.360030.1 (locus Cucs a.360030) derived from phytozome v7.0 (chr-ID scaffold0358 8; pos 793162 to 793721)
tttttcagtatccttacgtaattggcatttcagatttaacttatagtattctttggcaggctagtttgttgtattttttatttttgtatctgcttgtccatgatcacatggtgtatattttactaaataaattaggaagtagctttcctgtggctccttggtcattacacccattttgatttgttgtggcttatgaggctgaatgaaaatatggttttcatgtttctatttgtgtcatgtcatggaaagaaaatcgtgaccttggggcctgggcaaactaattttgtcctgacaatttaacggtagcttgctgaaaaagttttgagacaaaggaggttgatattgaatatgaaaacttttttttattttaccacttcttgtgttcaatgtgtggaggaatcagcatataagtgtgtcttatcaagtcttttagaattttggtttttcacttttaactgtcgagaagattgctggctcaaattatgctcttggaaaaagtcattttaccttgacctgagtttttagttatataattgaaggaagggtctgttatttgacta

SEQ ID NO: 68357 - DNA, 531 bp, Cucumis sativus
  Intron number 3 from transcript Cucsa.261680.1 (locus Cucs a.261680) derived from phytozome v7.0 (chr-ID scaffold0226 5; pos 109645 to 110175)
tcttcgtacctttgaaatttcctccctttcaatttgttcatgaagaggtaaattttgagaaaggtaaattaccaaatgataatgtaaatgagtccattgccctgttgactaaacacttctctaatgttataagaaaaattaaaaaacacaaacaatcatggtttaaataatagagaacaaaacaattatagaaagagagattttgacaaaccaaatggtagatatagcaaatcattcaaaatataagagatgtggtggtcatggctattatcaggctgatgtctgacttacctgaggagacagaagaaaagttttggtgctaccctatctaatgaagagtctgatgtaagtaacgaggaagcagaatataccaatgttgttattagtattacatctaaagatgaatctgtatttggctttcaagattgaaattgtcaaacagaggatactctatcatttggtcagttgcaacgtcaatggaaggagaattcgccagctcgagctattcagaaggaaaatatacaaaagttg

SEQ ID NO: 68358 - DNA, 1020 bp, Cucumis sativus
  Intron number 1 from transcript Cucsa.396020.1 (locus Cucs a.396020) derived from phytozome v7.0 (chr-ID scaffold0410 0; pos 1362262 to 1363281 reverse strand)
caaaattccctcccggccatcagttttctcctaaggtataatcttctttctctcttttagatacaccactcctctctcagatcactctcaatttcattctcagatccgttagttcttcatagcttcaccttcttaccggttcgtctttcgtaaaaccgatccttattcgtctttcttctcctcttttctgggatctgatccgtcgctagtccattaatttttgattccatggacttcagtttgtcggatttgtgccttggtcttatcgtattaatttctagatcgagatctgtaaatcaagtttatttatttatggttgttatactgttttttccgaaatatattacctgttgttgtttactgttcaccttaactacgagtttatttttgttttattttatgtgaattttctggtatcggttcggtttcgttatgtttacattcttttcgatctgttttcatgcgttgtatttttttcacctcttatattgtcatgatagattgaatatgtggactctaagggatgagcaaacctcttctcatagtgattgtctcctgttgtttcactctggatcagcaaatttctagttatgaatctgtattcttgtggatgtatttcctcattggtttatatgctttgattcggagactaaaatgatgtgtttgtatacgtttttattttcttatcttattaatcattttgcgttctgccgaattgggcttcgatgaatcattaaaggttcatatgttatgttgcaaacgatctctaaatacttgtccatcttgctatttttcaaccgttcttggcattcgtcattttagatctgttttcaacgaagatttatagtagtgtccacggtttgcaggatctcatttttctttaatagctatctatgcctttcaaaatctctacttttggcctattgtcgggatagtttttctttaatttctgttctaaacttgaaatagaatttctcatgtgacgtggattttggaaattattgcagggaagaagtagcc

SEQ ID NO: 68359 - DNA, 630 bp, Cucumis sativus
  Intron number 1 from transcript Cucsa.238550.1 (locus Cucs a.238550) derived from phytozome v7.0 (chr-ID scaffold0202 3; pos 1090205 to 1090834)
aagtctttttcaataagacccaggtgccttgttatttgaataatgggtttttggggggttttggagtttaggcattgttcttaataaaaaagttaattggtcagtgaagagtttcgaaggatttgcatatgattgtttctagcatatgaagttacgcgtaagttgttgataggggaaatatttaaaacccaacttaagcttcatggggaagaagataaaagtcagggcatgttagcatatttaaatgattgatatttgatggaggaaataagatacgtaatttattcaggtcagcagagtataatgtggtatgctaaattcaaagatatttttccatgtattatacacatcatgatggcaatctatcatctttttctcactgcacttcttttactatataatttgtttgaagtccaagtagagtcccatcagttattaagagtatctgggaactattacctacaatttttttaaaaaaattctaatataatcatagaattattggttgttggattttcatttttttgtggcttttttgggtctatactggcttcaagttctcctcatggtcgaatcttgcctctgtaatgctcaggttaacaacagagatatatccattgctgtccttag

SEQ ID NO: 68360 - DNA, 882 bp, Cucumis sativus
  Intron number 2 from transcript Cucsa.238550.1 (locus Cucs a.238550) derived from phytozome v7.0 (chr-ID scaffold0202 3; pos 1091071 to 1091952)
aacaaagaggtcccaagccaattagagttcttgaggttgttttaatttcattggcgttttattatgtgcatgtacaaagttaattcctagtttatcttccaataaagtctgaagtttatacatttcaaattaggaatacgttcatgccttatttattagccacctgtttgagttgtagagtcttatgttctacaatctgtcttctcccctacaaaggcaaccagaattctgaactgatactgctactgggaaggacctttgtaacacccccaattgtaaataagttttttttgaggggcagcgctctttggggtgttagttggttgcggtttatattttttgttttcttgtttgtttgggtttatgttatcattatgtttttgtgtaatatactatggtgagtgtgtcacagagtggagagtgtacaccttcttgaagtggtggtttgcttgtttaattttcttatgataatataagtacgcgtacgccttgtgagttagtattcttacaaccttctagggatggtcaacatgaagttcagtaacaatttattaacaatggatagaccaagaggcttgaagtctatgaaattcatgtagatttttcaaatatacaaagatgaagttgttcttaatagtgtgtacattccatgttcattatgaatgtgtccttgttctaacatattagaatttagttcaacatattgtcattgggttttatgactccgatgttatactgtgagtctactattttgtttgtgttttcttctctcttgggatgtttggtataagttatggtgatatgtttatccattcactaactgactaattcctgtttgaatttgaaggccttgtcagcttctgggctaagagccttaagata

SEQ ID NO: 68361 - DNA, 568 bp, Cucumis sativus
  Intron number 2 from transcript Cucsa.237620.1 (locus Cucs a.237620) derived from phytozome v7.0 (chr-ID scaffold0202 3; pos 425373 to 425940)
ctttccacaggtatataaaaggtctacttataatcttaacccttttatctcgaatctcatttcaatttggcttctatacttttacaagtttcattgctctttttctttgtgattattgaaaagcacaacaaaaatgcaagtgaactccataacgtagcaattttagcccatatacttcaattgattcaatttggttcttaaaacatttatgtttaacggttgttcttcggattgaagtttttgaaatgtcctctgaacttcatgatgtgacatttatagtgatgagcccttttttttcttttctttttttagtttaacaacatgtaggactacaagattcaaactgttatccacttggttattggcatattttttaactaattaacttgagtatatctgacaaatcacacaagttaaaaaaataagtttgtccatgaaagaacaaatacaaaatgttttagagcatagagactaaattaaaactaaattcaaagctggaatgtatacaattttctttagttcaaatcattaaagtgaagagagtgccatgtgcaggagctatatagaa

SEQ ID NO: 68362 - DNA, 926 bp, Cucumis sativus
  Intron number 1 from transcript Cucsa.258410.1 (locus Cucs a.258410) derived from phytozome v7.0 (chr-ID scaffold0222 9; pos 5383935 to 5384860 reverse strand)
tttcgctggatctcaatcgaactcactggtctcaggttcgtcttcttcattttctgagatactgcatcttttttttcttggctatttaaacttcttgtgactggattctgggtttttattgggtaactatggggtcttgtttaccggttacgttggttttcgcgtttgtcggagctggtcaaagaagaattatactaaaaggcttttgctatttcattgctttcaagttgtcactacacagaattcaattaaagcggttaacgtttttgttgttgttgaaatcttaaaattagttgacattttcacgtttttaaagttcctagttcattcaattcgagggttattatcactatcatcattactactattattggaagagtattttgtagttctttggtgtgatatgtacatgggacataatgcttccgtctattttttttggaaactgacatgtggtcgtgttgtattcgcgtttgtgactattggggaagaatgtaccggggatatggcaaggcggtctattcacaatgtcatgtgatgagactagtcatgttgtttctgcgttagttcacgtcttcaaagttttttttcgtgtttttgttttgatcaaagttccaaaactagcacgtttgctctcattttgatgattatctcgttcaatgtttctttgaattatttatttttgtatgaataaattattttcaacgatgttcctaataaaatatttactcacgttttctttaaacgaacccttttcttccagttggttttgagtctgacttatcatgcacgaaggaatcttatttaccttttattttccctaattattttgtttgaatcttttgttcatttgttttcatgcttcaggtttgaattttatcctgttctcaggccccactctgacgataggatttcaataggggctg

SEQ ID NO: 68363 - DNA, 908 bp, Cucumis sativus
  Intron number 1 from transcript Cucsa.283810.1 (locus Cucs a.283810) derived from phytozome v7.0 (chr-ID scaffold0265 3; pos 785654 to 786561 reverse strand)
tcttcaaccccaaaccaggtacaacaactattgctacttttattctttatttttctataataatcgttaaatcatcatgggttttgctgattttgatccgccattactgattcctcgagaaagcccatatatacatcatctttctcatctatttcattttccgatccggtttgactttaattctgtgttgtaaattttaatctcgactaaagttgacgtctgaataagttttgtagcgtttaccaagatatttgatgatcccaattgatctctgatgttgttatgcttgtgcccttctgccatgcttatctgtttctattgggcgaattggaatattttgatagcggggacaaaacattgaatattttttgtggaaaaagaattttctgtgtgtatggagatatcttgaatggattatatcccatttttctagagtctttgttatgtggcgtcttcgttatgctagatttatagaatcgatctgatctctttttttggtccaagtgtggtctataagcttcctagcatataatatcccacttaaatttctcatattgtagctattctataatttttttccccatttgtactttgctttatatgctttgctttgcgggaattccaaattctcttttgcatatggcttagttgtcaatcacgttggaagttccattgtttctggttaccaatggattaatctactttctattcttttgaagattgagattactttttcttactttattgattcctttgctttatatttttatcattagattcttccttcccattttgcaactttatcttatttttcaaagtgcagcactatgattggattagcaatggataatattagcttcttataaaagtttaatttcaggggacagaagctctgtgtgtaaagggct

SEQ ID NO: 68364 - DNA, 910 bp, Cucumis sativus
  Intron number 2 from transcript Cucsa.241220.1 (locus Cucs a.241220) derived from phytozome v7.0 (chr-ID scaffold0204 7; pos 1320356 to 1321265 reverse strand)
tgtggaccaattttggtgattcatttggtatgctctcttcttcagttatccttatgctaaaatgacatttggtattcttacatttaaatgacggttaaaatagtgggcatgggtcatgttggaagcctaagggtaggtctataatttattttgccctaattttgttctttttatgaggcttgtgatgcctattaatatttccccccttgaattttagaagctgtatagtgccaatttttatgtttgaattagctgaagaggatcactaattgtgttttcagctgtatcattgtttttggcgaaagaaaaacaatgttgggttttaaatagaacaattatctgcagtcaccgaggtctatacatgtagaagtaagagaaaactataccaaatgatgaaattgatgagtgaataaccagttatatgtgggtgtgagtgcgtttgattttgtgagcacttgggataattctgttaggttgtaaaggggcgttgaataggctgaggtagggagtctttcattatcttttggcatatttgttttgtagttctttacagcataaaggagaatggggagatttcgaactccctccatattttgccaaaacagggaatatataattcatatctctcaaatccattttagttagctcatgactcatgtatctttaagacttaagagtttgttaccccacgatgatttaaataatcttctccttggatgaggagcccgaagatgagatatgccaataatttaagcacaagttacttatagaataatcactcttggattatacttccaacattctttgagattagattagctattgaacttttaccaactattagggaacagctagcattctgaattctttgtttaaccctgtttgcagatacatctaccttcaatcaact

SEQ ID NO: 68365 - DNA, 878 bp, Cucumis sativus
  Intron number 1 from transcript Cucsa.241220.1 (locus Cucs a.241220) derived from phytozome v7.0 (chr-ID scaffold0204 7; pos 1321495 to 1322372 reverse strand)
gccatttccggcgaactctccgatcgctgaatcgggtattgtagctcttcagtactcttttgatttttcgttcgagtgttttgcaattatcctcccccttgtttggttcagtttgttagattgaagtgcacgatgaaattctttttgacttttttcttgtatcgtctttgtcaggaatatggatatttttgtttggcgtcaaattatgtccagttgctttctagtttggtcgaatttgattcctgattatggtctgggttcctcattttgacattttaaggaagtagagaatttagacgctggaagacagtattgagtggagaattttttaacattggtgaagctaaaataagagctaacccacagtgatcattattcttgttcgtattgctataattaatttttctttcaaatgcataggttgccctagtcttaaagagcttagagagaatggaaccacctacttaggatttaaattttaacaagttatcttgacaagcaaatgcattaaagtcacatgtctgttttgttagaatagttgagtgcaaacaaagtgggataaacactcctgtgtgaaaacttttctgactgatatctgatagacattttttatacatagcaaatggttttgagtacaaatgtcaaaagtaaccgtttggatctcccaccagattagatttttgtaatgaggaagaaaattacttgtgaaatgctgtttgctagttacataaatttcaccacgaaatttttatgatttggtgttcatgccaagcaaatttcaagcattgctgctaacatggtggacaagtttgttttgttatcactagatgttcgtcctttctgaaatatgttcttcttgttcttggtgtttactatag

SEQ ID NO: 68366 - DNA, 809 bp, Cucumis sativus
  Intron number 1 from transcript Cucsa.286550.1 (locus Cucs a.286550) derived from phytozome v7.0 (chr-ID scaffold0265 3; pos 2598046 to 2598854)
tttgtgatcaggtacttgctatttttgctctttgatctgtttttttttcttggtttttgtttccgtcgttgaggaattttgtttatgatttttgttatgctatttctgatgatcgaggaatatatgctttgaaacaacgttttgttccgtctgtttcttcggtgtttgattgagtcttgtgattttagggctttgtagttatttgtttgttggatggttttttttggggggtgggaaattgtcttatcaaatgcgagggccatagctttgcaacttactgtttcttttccgttgtgttgggtttgctcttatttaacctggagatctgactgtgggaactttgaatgtcctaacctactggggcattcctacacaacatttaacagagagtaaaatctgccccttgtcgaaatgtatttgttgatgtgatttttgaaatttaatctttactgccataactttgagtctcaaacctggtggctgccctttaggtgatacatttgggattgtttcgcattcatcttcagaattttgggtatttgtgagaaatatttctcttccatggagaatgcgacttaattttttatacactttgagaatctaattaaagtttaaatgtattgaagtacatcgtaatcattattggtttgattgcttgattattggtatgaagggaaattttgaagttggtcttatcattattccaagttttgtggacctttttctttttttttttcctatctttgctgatgtttaagatattgaccagacttcttttctgtttgcaggaatccaatcgagtattgggg

SEQ ID NO: 68367 - DNA, 311 bp, Cucumis sativus
  Intron number 1 from transcript Cucsa.261660.1 (locus Cucs a.261660) derived from phytozome v7.0 (chr-ID scaffold0226 5; pos 67149 to 67459)
ttctctgaatttggcttctttaattttcggttcaggtaatctcctttgatcggttgtcaatgagtagatattataaactgattataccccagttggatggatgttctttttgtttgagcattgttattgacttccgttgatgattgatgggttgtgatgatttcaagtaattcttgtggtatttgagtttacgacttctaatttagcatttggactgagtttttttttttgtttgtttgtttgtttgtgaagacattcattggtattgtttttaaaaattggatctcagatttgaggatataccactgtat

SEQ ID NO: 68368 - DNA, 477 bp, Cucumis sativus
  Intron number 3 from transcript Cucsa.377980.1 (locus Cucs a.377980) derived from phytozome v7.0 (chr-ID scaffold0380 6; pos 447616 to 448092 reverse strand)
tttctctacatcatttattgataaggtttgatttccttctatatttatttgtcatttttagaagtgtgctcaaatgttgattagtgtttggggtgttccttgttttgttttgcatgcatgacaaaggccttcttcatgctagataactaaatgtaggcagccttgtgatacttgtctttgtttgaagtttcaacatggatcaaccattgctcttgcattattatttgtcattttctttttgtgtgtcgctcttggaatttcatgtaatctcaagaaactgctgcggacatctctaatttgtaggcgaaagaaaatatatattggaatgttgctctttgttataaagaactttaaagcatccatgtttgcacgcataaaattgaattgttttcttattcccaaaatagttaatttcttctaatcccagttaattttttcatactgcagccacaccttgaaactggagatagaagtaag

SEQ ID NO: 68369 - DNA, 755 bp, Cucumis sativus
  Intron number 2 from transcript Cucsa.377980.1 (locus Cucs a.377980) derived from phytozome v7.0 (chr-ID scaffold0380 6; pos 448139 to 448893 reverse strand)
accgtcgaggcactctatacaggctgtacaaagtatgaattattttctcagcttgttctaatgaatacctttgatgttttttttgtgaaactgcattcgattcttgcattgcccgtgtgatgagaaaatgaagaaaaggcatgtagtatgtgttttagacgtgaggtggagttgaattgattgatcttacggaaggttctgctgtcccccaatttaataaattactgatttcttctttcttgtcatgtacattactgcttttttgttaatccttgaccttaagatcttgtgcttcttctggctatggaacacgaaacctgctgaacaaatatttgcataggatttattatgttgcatatttacttttccaacctaaaaccttttacttaataccttatacgatgtaagagcgatcagggaacttcttttttaagaatatattttcattttgtacatctctgatctcacctggtcaaagcagtttgtcacttgtatgataaactaaatttgagaacataatgtttgggatgttttcaatcaattcaaacctcgagggagaattttactttcgttgtagattcctctggtcatgtccaagttgttatggttttttcaatacatcagcctccagttccccattttaggagggttcttaatgtgaaaagttatgtacatttttctgaaaagaaattggttagtttttgtagttattacaattcacgctatctctatgtttctacatctgcagtattttg

SEQ ID NO: 68370 - DNA, 630 bp, Cucumis sativus
  Intron number 1 from transcript Cucsa.377980.1 (locus Cucs a.377980) derived from phytozome v7.0 (chr-ID scaffold0380 6; pos 448902 to 449531 reverse strand)
cgatcgtttcatcggcgactcatcgctcccttctggtacgtttgcattcgcattctgacttgtggttttttcattcgaggtttatcttggttgatcgttttgagatgttactctggttgttttgcttgctcagaaagctgactgaccggaactttgaattttcattatcttcccattcttctcatctggatatgtgcattcatttgttagttaacttatttactgttccgttgatgggaagatgttagttacctgcggccaatgaaagataaacgtagcaacttgattgattgattatctttggtgttctgatttttcttcttcttcatattcttattgttttccttgttttatgtatttctgtctagctgttatttcatgtttgatataggggaactgaggatttgttgtctatctatgtacttttttatgctgttttggtgatgaatcagttttatgcgcttggtgtcctttagtcactacgctgtataaatggaattgtgcattagcgatttattgcttgactttaaggtttatgattatgataccgtagttttcaagcatttggttttcttacatatcgtacaacatgcagttcttcaccactcgatttggagcctttaggaggtt

SEQ ID NO: 68371 - DNA, 736 bp, Cucumis sativus
  Intron number 1 from transcript Cucsa.313320.1 (locus Cucs a.313320) derived from phytozome v7.0 (chr-ID scaffold0299 5; pos 2484949 to 2485684 reverse strand)
gaattcttcattcgttcctccattatcttcttcaggtagatttcaaattctctggttgtttatttttggtgtaatattttctctaatatgaaattctctgtgattaattagaattttatcttactttgattcgtgaagttgtgagaacattctgtttcctctgtgattgggaggtttgatcaatagtttgctgttgaagtttagtcaacttggatggataaaaaaaaatcatccttaaactttttaattgattgatatttgaaggagatgagttgatagaatagaagagtgtaatgaacaaggataaaattcaaactttcatgaacatattgttgacataactttatccattgaagagattagtatcatagagaactttattccaaatatcaaaggatattatgtgattatatgtaaatcacatcaatgggatgtgtaggcctgagtttgaaatattctgatgattcattgcttgggggaccaaccgcgactttgcgggaatttgggattagtatctcaactcggatatcagttttacgattcggatatgacatcgaaccaccattgatttggatggttggtttagtcaattagaattttcttttggattgaatttggttctcatggattctaaaagtcaataacttcgtttctcatccatctattttcatagtcttattaagtttgtattgttatctgttttgaaggtgaaggagaaactgaaaaattgaattta

SEQ ID NO: 68372 - DNA, 926 bp, Cucumis sativus
  Intron number 1 from transcript Cucsa.248460.2 (locus Cucs a.248460) derived from phytozome v7.0 (chr-ID scaffold0220 7; pos 294167 to 295092)
aagaatgtcggttttcctttaagcggtacacattatactttttctgaaaattattttggttgggctgttaatttttttatgcgaaatctgggattttttagtgtgtcagttacttcaagtctgcaattgagggaacgaggatctggtggcaataaatcttaaggcttcagttcgtctatatttctccttttgggtcgtccataatttgatgtttataattagatgatgaaaccaattgtttgtatatgctatacctttctggcatttctaattcattctttctttgcttgttttatagaatcataatatgatatttgtaatctgtcaaaggtatacgttcataccattttttatttcttatatacgtttcacttttgtctattactgtaatggttgtattttttcgcccccattattgatttcttggtgctttactgggattctttgcttcgaaacttcaatcattggtgttgaattgccaatggaagtaattgtcctgcactatgtactatatttttgcctgtgttttccccggaatctgaatgaaaccagagctcttaataatactttagatatctttgaagtttctcacagaggaagctaaacccatttcagggtttcacttattgtatctgctaatagttgtggctggatttgaaatttctccatttgccttgtttcactcatgaaaactctaagcatagaaatctcagctattggtggtgttgctcttgatgtttagtaagatcttcaatcttatttttcctgttctctattgtttcacatcatctgatttttggctttctattcaatgtatgacaactgtcattatatttgaagcttgagaaaattggaggttgtttttgattcaattttgctatgctttctcagaactagtgaaatcgtgtggtcgatcttctgtttga

SEQ ID NO: 68373 - DNA, 687 bp, Cucumis sativus; identical to SEQ ID NO: 64194
  Intron number 1 from transcript Cucsa.289160.4 (locus Cucs a.289160) derived from phytozome v7.0 (chr-ID scaffold0269 8; pos 647615 to 648301 reverse strand)

SEQ ID NO: 68374 - DNA, 354 bp, Cucumis sativus
  Intron number 1 from transcript Cucsa.286590.1 (locus Cucs a.286590) derived from phytozome v7.0 (chr-ID scaffold0265 3; pos 2622262 to 2622615 reverse strand)
gccgccttatcgtcgatttcataggtacccatttcccctctccccttccacatttcattttgttacttcattctattttctagtactccgataaaatgtagctatcactccttgggacaagacaagagagtagagttgtgatcttcaaataaggaagtttaatgcgttaagtgaaaaaagtcgatgtttattagtacttagtagtagtagtagggtagagtatgtaatcaaccaacaaagaaaaatacatcaaagaaactccctaatttctttactgctctccctcaatttctcatgtgtttgattgaattaatttcagcggaaagctttgggttgccacatttaagcgcatat

SEQ ID NO: 68375 - DNA, 870 bp, Cucumis sativus
  Intron number 1 from transcript Cucsa.254900.2 (locus Cucs a.254900) derived from phytozome v7.0 (chr-ID scaffold0222 9; pos 3094731 to 3095600 reverse strand)
tcggatctgtacccgttttctggttctctgtaattgtaagatgattggatttctatgcgttttttttttttccttttcatttttcatttgtggcggtctctgattatttttcttctgccgtctgattcttgattcgaccctctgtttggattcgggattgtgatcgcctggtgatttgtgatacgaatttcttatttttgtgctgattaatcgaattaaagtcttttgttgtgtgtgtgtgtgtgtgtgtggtcagcttgtgaacagagattcggatttggcttaatctaaatctcctagcataatcgggtggatcctgtgtttattccttttggaaccaaccattttgctatctttgttagagttttcgttttcgttttcttaagagttaacagtatttattcgaagtgggatcttcaaatttatgacatggaatccttataagtgctgctaccaatatattccgctaatgttatagggcgatatgaagcaaatgttttctttctatctttgcttttgttttacccttcaagtgatggttggaattatggctctaaatttcccagtctcaagcatttttcatcatgcggatatgttttttttttatttaaacaactgcggttgggtgtttgaatctttgaccttaggacggatcatactttagcttggcaccatgtggtacgtgggtgagttcatacagtttaatggagttgcatattttgtcagatagtctaagaaagcaaatttggtgaatcaaatgttctttgcattgttgttcttaacattgtttcggattaaaaaaaaatccagtttcttataagatgtaaattgataaatgttggtttacttgaatgttatcagatctaggaa

SEQ ID NO: 68376 - DNA, 367 bp, Cucumis sativus
  Intron number 2 from transcript Cucsa.387960.1 (locus Cucs a.387960) derived from phytozome v7.0 (chr-ID scaffold0396 7; pos 387401 to 387767 reverse strand)
attgttgggaaaaccttgaaggcatgtttcttttttatcgagcaaaagataactttgccctaatactttgttttcactgtatcaatgttttgatctgtttcctaaaagaaaaaggtttaaatttcttgttctagattcagttggcccatccatttgttttaaacttcgttactggatactgacactgatttattttagttttcttcaatatctggtaaccaagatatctggatttgatatgtgatatattgaccagatattgaatgtacttcttaggaaaacctataatgttttttattaatcaatggattgatttattgctgtttttgcaggtgaattactttacactttcaccattctaacaact

SEQ ID NO: 68377 - DNA, 718 bp, Cucumis sativus
  Intron number 1 from transcript Cucsa.219820.1 (locus Cucs a.219820) derived from phytozome v7.0 (chr-ID scaffold0165 8; pos 1430272 to 1430989)
cggtaaattgtgattctatcctttttggcaggcttgatttttgtttttgtttttttttcccctcggtacgaacgagttgtttgcggattttacttttgttccctctttgaatgtagcgttaggagaggactaggagatcgtgtgaccttttctttgctttcttgaaacttatatgtctgattataagtgattctgttgcttttgtggcgcctttagaaatttaatggtaaagtggtttttgggtatctcccatttggagttatgaaacttgcaagacagtggaggtgtttatgtacttgcttataactggagtttcagttccgtgtctttaccttttttctgtttattaatcccctttttcacctttgcgattcaatggctgtggagaagaaattctttttgcaatgtttgatttattatttatcttttccgtttgtatccgtgtttagtgtttatgtgtattaattaggtcgtgtttgtttttgttatctatttggtttttggtttttaatttttgacaactaagcctatacactttcttttacctctactttttatcaatgttttcaaaatcaggccaaattatcgagtgttgaatgatttcattaaattatagatcaaagtcacgtcttttaaaattttagttaatggaaatgatttctcaattgaattcttgtgaacaggagcaaacacattggacagacgagaaacatagatt

SEQ ID NO: 68378 - DNA, 743 bp, Cucumis sativus
  Intron number 1 from transcript Cucsa.272400.1 (locus Cucs a.272400) derived from phytozome v7.0 (chr-ID scaffold0250 0; pos 962833 to 963575)
ttgcaagtttttttataaagaaaatcagttgtgtgtttgatctgtcagttctgagcagagattagaaataccaaacttgcattcaagggtgtaatgatcatctctttttctttattaaataaagaatcaaagataaagatggaatttttttattttgatgggggaatgtaaggctagtatatgatgtaataaaagaaataaagtgaagttggactggtcaaaggcaatgattttgaaaattgagcagttccatccccactcccacacattgctttgagaagaggggattcctgatcctgaatcttcaacacacagtttcttctcgtaatttggtattttgtgtttttctttgggaaaagcagattagattgaatcgaggttcgttgttgtggaagaccgatcattccctcacttttcttcttctaaagcatttgtatataaaccccttctcccttctccctaattttcaacttcaactctcctcaccattttctttcttttccattacttctatctgactcctccaactctacttgtttaccttctgcattattcttttggtttggttgtcttgttgtatcacacactattccacatggaggtactgattatatttaactgcatgcaccaatccttagtaagaggaatatatatatatatatatatatatatctatatatctaatatatttgttattggtttgttttgcatacattgttcagacagttgagttgaaagtagag

SEQ ID NO: 68379 - DNA, 397 bp, Cucumis sativus
  Intron number 1 from transcript Cucsa.266020.1 (locus Cucs a.266020) derived from phytozome v7.0 (chr-ID scaffold0235 2; pos 442387 to 442783 reverse strand)
ctccggttagtcttcttgtcttgttattattatttttttgttaatttgagtttgtttttccctttttagttcgtgttattcagttgaattttgggtatacgcttgggaaatttggaagagtttttaactctaatttttgttttaatcgggatctaggttttttaatgtctttgttccgtgttttgaaaatctacacagaagttaattgaactgggtgttgcatttttgctatcgagtgttgtgtccaatgatagagtggtacttgggttctatggcagcattattttctctggagatattcttgctatcgtttgtcttcttcttcgattttttttttttaaaatttaacaatttccattaatggcagaggaatctgaaacagacagcgaagaatcag

SEQ ID NO: 68380 - DNA, 900 bp, Cucumis sativus
  Intron number 1 from transcript Cucsa.308230.3 (locus Cucs a.308230) derived from phytozome v7.0 (chr-ID scaffold0297 8; pos 406381 to 407280 reverse strand)
tgcgcctatctgtatcaagttaaacttgcattcaggtaatgattatttttattcattgtaagatttttcttcctttttttgggaaaatggaatagaatagaggccgggatttgatttcgttgttgttggtattgttgttgttgttgttgttgttgttcatgattgagattgaagaagatgatgaggaagaggatgaggatgaggatgatgatgctattttgatttgatgttctgtaaataatatttgatcggaattcgtaggccccatgtttcccctgctaccgccaaaatcaaaagactcgttaattttccaaccctactgttgaattttggtggttttaattttctctcaagatccggtccaccgtctccctcttccctctatttttctatagacgtgttctaatcctttttttcgggaggtaatatttgtggcctttaagagaaattttcgcttggaaacttcatgcataggtattgaaatgatagcttgtttcttgtggattgtctttatatgttctgctcttgaatctgctgtggcgggaatgctataatcgtttcactagaaaatttcggtacatgattatccttctttggttgatgttttccagttttgtgatattgggtgtggcataaatttcgttattgatctttcttcagctagatttcctaaatcttttgtttttatcggtgaattgttttttctttttccttttaggtagtaatttgatgaagtattgctatgaataatttagttgaaagtcaattagacataccataatttatattgtttttctttagcagtggaggtctattatatgaagttttcttaatttcattttggtttgaaaattcttcagttcttctctcccggtgaccagataaagagaaagaagacat

SEQ ID NO: 68381 - DNA, 764 bp, Cucumis sativus
  Intron number 1 from transcript Cucsa.253880.1 (locus Cucs a.253880) derived from phytozome v7.0 (chr-ID scaffold0222 9; pos 2358627 to 2359390 reverse strand)
gggtttgctttccggccactctccggttgttctttgtaagttttttgggttttcattatctgggtttgtggctgcttgtggattcagggtaatgtggccatgttttatagtccactgccttttcttcttcttcttttgacatgggattatttctgattctgtttgtctattgttactttgtgttttttctggtttgttcttgtgatcatcatttcttatgcttggaagtttgaacatgaatcaattcaacaactaagttgacagtgttcgactctctcatctcgttgaccctgatgatatatcttgccttttgagtgatcactttcaaacttggaagttaatatgaatcaattgaacagcttacttgagacttgacacttgagaatgttcaactctttcatctcattgaccctggtgatatatcttggctttggagtgatgaactatgagagcttggaggatgaactagaaataatgttttgttttttgagatggatatttagtttgagtaattaattttttttttttttgtagacatagtacattaactttggtcgcgaggaaatagtggtcttgttgacaagcatttcttaaacaatgtagtttctgacttagtaatagtattttaatctataactttggaatagctgattttaacttttcctttgtcttctttttattatatatcactttagagtgcgttagattcttcagttccgagatttgatctttgagcgctctctttctagcagtagaggcaaaca

SEQ ID NO: 68382 - DNA, 759 bp, Cucumis sativus
  Intron number 2 from transcript Cucsa.201370.1 (locus Cucs a.201370) derived from phytozome v7.0 (chr-ID scaffold0137 4; pos 263604 to 264362)
aggtatgttcgctttctttactatggctttgcgttctgtttattttttgtgcctcgtgattcttttgacattggaaacaactttatgtggatattttagcgggtaagaaaagagtcgatttcgtgtttttaactgctttcgagaagaacttttaaatgttgcttaagataaaaggattattctgtacctgaaattatattttattattgaagacgtagattgttcatacgaataaaggagaaaagggagctttctgggaataattatcttaatgcataaggattaatctctcgtttttcttctaacagccgcatgggaaaaagaaagattttccttttactctccttttcgtttaattacttcctgtcataacggtgagttagaagatttttcatttttccctagggctaacgtgttggcacttgagaccatgtttgtttattagcactgactgatatggagtaacgtttgtggtgaaattcacttagacatggtggagatacttccaacttcttgacaatgttggattaaacggaagggaatatgtggtatacttgagattcctcattcctacgtgtttgttttcttgtgcattattttggtaacgtgctcaaatgagctatttttgcatgttatgcattccagtagtgaatatttcgagtatggtgtatccagttcctactgaaccggtatccctttttctaatgctgcaccaaattggtttatgacttctttttttacctttttcacaaaggattt

SEQ ID NO: 68383 - DNA, 687 bp, Cucumis sativus
  Intron number 2 from transcript Cucsa.292570.1 (locus Cucs a.292570) derived from phytozome v7.0 (chr-ID scaffold0277 9; pos 54283 to 54969)
catcgaaaaacccttttcgggttcccaaggttccgtttacctgaattttattttcgttaatatgttggaaccctgttcttagattattctgacgcgaatatctttattgtaattctttttaatcttcatctcacatgtctagaaccaaagtttctgtatagagtgaacttctattgacagggagattatgaagtcctttaatatggaggatgtggttgaattatgttcatataaatcaagcatgacatatttctctgtccttttatgtttttttcccctgagaaatcatatgacagaagagttgacaatttgaaggtttgggggaaatttagttgtccaacgcagacttttttttcctccttacacaatgatgcacggtgaaaattctactgtttacttgggcttgttaaacgtttgatttggatactctgttatttccgtgcttcccattaaaatttaatccctatcagaggttatgcattttcttttggtgcaatcttcttgagtttaaattttttgggatgctttggctgattttcattatgatatattcattgcttggtccctgaggtatggaggcatagtactttgatgatttgtacttataatacgttaggtttttctcttaataatttttttattcttttggcagatcacaacttatcttgagcagagattttacaagga

SEQ ID NO: 68384 - DNA, 873 bp, Cucumis sativus
  Intron number 1 from transcript Cucsa.259010.1 (locus Cucs a.259010) derived from phytozome v7.0 (chr-ID scaffold0222 9; pos 5713390 to 5714262)
gcatcactctccagttctttcaaatttcgtttcaggtaatttccatgcctggactttgatttcgtgtttctctttcttaacgccaacgtgtgagggcacgagagtggtttcagctggaattgatgccaatacggcactgtttattgattgcccatcagttttcattataatttggaaatgtttgttttcattctgatttcattatttgattgccttgtgttggaattcatcgtcataatttgttcttaatccgttattcaatcgtcgttgacgaactccataaattttcttcttcttctttctttttttttttttttaatttttaaatttttaattttgaattgtgggcttttttttaatttgtaaaaaaccatttgttcggttctgtaaaccggtttaatactacgaacccgactgggttatcgtctttgtttctgggaatcggaaaattatatcgatagttgacttggtagaattccgtcggataatttggatcttcggccgccgtgttgggagggcagttcaatcgaatcaatcagttcttctagctgtaattgcttttcacttggaagttgctgttcaattgttgacttatcaatgagttttgccatattctctcttactttttaatttttcttttcgggttttgcaaaaaagatcaatccacaaatcaaatttactggacacttgtccttcatcttatctaatggacccctgccgttattcacgttttgggttttgcctttttgcttgccttatcgagcagtttccagcccctttactgtcttatagattttgatgggtttgattttaagctaatctccgtcaatactccggtggtttttgttttgtaacagtttgtgaccgacgaga

SEQ ID NO: 68385 - DNA, 512 bp, Cucumis sativus
  Intron number 1 from transcript Cucsa.317340.1 (locus Cucs a.317340) derived from phytozome v7.0 (chr-ID scaffold0305 2; pos 25840 to 26351 reverse strand)
ctgccaggtgagccctttgaaaccctaagattttggctttttacgtgctctgcttggatactgcatgtttaattttctatgctcggtatctcaatgaattactgttaatgagtagtgtgattcttttaatgatatatatatagttcattttcttgcaacgttttgatccatgaagaggattttctgcagaactctttggttttttttttccttctcgcgagtttacaaactgaacgtgttggtatagaagggtcgatgttgatgcagatagtggatattataattaatcattataatctatgttttgatttaattacaattcctagttaatttcaatttattgatttggaccctttttctcgtacgaatatagattgattattttgttcaagctaccctatctcggttattaatcttgcgattctatagtaaaatgggctgtgtgcttagagttctaactgttcactttttgtgtaggttgttctactttttctttgagtcccgcaacagaa

SEQ ID NO: 68386 - DNA, 768 bp, Cucumis sativus
  Intron number 1 from transcript Cucsa.236980.1 (locus Cucs a.236980) derived from phytozome v7.0 (chr-ID scaffold0202 3; pos 63379 to 64146 reverse strand)
ctaagctcactaaggttaaattttttgcttctgacttctctgatttttatcgagaactaagaactccttatttcaaatctgtgtgctttctggacttggatatgttggttgcacacacttgaactattgattattcttttgctactttgcattccttatttcctacggttactagataaaaatgtaaggatgatgagctctcaattggtcctgatttagagaagattatgttcattattggattcaacaaagtatttcaatactcctttttcaagcaacgaagtttgaaaaagcccattctgctttagtcgagtttggacagtagatccctccttttccttgcaatggtttgatactgtcaattgggtcaaactgatttcatttaaaagcctcatataatcgaaattttattctcatgtgtacagtgtggatcaagcttgatttaacctaatagacctcctacagtagagatgtatgctatcataatctcaaaattttggcactgcatggtggaaattaacttttagatgttctttcccttgataagtactttttaagtctattatttagtgatttgaatataagtattcaaaccaacttatgtgtatctgtcagatgggtttctccgaaaagtgtgtttttatactcttttaagactccaatgttcttaatatttatcaccatttagtttttcaaacagtaatgagttataatatatgcttgcaatttagaacacttcattgaatgatcactctttcccgactcagg

SEQ ID NO: 68387 - DNA, 900 bp, Cucumis sativus
  Intron number 1 from transcript Cucsa.257410.2 (locus Cucs a.257410) derived from phytozome v7.0 (chr-ID scaffold0222 9; pos 4724344 to 4725243 reverse strand)
acggagcacaccacaacctctcttcttcttcctacgtaatctctctcttgatctctcttatctttcttcttcttcttctttgatttttcctctacttttctgtgttattgtttccatcggagtctttcgttttctggatttgttggtaagagggttttcctttatttgtgatatatgtttgattccggtttctgtttgttatgtttacatcattcattatattcatgttatcttgttcttgttcttcattgtgatcatttttctgatgaatatcatttattggatgcttttttgttcctttcttctctttttcccgcattttttgtattgctaaaaaacgattgaatttgaatgtatggttattttttctaaagataatttcatctgtgcgagtttgtcggtgttcttcatgtcttcttgattttcaagagttgcactgtttagagttgttgatctattgttctattacgaacttttaatgtattgatgttgaattaataggtggatatgattttactggataaataagcttgaagtaatggctttagctatcgatttcgcatcatttgcccacaactgtaaatttcgcttcgagttcatcttatttgattctgtttaatttttagtccgtctcggattttctttggcatcaataagatcggtctaacatgcaatttaaacctcaatcgataaatgattctgaagacacaaataacttgcttggcatatcatcatcctcttcagttattcattgatatttatgcccttaaattttctgttacccgtcctctacaaaatgtttcccaatcttctaaaaattatatgcctgatacagcattcttttgattccattatctattcatagcttggtttagagctcttcgaaacttgaagaaaaat

SEQ ID NO: 68388 - DNA, 859 bp, Cucumis sativus
  Intron number 2 from transcript Cucsa.358560.1 (locus Cucs a.358560) derived from phytozome v7.0 (chr-ID scaffold0358 6; pos 194114 to 194972)
acaattgtatgaacatctcccatattgacaccattgatacccctagtttgagtcttcctcatacttactgtgtcccaactgtatgatcttggattaaccgtgtctttttctcctaatggttgtcaggttcaggatccgcagacgagacagatgattgggatatgtcacaaagtgggaagattatttgagctcctattactccagctttctcctccttcatccatctctgctcctgtcactgactttgatacatattagtggcaccttcgtcttggtcatgcttcttccgaaaaactttgttatttaatttttgctaccaatttgaataacgtagtaagtttgttccttttaattatttaaattgcaaacttgctaagcaacctgctttgtctttttctcactccacttctatatgcgataaacattttgatttaattcattatgatatttgggatcctgcccccactaccactgtccatgaaactatcgctgctatgttatttttattgatggtttttctcgatttacatggttttactttcttaaacattgctctgaattatctcacacttatattgagtttgctaccatgattcacactcaattctcttgtcctattaaaatcctctccactgataatgccttggagtataaagacttcaccctcctttcttttctctcttagtagggcactcttgttctgcgctcctgtccccacacttctcaacataatgggtgtgtttagcgcaaacatcgtcacatccttcactcagtacgtgcgctccttctctctacctcttctcctaaaaaattttggggtgaagcaaccatcaaccgacttccttcctctgttcttcag

SEQ ID NO: 68389 - DNA, 233 bp, Cucumis sativus
  Intron number 1 from transcript Cucsa.399180.1 (locus Cucs a.399180) derived from phytozome v7.0 (chr-ID scaffold0418 9; pos 5220 to 5452 reverse strand)
acttttttgcatattgcggagctcttgcttttcaggtttggcatttttaaaactttcttctttttttattttaaacttaaaaaattttactagaaagaggttcttatcatttgacattaagaaaaatgttgagacacatttctatcgtccctactttggtaagtagttttgatcttatttgtttttctattttaattttagggtgatccaatcgattgggtgagtacacatag

SEQ ID NO: 68390 - DNA, 455 bp, Cucumis sativus
  Intron number 3 from transcript Cucsa.308540.2 (locus Cucs a.308540) derived from phytozome v7.0 (chr-ID scaffold0297 8; pos 612146 to 612600 reverse strand)
tgccacacaagctagttgttcgagccggactagctgtaagttcctttcaaagccttttgatgtttgttccattttttttgtgttgccttaaacctttatattgatcttctttaggtaggacttgaggttatgataacttctacttctctgagagagtgattttctttggatactgtactagagcttctgtctacaatggaaattagggcttgtgtttcattgccttcaggaacattcccaacttgcagtttgaacataggagacagtagacatgttgagtttatgttactttgatggattagtttattgaataaattacattatctgttgagtgtttaattcgaatatgtccaaacaaaaaatctttccttggttgagtgatacaaattctgatagttttgattttgtacatcttctcatgtatctcaatcgttcgcctttgaatcatccagaag

SEQ ID NO: 68391 - DNA, 755 bp, Cucumis sativus
  Intron number 2 from transcript Cucsa.257950.1 (locus Cucs a.257950) derived from phytozome v7.0 (chr-ID scaffold0222 9; pos 5100708 to 5101462 reverse strand)
aaaaccttcgacacagcacttgaaaagaatctttcgtatttaactgtgcggttttttatttttattatttaatattttcaaaaagcaaaatataatcaaattaattaatcactattctatttaaatgaaaacatattaatttaacctctaaaatgtatcgatttaattcttatattttaatattttcactgaatcttaatctctatcgtgcaaaaatatgatttaattatttaagtgattgagagttcataaaatctaaatactaataaaaaaatgtctttaaaatcttttaattttacttttaaattcttttctttttagttcgtgcgatattatgtaaattttattattctattacgttatattagaaaatagttatatattatattatgaaataattgtgtccacaaaactacaatctttatagggagtcttatccaagcaaaaaaagaacaaatttgggaaaatccatttccatttccatttgcattttatgtactttggtagaagcggccttacccaagtgaagaagaagaatgggagaagaaactgaaggcgatagcaatagcaacgaccttcatcaagttttggttttaggttctccgtgggtattacccgctctccaatctcaattctcaaaccgattccatttcctcctaccatctctttccgatctccctctcctccaattcctttcttcttatgcccaatccacacaagccttgctcatccccggcggctgctttctggtcacc

SEQ ID NO: 68392 - DNA, 628 bp, Cucumis sativus
  Intron number 1 from transcript Cucsa.201110.2 (locus Cucs a.201110) derived from phytozome v7.0 (chr-ID scaffold0137 4; pos 52288 to 52915 reverse strand)
ctttcttggattcttcaccaaaattattctgattggtaacttcaactttctttcacacttctcttcagaaatttgtttatttgtacttcaaattcttcgtgtaacttgtttgttttacctgtttgatttgtgttctatgcacttggtatttgactatccctaaagttgaggagatttgggaacttcatctcgttatttgattgtaggtagccgaggggtttcctcttaacctattttctcaattatgttttctgaatcgagatgagcatacgggtcaatgggtgcttgcaattccagcctatggctgcttctctaataaatactggaagttactactcaacttcatacaatgtctttccctcttctttcttccttcgccctttgcatgaattcgtttgaaagtttggttgaacagcctaatttcgttcttcaagatgaaattttggcctctgtttaaactttttctaatacattctcgctatctgcggtcatcctcccaaaacggttataagatttgctgagattatgaaattgacgtaaggaaattgggatcgtttaaggttaggtcaatttttttgttgaagctctgttaaattaagggtattcatttcatttcaggcagcatttt

SEQ ID NO: 68393 - DNA, 701 bp, Cucumis sativus
  Intron number 1 from transcript Cucsa.311260.1 (locus Cucs a.311260) derived from phytozome v7.0 (chr-ID scaffold0299 5; pos 927119 to 927819 reverse strand)
aatctcatccaacgaagttccgactcatatctcaggttggtgatgatttttctcgctgttttttttttctttttgatgatgttaagcatgagtgtacggcatgcgtgtaattggaagctgggattgtgaggattatcattttttatcaattgcatgtttgaatttgatgttatttgttagggtgttatcctgtgattctcaaaatctctgttgtcgctgacagaagtgattcttgtttgttgaatttgatactttctaggtagtttcatagttttctgaaatgttaatgtatgaagtcattacgtgaaaagtgatgagcggtgcttaatatagttgaaattggagaaaacaaggtggcttaacttatcgcgtaatggatggtacagtgttattattccttccagtttctttatttgttcgccgcttagaggattgagcttctgcttctgactctgagtctgtcggatgagcaactaaagatgattttgggtcgtttgatagttaaactaagaattaccatcgaaatggacgacagttgcaaagatcattttctaagtagcatgcaggctgcaactcccgacagttgtcaggattcagttaaattcatttattacaggatttcatcatgaagtttctatcaccattctaagacagtgcgaactaaagcaattgttgtcttcttcttgacccgattctctcag

SEQ ID NO: 68394 - DNA, 848 bp, Cucumis sativus
  Intron number 2 from transcript Cucsa.285860.1 (locus Cucs a.285860) derived from phytozome v7.0 (chr-ID scaffold0265 3; pos 2091214 to 2092061 reverse strand)
cttctccttcgagttttcctcttgggtttaactgggttcgtcttcttactctactctttctctctatatctttactccaagtagcttaaggaaagataaattatttaagagataggtagagtaatgtcgtaattcacgatgttctgtgatatcgttggatgtatgagagatgtattcagggttattgcacccatttgttttgcaactcagcgtgatggttaattgttggagtattttgattttgttatctgggtacttgacaaagaattaaatcttgttgtttggctttaagtttagaaacctcgttatatgtagaccttctaataagttattctctctgtgttcattggtgtagcaaacatattggcagtgaattgtgtaattttgttttttaccaatttcctttctgtttatgtttttcttgttgattttataacaacggttcaacatcactattcattcttcttatttttaaaatttttcattttttttttctaacttttgtcgtgtggttggagttagactgaaaaaaaaaacaataaaaataataataaacaagtggaatttatgatcaacgtaagtattactcatcaaaaaataataatcttaattagtttagttgggcttgatccttttcctgtttgacatagacaatggcccggatcattaaattgtatttgacttttaagctcaatacaaaattttacctattttaataatttggagaggtgaaattttggtataaatcagtttatattacacaccaatgcattgtaatatttactgatatgacatgaagaggttaaaaaaaatgtatattgaaattgatcttttggactttgtaggat

SEQ ID NO: 68395 - DNA, 457 bp, Cucumis sativus
  Intron number 2 from transcript Cucsa.244560.3 (locus Cucs a.244560) derived from phytozome v7.0 (chr-ID scaffold0213 5; pos 425226 to 425682 reverse strand)
tgccttcaggtatttgtatcgttgtcttgttgctgttttttcatttcattttcgtttgagtggtgattttttgcagtttgatttattatttctgtaaccctctattaggttcgggtaaacttttcatcctacgaattatttgcctaacgaacttcaggaatgcgatgttactgaacgcattgcttgtaattgtttcttgaagacttaagttaatgtaatttcattgtaagtgtgagtgaaaatacttctgtacgcatgtaatttccgttctgttcaaaatgctctgtgagaaggtatatgataatacatatacagagtgggggcttttggtaatgttacatctctaaattttctacttgtaattgaaggataaattgaactaccatattgttttcttttacccgcttacctctttcctctaggagaaacttcatagacatccggaatatcctccaag

SEQ ID NO: 68396 - DNA, 354 bp, Cucumis sativus
  Intron number 1 from transcript Cucsa.284200.1 (locus Cucs a.284200) derived from phytozome v7.0 (chr-ID scaffold0265 3; pos 1048638 to 1048991 reverse strand)
agacctgctgatcaccacaccgtcactcttctccggtttgttccattctgatccttaactctctcatgggttttatcaattctactccaaactgcattcttttgtctgattttggaaactaccgtgtttcttccttgcaacttttcaactttaatcaaacccttttcgaattttgttcttgactttatgaaatgggtttgtaattcgtgtatcgcttgttgaaaacaaaatcttttgttttgtttctttcttgggatttttgtttcttctttttccgaaatgcccgggctataataacaggttctcatcttgttttcttttgtcttgattgcagataaaaagtgaaatttataa

SEQ ID NO: 68397 - DNA, 753 bp, Cucumis sativus
  Intron number 4 from transcript Cucsa.281550.1 (locus Cucs a.281550) derived from phytozome v7.0 (chr-ID scaffold0263 9; pos 249490 to 250242 reverse strand)
ctgcaggtatggccaattgataatcttaccacaaaacaaagtttcttgggcctatttgatgaatgactttttcatattttggatttcatttatagaactgttgttagaaaatattgtgctaaaaacagaaatgctaattttcttcaacataagtagactaaaaagaaaggaagaaacaagaaaccaagtggccagatatctctttctaaaactttagccaaaatgccctttgatccacaatggagaaacaatgagagattgttgttttctaaatagttcataaatctatgatcttgggcttaaaaggaacgaacccaagtaatagtagtcacctacttaggatttaatgtcttacaaaatatctcgacaaccaaaggtagtagagtcaggtaatcgcccatcagagtagtcagagtctgcataagctgattcaaacactggaaataaagaagagctaagattcttgttaagttgaaaaggactcttcacaaatgtgtggtttagtattagacgtgccaacaacttctaatgaaaaagcagttggttacgcggttcaaagaaataatcgttgaaacaaatgttaaggtcgtgaagaacacatttgatttgatgccatacaattcatttgttcacttgtatgttaaaaaacaaatcacagatttggtctttctaaagtattttagttgtggggtcttgaaaatagacaaaacccattgattgttacttgtttgggtccacagggaagtgtgacac

SEQ ID NO: 68398 - DNA, 888 bp, Cucumis sativus
  Intron number 1 from transcript Cucsa.311170.1 (locus Cucs a.311170) derived from phytozome v7.0 (chr-ID scaffold0299 5; pos 835169 to 836056 reverse strand)
tgtcaaactcaaatctccttctaattctacccaaagtactttctttaaaccttttcttcttcttcttcttcttctcttttcatattccaactttgatttacttttcttcagttttgtaaatgtttggtttttggaaatgctctttgttttcttaccatttgtgtatacacaatggtcatgagaatgataagatttgaaacggcttttcggaaactatttgttttttatattagcttaaaaacacttctttcatccaaatgaaatcagttgtttaaaaactaagaaaagatggtgtctaacgactttattttgtttttaaattttgactaagaattcaacttttatatatttaaatttattcatggaattatcgtttagttcattcatgtgggcaaagatttaggcctttcacattttggacaattgaacacaaccctctcttttgttcaacttggtctcgagtcatttagaaatttcaatttcatctttctatagtttgatcatttttagttgaagtttttattgtaagttaatagtaaccggtgaaatgatgataaaatctaaaaaaaatacagtatcgagtctttggtcatttaacatgattttactgaaaatttttagattttgccaatgttaaaaaattatgttcatagacaacttttttaatgtttgagaatccctcaagaaattctcttacttgctaatggcgacttatttagagaatatatcactttgaacttgaaaaaatccatattcatttttgtgcattttgtagcaaaatcttacttgattttggtgcatagagtactatgcaaaacaacaatgtagttcataagacaaaatgatacaaagtttcatatgaagaaagctctttctttgggtgcagag

SEQ ID NO: 68399 - DNA, 371 bp, Cucumis sativus
  Intron number 3 from transcript Cucsa.318750.5 (locus Cucs a.318750) derived from phytozome v7.0 (chr-ID scaffold0307 6; pos 265218 to 265588 reverse strand)
aagcttttggatcaatcggtgatttaagttgcaaggttaatggtaatgagattgccttgggtccttgatggaatagcatgcttttgattccatgtgtattgcttctctttagtgaattaaagagggctttttgaagttgtatttgtttctttgaagttgcatattaatctttgcatgaggtcatttatttcttcaatagtacgagtataactgctgccttttgttttctcttccaagtttaccataaaaaatgacagtactctgcaatttgaacttaggaggtgaatgtcaataataagatgtgcattattcttctaatttagtcattgccttcaggggattgacgaacctctccaactaaacaaaaaagg

SEQ ID NO: 68400 - DNA, 688 bp, Cucumis sativus
  Intron number 1 from transcript Cucsa.318750.5 (locus Cucs a.318750) derived from phytozome v7.0 (chr-ID scaffold0307 6; pos 265631 to 266318 reverse strand)
attttgtgtctatccagaaattctgagctctcttttattttttgccaaatgcttgtgattgttttttcaaatttgttgaatggtatgcttattcaactgtgttttattttcaaggagtgcttaaacagtccaaggaaatcattttgaagaaagtaaagaatgcgtctgaatttcaggtacatgcaactataagaaagattcaaacctatgggttcagtaagtgacaaagttttctgcattgaaccaagtgatccctaatactttgaggccctctttttgaaatatgaatgtagatttgtgtatggtataattgtgtttttatcagtcctttatctttgagtatttctttcaatgttctttccttttattagttacctcagtggaaattgttgaaattcctcttgtattatatttacacacttgggtcttttattatttgtttcttttttgggagaaattatgttatagggagtttctaagtcttagttgttgttagttatatataaataaatttacctttacccactaacttaaacttttgggttaattagtaatttaagatggcactagacaggtggtccaagaaggttttgtattcgagtccttgcaatgttaattttctcctcaattaaaattgatttccacttgttgagcctttcaaatatttcaagccgccaagtgaggggga

SEQ ID NO: 68401 - DNA, 733 bp, Cucumis sativus
  Intron number 1 from transcript Cucsa.394800.1 (locus Cucs a.394800) derived from phytozome v7.0 (chr-ID scaffold0410 0; pos 577735 to 578467)
agcgcgtgcttgaaagcaatcctaggcttacgaaagtaagtgtaacttactccagttttgccctgtcataattagctgtctgtcttgtttgattacttaattttgtctatatttgtttcgttcattttcattgggttaaacagtttattcttctttataggcacttgaaaatgttaccttgttgacctccttggtgcttttgaagacacacacaaacaagcttgatgtttttaatcatacgatgcctagagagccttgtgcatacattttgctttctgttatctaaccttccttcgtaaatttgaacgttgtccgagttcgtatctatatattttacaaacacacaatacataattttattgatatgttgaacagtaatacaaatattgggatacatttattactattagaattggaagtactaatgctacgttactgtagttaggatgtcttatgctaataaccacaaagtagctcattcctgagaagcatagacgtatgcccatcaactttccgtttaaaaaaaaaattagaacgtggatattattgggacatttttgacggagtgtttcttgacgtgggtttgaccctaacacctgtgtccagcaaggacactattttgtgcatagcgtgaatatgcaatttccttcctaacaatacatcatacttatcacttactaacttggcatgttactaaatatgtgtccactgccatgcagttgtctgttcctgg

SEQ ID NO: 68402 - DNA, 916 bp, Cucumis sativus
  Intron number 1 from transcript Cucsa.339650.1 (locus Cucs a.339650) derived from phytozome v7.0 (chr-ID scaffold0335 6; pos 2238270 to 2239185 reverse strand)
ttgctggtacgagatttttccttctaatttgttgttgaagaaatgaaatgcaccccatttttccaaatggctagttattgattctgagaaaatttgtttattaatgcatggttaaaaaacactcaatctgttctgttttctttgtgtttttgttgcatttatcattgggggttcttaattctcttcatatggtattctgtggaacacccagattttgaatttaacatccgataaggtcatcagtattttgtttttttcaattcttgtggaagttagttcataaatgaaatggggtttttgagtttttacttcttgaggatagatttgccttgaacctgtttgagagtatgacaaaatgagaacaaactcttttctgctacatcaatattttttctcaactagagaaaaagagagagtattagtagatggaaaatgatattgtttggaattgaatagaagtagcagagttctgtttggctttctttctttcgttttttccttttttggagctatggcctctttgtagatattatcctcaacagaaccgtgattcacgagattggcttgagcagacagttacttgcattaactatcacagtgttctttttttggaacttttgtgtgtctccattaattgttgatatgcaccccttttgaagacacagttgcacatgaaattgaaaatggaagcaaccaaaaggagttaattaaaaatgaggattttgttttgttacttactggctactagtttaggttttgattttattgggatatcttgccttcttcatgatgagttttggggcatttgttttaattattcattaaagtctattttgactagctttctctaagagattaaatgttaattaatttttccccagttaaacttcttgactggggagaagagggtcatagg

SEQ ID NO: 68403 - DNA, 782 bp, Cucumis sativus
  Intron number 1 from transcript Cucsa.258810.1 (locus Cucs a.258810) derived from phytozome v7.0 (chr-ID scaffold0222 9; pos 5593442 to 5594223 reverse strand)
tggagcgcagcaagagcttcgttaaagctttgcaggttttttttctcgaacttcttcttcctcttctttgatttttgtttcggatctgattctttttctttttttcgtttgcgtgtttggcttgtggactttatgctacttgttctttgtttttcttgatttgctgcttgtggtgtgttgactttttttgaatttggatgctatactcgttgagttgaggtgactgatttttcggaatgaaaggctgtgaagatctttgaatgatttaacgaattcgtttaaattttaatttggatgctctactttgatggggtaactttatttcgaattggtttaacggtgaaatgcactttagatttgtcgtgtttaggcatgatacggtggaaattttttgagatgtatgtcgacactgcgcgtgaggagaatttagcttcattcgatcgtttccgaatgagtctgtggtccgcgtactgtattttggtgcacctgccaagtctgtaccgagattggctggaagtatctaataattttatagaatctttagttctctgtcaggatgatctggtttgagagagagagagagagagagatgattacttctactgtagatctttgctttttccaatttccgtgctgaaatttgttgtctgcgtatatttccattccattttttatttttcctagtttcatcttttatagaagtatgtggatcccattgttttgacctatataatatctttcactcaggaattgaaaaatttgaggcctcagctgtactcggc

SEQ ID NO: 68404 - DNA, 530 bp, Cucumis sativus
  Intron number 1 from transcript Cucsa.258240.1 (locus Cucs a.258240) derived from phytozome v7.0 (chr-ID scaffold0222 9; pos 5271698 to 5272227)
aaagtcaagtactgccaattttcttgattccttaaaccctaatatttgttgtttctcaacgtcttggggttttgctgttcttgaaagttaggaactatggtggtttcgtgttgtggattcatggtcattttacatttgatgtgtatatcactacattgaatcgtgggaaatgatgtgtgtttatgactatcctaggccatttgttgcaagatttgatcttagagggttttatgaaattacatgacatgaagtatagagccgcgtatgtgacgtgtttctgatctcaggaaaacgactgagcctggagggcttttttccttgggggtggggtggataatgtcgtgaatttaaattcttcgaaacacagttttggattgaattgtatatgtatatcttattcaagccgttgcttcattggcgagtttaatgcattattgtcattttttattttttcatattccatttactggctttggagaggggcgttaagttgaatgagtaacatgtactggtgtttggttcacagctat

SEQ ID NO: 68405 - DNA, 876 bp, Cucumis sativus
  Intron number 1 from transcript Cucsa.375420.1 (locus Cucs a.375420) derived from phytozome v7.0 (chr-ID scaffold0374 6; pos 460986 to 461861)
ggcaaacaggtttcttcttcctcttcttcgtcgttactttgtctttgttttttccattgacttggttcttcctttctttattctggttttctcccagcttttgactggaaactcatcctctcatgattttgattttgggttttgggttttgggttgtcctgtatctgtttggatgtttttgtgatttctttcttttcttctttttgtgttttgatggtttttaagacgtagacttcacacgatctttataagatatatagattgctgtctttatacaaattcacatcgaaaacttagtcaaattttgtgtaggagcgaagtttggttggttgttttttgttctaaccattttttaagttctccaatatcttaacagttcagtgattgtttaacaaactataaaatactgagttttgagtctaaatctttattaatacttcatcttcttggatactttgctcctttttctaggaaaacgatttggttttcgaaaaattgtatttgttttctaaaaacagtttttgaatttgagtttaaatgttttgaaaacatttgttagatatagatatatggcaaaacaaagaaatccataagttaaaatacttctaaacaagattaaagtatttcaagactgttaaatatattaaaattgattgagtttttttagaaatataaatcgagttcgagtaatttcttcaccaattagttctaacgctcaatttaaaatgtgggcaaagaaattaaaatcaactcagctctctcacaatgtatcgtatttgcaataatgtatttcactaatttggtggactgactcaattatactgtgtttttttatgtaaagaaattgaagactcgggtagtgaagcaaaatataaa

SEQ ID NO: 68406 - DNA, 621 bp, Cucumis sativus
  Intron number 1 from transcript Cucsa.365850.1 (locus Cucs a.365850) derived from phytozome v7.0 (chr-ID scaffold0361 1; pos 3738029 to 3738649 reverse strand)
ccctcccctgcaatttgttagttcttaagtctttcttaaattttctttttctttttttctaatttttttgtcttcttggaatttattttatttttgttctttacatttgttttaaaattttcattttcatccattaagcttctttattttaaatgcttttacacgtctaaaacagatgactttatagattaattttataaaagctacggatgattttagaaaataaactaaaaggaatatagcagatgattttataatatttattttttaaagctcaaagttaaaatgggtaacatttatataaattagataaaatagaaattatacagtccaataaatttgagttcaactttccactttaatcttatctctaaactaaattataaacatgaccttaagtcaaaaggtcaaaatacatatgattaatcaaagattaggggttgctatcaaccttcctaaaaggaattaaaacatttaaaatgaaaatgaccactttcaaatttgatcatatattatttttatcaaccaaatttgactatcttttttcttgtcaaccaaaggtgaattttgtaattcttgtgtgcagttctaagagaagaaggaggttcaagttcaagtaac

SEQ ID NO: 68407 - DNA, 1008 bp, Cucumis sativus
  Intron number 1 from transcript Cucsa.363890.2 (locus Cucs a.363890) derived from phytozome v7.0 (chr-ID scaffold0361 1; pos 1468617 to 1469624 reverse strand)
gatccctcttccaatttctgtttgtttcgaagaaagtgagtccgcattttttcttataaattgtttgataattgatcgttctaatcgatactgatcttctcaactggaacataattgctatttttttttaattctgaaatggctgtaatttagagttcgtgaactgagtggttatggccagtgagatgttcgtgttgaggatttatttttgtttgaagctgtttccgatttttgcgcaggagattgtagatttcaatttgttatcggagtttttggatgcgtttgagagttcttcagaagaaaagcagaaagttatatatatatcttatcgagtttcgtgaagaatagaataacggcgtagtagtagctctttatttttatttttttccctcttccgccgattaattttatttagttaaattatttattaattcgtctgttccttgtttatacttcgtagctgcaatgaatttgtttcgatttttttttcatcaataattgataatttgaaaattctcttcaccgtatgaaatcgcggctggatccaaaaacttagcagagttaagcaatatattaaaggttagatttcaatagtagagaatgttgaaatgtccagctgtagctgagtgatgaatttcgtatcatatattcatacgtttttattggctgctgtctttatagttcatactacgattctgacagaatttttgtgcattgaatatactactttatgcacatcctggattttttctcttaattcttgttggtacattattaggcgataagtgtggagaactttgtagagtaatttgtgactgatgaaggcataaagatggtgatttgttttcttcttaagttaaatttcgtaggaatatgttgtttgtgtgcctcgtgatcatcggattatggtttctgtatgtatttaaatgctcttggaaactagaaccattctaactttgttctaaacatacagccaatctgcacagatcggcagaaagaaattttacc

SEQ ID NO: 68408 - DNA, 211 bp, Cucumis sativus
  Intron number 1 from transcript Cucsa.310790.1 (locus Cucs a.310790) derived from phytozome v7.0 (chr-ID scaffold0299 5; pos 547634 to 547844 reverse strand)
tactccgggtaaccaaaaatttgaatttatccaacttttttttttttaatctatttatgttgttaggtggtttgggaaaacattcaattctaccatatttacggtttttttggtgattgatggggagtatagaagataggtttatgttgttattcttagttcattgacttttacttattctgacctttttttgccaccctgtaggagaacg

SEQ ID NO: 68409 - DNA, 759 bp, Cucumis sativus
  Intron number 1 from transcript Cucsa.300840.1 (locus Cucs a.300840) derived from phytozome v7.0 (chr-ID scaffold0293 1; pos 464445 to 465203)
taccctcgaaggcgtcaataagtgctcctcgtttggtactatactttgtattttgttcttgatcttttttttaattcccaaataaatgagtttacgtttttttggtttatccgtctgcgaatctatgatacagatcttatagattgttcatcggatggttgttcaagccttggtttctttgttggacgagagatttaattttcacatttcggctgatttattgatagttcttccttttccgtatgattttgtatgtgaaggcatcaatagaatgaaatatgattcgatgatttgcatgccaagatcaagattataatatgttttgctgtgttgggtttgaattattgtcttcaagatgcttcctcttgatttttaatcttattctttttccacgatgtaaatgtaaaacaatgaattgaaaacttgatctagtgcgaaactcaatagaaactcaattaagctattcgtggaatttctttggttccttaagaaacatctacttctctccttttccctcccggttgaaatgctcgttttcttcgtaaatctggtctgctgatggtctttgtgattattttcattttgttttgataataatgcattcttataaatgcttggtctatttgagcttctcttggcttctacctgccatcaccagcccttttttagttgttttgtgacatcaatggtggattcatatttatgtttttcttctctgtttcagattgtttaggcaggcggttgggaccacgacttctt

SEQ ID NO: 68410 - DNA, 593 bp, Cucumis sativus
  Intron number 5 from transcript Cucsa.209580.6 (locus Cucs a.209580) derived from phytozome v7.0 (chr-ID scaffold0147 0; pos 8110 to 8702)
aacttgacaagaagacagggctgatcaaggtattggaactatcttatatctctgaaatcaatagataatagatatcatcactaataagaattagagccgtatgtttggtgagagtagttgaggtgggttaaagtaaaaaacaaaaagaaatactagcgcaacaatgcaaaatttcttctcttttctcaccatgagctttcttttgtgtgaacataaaaaatgaaatgtttcagatctaaataacgttcttctctatcaataggaatttgttttgattcttgtgttcattggttctgactctgttcataacgaacaggttgatcggattttgtattcatcagtggtctatcctcataactatggcttcataccccgtacgctgtgtgaggacaatgatcctatggatgttcttgtacttatgcaggttatactctgaacattgtttcagtcagttgaaaatcttcacaaactgatcttgagaagaattttagcctctgcatttgcattaccttgttttcctacctagtaaatcggacgtctattgatttgtttgtacaggaaccggttcttcctggctgttttctccgagccaa

SEQ ID NO: 68411 - DNA, 847 bp, Cucumis sativus
  Intron number 2 from transcript Cucsa.281100.1 (locus Cucs a.281100) derived from phytozome v7.0 (chr-ID scaffold0263 3; pos 1004021 to 1004867)
agaaaaaaggtatatcagtttggcttatattcatcttcttcatttcattttttgagtatcagtttgttgtaattgaatacatttcctgtttccacatttcttgttgtttcatttttctaactctttgttcagaattctttcacctccgtttgagcgtcgagaaaccttaacaaaatgattggaactagtttgtatcatatttgaaatttactatttaatgtttcctttatatattcatcagtcggacgtctgagaagataagattcaccttattatcttctcgcaattacgaggattaagtagggtccttgttataatatatcttgttgctatagttgaatatggtgcttgctatgagagaattgggaagttctaggtagtgattttatctcaatgagagagcattttctggataatcaacgggactgttttattagtttgtcgttttataagccgctcagtttacttatattccagtattggcttttcaaaacatttggctggagaagtttcatgtgactaataattcatatagaaaattcttgtaattaaacttatttagcgtctatcgtcaatcacaagccgatagcttcattttagagtatcaaaagtcgtttgaatatcttgtcttgaacatttgtctgtgattacattaacatagatgattgaactgatgaacagaataagcttctttctgtgaggtatcaaccagaagagaaaaggcttctagatttttttcatgtaatttcttttaaataatggtgtttttttatctttgtggatagttacattttccaatgtgattgcaacaggttgaagagagagtacggaggaagggtagagattt

SEQ ID NO: 68412 - DNA, 749 bp, Cucumis sativus
  Intron number 1 from transcript Cucsa.301790.1 (locus Cucs a.301790) derived from phytozome v7.0 (chr-ID scaffold0295 1; pos 61574 to 62322)
ctctttctctctcctctcgccttttattttgaaaggtttttctctctctttatttgcttctttacacacacatatatatatgcacacaaattttgtaattctattctatcaattatattattttattatacgaaatttataggttaattgttttaattaaaaccttaacctttcatttggtaatttgttgcttttttttctttaaaaaaaattgaccttatttttcaaaattcacatgattttctagataagaaattaagaagtttaattatagaattataattctcaaaaactaaaaagaaaaattatcgtataattacttttttttttaaaaaaaataaagctcagtttatatgatttttgtttaaagtaaaaagtttaagagtatttttaaagttttgtgtttattgttttgacttgatttagttattgttattttaaaatttgggtcagattttatattttgaactcaataaaaattggattaatgaatgtatttttttaaagtttaagtatttataaaaaatattatgtaagtaatgtaatagtgtataattaatcaacataattataagtatgcacaatattatttaagaaaaagagatgtatttgtttaaattataaattgaaataatgatgaattttgagaagtgatattgatagaaagtgatgagatttgaagaatgatgaatgatgtggaaatgcacgatgcaggaggaagtggccaaagaaattgagttttaagttga

SEQ ID NO: 68413 - DNA, 766 bp, Cucumis sativus
  Intron number 1 from transcript Cucsa.291630.1 (locus Cucs a.291630) derived from phytozome v7.0 (chr-ID scaffold0276 6; pos 183745 to 184510)
gagggtttgtagcccaggtatgaagatattgcattctgtacggattttaatttatttgcaattcattatttgtgaagttattttgccccaatttctcattctttacatgttggaaaatcaagcttcttaaaatgtgacattgcatatatcaaccaaaaaaaatgaaaaaaagttataaataaataaacaagaaacatctatatcttatatttcgaagttaaaataatttaataaccctttcgtttttgaatttttcatcagattctaaaaatataaccaagtttttgtgttcaaaaccagcttgtcttttcaaaatgttctaaaatgtattaaaaagaaagatcaagtcgaattagcgtttatattcttaatttttataaattttttaaaaaaatcaaatagatatgaattggaccttaacaccttttctaaatgttaaaacctacccttccatatttctttagctgctataacattttagttcttgaaaggttcttttaaatctgacatgaaatatttcattgtaaatccaacactttgccaaataagattatactaaaatctgaagcaacatatcttccatcacttatcaaattattagtgacaacacaaaacatttttctacaaagcatatatcctattacgattattacaattattgtatattttaaacatattttagaaataaagctatacactattaattttttctttatgtactaaatatgtaggcgaagacccaaagcaagtgaaggcaaaattaaga

SEQ ID NO: 68414 - DNA, 1063 bp, Cucumis sativus
  Intron number 1 from transcript Cucsa.257510.1 (locus Cucs a.257510) derived from phytozome v7.0 (chr-ID scaffold0222 9; pos 4779781 to 4780843 reverse strand)
actttccggcgacttttccggccactccaaactctgtaagcctttttttctttactctccacctctcgaaactcttctgcctcatcgctgcatggagttccccatcttctatttttactttgcttttctttgatgtgtttgattcaactgttaagttgaattcatgagtctcttgagatttagggtttttcgaagtcgtttgaaatgttgaattttgttctctgttcttgttcctatgttctgcagggctaatgaattagttatatatttggtttccgaaagattggtggtaatgctaattctgggttagtttgtgtaatgattgattgggaactggaaattttagctcaaatgtcaaacttcacagtttcaggaaatatgctttgaggtttgttttacccgtgggagatatcgtatgtcataggagatctacactattattcactagatcagtgagaatgtatatgctacaattacattttctgaacttctactttggaaatgtatggaaagaagaggctttgggagctgattgcggcactgggacaatcaagcaattgtgctaactttttcaccacaacccagtttacttttctcctcttgcaaaggaaattttgtgaaatagatgatcaagccattacactatttgtctgttaagagtttattttgggtccttgtctgtactatttaatggtctagtgaatatcttgggaactggtatgattaagcgaattggggttaatatggcaaggaaccaaccttgcaaacgtgaatgtttgctaatgttgcttcttgttgctttcaacctttttccttgacatgatacagatctccgtttcacctctgatcaaaaggcttgatttaagattgtcattaattgctatatgaccaactgaatcgatcggtttattaaggaatatgctctaatactatttattctggaactcaccataaaatgcatcctgattctcacatatgaatcagaagatttttcttcctcataatgatttctctgcttctgtatgtaggtggaagcttattgtgtttgccggagtacccaaat

SEQ ID NO: 68415 - DNA, 745 bp, Cucumis sativus
  Intron number 1 from transcript Cucsa.340400.1 (locus Cucs a.340400) derived from phytozome v7.0 (chr-ID scaffold0335 6; pos 2862267 to 2863011 reverse strand)
tcagactcaacccttccctcctcttccctcatttggtaaaacccttgtttcttcttctttttttctgtggaggaaatgggaattatctgtatgacttttgtactgaatggttgattgattattgttgtaggttatttatttgttttattggttttcttccagttcgtttggttacctagaattgtaggagaaaggacaaatgtaggatgaatcacttcttaatctaaaagtttggactaatttgataattattattggttttttgtttctaatttttgaaacttaagctcttgaacacctccttccacttctttcttatttttattttgttatctatgttttatcaatgttttaaaaattaaagctaaaatttgaagatgggaaaaaaattaaaagttcgcttttatttttttagaatttaccaaataatactttggtaagaaagatacaaatatttgtaaaaaattgagaaaaaataggtttaatcttcaaaacaaaccatcataaatgaaaatggttaagtctcttttgtgacccaataattgatgatatttattgaggaggaggagaatgaccttgtgtagttgaattgcttaagttaataggttgatgtatgtttaatcttctattcaaattattaatgattgagttgagcttcctctgttttctccttctacggtacaatcactttcctaatttgccttaatggatgccctgcttgtgtgtgctttaggaaagagaattc

SEQ ID NO: 68416 - DNA, 1030 bp, Cucumis sativus
  Intron number 1 from transcript Cucsa.242650.1 (locus Cucs a.242650) derived from phytozome v7.0 (chr-ID scaffold0204 7; pos 2350095 to 2351124)
gtttcaagaacacgaacgatttcttgatttctaaggtattatcaatcattcctaatttcttactatttttttttatttttgttttgattttctacgaggaggatgttctgaataaccaagacggtaagcaactgtttttgatcttgttttcacgtcgatttgcgttgatgatatgatcgttcctgtttttgtttctgctttttgtttggattggattttcttttcgttatttggaaatgccgatggattctgtgattaatatcagctcagaaatcatgatcgagtaaaaaattttaggtgattcatttattgtacgttgaatcgtgttgatcttatcagtttttggtttcgacttgtgttagattgattttttctttgttattttggaaatgtcgatggttgtgtgattaatatcagtttaacattgattatcgataacttttgtttgtcgtgattcatttattgaacaaagtgcgtcgatcatgtcacttttttattttttgcattgtgtttggattggaaatttgattgttattttggaaattctggtgcattatgctttagcgattcattaatatcagctcaggaatgatgatcgagcaatttttttggggtgatttgtttactgtatgttgaattgtgctgatcatgtcctttaatttgtgttgtgtttagatttgagtttttgttatttggaaaatgctgctggattatgtgattaatatgagctcacgaatgaggattgaacaaaatttctccgatgattcgttctagtttatatttctgttggtatatttctcccttgtaaggatgagtagaattagatcggatgttgaaaatgtgcagcctaaatgggctaaattgcttagttttggtgttctgttaacatgtcacaatatgttatattttttacgtgtaagaattctagaattctttacttttcgtatcgggggattgatctgaataggatcagtaattttaatctgaatgtcggcaataatttgttgttttttgctgcagacaattcacg

SEQ ID NO: 68417 - DNA, 502 bp, Cucumis sativus
  Intron number 1 from transcript Cucsa.360970.1 (locus Cucs a.360970) derived from phytozome v7.0 (chr-ID scaffold0358 8; pos 1443419 to 1443920 reverse strand)
ctgtcaagattcaaacagtttttaggggctatttggtaagtcaaaaaaattaaaaaagttccaatttttccctctgcttttcctctgctttttttctttttttctttttacatttgctgttcatcaccaaatacaaagttcttttcggaggaataattgtacctttttttttccttcttttacaaatatatttcctccatgaaaattacaaaacatggtacttttttttttttttaatcttttacattctctgtgttctccttgaaagctgagaaaagaagagcataaaaagtgaatatgaaacagtgcaaaaatctctttggtttgtcaatgaaacagtacattgatttgctgactaaatccagaagcttttctgatccttctctttccttacacttttatgggctccatttgtaaaagggttttcttttttcaaatttgaaaatgtgttttgtttttatggtcaggcaagaaaggccctacgagctctcaaagggcttgt

SEQ ID NO: 68418 - DNA, 760 bp, Cucumis sativus
  Intron number 1 from transcript Cucsa.284850.1 (locus Cucs a.284850) derived from phytozome v7.0 (chr-ID scaffold0265 3; pos 1454802 to 1455561)
gcggttctgagagttcaggttaatattttcatgtgatgggtattgataaactttgaatagttatctgttttctttagcaatagatctttacaaaattttattaattaatgtccatgatttgtagttgctggctctttgaagattaagttgttggactgtttttgaagctctgttgtctctgctgatgttgtgaatatcattattaaacctcttttggttggttctgcatatagatgcatagagaatgacattttagttgtatcttacatataatgactttccttatcttacatctttaaatgaatttagttttttctatctcaactgttaatggagcttctcatataattacatcctagaagaaaaccactgagaaccgtttttgtcaatattccatgaaactcaacatgaaatctttgcttatttgttgttttagtttcttttatctatgttgcatattgcatattgcatattattaaagtatcaacttaattcattatttatgaaagtcctttcactgtgtatacatccattcgctgagtcatgttctggcatgagatagacaaaatcactctattaagatttgtggattcaacttcctatctgataacacaggagagggaacaaaacgtttggaatttgtgcattttgaattatacaagtttataatgaattttagcattgcttttgcttgctagttctcttcattttccatgttctcaatttataggttcagaaaacagttcctctcgactttcca

SEQ ID NO: 68419 - DNA, 782 bp, Cucumis sativus
  Intron number 1 from transcript Cucsa.333900.3 (locus Cucs a.333900) derived from phytozome v7.0 (chr-ID scaffold0329 0; pos 49600 to 50381 reverse strand)
ctgggttggcttctgaaggtggttccaagcttaaaatgctactcacatatgttgataatctgcctaatgggtaatcacctatcagttttatctattgcctctgtttcccaatgccgggggtctctttttagcttcttgattgttgaccttggtggggattctgttttttggattccagtgttttctttttgtttccttgtagtttcttgaatctttcttcttggaaacgcagtttcttgaatctgtcttgttggattttttgtttttatcttagagtagtgtaaatggattcagtattttctcactgttctctgttcgaatcctgaattccatctttcggtgtgggtataattactgtcatttctgatttctctcgctcaagtctgaaccaacttacctttcttgcttttgcttactagtttgtattttgcacgttttttaattgagtcgctgtctctagtgttaatggtgagaggcgtcagtctttcttcctcaactgactgctgctatatattatctttggttgtgttttgggataaattgtggcttgtttgcttgctcttgtgtgcccaaaagtttgtttgtttgtttgttttctaagttgtattttctaaaggatttatcttagttttattttgattgatctgctgggacatgcgttgtagttatatatgtttatcatgtttatgctgcagtgtgggggcatttttcgctgttctcttactaggtggttctccttttctgtcacttttccctcttcaggagcgagataggaacatttt

SEQ ID NO: 68420 - DNA, 888 bp, Cucumis sativus
  Intron number 1 from transcript Cucsa.271130.1 (locus Cucs a.271130) derived from phytozome v7.0 (chr-ID scaffold0250 0; pos 69023 to 69910)
tctcctacaagctcgtcttctatcttgccctatccgtgcgtatcttcttcttcttcttcttcacgttacattattcttttttaatcactatttcagatctacttatcttcgtttcttcatatcattatcgagaatcagtgatttccattataatgatttgatttcgacaattgatcttcaagatttagctacactgaatattcgatgaacttgactaaaatcaatgtgagacttgaacaatgaagcgcgattatcttagcacaatagcattgttacttagtgttcacgtgcgtagcgttggtagtttaggattcttatttttgtttcgtaacttttcaattttgattacggtctcttctcggaccgtctctcgatactgctagggttttgtgcgaagattattttataaaattcgatttagttttgaatgttcggtttgttacgaactgcgccttagttttatcttcaaattttggtgcatggaatccattttcccgatgcatatcggcttagtcgcttctccaatttttgtctgtttgctagtgattaataaatatccgtgaaaccatgctaaattccgtgagaatcgtgtgcgccgaacaaagtagataacggataacatttagcgtcacggacagctactgatcttaatttcccagtgatacattatgaaagtgaaatttcaccagctgctctaataatttattagcaagtgtgcatgtgatgagacatcctcttcctgcgaactgaaatgaaaaaatttgctattagaaatagaactatacggataatgcaatttccggagccagaggctttctctaattttccgctaagatgcttagctgcaaatttcttgcttactaatggtaatttgttgggatgcaggat

SEQ ID NO: 68421 - DNA, 870 bp, Cucumis sativus
  Intron number 2 from transcript Cucsa.332360.1 (locus Cucs a.332360) derived from phytozome v7.0 (chr-ID scaffold0326 4; pos 97542 to 98411 reverse strand)
cccattggaactaaagcgcctcttccacctgcgaggtctgcttgagatctcttgctttcttcgacgcgttctttcagctttgttaaattaaatatttttctctgtttctttatgatggggaagcgagggtgtgatttctttaaattgtttccattttgatcagagatctatattaataaataaattgccttctgagcgtgatatttctccaatatgctgtcgtaccaagattaccgtttttttttttaattgttacatttgaattctggacttctgatatgtcatttactcgaatgttcccgcccccttttccccctgtgttagaaagttgattcatttttgtttggaggttagattttatgctttttgtaagtggttctgttttcattgcttattttcatctaatcaatttaaactatgcatatgacatcttagcttcgtggtttttgtctcattattataggataggggtaggcaaagacccccaataaatcttttctctcaataaaggaaatatttccactcgttctgtattttcctttaattttgcgtgtcctttttttttctcttcccttttgtgatcaggaaggtttggcaatgtttcccctttcctacattctagctctgaccttgtctttaatgtggatgaagttgtctatctcttgataaggcaacttcaattttagtgtgttcttcaagagcttatcagtagtaaatttgaatttagtgcctgctcgtgttttttaattgtgcgtgcatctaagattgtttgatcgcttggaataacttcattaattaatgtgtgacttagtttttatttgttcttttttgacagaaagccagattctccgaagtcaagatcaaggtcta

SEQ ID NO: 68422 - DNA, 501 bp, Cucumis sativus
  Intron number 1 from transcript Cucsa.207460.1 (locus Cucs a.207460) derived from phytozome v7.0 (chr-ID scaffold0144 3; pos 292984 to 293484 reverse strand)
gatcttcccactgcccaacatcatcaggtaatttattacaacacaccatcatatatctatacatcatcctttttcattattatgcttcttctcttcatctctttctttaatctccctctttcatcatttatggtttctttctcctctctctctctctcgcttctattctaatattcgaatgttttcagaaaaaaattaggcttcttttctcctaatttttgtactttgattattatatttcttgaaaaagaaaaaaacaggtttttgaaaattttcagtttagttttaatcatgtcaatagaaactggataaccattacaaacaaaaggaacttaaatgtagaagaagaagtaagtgtttataagcgtttttttaacacagggtttcaaacctctaagcttaatttgggaagaaagggagagggaaaatgggattttttgtttttgggtttgaaattatcagtactaattatatagatatgatgatgatttatgataggaa

SEQ ID NO: 68423 - DNA, 308 bp, Cucumis sativus
  Intron number 1 from transcript Cucsa.310280.2 (locus Cucs a.310280) derived from phytozome v7.0 (chr-ID scaffold0299 5; pos 125538 to 125845 reverse strand)
gctctctgttcttaaattggacggctcttctttcggtaatttctgtttctgtgcgtggctgtgtttttttttattttaatccacataattcgattcggggtaatttttggtagtttttttatgatgctggagaaatggagattattccctgctcgtgagttttgtttggttttatttagagcagagatatattgacggtttttgaaatgggtttttatttgatcccagaaagtgagaaaactgatttcttaaatttgaagaataagaatgtctttgtttgcaacctcttttaatataggaggacttca

SEQ ID NO: 68424 - DNA, 675 bp, Cucumis sativus
  Intron number 3 from transcript Cucsa.332310.1 (locus Cucs a.332310) derived from phytozome v7.0 (chr-ID scaffold0326 4; pos 54041 to 54715 reverse strand)
ggcatcctgattattgcatttcaggctactcatctgtaagtcccactatcttcttggaaatacctgatctagatgcagacttcacaaatgcatattactggtttgtcaagggttgctggatacattggtgattgtccatcaatatccatgaataaaccaggttgaataaggcaggggaatgtaaaatgagatactgaatagactgaatagactacaaacaccttcactaccaagaatagctaggcgagttgaatctttatagttactctgcacttttccttatagcaagaagatgttgacgaataatttgcactctccttctctctccatctctgtccgtaccagtgcagatgcaagggttttattttggggcgcacaatgtattaagaaactataacgattaatgtaaaaaagtattaatggcttcaaaaataactaatttagtacttattacaattgttctttatgtgtttccaaatttagaaatcaattcatgataactttattatctaacatatgtatgtatgtatgtatgtatgtatctgtataatatgcttatgtgcatgctaattgtcagttgtcacaccattctttgaattatttcgtacaatgattattagctgtagtgtagttagcaatggaagcttacagtttgtttttgaaaaacctagattg

SEQ ID NO: 68425 - DNA, 849 bp, Cucumis sativus
  Intron number 1 from transcript Cucsa.234300.1 (locus Cucs a.234300) derived from phytozome v7.0 (chr-ID scaffold0199 9; pos 239505 to 240353)
tgaaggtatgttctacaatgcttctacctactgattccagtccctgtaacacgtaacatatattattctacctcaactcatcatcaactaagtttggtttaacattactattagtgagccttaaaaaaccttgtttgataactaaggtttttcttttcttttttaaatttaaatttggccaattagaattagattttgtttggattttgaagcatttctaaaatgtaggaaaaatattgaaatatataaaacttggttttgtttgttttcttaccatttctttggcatagttttagttagttttcaaaactagacattcaagttcactaaactccaaaaagaatttttaagtttctcatttttgttttttaaaaacgttttcgttttcagaaccgttttccaaaccaccctacaaggtaaaagtaaaaaccgaaaacaaaaaatcaaatgattattatctatgaaagcctaataagatcatgtttgatatttgaattttttttaaaaaaaaacatatgaactcatacctaaattccacaataaaaacaaaaacttttacaaatctaattttttttttggttttcaaagcttttggcttgaattttggaaacacttcgaaatagtaattaacaaaacatagaaactcataggtaggcatcaaagtttacaaaactctatttttcaaaaactaaaactaataaatgagatggttatcaaaggaaggtctattcttattagcaatgtactattacttatatgctttttgttatttttccagattttaatttagttttgtgtgttgagggtgtcacagaatcctgagatcaagccattgactgaacccgaccc

SEQ ID NO: 68426 - DNA, 518 bp, Cucumis sativus
  Intron number 1 from transcript Cucsa.339880.1 (locus Cucs a.339880) derived from phytozome v7.0 (chr-ID scaffold0335 6; pos 2413142 to 2413659)
aagaatccttcactttttcccattttgccgtctctgtaagtttttcatttgattgtgttcagtcagtgcagttgctgagagtatgaagaaaaatgtgtctacattgggaaattaaaagtgattccaatgaattaatgatcatgtggtgtgcaattttgttagtaatatgatggtttgtggctctaatttgagaaaagaatagttcagtactaagtagaacggaattgattttaattgaatgggttaataatggcttgaaaattttcttgttgaggtttgtaatgacaattacatatgcttatctgggctgtgattagaaactttgaatctggcttatcttttgcttaatggattgatctgaggaatggaccgttctagttttaatgactaagaactctggtttcacttattggcttgaaattttatgttttgatctgtttttatacggaatagaattttttagaaatttgagcttgatcaatgaaatttggaagtatttaattatattatgtgtcagg

SEQ ID NO: 68427 - DNA, 493 bp, Cucumis sativus
  Intron number 1 from transcript Cucsa.205440.1 (locus Cucs a.205440) derived from phytozome v7.0 (chr-ID scaffold0141 6; pos 529930 to 530422 reverse strand)
ttacaaatttggttcatcaatttcccctcttcaaggtaagctttatatatatatatatatccaccagactagaagtttatataccaaaataattataaatattacaaaatattatttacgatatgtttatatagatattgttatatttataaattttatcagttttacgatttaaaattatattttttcaattttgacataacaattgtttagaaatactagaacatattcatctttgcatatttgaaaactattaaagtctttgcgtggatagcacaatttcttttttcaatttatttattactttttttaaaagcatatagataatttatgtccgattttgtttttttaagttattttccttcttttcttactatagtttacatttttatttagtaggaagattgagttcttaactaatttttagatataaaaataagattttaaaaagctatatatgttttacacatgcaggaggtttggcaagaataac

SEQ ID NO: 68428 - DNA, 801 bp, Cucumis sativus
  Intron number 1 from transcript Cucsa.381820.1 (locus Cucs a.381820) derived from phytozome v7.0 (chr-ID scaffold0386 6; pos 59013 to 59813 reverse strand)
ccttctcaggtttaaattctctttcatttacttaactctcttctctctctgttccccttctgtcagctttttgtttcattcattcattgaagtttgtgagagagtttaacgaactaccgtacgtactcctctcattcaatgtttgacgtgtactactgttaaaagtattgatatactgatgaagaaattaatgtaatccatgactttgagttcatgggtggtttagcatgtatctatctaagcaacattgtgttttcctcctgctaacgatagttccaccagtgagagttctctataaatttcaagggccatgagtgagacagagtgtcaaagtattgatataattaacttaaccaattaatttaagcttttggtttcaccttagaccgatcttaaatgtttttttatgaacaatggataaagggaatatagagtgatagtattatatatattttcttttcatattatgattttttttttgttagaaacgaagatgcaaacttgaatctaagcaaaaaaaaaaatcataatccacgagttaaagtttttaaatttattagtgatttaacatgttttggagcaaaacttttgtataatgtcgttttctttttaattaatattaatttacatttgtggagccttccacgactttcaaagttcaagaggaaaacaaaatgatcgataagtttatgttttttatttttcctacacggttgatttgggatcttttttagaaactgagttataaacttgaatccaatggcagggcttagtgttagcattgactgcaaacaaaaagat

SEQ ID NO: 68429 - DNA, 937 bp, Cucumis sativus
  Intron number 1 from transcript Cucsa.204630.6 (locus Cucs a.204630) derived from phytozome v7.0 (chr-ID scaffold0141 0; pos 5933 to 6869)
cgcaccggctcaaagctaagatcacaccactgctggtacaactaacactacctctctctctctctctactttgctttcactcagtttaatcctccattccaccaactagatcattcattctcaccttcctctctctagaattttccagggtttctctctctctctcccttcatatggaattgtaaattccaccaaaatctttggactctcttccaatttctgcattccattctcttttatttattccatttcagtttatctttctctctctatctccgttcccgcggaactggtgagtcttttggattctttttccgcttcttgttttatattctgcgtggaagaatcttattgtttggttatttttgttgtttgaaattcatggtatcttgttaagaacgcagtctgtgtgttttttcctgaatttctgctggtttcttgaatattggagtttcttttttgcctctcgatttgtgtttgatttgttgagtttggaaatgggttggagtttgtaatcggattagtgtttggagtgactctgttcgttgactaatgatttatggttcgagtagtgtttggtttgtaactttgaacgatctgttttggaataagcccagcggtgcgtctttgattttgatcttagtgggtttggtttgactttctcaacccagtttttttttccttggaaagttggggaaatgggatattattattattttattttagccaggaacagggtggattggaaacacgtggtttttagcttctatgatctgtaattatatgatgaaatacttgggattattctatgtttctttttttctttctttttattttttattttttgaattttcttctaaatcaaatttaatttgtttttcccgattataagaaaataacgtttctgtgtgcagagtaattgtttcccaggctttga

SEQ ID NO: 68430 - DNA, 866 bp, Cucumis sativus
  Intron number 3 from transcript Cucsa.381880.1 (locus Cucs a.381880) derived from phytozome v7.0 (chr-ID scaffold0386 6; pos 104440 to 105305 reverse strand)
gtatttgaaagagtgggagaccctttgatttcgtaaacaaatgtcatttgttatctgtattcttcagtgagtttcatttttcttttcaaataagattcaaataactgaggattaggacttgctacttgtattatgctcatggtttgcccttctaacttgaaaaggttttgctaactcaaggctagaacaaaatgcttttaagttttcaagacctctttgataattatttggattttgaaacttaggtttcttttgtaatctactccttacaagggttttcaaaattcaagccaagttttgaaagctaaaaagaagttgtactatttaaaaacttgacttgtttttttgttttttggaatttggctaagaaatcaaatgtttgcttagaaaggaaaatgaaacaagcaagcacaacgacttagttttcaactttgagttttcctgaaaatgttagaaagaaaggaactcgaatttttgagggaggcgccctgaggttttgtccacccagcgaaaaaatgaagtttctaaagtcgagtgtggtaacaattttgtttttagtttttagcttttgaaattttggcttgttttcttctaaattcgttaaatagttctcatataacttgaagaaacatttgaagttttagtcaaattttgaaaataaaacactcttgttttagtttaaaaggtatgacttggctttttaaaattgtcgacaaaacaataaacataactttcaaaatctaataaccaaaatacttatcaaacaggtgctaaattattaaggttgaacagaattgtatttattcgagtttcatcatgccaactaaatttgtgaaatcattgtttatgaaggctgccactgtaca

SEQ ID NO: 68431 - DNA, 719 bp, Cucumis sativus
  Intron number 2 from transcript Cucsa.364400.1 (locus Cucs a.364400) derived from phytozome v7.0 (chr-ID scaffold0361 1; pos 1865266 to 1865984 reverse strand)
ttgggaatctgttttgtcgcgggggccattttcaggtatatcgattctcttttattattattattattattattatgttccttgatggagatgtattgatatcgatttaggtcgcgatttttggaaattttttcattttgttttgatgattttaaattttttatgtagctaggaaggatctgtatttctgtatttagcaggctatgatttgctttttctgcgtttgatttatgcagtatttgttgcaataattgcggactttttttgtgtgtaattaatgaatcaattattccgagtttatcgaactttaagaatttatgatgagtgattcttctatgttagggtgattgattttagttacttcgttcatttatttccttcctgatggagtaacggattttaattggatttcgtaatttcttctccattattgttcctttaatggatcagggagatctatacttcttaaacatttatgaagagttgattatttatttatagtactgcttagtaaaaatattgtaattaacatagtttatctttccatttgcaatcttcatttaattttcttggtgaaatgtgatttatctctgtttctttctatttttctaatcaagagctgatcattatgaaatgtgatttacctctcttcactttttcttgttttgtcaattttcttaacttgtttgtaggatctttatttgattgcaaattgagag

SEQ ID NO: 68432 - DNA, 804 bp, Cucumis sativus
  Intron number 1 from transcript Cucsa.304260.1 (locus Cucs a.304260) derived from phytozome v7.0 (chr-ID scaffold0295 1; pos 1949029 to 1949832 reverse strand)
acaatcgctctacgttcgttcagaaggactcacaggtagttttcattgtgcttcattcttaattttagttcatcaacttttaacattatatttttcttttttattttactttcaaatacttcattttcaacttcgaaaaaaatttgatatttctctttcaatagtttttttttctctctccctctctctcaaacgttttaaaaaatgtcaatttccaactttttgaactttttttttttggaaagaaaatattgtggcttccaaacctaaactttggagaaatggttttttttggttatttttatcacctaattttagctaatgtgtttacctacatattaccattaataaaaaatttgataattgtgtactttaatttttcaagggaaaaaaaagtggagaaaaaatctttctttttctctattttgcaattttctctcttatgtttcagaaacattaaaagtagtcaacaagagctctctaccaatctgatttttgttataaacctataaattaggtgtttatttgttaaaaagtaaaatattcctaaagtagtcaaaatttgtcatttggcaaaagttccagaaattagagatcaattattaaaaaaaataagacgaaatttcactgtccacaaaaattgaagcttcaaattaatctctttattcatttgttgcattaaaaagaagaaagaaaatttgaccatttaagcttaactatcattgaatgcacatacaactattcaagcataactcaagaatgggtggttttcagatcacccacgtgaagacgtgttgttcattc

SEQ ID NO: 68433 - DNA, 757 bp, Cucumis sativus
  Intron number 1 from transcript Cucsa.303320.1 (locus Cucs a.303320) derived from phytozome v7.0 (chr-ID scaffold0295 1; pos 1279387 to 1280143 reverse strand)
ccgagctcaaagaggagcttaattcccagtacaaggcatctctcccctctctatctctctgttttactcctcttttgcttcaattttctattgctagttcaatgtctacgtattcgtttcatgatccgctatctatatcaattcagctgattgttagttcaggtggtcgtctttaatgggttagtcgcagatctgttgggtttggggttttctatctctcttgtcaaagatagcatctgaatatattgaattatgaccttcagtgtatttgttaaagagttttttatgttataggaaaaacatgtggtgatgaatttattgattgttgtatgactcaatgttagtttagatgctggcgatcaagtctatacaggttaagacgataagaaaacaaaggcagcttgaaggcttaacgctgcttatgtttcttattttctacatttcatttccaatcatcgtttttttttccaaagcattttcaataatcttagtaactaatgaactgattgattaatagttaagagagttgaacgggacattcataagatttttgcttttttatgacgaggttcaggttttggattgatttagctgtttattggatccaactcctatataatatgttttcttttggcgtgaagtgtctctataagctggtcttcattgttgaagaaatatgtttgtttctaaattaaacagtgtttctcattggaactcagaagtagcgtttaaaacattttgcaggataaaaggaaag

SEQ ID NO: 68434 - DNA, 511 bp, Cucumis sativus
  Intron number 1 from transcript Cucsa.355650.1 (locus Cucs a.355650) derived from phytozome v7.0 (chr-ID scaffold0357 7; pos 152062 to 152572)
ttccgccgtttccgtcgtttctagtttctggaaaggtaatagtctaattctaaatcgaattctctttcaattcttgcatttattgctgaagataatcatgtagtctatgttacgttttgattcattagctgcataattcaattttaactgcaaatcttctgcttgatttctacgccttagtttccactttgagctctgcttgtagaaagatttgatctgagaagactagtttatacacacacacacacacacacactagtggttcttgtcgatggttcatctatccattggggaaaagtatgttgcattttgaagtattgagttaaatagtactaacgagttgcaaggcattttgtgttttttagattttaagttctggtaatacttttaattgtcgtctatttgatttaaaactgctatcaaaaaatttatcctctgcgtacacaatgtggtcattttgtatttcctatctgcagagtttgatttagagaaggagaaaagtgcattggat

SEQ ID NO: 68435 - DNA, 1036 bp, Cucumis sativus
  Intron number 1 from transcript Cucsa.281200.1 (locus Cucs a.281200) derived from phytozome v7.0 (chr-ID scaffold0263 3; pos 1088174 to 1089209)
accaggaagtcctcaacaccaactttcttcaacaagtaattctctttcttcctttctctcttttgtttcttccatttctttttcatttcgttttatttcgtttatgtattttaaatgagtcttaaacttatagtgtgtttgaaataccgttttaaatgaaagcgcttagttaaattaacaaaatgctcatgatcaacttttaatgtttgagttagactttccaaaacttgattttaggctttgaactttgacgttgttttgataagtattagaatgtcattacaacggttattttaaaatatagtaaaataatttttttttcttttcacaaatacactaaatcgttactattcgtcgtgaataatgatagaccttaataaactattgataaatgataatgttttgttatatttataaatatttttaatagttttgtcatttaaaataattagacaattgacatattttgtaacctaaagatataggttcaatcattcacccaattatatttaagatttaaaatatccatactagcgaaatatcaatgtctcttttatccaaatttcaatcaaatattgatttcaagatatatttttgcaaaaaatttgtaaataaacattagtttttatgcatattatacatttgtttaccttacctagtaaatatccatttatgaaaatataaactttaaagagacattttataaaataggaaaataataaaattatttataaaatatagtaaaaattcattaaactgtttataatctatctaaaaagtttttgctaaatatataaaaattttcaatttttttagtatgattctattttagtttagattagtaaatatagttcgtaagttctaaaatttttcaaaatctcccaaaagagaaactatttacgcattttgaaaaaaaaactaaaaaaactgatttttgttcattttataattatttaccattcatataataaagaattataattttgggggagttttattagaaaaagaaggagaagaaacggacttcttcgaagcg

SEQ ID NO: 68436 - DNA, 603 bp, Cucumis sativus
  Intron number 1 from transcript Cucsa.337300.1 (locus Cucs a.337300) derived from phytozome v7.0 (chr-ID scaffold0335 6; pos 402186 to 402788 reverse strand)
gaggtatttagtttaaagaactacttaagttttgattctgcatggagatatgcatggcgattatgggatttcaagttttttaagaaaagtatatagttcttagtcttaggctttaatttaacactttgaatttaatttctcttgtgtatgttttattacatccatttctcttcgattttgagtttaattatttttatttgttcacttttgaattttttgctattaattttaactgaaacttactattgtacatattttgttagtttttttatatttttaacaattacttttattcaaaagcataataggaaaaagtaggttataaaatctagaaatctattagacactttatataaaatttgatgcaaacctaaattattttaattcaataattaaaaagaatggatggtaaatgaaatgataattaaaataaaataacatgtacagaaaaaaaaaattttgactagtaaagggaaaataaaatcattaatatacaatcataaaaaagtgggttattccttgtttgaagatagaacttatatttgggttgatcgtgtattgaaattagatacattggctgggtgttcatcacttggaggtgga

SEQ ID NO: 68437 - DNA, 764 bp, Cucumis sativus
  Intron number 4 from transcript Cucsa.252830.1 (locus Cucs a.252830) derived from phytozome v7.0 (chr-ID scaffold0222 9; pos 1684057 to 1684820 reverse strand)
aatattgtcctaacagttcttgtgactcacgagaggtagatagttatataatttgtatttatctcactactttaaactactacttatacatatactcccgattcaattttgaatttaattatgtaaacagttttcaaaattgtctcaagtacctaatcacgtttgttagtctttactacttctattgctgagtttttttttttatttatttattattattactattacatttttataatatttttaaaagtcatatccaagtttttttcttcttatttactaaaaatttaaatatatttttaaaatagatgaaaactatgataaataaatggaaagaatatagtcatcaatttggtagactgaaaatttaaaacaaaaatgttaacaaataaagccttaatttgtgaaatgttcctttggataatttatcctaaattatgagcatgttaggttagtaatttgataaaaagtaaaacatcttaaaaataaataaatactttttattgctttaaacatttaaaaatggtaacaaacaatgaacaagttaaaaatgtttaaaactgtagttcacacgataaaaagttaaaaagtcattatagaaaaacaattgaagaatttgattattaagaaagaataaatgaaaacaacatttttgggaaaacattatgaagggtatgtttttttcttcaaaactacttacaaactctctcttgtttatttgatgaacagtcatcaagtgtgaagctgagtgatatcaacataag

SEQ ID NO: 68438 - DNA, 602 bp, Cucumis sativus
  Intron number 1 from transcript Cucsa.283640.1 (locus Cucs a.283640) derived from phytozome v7.0 (chr-ID scaffold0265 3; pos 689535 to 690136)
gcgttgattcggccgcggattcttgtcgaaagtagaaatttacgggagatgggaaatcgggggctttgataatggaggggaatgaacaattggttgcggatccgggtaagactggcccaatccagattatttatttatatatattgaaattttttttgaatgaatggatgaaatgggatgttattttaattactggattggtgggaactaagaatgtgagaagagttaatggttttgatgatttcatattttcggatccaccctgtgttcttccgaaaccaagaacatgatttgcttttaacaattaagttctatttttggttcttcaaatttaaggtatgtccttttgacattaccatctaagttagacaaaatttagcattatatcggcatccaatattttatattggtagtatatgcatgttttaaattcatgtgagattatatatatataatagggaagaaatacaagaagataaaacacagaaatttttgacaacaatgttaacttccataaacgtcaatactattcataaacttacaaaaggaaagaaaattgaaaggttgatttttcaatctatcgtagaacacaaaattctcac

SEQ ID NO: 68439 - DNA, 875 bp, Cucumis sativus
  Intron number 1 from transcript Cucsa.236990.1 (locus Cucs a.236990) derived from phytozome v7.0 (chr-ID scaffold0202 3; pos 64671 to 65545)
agaagaaaggtgatttgaatatcgatcaatatgtgcaccaaatttttatacgttgtgtgattggtttcgcatggaccctcaagttttgttgttcatgcaacatcttgagttccacgtctcccttaaaactatcatatttcctcttctacacttctaaactttccaacctcaatttctttttatcaaggtagggattttatactttatcttgttacaaaacgtcacaccaaaacaaaatttggaatgaatgagtttcgaagtgagtctgaaggacccctatgacagagtagtatgaaatctattatattaacatgtggaatgaatgagtttcgaagtgaaaagaaagtctttcctccgtccctctgacttgtttatattcatagtaagaacttctgctccgcttctttgcttcttcatacttccaattgtaggaaaaagaaagaattctcctttccatttaagaagcgagaaaaagggaaatgatcattgatcatagacccactcacacgcttcttaccaactaggtaacaatatgtaacgacattaactgtttctcttaaatgtttggatcgactggttaatagttgttgagttaacattgtatcgaaagagtaacgaaataacgaaattctaacaactatttttaagaagtctttttttttataggattaaatcttttaaactatttttattacttgtgtaatttaaaacattttttctataaattacacatttttcaacaattgccttaataattaaccctaaaacgtcatctccttgcaattatatcaaagtttaaagtttaaaccgcactcacacagcaccaactcttcatgacctccatcatctcttccatagctccaaattaccagact

SEQ ID NO: 68440 - DNA, 647 bp, Cucumis sativus
  Intron number 1 from transcript Cucsa.356910.1 (locus Cucs a.356910) derived from phytozome v7.0 (chr-ID scaffold0357 7; pos 1816269 to 1816915)
ctgcaacagtccttgaaagagaggaagggcagagggttagaattattttacttgttcttttacttcttttatattgtaatttctgttgaaggtatcaataaaatagaaacactatatcagtgttctatcacatatacttaaaatcaggtaataatttatgattttagtttatttattacgaccttagttgagcaggatctgttctataggttgtacaactgtgtccttgaaaagaaaatattagtttatgtatttgcaagaagtatgggacttttgattaatgggcaaaaatagaagtttctccattttcttcccatttataggtaagaccttcatattttacatatgaactgattgagtgagctagagattttgttctcccttcccctctgatggctaccaaatcaacaaatgctgcccttgttaaatcataaatgatgctaaacgctctgccaatgggttgctgtaattttaattatacaaacatgataacacaagtttatagtcactattgtcaaaatgttctcactatacctacagcagggtcttctttggccattcactgattagaatttaatgtgggactaggagaaagatgtacctctaattcagatcgatatatttgcagttctttccattgctgctaa

SEQ ID NO: 68441 - DNA, 826 bp, Cucumis sativus
  Intron number 2 from transcript Cucsa.258480.1 (locus Cucs a.258480) derived from phytozome v7.0 (chr-ID scaffold0222 9; pos 5428517 to 5429342 reverse strand)
ctggacggtctgctctgcaggtatatatttctatgaaaactaggtcttgcaaaaatcattccatcctacttatgatcgagcattcagtctgaaaccatattgtaaaagagattgtaatgtgctgcatgtatatgttgtgcattctcttgcttgatatttaaatgtgtgaatatagagttcagtgacctaaaatttgttggctctgttgtagctctacaagctcttggttagttatatatgaaaaatagcctggaacaaccaattgtgtattaattcaggatgataccactgtttctcatttcatatgtttgaagaagaatcttcttaagctatctcagtttggtttgatataatattggtttattcatgtttcttgtattctctttgcactagactcattttttcaacaaaaagttttgtttctgttcaaaatatatacacaaacacacataggcttatcatcacgattcatgtcaactgtggctctttgttcataggttcaacggataatcttgtctatttgatgcagcatcacattctttggttatgtgattgattgcaattaatgttctgacttttgtgtgaccaagaatatgctagcttatatggttgaaaatactttttaatggatgaaaatattctttttagtataatgtgggaagggggtttcaaaccatagatcccttggttgctcccttttggcttcttcaaagcatgcataaaaagcagaaaacttggctacagtaaccgatctctttagtgtgtagttaatccatgataacgttatttaagcattcttcttgttataatatcagggcatacatcc

SEQ ID NO: 68442 - DNA, 616 bp, Cucumis sativus
  Intron number 1 from transcript Cucsa.235690.1 (locus Cucs a.235690) derived from phytozome v7.0 (chr-ID scaffold0201 2; pos 344228 to 344843)
gaaatcagaccttagcctttcaactcaagcccaaggtcctattttctttccaatttttgttttcttttttctcttatttgccgacttcaaggttgtttttagatttcagtttttgaaagtgaaggggtatgtttcttaaaaagaacatattagagaatgaatgtcatgtgtatgacttgaatcagtgcttctaagtttgattttcaaaggtagaaaagtaaaaaccaagactctgtttgaaaattaacacagtgttcttccttagatgtgttgttttgttatcaattttctattaatattttcaaaaataaaaatttaaaatcgagacccatttggtaacttttttatttttagtatataaaaaaattacactaaattatatacgttttgtcttttttaataaagaacaaactataaattttaaaaattaagaaaggctctttttagttctttcttaattaaaagtttatctacgagtacaactctctcccacataaagtattgtaaagaattgaaagaaaagatgattattttcaaaatatttacacaactgggatgcaattctttgaattaaagtgtagtgtttttgaaagagagagtatttctgatttttcag

SEQ ID NO: 68443 - DNA, 362 bp, Cucumis sativus
  Intron number 1 from transcript Cucsa.307110.1 (locus Cucs a.307110) derived from phytozome v7.0 (chr-ID scaffold0297 7; pos 396849 to 397210 reverse strand)
ggtgatattttttgtttccattctcgcattcacaggtgtgttctggttttggacttgttctttatttttcctcacagtgccattccagaagattatagttatgtttcatttgtcatttggttcaatcataacagttctcctgttgattttttttcatacccatataagatagatcttgtagtatttccctttgatttaatcttagtggtactggtaactgtgacaagtatgtcatttttcattgaatacaagttatgataatatatgaatggtaatcgtgaaactttggtattacgatcttaatgaaatagttaacgttatttgcagttatctgtgtaaataacagacaagagagctttagc

SEQ ID NO: 68444 - DNA, 570 bp, Cucumis sativus
  Intron number 1 from transcript Cucsa.244200.3 (locus Cucs a.244200) derived from phytozome v7.0 (chr-ID scaffold0213 5; pos 35558 to 36127)
gagagagactttttttgagacgactgataaaggtagtaatgtatgtttctgatccaaagcactttgatttcatcttctttctgttttccatttctgggttttcattcttcatactcatagcttgatttcctctgttacttagccaaaaagttttgtggttttcgttttagatttccccccctcttttttcttcttcttttgtagcaaagggagtttttgcctgtcctttctttattaatcataatcattcaggtttggtcttcaaaacccagttctgttctttttcgaatctaagcattcaaccccatcttttactttttcaaacattttcccagattccgaaaggatagaaagaacgaaacccccctctgattttccggctaaatgttggggtttcagctttttttatgatgggtctttcttctcttgtgatttttgcgagaaaaactttccacccaccttcatttctctctttttctcttcaaaaaagttgttgaaatttctctgctcctctcatcctttcttttactggcagatcttttgtgctttgttcttcagttcaagagcttg

SEQ ID NO: 68445 - DNA, 410 bp, Cucumis sativus
  Intron number 1 from transcript Cucsa.258440.4 (locus Cucs a.258440) derived from phytozome v7.0 (chr-ID scaffold0222 9; pos 5403548 to 5403957 reverse strand)
tttagatcggtggcgatctttgttgttgcttattggtacggtgtgttagatccgtttcttgtttgatctcgaattattgaatggatgattgtacgacctagaaatgattgcgtgtatgtatgtgctgggtcggtaatttgtatctttgtaggtctagcttctattgattagattgaattgtgttttctcgttgtaaatttgagtgataatcgggatgtgttcattacttgtcgagatgtggcgggagggagttgtcttgttgatcgcacgatttattgctcagtttcatattgttgaacttgcatctgggttttttttttccaatcttctctcttatttctaatcgagctgttaagatatgttttccttccccagagttcggtgaggttggaatacacaaggattctcct

SEQ ID NO: 68446 - DNA, 801 bp, Cucumis sativus
  Intron number 1 from transcript Cucsa.238120.1 (locus Cucs a.238120) derived from phytozome v7.0 (chr-ID scaffold0202 3; pos 799117 to 799917 reverse strand)
aattctcgcttgcgaaagtacgtttctgttcctttatgatttatgaattattgcgaatattgggaatggacacacctaggtggcatttagattggaatttgtcgattatgttttatgtgctgttagcggttttaaagaaacgagaggagatgtttgagataaatgtagtgtttaaattgtgcgggaggagaattctattttcacgtgtcttgaaaattctatgtgttgtagagatttgaatttaagatatgttttgataatgttctaaaatatttgttggaatgcgttgagttggtaatataaaactactctctctttctaatcatggacttcgctaacattctgtagtttatattttctttgtttgtcgattttgtttctgttataacaatattgttatgattaaaagtctaagctgttaaactagaacaaattaatcacttacaatgtttccaatgctctatttgaaaaatataatatgcttcaattttatatggaataaataaattacgtaagtaccagatattttgttatatcaataaaatacttacgggaactggcaggatggtacccctgattacaaatctgtagtatccaagagaattgtgactgtatattgattttgattgttgcctttgaatggatgcaatgtacaatttcttttctcactattgatgtacacaccttttgtctttgtgaattgtgatttagtttcttttggtctatttgttctgttgttgtggtgttttaccattttcttttacaggtttcatttggtgttattggcttaggtgttggggt

SEQ ID NO: 68447 - DNA, 743 bp, Cucumis sativus
  Intron number 1 from transcript Cucsa.337010.1 (locus Cucs a.337010) derived from phytozome v7.0 (chr-ID scaffold0335 6; pos 156980 to 157722 reverse strand)
ttcgtcagcctccgcagggtaattttctcatgacttactgtttctttgttcttgtttttcttttcgattgctgtcaatttggctggctttgcaagttagctgtatatgggtttgggaataattgcaaaatataagaaaattgtgacgccacgggtagaagggggtaacatgaatcaactgataccaaagtagaatgggagttcttgaaaatttgcaaatatgattaagaaaaaaagaattaatagttagtatctatactatcatagtgaactttcattttcggaggctctaaacttgagcgtatttggcttaagtaatcttatccatgatgtgtgaccttttggaaatttcttaaaatacatgtgtgaggatgaaacatgctaaaagaactccctttggcatgtggaggctgatttcacttttgtaagttgtttgtgttgtaggtggggggccgtggggtcttacagaaatagatggtttttgagcataaagagtaaattgaaatttcaaaatcacaagataactgaaactaaggccaaatcgtatgaggaaattcgaacttttaaaactataatgatgatgaataaaaattaagtttagactattgaaccgagattagccatttaacgcattagagtcatcacattgtggtgcttctgctgtttaaactactctatgattttcttaatttttaaaggagttttccactcgatgcctaggtagaagagagaagcccgaagaga

SEQ ID NO: 68448 - DNA, 290 bp, Cucumis sativus
  Intron number 1 from transcript Cucsa.251220.1 (locus Cucs a.251220) derived from phytozome v7.0 (chr-ID scaffold0222 9; pos 360208 to 360497 reverse strand)
ctctaagaaccctacttcctcttgaatttatcaaggtaattattattattattattattattattgtgttttcttagatcagttgttttgttacaaattgagcaacccctttttgatgaaattttgtttcgttacttaaagtctttacctttttcttcttgtttgttagttactaaaaatcattattaaaaatctcttcttctttttcttttgggtatttcttaatttgacttgatggaaaatggattttttttttttctgtttagggaaaaagggcgatatcggaccaa

SEQ ID NO: 68449 - DNA, 517 bp, Cucumis sativus
  Intron number 3 from transcript Cucsa.205750.2 (locus Cucs a.205750) derived from phytozome v7.0 (chr-ID scaffold0141 6; pos 739302 to 739818)
tccgactccattatcacaaagaatatcctttcgaaatacttatatttacttttagcgtttccctaaagttgtagttatcatgagtaattgtttctgatagacttgcatacattttgagttttaagttctgcaaaataggtcgtttagttatttatttgttaatattggctagatagtgcaattttctgattattatcatttttcttatcactctatctaacaatgatctagtaaaagttgcatataattgaaatattcttatagggaaacaatagtaatgattttgaaatggattgattgaatatttatgaaccttaattccctctaatgagatatttgaatccattacaatctgagatcctctatataattcaccttgactgctaattagaatgttttgactttctaatacaactttgggtttcagatacattggaagagaagtagattgtaggatagctttgttgtaataagttaacttatagtaaataagctttctttaacttgaatatactcg

SEQ ID NO: 68450 - DNA, 593 bp, Cucumis sativus
  Intron number 1 from transcript Cucsa.275790.1 (locus Cucs a.275790) derived from phytozome v7.0 (chr-ID scaffold0258 1; pos 708855 to 709447 reverse strand)
ctaacaaaaacaacgaacatttttggttgaacgaggtaatgtccttaatgatttttgtaactactgtttatcccttattctctagctttttgttactctgtttgtaggtttgtctatttgtacatgctgttgtagtgttttttctcttctgtattctttcagtcttcctatggagagcttggttttcattttaaaaaaagtttgagctatctgattgttttttacactctcttctagtgtgtttttgtgtgagaaggtgggggtgtgtaataagccttcttaagtttagataacgggattaattggataatggaattcttcagtcttgcattttttaacaatgaagattcacggtaatatagttaatgcagactcaaatttgttcttgtgatggtcggaatgattagaagatcctagttttggctgtttatgattatggtaaaagaatacaactctccccataaggttaagacgactcaatcatgatgttttgactagaagagacctctttgttctttcaagggcctttatttcttttacttcttctaatgctattctattttgtcaccgatggctgtagggttttacaactt

SEQ ID NO: 68451 - DNA, 810 bp, Cucumis sativus
  Intron number 1 from transcript Cucsa.198280.1 (locus Cucs a.198280) derived from phytozome v7.0 (chr-ID scaffold0135 7; pos 1360478 to 1361287)
gtcattgatcttaaggcgacgggaaatcgctacatgtgagtttccgttcactaataactctgattagtactctgtttttgtgtatatttgcttgcaatgtgtgaggttcgcttttggctttgacctaagtctgatgaagttcttatttagacgatttgaaaatgaaagtatggtttggatcttagtgtttgggttgtttgttatatattctgcttatggttttgattttgcagctcagggtatgtgagttttcttttgctctgaattttgatttatactttgtcgtcatgtatgtttgctcacactgtgtgagattcacttttggttctggcctaagtttggtgaagttcttgtttagatgactggaagttgaaagtatggtttaaatctttgtgactgtgttgtttgtaatatagagtgtttatggctttgaatttgtagcctaggtcacgtgagttttctttcattaagaactctgattagtactctgttatgcatatttgctcgcactgtgtgaggttcgcctttgggtttgacctaagattggtgaagatcttatttagatgactggaagttgaagctatgatttagatcttagtgattgtgttgcttgtgatatagggtgtttatggttttgaatttgcatcctagcgtgtatactgattggcctgcaatatgatttttgtttgtttgaaatagttgacgatttaaagatgggtgaggtttctgttgttttaaatgaagatttaaaggctatactgactaatttctttttgcttcacattcaggtttactgctagtgacggtgtc

SEQ ID NO: 68452 - DNA, 906 bp, Cucumis sativus
  Intron number 1 from transcript Cucsa.370550.1 (locus Cucs a.370550) derived from phytozome v7.0 (chr-ID scaffold0367 8; pos 249073 to 249978 reverse strand)
tttcttcaggggcgacgaagaaaaaaggtaaaaaccgaggcttccatcttcatgatgacaatcctttctttcttgtatttctttgttctctgattgtttgttctatgatacatgttcatcgaagcaggtttgagtttggcagcttacaaatatgtaattaactgttcaggaagtatgagcaatagtctatttattagacatagttgattgccatttccaacttgcacttttttctttttatatatagtttcgaatttctatgtaggagtatgttttgatacctgttttctactactagcacacttagatcttggaattattcatttgtggatacaagatatgaaggaacttaacatcgagattgagattgaggtcccaaataagttgctcaaatccatgtatgacattctgtttatctgtctctgtgatgtaatgtctaaaaatctgtgctctaatttattgccataggaggaattgcctgtgacatgtaagcattcgtatgaaccagaatacagtgatgtgtttgttctacatttcatgtctctgtttggttacacttgtgtaaaaaacagtgtccactgtttaccctatttgagtgttccttgttaaaggttatgtgacacccaatctttttcacttttctgattgcaaaataaagtttcatattttgaaccaaccaagtgtctctgtggataagtgagatctacccaactttttataggatcatcaaaaggagatattcctcaatggatgggtaatggtctatttggagtaactttcttagtgccttaaaattggattttaagcacttaaaaggtcattacaaacatgcccttcatcacaatcgtttgtttggaaagtaattcattttgtcatttgtttattaggaggaagccgtaaagagac

SEQ ID NO: 68453 - DNA, 555 bp, Cucumis sativus
  Intron number 2 from transcript Cucsa.199090.1 (locus Cucs a.199090) derived from phytozome v7.0 (chr-ID scaffold0135 7; pos 1904554 to 1905108)
gccaacagagtagccattttttcaaaccctccaaggtatgtaaccaaaaccaacacgtatatatctgtttagtccttagacttatttttctacttcattcttatatattttagctagggttgtttttattccaatgagcttactgagtaggtctttgtcattttaaattcaatcgagttaatcaaatacatatctatgtccttactcaaaattagtttgacaataattcttaatcatgatgtaaggcaagatttgaaaatggttagaagtggttaagaaaatgtaaaaatccaacctaatatagattgaaaacgtaaaactaaaaaccaaatcatcttcaaaacaaaaccttaagaatataatattatacattttttaaaatgaaacccataatacaatgcacattataagaaaaccttgtcttgaagatatggagaaaggaaaaaagaaacaaaagttattgtaaaatcatttaaagttcttgaaattttcaattatggttgtgttaattaattaattaattaatctgtttttttctttgtaatttcaggaaga

SEQ ID NO: 68454 - DNA, 770 bp, Cucumis sativus
  Intron number 1 from transcript Cucsa.199110.1 (locus Cucs a.199110) derived from phytozome v7.0 (chr-ID scaffold0135 7; pos 1919348 to 1920117 reverse strand)
ttccgcttgctattgccgtgtgggcgactttacaggttattgtagttctactcttcatataatgtttggaactgaattaaaaccattctgttatgatttgctaattcccaattgtgtaattcaattcagctttagcgtggggtagtgcaaattattgtaaacaattttcctttccttctttagtttactgttttgggtatacaagtaggaattttatgttgttgggggattacaaataactgtgatgaaattggtgtaaacatagagaaacaaatgtataaacaatttggttgtgacgcaagtgtctcactttgattcaatcaagccatccacggtgtgtactgtactactttatatgagtactggtgcaacatatattctctagcatgtctaacgttgagttactctgcttaaaatgaaacaaatataagaaaatgtaaatcttgttgtttaatgagagttgggtaagatatctatttataggcaactttagatctagaaatttaatgatatcttcttaaccaatcattggaggatgtttttacctagagaatgaacttctctctttgactcagttatcaaatattaaaaaaatgtaacaacatatgcttctactagtattttgtagccactggtttataattttacgcttttgtacaatattcttcttccttttttcatctgcactatgttcattgcctgcggccatttgggattttacattgtggcaacattatgaaatcttgcccctttttgtttgtttttgcagt

SEQ ID NO: 68455 - DNA, 942 bp, Cucumis sativus
  Intron number 1 from transcript Cucsa.197740.1 (locus Cucs a.197740) derived from phytozome v7.0 (chr-ID scaffold0135 7; pos 1019436 to 1020377)
gccgcaccgttgctgatatcattggtaccttaataactcccactctcctcctcaattaattttctaccaacaaaaagaaaacaaaatactcatcattttcatttgaagatttaagcttttgtttcaatttgttctattaattttgccaaatacggattctttgtttacttgtttaataaattggatttttttctaagaaaagtacttgccaatgcaacaaaatgtcattgacataagtttagtatcacttaaagtactcttatacatgtgtttatcaaagcatctattattatctattgctaatcgattctttgttatatttaaaaatattttagcacatttttctttaatacaacgatttaaatttatgattgatttcaaatatagtaatatgaaaaaaaaatatttataaatataacaatatatcattatctatctaataaataaaatatgatctaaagacgataatattttgctaaaataatattcttcaagtttaactattttcatcaccattaaaattaaattacttttttttacaattattttaaatgaattaattgaattgaggattaaatgaaaaatatatattaaaaattaaaattttgaaacataacaaactaaagtaaattgataagtaaaactaaaaaaaaaatgaaagctagactcttgagaccaaaaagtttattgtttttgtttaagtaattttaaataaataattatattcaaaataattaagtatataacatttttaaaaatttgtaaatattacaaattttgtcaaatttatctatgatagaagtctatcaccgataaaccatacggtaaatattgatgtatcactatcactaatagatcataagagtctataagcaatagaagtctatcatcaatagattataattaccctcgattaaactaaatcatctttaatatcaggtg

SEQ ID NO: 68456 - DNA, 697 bp, Cucumis sativus
  Intron number 1 from transcript Cucsa.248990.1 (locus Cucs a.248990) derived from phytozome v7.0 (chr-ID scaffold0220 8; pos 159120 to 159816 reverse strand)
ggcttcttctgcccttgctgggacgattttagaaggtataatgctccttttcaaaacccccatttccctaatttctgatttgggtttgttgtttgtctgtttctgctcccattttgcattttacttcaagatgtacttatatttgcttgtgggctttttagttttttgctccttttgaaatggggttcttgtttttgtttatagtaagtactgttttgggttttctttgttggatttgaactgtcttaatgtgttgtcatttttttgctttcttgtttcctctattgaatcttttgctgctgaagagcttctatcttttcttctgctactttcattttttagcgcttacttctgtccaacttcattctgcttacttgggagtttcatccctttagatctaccatttattgagtttgttttaccatttagaccagttttagactttgaatttggtgtttgggatgctaataaaagaggaagatccataatatataagtaaaggccatatgttaatcggtaaacttatggggaatttgttgttgtcctagcagttgaaagttggatctttcactttcttccacacctttagagctttaagtttaactatagagagaaagacagagcaaagtatgttgttcgtatttttcatttctagatattgaaccctgcttctttactcacacaggacttctagcaa

SEQ ID NO: 68457 - DNA, 736 bp, Cucumis sativus
  Intron number 1 from transcript Cucsa.341920.1 (locus Cucs a.341920) derived from phytozome v7.0 (chr-ID scaffold0335 6; pos 4355117 to 4355852)
acttggagctcctctctaatccacgagtcgatcaggtggtcaactcattccaattttacctttttcttttttttagttcactccattttttcttttagattaagaatttctccatttgtttttttgttatatttgtaaaattttaaaaatatttctatttaattaattatttgaaatctaagggttatatttgagtcaacatttattacattttattttttttgtgtgaagtataaatattttgtcaaatgttctattttttacaacttttttaataaaaatatagttgagatatatactaataatatatatatctacaaaacataatagaaaataatattttcatgtatttatatatattttgattcattttattatatttgaaaacaatcctcatcctaagttaaaactatatctaatcctttagacttatttaagtcttttttatttattttgtaaatagtttcaattttttctattcatctcagttgaaaataattattttatattaaattaataaaaatcattaattaaattaacatgatttcataaaagatacctttataaaagacaaatttttaatagaagattgtaaaagaagaagaaaaaaaattaagtacgatactttgtattttttacttttgaaattttttaaaataattaactctacattgattgtacaattgagtaatttaacctaatgtatatttgtcaaggcacacaggttaagagcgtg

SEQ ID NO: 68458 - DNA, 442 bp, Cucumis sativus
  Intron number 3 from transcript Cucsa.332500.1 (locus Cucs a.332500) derived from phytozome v7.0 (chr-ID scaffold0326 4; pos 264217 to 264658)
tgtcttagaaactattgccagggttccctattttggtgagtctttatatatatatatatatatatctttcttgtgttcttacatagtttttgaagaaaagtgttgtgtggagtttgaacttatgattacgcggttggatcttgatttgatttggagattttttttttattggaagaattaggttctttcaaatttctcaacttgttaagttctttggtgagctattggttcaaaatttatcattaactcccttgaaacagagctaatctgcaataatcttaatatgggagggacttttttttttctttctaattttggagtcagagttcactcctcctattgatgttatttgaggacgagaagagtaagtagtatttagtttgtaatttgtttctaatttctccctttcaaatggtagcgtttctgtcagttctacatttat

SEQ ID NO: 68459 - DNA, 503 bp, Cucumis sativus
  Intron number 1 from transcript Cucsa.339780.1 (locus Cucs a.339780) derived from phytozome v7.0 (chr-ID scaffold0335 6; pos 2341376 to 2341878 reverse strand)
tcagatctgtctcctgaaggccccaaattcaagaggtaacctaacttggctccatttttcttcaattttcattttccgatttccattctgtttaacattttattgcagatctcaaatctcaaacgatcttttaatttacggtttcaccttttcagttgctgctacattgttaaatcttttttatcttcctcgtttgctggtgaagtaaaattggaatttcatatctgctgtaatgggaattacactggttcagtttgaatttctatctcattgcgtgatttgaatgtcactgggaggaacaaaatgttaaggggaaattaatttttatgatggttatttatgtcgtagttttctatcaatcactataggagtttgtgttggaagatcttttaaatccatgtcaagacacactggaaattattttcaaatgtctgattttctaattttggatgtttttttgattgccagtcctgtgattgttgctcatagagggaagaagaaat

SEQ ID NO: 68460 - DNA, 427 bp, Cucumis sativus
  Intron number 1 from transcript Cucsa.355990.1 (locus Cucs a.355990) derived from phytozome v7.0 (chr-ID scaffold0357 7; pos 690777 to 691203 reverse strand)
tacctgcttcatgtgagaattcaatctccattaattaatttagtcacgatttctttctttctttttgaaatgtatacttttattctttagaattttcatttttcttaaaaattccaattttcaattatgttttttacaattgtgaaactaaatactcaaattcttaaaattaatttttttaatagaaaatgcaagttttttaaaactactattttttttcgtctttccatttctaaacttcggttttattttggaaaacgttattgtcagagtatggataagaaaattgagaaatttaattatacactgaagtagtgtttatacataagctcaactttctaaaatcgaatgattatttgatagcttaaattttgaattttccattaaaaatggcagactctaagacaattttcatgatgatatgcag

SEQ ID NO: 68461 - DNA, 841 bp, Cucumis sativus
  Intron number 1 from transcript Cucsa.325900.2 (locus Cucs a.325900) derived from phytozome v7.0 (chr-ID scaffold0313 2; pos 190353 to 191193)
cgctgctaccaggacctgcagaactccatctcgaggtctgtcgaagttttttttttatcctcttgcttttctttatttacaatctgatcatgaatagaacgattaatttctttaaatgcatatattcctttaactcaagaggtttgctactctaaatcacggggtcgaattcgaatctttaaacgttgactcttgtatatcttgcaaaaattttcctaattttgtaatcatatgtttcacagttctcttgaacttattgtgaaaattttgtgctaagtcattcagttggggctcaaatgccatctagtttagggtttattgctgccgacttttgagagggttttttagttcatgattatttggttaatgtaaaattgatttgggcttcatttaagtgtgaaacgcatccatcatttatcttttaaaattaaagattaaccatgaacaagttgatcgagttttcgtgtgtaggcttgcgaagtatcttactaagttactagctcattaatggaaaacaatgattaaaattatgaaacataagagtgccttcatgtatttaatgagttacatcacgaggacaatttgttaaggttataaactaaatccaatattagcaaatgagagaaccttttgggtcattctatttcgagtttcttctcatcgatcttaacttttatctagaatcagtttttaacttaggccttctaatttggtgtcttgtaattttgatatattagtttagttgggcgaagttaacttttttactttgtagatttagttgtaatcttgctgtactctgtccccaaatattttaggttgacacagaactccaacttcaagc

SEQ ID NO: 68462 - DNA, 650 bp, Cucumis sativus
  Intron number 2 from transcript Cucsa.309440.1 (locus Cucs a.309440) derived from phytozome v7.0 (chr-ID scaffold0298 0; pos 177453 to 178102)
cagcaccgtcaacctggggctttgggacactgctggtcagtaaactttactttgtatccacttttgcatttggggtttctgttttttaggattgtttggcattgtcaacttggaactagtgtaattgatatagttaaatttattgtaaaccattagattaggttttgatttcagatgtatatattgctggggtgtgactaagtcatacattgactaggtaaggggaagatcatgatatttaagcatggacgactatctctaattgtatgattacgagacctagaaaagttccgagggttatgtccaaagtgaacaatatcataccattgtggagatatattgaagggttggttgtctcaaactaccggtatcaaagctatgccccttatacttaatcaggtcgatgtgccttgatgacatagtcattgtgatcggtggttgagctaatagatagggaatagccactccataactatttgaggggaggctttcgtggtcgtttttttcaaatgaacttcagtaatagaaatataggctgattggttaatgagtgaagtcatgttcttttcaagaaaatgaagcccttcgttgttggggtttatttggtaaatgcaggacaggaagattacaataggctgaggcctttgagt

SEQ ID NO: 68463 - DNA, 806 bp, Cucumis sativus
  Intron number 2 from transcript Cucsa.346040.1 (locus Cucs a.346040) derived from phytozome v7.0 (chr-ID scaffold0344 3; pos 315269 to 316074 reverse strand)
tcattcctctcaaccccttgtttagttctattgtactttctcaaacttcaccatttaattgcttacttctatcttgtttacttctattatggtaatttctccaacttcactttttaattgcttatactctcttttttcatactcatcgtgtgttttttctctgtctctcactatctcaactaaatagttctaattattcgattagatcataagtttaatctctcatatttttcattatatgttgtgttcaaatacagaaatataatattcaaaaagctaaagatcactttgttcatgttcaatcttttttttcttacagaaatggcaaatggatattagagaaaatacataagagtaaaacttgtctagatttgcaaatatagcatattttttaaaacataattatgtttgtttagtattctaattttactctttgggtatatcagtgatgcaaactaaaattgatatcggaaaaaatctaaactaagatgtaaatttcatatgtgtattagttgatgggttcttttcaaaacttatttataaatataataaaaagaatttgtcataaacatctatcaattcgtatcattgtaatctatcactaatcaataattaaaatttgttatatttataaatacttttaacaactttgtcgtttgaaacaattacctaacatcaaatatacgtagtatctaatatatttaatatttggttatatcgaaagaagatagttcgatatattatagcatatttcaagtgtatcagttgtcaacattaatccagttagaatgattaccaacaggtgg

SEQ ID NO: 68464 - DNA, 362 bp, Cucumis sativus
  Intron number 1 from transcript Cucsa.349220.1 (locus Cucs a.349220) derived from phytozome v7.0 (chr-ID scaffold0348 7; pos 522341 to 522702)
ggggaattcctgctccgacgcctttatcaggtaattggtgaagatgggtcaattcaaatttgtattgatttgtttatttctcattctacaaccgtgcgtggtttccaaaagatcaggtttctgattgttttgagattcttgcagcttttttgtggcaattattcttttcttctcaaccccttcgaaaaaaaaaacattttatattatttgtcggcttcgaatgttcttttagctgcctctttctctaccttcgtcccattactcgaagaagatttcaagttcttttttttttttcttcatttcattttctttccctttgattcacagagaagctgtaccgacctcctggtcacgattgtcct

SEQ ID NO: 68465 - DNA, 319 bp, Cucumis sativus
  Intron number 3 from transcript Cucsa.237750.1 (locus Cucs a.237750) derived from phytozome v7.0 (chr-ID scaffold0202 3; pos 495930 to 496248)
acaggtatttatcgaaagtgtttcttttccacttgtcccttaatcagttaatcaattttcttcttgtaattgagattaaataataaaaaatgattctcattatgggctgtggtcgaggtgtatgcagtgttttcgtatttagtggattcagctgatatgccacaataattgagttggtgatattagatagccaaatagcattcacttttgactcggtcctttctattctcatgttaagaaacttttgaagatatttggaggtttgattatcacctgacaggcagggacttgcagaggataactgggtccaattcttcta

SEQ ID NO: 68466 - DNA, 653 bp, Cucumis sativus
  Intron number 1 from transcript Cucsa.384840.3 (locus Cucs a.384840) derived from phytozome v7.0 (chr-ID scaffold0390 4; pos 264600 to 265252)
gacaccgataaggttctcttcctttctctttttctctctttctgtctctcctcctttctctatgattgctgattcttctccttctcttctttttcttctgttcatgctttatttgtgcctgatccaccttgtgatcctcgtttcttgctaagctacgagcgatctattgtgatttgctacttcctttcctttgctggaaagttttgataagtagccggaagttctattcggcggttactaatctgtttacgtctccgagtagagatgtttttctggttcatttctctctctttgatcgattgcttcgtgaagtagttggttcaatatttgatcgagtatttagatgagatcttgcgtctgagattgacctcaatttcgtttaaccgtcttcttttagtttaattcctcttaaaatagggagactggtgcgttttctttcttctctcaaccttataaatcggaaattaattggtactgtgctgtgtggacgtctgagtcgaacgacttcgcgttgtttattagtcatctaattgctgtttccgaaactccttttcctagtgatttcatttgttccgatctggtttaatcttggttgttgtttcatcttctgtaattttgattgttattttttgtaattacagttggtcttctcc

SEQ ID NO: 68467 - DNA, 756 bp, Cucumis sativus
  Intron number 1 from transcript Cucsa.238270.1 (locus Cucs a.238270) derived from phytozome v7.0 (chr-ID scaffold0202 3; pos 898235 to 898990 reverse strand)
tagggagattttatagagtgacttcaatcaaggtaagtctttcacctctggagatattggtaccactccaacctttaagccttcactcgatcttctcaatgataggttcctatggttttgataatgttagaagttagtctatacggttttaaaagttagaattagtccatatggtttgatataactttgtatatggtttcatacggtttgttaaaccatctttaatagtttctaccattttatcaaacagtatgtagtaaattctaattataagttataagatctgaattctaacttcctccaacccataaggaccaattttcaatttatcgtataaattatataatattacaaaataataattatacaatttcttaacacaattttcttaacttaaaatatgttcctaattaaattaatagtagtttattctcaattgatatttagtgggttagtacaattgtttaaattataatttgatttctgatctatgctaccaaatacatatctgaatgcatgaaattcaactttgttttcatttaattccatttttcaaattttctatcaaacataccctagtttctttaatttgaacattagtctcttttcatttcatcaatgaaaattgttgtaagaaggtgattgattgagttggatttgtatcattcacgtcatacggttttttgccagttaaaggaatggagtttgtgttaagaatttctttctatgtacataggtgatttttccctattcaaa

SEQ ID NO: 68468 - DNA, 879 bp, Cucumis sativus
  Intron number 1 from transcript Cucsa.251640.1 (locus Cucs a.251640) derived from phytozome v7.0 (chr-ID scaffold0222 9; pos 653647 to 654525 reverse strand)
acatcaccgcctctcccttgggcgttccccagcaggttctctttctctctctctgtttccgttttctttttgcctattttctttttgaaatgaaataccactcttcattgtttcttcttctgtttggttctcctatttagtttgtttcaagtttagaagtacgtttatgttcttcgagtattggtatgtgccatgtggtttatggttttgctctgtatgactgtattttacccaaacagaaaataaatcttagtttaattaaaaaaaaaaagaagaagaagaagaaaagaaaaaagaagaaaaaagaaactgtttgttggatatttagaattatatttaaatttgtgtgtatttatatttataaatttttattcttaccgggtcgcgcggtttgaggcattgaataatttagggctttttctttttctaatattcattatgattgctttcagccgttctggggcataatatacaacttttaagttactcattttgattgtcgagaaagttttattgacgcgaaaatctatatatacatataactaataatttaattttgtttcttaaatttgatgaacaattaaatggcgtttttaaatgatgaaaaatgaaaaatataatgaagaatattatatttttttgggtaaatgaattattagtttttcaaataacataaacaaaattggttgaaggttttttaggtatgatttaaaatataatctcatccattttatataagtttttgagttgatagatgatttaagatgaatcatataaagttaaatttacttcaagtattttgattgatcgttgatcgttgatgatttaaaatttgttgttgcaggttatagctgtgaacgaacagtttcctggtcctcc

SEQ ID NO: 68469 - DNA, 1009 bp, Cucumis sativus
  Intron number 2 from transcript Cucsa.200150.1 (locus Cucs a.200150) derived from phytozome v7.0 (chr-ID scaffold0136 5; pos 605311 to 606319)
accattcggtatttggtatttctcaaggtttgctttctatcaccattatcttttaataaggatatataaaatatatacttgcatgaggaaattcattctttttagtccaacgatgtgagataggattgaatcattggtttttgaaatgactatttgaatggtttattcactaaaagaagtatatttgaattgatcacgagaaaaaccaatctacatcaattcatatttaaataaaacatgtttagtaacgtattgtagtgaccatatctacatgccattaattttattctaaattaaattagatcatattcattctggcctctgttaagcttatatttattataggttgaatcattaattttctgtcagtatagtttacggtataaggtattgatatgggctattagtttgttttccattgtttattatataacttgtttgacaacatttttgttcttcatttttttgtttatcttcaactagaaacgtaaacatattttataactattttatttatttaaaaaaaatgaaaaagaatcaagaacaaaaatgtgcgttcttgtttttctaattgaaataaattccaatgccgtatatgtaataaagaaaatgtagattaaaactggtataaaacaattataaagagttattgtatttaatatacaattttagcaccaaacaaatattttcttaaatcattttaataaatttaagggttctttaagaatgaaaaaaaataagataagggatagtgaacaattatcaaacaagttctttattttcaactaaaaagttctaggtctttttaaatattcttctatatatgttgttgaatttaaaagttcagtatatcttttattgaatattaaccaaagcaatgaataattcaataattattaattgttaaacttattgaagaaaatcaaattttcatatatcttcgtatttatgtatccttgtttttgattttacagggattggaagtgctaaatattgcactttgccacta

SEQ ID NO: 68470 - DNA, 579 bp, Cucumis sativus
  Intron number 1 from transcript Cucsa.201190.1 (locus Cucs a.201190) derived from phytozome v7.0 (chr-ID scaffold0137 4; pos 131340 to 131918 reverse strand)
tgcttcaggtctgatcaccatcaccatgacttttaagtaacaaactttagtactctataaattttaacaaggctgtatagttttagttttcatttttttgaaatttattcttagattccctcccgagcttctttgaagaaactacaagtacaaaattgggttttcaacagatattacaagactacgatgttgatgaccaacaacgacaatgaagaacatgctattaaatgctttcgacctaaaaataaaaacaaaattttgaaaaacgaatcatttttttagtttgaaaattgagttgatttgtggaaataaaattggtaaaaaattaatcataccctaaaaatatagaaattgaaaatagagtttatgatcagtacctaaaaaaaaaagttatccgtctaagtctaagtaattttgattttaatctataaatttaggtctcatttcataattgaaatgtgaaaataaaataaattaatgtgaatgattaaacattttttttaattgtaagattttaactaaaaaaattaatatatatgaaagaatgttgtatgaaatttagaaaggaagtaatataca

SEQ ID NO: 68471 - DNA, 259 bp, Cucumis sativus
  Intron number 2 from transcript Cucsa.343180.1 (locus Cucs a.343180) derived from phytozome v7.0 (chr-ID scaffold0335 6; pos 5450135 to 5450393)
tatcctgtagttcccgggtactacagtacaccctctgtttttcttttcttcattttcttaaacacttgctctactacttcgaacttgagtttattaatgtcatttatcaaggaagagcaaaatctttaccaatatccttcagatctgtccatgagtgaaagattgaattgactgcaacacccacttaaattaagatcctaacaaagattaaacaactcaaaatttgataaattctatattttatgcttcgtgttcaggc

SEQ ID NO: 68472 - DNA, 429 bp, Cucumis sativus
  Intron number 1 from transcript Cucsa.218040.1 (locus Cucs a.218040) derived from phytozome v7.0 (chr-ID scaffold0165 8; pos 232531 to 232959)
aagcaaggattggttccactcaaaggtatggttttctcatttggtaacaattaccaaattagttcttctactttcaaattaataaccattaattagtcattttaataaactttaatatataaaaattgatttaatttatggcacttgcggactcaacttaggatatgagagattccgctttgaataaatctacaatgataggacaaacaaaatatgttgaacacaaagtcagaaatgaatacacttagattttgacacttgtacaaattgtttccattagtaaatattctttcagcttagttaaggagttgtaatgacttaatcctttatgagggaaaatagtatgaaaatctaatgaaatttataacccacaaaatgttctaataattttcttacttttttttttttgattttattgttttttaacag

SEQ ID NO: 68473 - DNA, 533 bp, Cucumis sativus
  Intron number 3 from transcript Cucsa.363400.1 (locus Cucs a.363400) derived from phytozome v7.0 (chr-ID scaffold0361 1; pos 969401 to 969933 reverse strand)
ttcatttctaaaaacaaggttaggttgaatctccacactaacaatcttctaagttttctggatgttttctctaatttctctttcgatttttgtttttgatcggaatcgaggttctgttactagtcgtcaccgaagctatttattgaattaaacttaatggaagaatcttatccgttgcgaaactgaaatatattgccatttcaaagagattaaacggcaggaatgttcctgatagtatggatgcaataatcaacattacgttcattcaaaattagagagtaaacaatctttcaggaatcataacttaaaacctcctcctcttctatcttgttgaattaggactagattaacaagtgtgtattttgtgctcttcacctgtatcttaaaattgatgtatatagcaggacaataattatttcctttggttctgttgagtatcagttgagatctttacacccatgtttgtatcgaatatttacattttgatttgatatttaggatcctattgtttctggcatagaggacaaaatttc

SEQ ID NO: 68474 - DNA, 667 bp, Cucumis sativus
  Intron number 1 from transcript Cucsa.383320.1 (locus Cucs a.383320) derived from phytozome v7.0 (chr-ID scaffold0388 2; pos 301580 to 302246)
cctccaaaccacctccccctgatcctcgtactcaggttcttgtttttgtcttctgtttgttcggttgttatgtatatgatgtttttcgcttcaattatatgctggaatggttgtgtgattccttggcattgtgctttttttgtgggtattggatatgggattaatggtttcgtctagggctttgaagaagggatgccacagaccaaaataatgtttgggtatgactcgggatgaattactgtttgaggtatataaggcctgagttaggtttcatacacgttcttggtatttgattcacatgtgcttacatttttttgtacttgtagttttttggttttgttttctaaccgttaaaaattgcaatagctcgagtgtttgaaaaggtaataggcctgaggctgagattaccagaagtagaaggtctgttttgtaattgtaacttgcaacttggaagtatatggcgtaggcttagtttctcgagttcatctaatattgggttttagaactccttgattgatatgcaaaactagtgtacgagaaagtttcatttttatgctttatctcttttcttccacggattcatttgtcaatttcattgcatgttgggttgtgacatggtttcaattatgtaggccaggccaaaatcgaaaggaagaaaatctctgtc

SEQ ID NO: 68475 - DNA, 592 bp, Cucumis sativus
  Intron number 1 from transcript Cucsa.308300.1 (locus Cucs a.308300) derived from phytozome v7.0 (chr-ID scaffold0297 8; pos 450065 to 450656 reverse strand)
tcctactccttctcggccgcaaccttcatatccaggttaaggcttctgtagctcaattgtaatggtttgaatttaacctagagaagtgtatttcgttacgggaatatgaaatggtgtttacattctaacttttttttatagccttatagtagcaaggacatgtttgtgacttgttgtgagtgatttttttattctttatatgtaatttattttaattattttcgtatgatcattttaacgtttgaagtgtttatcaaatagcgttttggaaaggctatcaaatagcgtgtatttgatagcgttttggattattgtatgatcatttcagcgtttaggaaaggctttttgtttctaaggttttgtaattgtttcttatatatttcttatctaggagattttgtattctttagcactagtctcttttcattgtatcgatgaaaatggtttactccttttcgaaaaaaaagaaaaagaggtttgtgccggttacacgtggttgtctctcttaccagctatatcccgttttattgtaacaatgttcgctgttacttatactcatttacgtgcagaactctctggtgttgatttgttc

SEQ ID NO: 68476 - DNA, 675 bp, Cucumis sativus
  Intron number 2 from transcript Cucsa.373330.1 (locus Cucs a.373330) derived from phytozome v7.0 (chr-ID scaffold0372 6; pos 131796 to 132470 reverse strand)
gagtaagttagatgaaagctgtttacctccttgacttattgttattatttaatgttgacggtacatcgtaactttatcttatcgaaaatggtacatatgcgattgctaccaatctgagttgtagctatgctggtcaagacattataatgttgaccaaaaggttaaaggttttaatcctctccatatattgttgtgctcgaaaatggtacattttctattttgaactctgaagaatctgcttgtgctcttttgagccaagaagtctgcagcattttatggtaaatagaaaaaataagtggagctagtcctttacattttgaatctagacccatgtttcattgctcttcttgttgttacctttctaattattttagtaattatgccttatttataaattctaatcagttctagtcttgggggatgatgaactgttgggtttcttgtttgatgtcaatatatataagtaatgtggaacagggcacattttcggaattgtttgattttggtggtggatttttaattcattcgacggttttcctttttacaagaaatgcttgcgactaaattagtctgaataattgatgatgttggatcatagttcctagtagtttgaaatttgaaacaatgacagatcaactatagttaatactcatttcactttatcaggattgtgtg

SEQ ID NO: 68477 - DNA, 1015 bp, Cucumis sativus
  Intron number 1 from transcript Cucsa.357500.1 (locus Cucs a.357500) derived from phytozome v7.0 (chr-ID scaffold0357 8; pos 620895 to 621909 reverse strand)
cggctcgctgatttcatacctaatcttgtttccaggtactgtggctgatttcttttttgaaatgctcgttcgttacgtgttcttgttttcatgttgttccgtgaaatgtatgtggaaactgttatatgtttcttaatacttttttctccaggcattacatgtctgtaatctgttcttgttgcaagttttcgtcaggtggttactttaggacattaatgtttggtatttgtgtctgttgttattacatgtctgtaatctgttgtttttgcataaatgtgatatttctttggttgagatgacagttaccatgataaaaagtgctaagaacctgggttgattgcccaaaacattctttaacaaaccaacattaattatttagacatctgcatttgccatgccggtagttctgtctgaatcaagctcttattatgacatggagatgcaacttacaaagttttactaatgtgtgtgctcgattgaattggtcgtgcctgcactttagatacatatcttggtttgttatattgccctagcaaacatatcactttggttggcatgtcaaggtcttgtgaaataataactattaaggttgttgtctttgtcatgtggatcattatatcgagtgaagggacaagttgagctcatcagttgtgatattacaagattattagaataccaaaaaacctttttactgttacacaatgaatcaaatgtttgtgtcatgatgacagttattgatgaaacaagaaagaaagaatgtaggtgttactgtaactcgccttgaattatgtactgctttactacagaaaacccaactgctgagtatatattgcttcaaagccatttttcgtgatagtttgactttgaaaaacacacatatttcctaaagatcttgttctagctgttgagattttttaccatgttttctttatctctgttgtacaagtggactgatcattattttctgtgattctgtccagtgggagaattccttgtccacatcctggtcggatat

SEQ ID NO: 68478 - DNA, 335 bp, Cucumis sativus
  Intron number 4 from transcript Cucsa.340000.1 (locus Cucs a.340000) derived from phytozome v7.0 (chr-ID scaffold0335 6; pos 2529108 to 2529442 reverse strand)
tttgttggattaaggtagcttacaagctcaatcctctcaatgtacttgctatttcaaactatttcccccttcttatcaatgtagtaaaatatcagtccttgagtaggcagaaagctagaaatattggttttttgctttcactactgatttgtatagttcttatgtaatggaaactacatcctaaagtgtgaatttgagcataacttagtagttaatacaccaagtaccatcctaaagtttgatggttttgatttcccaccactctaatgattgaacgaactcagaatataaaagaaaactgcaccctaaatcatgacatgctaatgtttttcagg

SEQ ID NO: 68479 - DNA, 591 bp, Cucumis sativus
  Intron number 1 from transcript Cucsa.232030.3 (locus Cucs a.232030) derived from phytozome v7.0 (chr-ID scaffold0198 9; pos 169664 to 170254)
tttgtgagatcgctctgcatcagctcatttttcaggtcccaatgctttattttttgcgtttatatatatttttgttttgctcggttttgttggtttatacgcttcacagaagaaaatcaatggttgatttgttgttcaacccacgttccactagtcttaatgaaagcttaaaactcagaatctttgcctcacaagttagaagaagaaaagggaattaaatcaattaatgaatggggaacaaattgcctagcattcttatccgaatcaataaacaaagagaaaagaaagatgtatatggtttggtatgaaaatcttgttgaaagataactgtatttgaaaaagttgaaacaatcgtgatcaattgaaatgaacaacaaaatacaagggaaacaagatagaaaactaactttgagtttgagtttaattgaaggaattgagacacagggagctgctgttgggaacggttttgttgttgttgtttgtttatttgttttttttttttcctgtttccttcctgtttacaatcttggaaaatccaattttttttcctcatttgcaaccaggggttccaaacaaggcaagggaccaaag

SEQ ID NO: 68480 - DNA, 311 bp, Cucumis sativus
  Intron number 1 from transcript Cucsa.284380.1 (locus Cucs a.284380) derived from phytozome v7.0 (chr-ID scaffold0265 3; pos 1188373 to 1188683 reverse strand)
tctctagtttaattgggaccaaacctcaggtttgtgtttttctctttcaaactttttgttaatcaaaaaagagaaaaagtacttcagagtatcaaactgaatcaaagcaacctaactttcaattttcaatcttaataattacaaatggaagtttctcagaaaccgattgtctttcaattgcaatatcagatgccatcttgaagcaattagaagaaaaagtgagatgtgatggagtgtacgatcatcaattacatttcaatatttctatctgggtgtcttctttttggggtcttcaagctctttgtcaaact

SEQ ID NO: 68481 - DNA, 582 bp, Cucumis sativus
  Intron number 1 from transcript Cucsa.338420.1 (locus Cucs a.338420) derived from phytozome v7.0 (chr-ID scaffold0335 6; pos 1325790 to 1326371 reverse strand)
tcagctactcaaatcccccagaaacccctctccaggtatttatgtaatgcgcttcctcccttcaatcctatttccttgatttttcctaattttaatcgttttcattcttcgatttcttgattctttcttcttctcatgcttccttcttcttggttctttcattatgaattatccctctcacgaataatggttgcgtttattgttctgtttttcccttcttctttttttcttttcgttcaacccttttctccaataacttctttgaatttagctcttgttttatagcggattttgattccttgtttaggtttgttagctaatgcttattttttaagttatgctttcgattcatttttagcattcttaaagtttccgactctattgtataagcctatatcgatttcatctttgaaagtgactttacttttgtgtttttgcttgttttgggtattcaattttcttctgggcaatgaagttttgtagtgtaattactttgtatggggggttttgtgcgttttttttttttaataatcctcttttgttacagataattggcacgctggtgtgccgtcgtgggaaaag

SEQ ID NO: 68482 - DNA, 694 bp, Cucumis sativus
  Intron number 1 from transcript Cucsa.249340.1 (locus Cucs a.249340) derived from phytozome v7.0 (chr-ID scaffold0220 9; pos 68593 to 69286)
ctctcaggttttttcctctctcttgtacacaaaactgatcacccacgttgttccccggaaaatgattcacattcttcctatcttgcctgcagtgtctttgactataatatgattgaaattcacttgttgattggtttctaattcttaattactgttggtttttctgtttagtgataatacgctgtgagagtttcgttcgttttcgggttttttttatgcgattttgtcagagtttgctacgtatgccggtcaccctgtggggaaatgttacaggtcgaccggaaatggagctaggtttgatacgtgcagtttgagttgtggttttgtgaggatttggtattcgttatgtgaattttgtaattaactatgccgtttgattgatatttataacggtgcgttgctttttgaggttgagaatttggacttaacgcctctttctattcatggttaattggtttcatttcttccttcttgttgactgagattggctgtagaatttgttgccgcgtatatgttttaatgttttaatggtggcctttttttttgaatttttctccctctcagtgggagctcccttctgttttttcttttttccttctagattctttttcaataatctttctatcagtggaagttctaacccattactaagtatttcttcattctcttgatatagttgattgaatcatcaatc

SEQ ID NO: 68483 - DNA, 638 bp, Cucumis sativus
  Intron number 2 from transcript Cucsa.249340.1 (locus Cucs a.249340) derived from phytozome v7.0 (chr-ID scaffold0220 9; pos 69468 to 70105)
ccccccaacaggtaaagctcttgatatttttttatactaaatttcattttgtgtaatataagagtggctattgacttaattgttcttcctttattgaaagtttctattgcttatatgttaccagcattatttgaaaaccagaaaatttgcgttctcttttcttgtacctaattctcgaattaataatggcgtcgtttacccatagttgctctaatgcttcttttctctgcagcatgttgttttaattctttgccatatgtttggatggtccctttccatgtttgttatctggctttataagatttggagagaaattaaaggatttttaagtttattttgaatttgttgtcatggttttcattttcatgaaccgaattttggacgggtgggaataaacagtctggaaaataaacttaatgtttgcttggagcttctcttgtcttaatttaaaggcattaggcaacacagagtcacaactcaaagcccaattctgtaaaacaaatgacaaatgagacacgttattcttcttactttctgtcttttgtttctagtggatgttttctttttctttttccttatgaagaataataagaatattcccatcgctttcttgtaggtgcacattacccagggtgact

SEQ ID NO: 68484 - DNA, 672 bp, Cucumis sativus
  Intron number 1 from transcript Cucsa.374310.1 (locus Cucs a.374310) derived from phytozome v7.0 (chr-ID scaffold0373 3; pos 191526 to 192197)
tggtgtgtgttacccatcaagggttcaagggttcaagggtaaattgaaactaaccatacattagagccatttttgtgtattttccttttaatttgtaccgcttggaaacttacccatcactaatgtcttgtcacccctcttgtgcaagctttctttaccattattaaaggctactcttactacaagagaagaggagaaaacaaaaagatggcttgctgcctgctggtttttcccagcatttttctgacttgatttgatctatctttctcgtttatttgaatgtttcccctgttattcatatttgaatttggtgagctgtgtatttccagtgctttcaaatttcaaataataaaggtttatctacagtgaaaagtgttctcagtttttaaaaaattttggtctccagttattcttgtttgatgccgttgcagttttttttttttttaacatgtattcacatgtgtatatctctgtgtgcatgctcatgtctaaatatttctggtatgttgtgattgtaggttataatgcccaacttaagaattgcatggtggatttttcatgagatcgttgatggatgatctttattcataacaacttttccaaattttcttacaccggcttatatgaatcaaatgagcaaaaagaccatcctctcaaaaatcattggtaaga

SEQ ID NO: 68485 - DNA, 744 bp, Cucumis sativus
  Intron number 1 from transcript Cucsa.256250.1 (locus Cucs a.256250) derived from phytozome v7.0 (chr-ID scaffold0222 9; pos 3913656 to 3914399 reverse strand)
acggtaatatctccatccctggctgtgacaagaatgtgagttttctctgaacttctccccttttgcggctgtttttggcatagaatctgaccatttttttttgtcttgtttactcgttttttaggactagttttgcaattttgaattgctattttttcttccccttccatttctctggttttcttatgccatttctgatcgattaagctcaatttgttaaatttgttctctgttctttgtaagattatgaaaactattgtgcatgcggtttatttgtttgaggttttcactcctgaaaccttagccaggtaagaaaaaaaacaggttaaagcacttgttttagttttcaaaatttggcgagcagacgttttctcagggggaaaaaggttaaaagacagagaacgatttttaggaaataagcatgattgttaaaatctcaagaatttatctatcaggtcctcatggacactcattgatattgatgattgatctaggaggtaatttttttggggagaatatattagttatatgtcagcaaaactgaccttatcgaacctggtgattggcatcagcttcatttttctttttctgtttcatagcatgctgtgtttattttacttcgttttctttgggaaaacgaaacatattgggtactacgaaaagttaaaagtcaaattacaacagagttttagtagtttttctttccacattacaattatgtgctgaaatttgcctattttacag

SEQ ID NO: 68486 - DNA, 528 bp, Cucumis sativus
  Intron number 1 from transcript Cucsa.242840.2 (locus Cucs a.242840) derived from phytozome v7.0 (chr-ID scaffold0204 7; pos 2484621 to 2485148)
agtctcctctttccacagagcttcatcagaaaaaggtactttttctcttaccttcaatcaagtcctttgtgttcattgttttcccccgccctaatttacaatactttacgacctatcatgatcgtgttccatgtaattgttcacgcaattcgtttaggttttgcccctctccgcttgctctgatctgccccccattttatcactgaagatcatttccatgattttcttttcgagcgatttgagaaatttcatattaatctgcatttgtagcggatatcgtttggtttgattttggaattgtttgttatctagcatgttatttgattcgaattggcgatgtacattagcatgtttgctaatagctgcttttatgtcacaggatattagaaattcgataacgtaaaggaatgggattaggatatatatacatgtttcgttattatttcaactaattaattttctgttaatgtacatgatttcattatgtgggcagaagaatttaggcctgggtctttgtgtttcttttct

SEQ ID NO: 68487 - DNA, 703 bp, Cucumis sativus
  Intron number 1 from transcript Cucsa.397860.4 (locus Cucs a.397860) derived from phytozome v7.0 (chr-ID scaffold0415 8; pos 400617 to 401319)
tctttcgtatttggagcgacgaactgagaaaagatgtagttgttctttgtacatctaatctcattcagtagtttgattagtatgtttttagtttgtacccttttagattttgtttcaccatttgccttatcagagaaatattatgactaattgctattagctttagaatcattttgtaaaaaggaaaaagtggagagaatcatttttggaagattggtctttttttcccccataaagtaagcctctcaaagtgagaatttatctaaaatatattattctattaccttgagtttgaaaataagcagtaatgttgtaatgctttgattaactacagaaggttaaattccacttttcttctttgctttttctttttcaactgtcgaaactttcgtgccaactactttttgatctcgctagggtatccatcttgtatttccaagaatacctttgtgaaaaaagtcatgtcaattaaagttgaatagttatgagcaattttattaataattttttttggcattacgatgccatgttttctggtttgcatgaaataattttcatttttttccttgaagttcaagttggggtttctgaaacggataattctggaaaataatgaagatctagtgagaactaattcactagttatggatttatgacttttacctgtctttattgccgcagataagcatcttgattccccata

SEQ ID NO: 68488 - DNA, 393 bp, Cucumis sativus
  Intron number 2 from transcript Cucsa.281900.1 (locus Cucs a.281900) derived from phytozome v7.0 (chr-ID scaffold0264 1; pos 76352 to 76744)
ctcttccaaattcctgttctctttgaaggtgctgcgtcgttttctcctgtttttttgcgcctagggtttcgttttttcaatcggaaaatttgggatattcatagaaaattgaaacgttttgatgttagttatgaggaattgactttaggcaaaaagttcaattaatctggaagaaaaacatagcatttaaatttatcagaactttgattttgaagaacagtgatgaatttcacttatgaaatgcttcaaagacattatgttttgaggtcgatactgtccaaaattcaagaacaaaactgtggctgttgaattcaattgctttgttggctacttttcaaaacaaaccttccatgttttctccttcttcaggtactgttgctgacaatataagat

SEQ ID NO: 68489 - DNA, 696 bp, Cucumis sativus
  Intron number 1 from transcript Cucsa.254740.1 (locus Cucs a.254740) derived from phytozome v7.0 (chr-ID scaffold0222 9; pos 2977139 to 2977834)
tgaagcgcctcgagcaagaggcaagatttctagaggtgggttttcttcttcttacttcttttatcttctttccaataccttttagtttcatttgaattgagatattttgatgggtttcattcatattttgcttttaagttttctgtttttcttttttaatttatctaactgttgtttttcacatttcttaaagcacgacacctttacattttcaatccaattccttttctttcttaaattcactttgtttttcttttgaaaactttgattgaaacttgtaacagaaagtaatatacaaggttcggttctatcatcattttgacttttttttttaaaaaaaataaaagcctgcaaatctcattttcatctacgtttccagttttgttggctagaagtggttttaaaacaagtcaaatggtgaaaacaaaaataaaatagttttgagaagcttgttttttgtatttgaaatacagctacgaatggaatctgtgtttaagaaatacgtgaataatggtaagaaattaaaagaaaataaacaatttaaaaaaattaaaaaattaaggtctcactcagcttgaaaagtaatttcgaaattttcttagtaaaaaaatagaatgaataaaaatggaaatttaggaattccagtgtgatgaatctgcaggaggagctggagcagcttgaaaaattagacaaagc

SEQ ID NO: 68490 - DNA, 959 bp, Cucumis sativus
  Intron number 2 from transcript Cucsa.218560.1 (locus Cucs a.218560) derived from phytozome v7.0 (chr-ID scaffold0165 8; pos 619971 to 620929 reverse strand)
gcttgttgttgttttgagtgagtacaattgtattcttttcatttgacattcatggtttcttacctttctgggtttatctattaaccacagacatgattctttcgtggcttcttcttccagaatgagctactagattcaaagttaaattatcatggaagatggattaatgttgtaaaaacaattcttttagagtatttggtttgaaaagagccaataagctttgaaagaaaagtcttagattggtttgaaaggtgagatttgccaagtgctacttgttgaatctctttcaaatccttatactttttttatttctttaatgggtatttatagttgctttggtcaatgattgtctttgagttctaacaatgagtagtcgtttctttattaaaaaggaaaaaaatagttgaaactaaaaaggaagacaaatggtagggctccttggacagccaatctttgaataaattctccatgcgcatttgattgtcaacagccttgaatttctgtagcgtgggtctcttgggtgagaattgttaagccagtaacgcagatgatgaaccatgtccaaagccttgcatgttaccattaaaattccatgactgaaatgatggatggaccatacttggtaaatttctatggtgtatttttcaagtggaagaaacaaagaaactgctggcccacatgacctccattgaactctcctgtactaaaagttctattcttctcaagccacattttacacaagattgccaacaaattatgttggtagtttaaactttaatgttagctatgacatatcctataattagttggaatttttttctgctgctatatgcctacttaataaaacaaaaatgagatgggagaaatgattggttttttgtgctattttaggttactcaaacaacatagtacaataacactttaatgtgatgtggttgactttggtactttgctttcag

SEQ ID NO: 68491 - DNA, 771 bp, Cucumis sativus
  Intron number 1 from transcript Cucsa.360340.1 (locus Cucs a.360340) derived from phytozome v7.0 (chr-ID scaffold0358 8; pos 1027718 to 1028488 reverse strand)
aacagaatctatactcttccattccaatattccacgttctccattttgtctctcattaattgttattgggtgggacttgtccataaatttctctttccatgggctttcaatgggcccattaaccctctcttatttgagccccgttttaggcccaaacttcaggccacctttttttgtgctactatttattttccctaaactaggctatatccaaagattgacctatgtggttcaactacatgatatgttattacattagtgcccgtactcagcaatgtgaatactttgaagtcaaaacaaaatttttatatagttgcaaaccttacaattagatttaaaataattaagtatacactaacatttaatatttttttttgttaatgtatacactaacataattaagtgtacactaacatttaatatttaacatttaagtttatcgttaattttaatcattaatagaccataaaagtttgttagcaatacaagtattttgctatatatttgtatttttttaatattgttatatatttaattattatttctaaaattgttatcaattataattacttttttaatatttataaaactttcctgtttggagacatttgataaaattgaaacgatacagagaagattatcatgccctgcacaaaaataatatggtccaaattttcacaaaacaattggatacaaaattattagtataattacatgttaacataaaattcaatctcacatataataatttgctactttttaaaaattaga

SEQ ID NO: 68492 - DNA, 1016 bp, Cucumis sativus
  Intron number 1 from transcript Cucsa.218630.1 (locus Cucs a.218630) derived from phytozome v7.0 (chr-ID scaffold0165 8; pos 660581 to 661596 reverse strand)
gaagcttctaacccttcttggtttacgccattgaggtactgttttttaacttttgatgatttttgtttctaaatgcatgtttgtttgtttgtttgtttggtggattctagctgcattttttttttgctaatatagtggatactttttatgttttctggtgtgcttataattttatttgtgcatggtgggttttttcttgttctctttttgtcttgtttggtgtagatgagggaaagcagtttgtgtaattttgtttttttagtgattgtatggtagtttgtagcaattgaaggaagcccttttgattaatcatgtcaggttgaatctgatttttcccatgtggttttgttgtagtgagattactgtgatgtgctttactaaggaaataatttgtgtatgagttgtgtttttgctttttctttttgaaattttggttgggaagaaaataaggggttactgttactgactgtatactcttgaatttggaacttggaagaattttgtgattactttgatgtttcgaggaatttgttgaatgccgagtgatacgtaacgattttgttttctctaattttttacggggcatttggtgcaagaagtgaaatagtttgatcgtggaggctaccttgcaaggagttaaataagtcatgaattgttgctctttagccttggggcccatagagggtttaagaattccttgggacaaataaggagaggagtaactgcactccaactcctagtcctactccttgtgccaaacatgcccttagagtttcgacgtcaaaggaattagagtctttgattttatgaaaatataggtcttactgagaaccttttgatattttgaggcaatgtatcttgggtcttatcatccaagtttcttaaacagcttctcagctttaattgaagtttgctttgtatgagtttcttttttgaagttcaaggcctctaatacatatatgtttatttctgaacttgcagattgcttattatattttgcgtcatccacctgataa

SEQ ID NO: 68493 - DNA, 516 bp, Cucumis sativus
  Intron number 1 from transcript Cucsa.271250.1 (locus Cucs a.271250) derived from phytozome v7.0 (chr-ID scaffold0250 0; pos 147784 to 148299 reverse strand)
aacttcttctccatcgctgctactgcttctttcaggtgcattttctcatttcttttcgtgtttctgtttcgattttggtcctgggcttgagggtttcagatcccttgtggatatatctgcattttgtttggatttctgttgttgttttgatttgttaaaccctttggatttttagttttatgtttgtgtttatgaatcgatctgttgatcagagtttagtggtggggttttttattattttatttaattttaaaatgggttgaaatttatctttatgatggtttgattcattggttagggtttagtttacacccgtatgtggaatatggtaactagtaaggagggaaatgggggttttcttcttcttacagatttgatttgagtttagtcttatttgtttttgttttgattgttactgttttggggttattggggttgtttgaaatttggtcatgattgaaactaatagactcgtgtttgtttgatattgcagtgatttttaagatatttctgtca

SEQ ID NO: 68494 - DNA, 468 bp, Cucumis sativus
  Intron number 1 from transcript Cucsa.374420.2 (locus Cucs a.374420) derived from phytozome v7.0 (chr-ID scaffold0373 3; pos 291012 to 291479)
ccctcccaccgcctctcctccggttggtacctctttcttttttccctcctcctcccccccatttctttttcttttaggtcattttagatcgtcaatcttcgaaacgcattttgttaatctgtcttattaagtaactgtagcgaaaaccatgtgtcatttgcgattgagttcgatttcttgttgctaaagtttattggaataacctggttctgaatctgggttcactttactttttgggttgggtagcttaattttgtagtacgggaattatctagtttaagctttgaattctgtttttctgcaacgtttcttatggtgagaaatgataatttttgtttagttagcttgatgttgttgctggttatctgctgttgaaaccaaatgcttattttgattttgctgaatgaataggtgtgaattgtgattgtgattatttatctatgccatagcttttttgtcaggaacaaa

SEQ ID NO: 68495 - DNA, 893 bp, Cucumis sativus
  Intron number 2 from transcript Cucsa.202280.1 (locus Cucs a.202280) derived from phytozome v7.0 (chr-ID scaffold0137 6; pos 356778 to 357670)
gcactgctttagcccatcagcacaaggcaattccggtatgtcctcttgatttttcaagctctcgtgccattcctttattatcctgtctctttaaaattgtttagcctactgccgatagttacatgaacaggtatgatgtttagacatgggcttctactctatctgcttaaattatagagtcaacttcggttaatttatatacggtttggataagacggtgttttgacattagaagaagcttactctttaattgagctgcgaggatttacagagaacctttgcattgctagtatacctttacacaagtcaccgatcgtctcttagacttctttggaaaacatgtttgtattgcttttactttttgtagtgtgtgtttggattgactcgtaagtgtttaaattaaatgtttataaacgcaaaagaaaaaaaagtttataaacactcaagtcaatccaaatgggtcgtcagtaatttggtaggagcttggttggccccttatctcccttccctcttttgtatatctttgtcttagaatttgtatgtcctttccggttcatgtacagagacaggatagttattgttacctctgaatgccaaagatgaatgaatggatcaaaatttccagtctatgcagtaccgtttttgaacttgtctttattgacaggattatgaattgaggaatttttagtattcatctttcgtaatgagtatttgttcatgcatatctttgttttcttatggttgaggatgtcatgtttcctcaagttctggttgcagaaggtcgtaggatggtagtgcatatagccagaaactacataatgcctaaaattttctagcgttctgttggctgaaactgtggaatctgaatatccaatttttttcttcaggttttg

SEQ ID NO: 68496 - DNA, 705 bp, Cucumis sativus
  Intron number 4 from transcript Cucsa.328040.1 (locus Cucs a.328040) derived from phytozome v7.0 (chr-ID scaffold0315 9; pos 314624 to 315328)
tgtgacaaataaaccaactctgtttctggaaattggtgagtgttttgtttgattgtatgtgtgcacaatgaaaatatgggatttcagagcttggtttgttgttcgttctactatttattgtatctttctggattgattgagattcacgcaaagtactagaggtttactttagttattaactattttactatgatttattttagcttgtagaattttgtaattggggataaatctatccttccattattgtccatttgaaatttggtttgctcaggttaacttcacagcttcttatatattgagaaatctggtatatggtgctaaatttggaatggtagaattcttttggacctttgaatcttgtctcacctggatgtctcatcttcttttccaatcaaattcgaaggaattagggaggtggaatgagtggcccaaggtttattggataaatcttatcaatttatttacaatgagaccaataccaaatccgggtatatattgaagggctcacttggtttatttgtatatgaaaatttgagatgcagtaacgaattgtttctttcttctgatggcgaactagatatcaattcagggtatgtgaaagtactcactggattatttgccatgaaatctaatattttacatctggcaaaattttctttttctgatcaataggcagtacagacgagtattggaggaggccag

SEQ ID NO: 68497 - DNA, 892 bp, Cucumis sativus
  Intron number 1 from transcript Cucsa.303580.1 (locus Cucs a.303580) derived from phytozome v7.0 (chr-ID scaffold0295 1; pos 1471534 to 1472425)
tggatttgaatactcatcaaattcaacataattgggtttgtgagtagtgatgatctcaatcggaatccatcaactccatacatgaaccctaattagtttatttatttatttatttattttgaaattagtttattgttttaatttattttgccttttcgtcttccctttttctgaatacgatgtaaacattcatacctatacctatatacttatatatatatatatatcacttttcctaatttgttcttcaatatatgatcattattttttcttttcttagcgcaagctcgaggtttgagtgagctgaaactagcttgatcatgatcaacatttttttaattttaaatatttcataattttgaaatatatacacaaatattattagttttctggagaatttgtataatggatataatattggctataaatgtttatattaagtatttgataacttatgaactatgaacagaaggaattggagagtttcttgcttgtttgctcaattgcaagaattaattgcatcatttattaacaaaaagaaaaaaaagtaatgcattaacttcattttcacttgggttttcttttttttcctttttactttgtttttcacatagaggcaactaggagttggaaatttgaattatatttacaagttcattccaattcatttatcttaattaatggattaattaattaacaatcaagttgcttttgtttatcaattttttaattagtattatagaatttaggctgtaaacatagtttataattttaattcatttttgggtgcataagagaagaggatgacacaaagatatgctaataacaaaattttcaaggaagtatataaaaagaagaaaccatcacttgacaccaaacacccaaaatcaat

SEQ ID NO: 68498 - DNA, 584 bp, Cucumis sativus
  Intron number 1 from transcript Cucsa.342590.1 (locus Cucs a.342590) derived from phytozome v7.0 (chr-ID scaffold0335 6; pos 4865426 to 4866009 reverse strand)
tcttggctcaggctttaaccaccttggcttctcaggtaaatttctaatctctctttctttttatatattcaaaattcttatctttaaaaataatgggaaaaaaactatatcattattattattgttattaagaagaccattttgatcaaccaattttgaaagatattttctgaaaagagcaatgatcatgttttttttactcacaaagaaagataaaaaacagctcacacacacacacacataaatgtatgtatattgctacatattcaattgtttgggtgcacagaaataagtacaagtacaataatttgttcttttgaaaaatatcatagattttagagatattcaagcacaaaatgacagttttttaaaaaaatatatatgtatagtttctttttttctttttattaaagaggatgcatgcaacctaattgtatccaaaagacttctaatagtgagattttataacatttaaaaagaaaaaaaactagtactctttccactcttgattttgaatatttttgtaaaataaaagtttgatttttacagggattagttgaagagaacaaaatagactcatttaa

SEQ ID NO: 68499 - DNA, 371 bp, Cucumis sativus
  Intron number 2 from transcript Cucsa.261770.1 (locus Cucs a.261770) derived from phytozome v7.0 (chr-ID scaffold0226 5; pos 321662 to 322032)
ccattgcgcacccacaggtacccaaattcttaatccattgttgattttcatacaaatttagcttctcttatatttaatatttaatatcatgaaaaagaaccgttttgattttgtttttatcttctctttatttttccctttttttgtctcttcatttgttcaaaccttatttttattggaggcgataggacccgctgaaatcacacatcacttgctttactttattgatcttctaattgttgtagtgaattagaaagattctaatcagtgatacaatacattttttctggtttaagcaatgttagtaatgttggttcaggagttgatgccacataggcctgtacatagcaagggggagaggagccaaggtg

SEQ ID NO: 68500 - DNA, 442 bp, Cucumis sativus
  Intron number 1 from transcript Cucsa.310450.1 (locus Cucs a.310450) derived from phytozome v7.0 (chr-ID scaffold0299 5; pos 268707 to 269148 reverse strand)
ttaaagaaggtttgatttgaatttcttttgttttctttacgatctctagcggaaatattgaacgtgaagtagtgcagccggatgtcgttaggatttttttcttgttcttttgatttatcggagacgaatttatttttcaaaatcaaataattgtttcattttatcatcgttccttttactatctttttccacgaagaaattgcaagcggctctgtattcgattgaaacatatcctcctaacctaatttcgtaacaatatgatgatttcttctatgcgattatccttcctcgttcaagcttgtgtaaagttgttgacgtagatccgtatatataactattaataataagtttctggaattgcatcctgattttgttcgtttgctggagaattacgttatgtatattgttcatttctttactgcagatataggagcggagagtg

SEQ ID NO: 68501 - DNA, 921 bp, Cucumis sativus
  Intron number 1 from transcript Cucsa.312580.1 (locus Cucs a.312580) derived from phytozome v7.0 (chr-ID scaffold0299 5; pos 1950021 to 1950941)
ttgaattctctgatcaaactcttcacccaaatcaggtattctattatctaattagttattatatccataatatattttacactttcatttcctttttatgttttaattttctttttaggtttgatttcttcttaaagttttaaaattctggatttttttattaagacaaaaacaaaagaacaaaaatccattaattttgtcataaaggaaaatattttgtttactttctaatttttctgttaatttctttatttttatgtttggagtttcatatttcttttaatttaatttttcctagaaattgtattagatgagaaaaaaaaatccttttaaaaaaatggttcataacactttttatttttgcgtatttcaaatttgacaatataactattaaagtaatggatagtaatttaaacgataatctacttttaaatttatcaacgtgtgttatattattataattttttttgttatttttgtaaactttccatttttttattatgtttccaaattttcacttaaaactaacctaaggtctattaattaatttgaaataattgtaaaataaaattgaaatttaattttaatagtgactaaaactattaaaatttaattaattaattatcattattttaattagtttaaattagttagtgtacattaatactaaaatttaagtaagaaaaatgaagttaaaattgtaaattactatggagtttgcaacaatagcgaaaagaaaaaaataatgctaccttttcaaaattacaaaagtactatttaccaaatttgatataaaaaagtgttatgaacagttgttttctaattttttttttgtttttgtaaattttaattactttgaataatccaaattaatattagaattaatgatatgaacagagcaactttgcaccggtggaagag

SEQ ID NO: 68502 - DNA, 915 bp, Cucumis sativus
  Intron number 1 from transcript Cucsa.358510.3 (locus Cucs a.358510) derived from phytozome v7.0 (chr-ID scaffold0358 6; pos 103242 to 104156)
tttttcgccatattttgcctataatctgtaagtttatgtttttttgggtgtttttgaactgcattttgatattggtcagctggggttttgctgtttctgtcttacattgactgctttgagaccttgagccacttattttttttttccaacttttaagttcagtttgatggttgaagataaattctctgcctggttgtaccttttggtttctgtgcctttttcttttattgagtgtgttgtttgtttcctctgttggtttgttgtaattggtataagagattgtgtaatgtagaatattggagggtttggattgtagttgctgagagttctttttctttgctctgaatgttgtgtttcttatttttttttttttttctcgttctgaaaagtttcagttcttttattggaaagaagagtacatttcaagaacaaggggttttacggtatggatttctccttctggatgtgaaaatcttttgggaatctgtatgttttttgaccttgtggattggacaaaaacattcttccctggggagagagagttttggttggaaccgttggaatttagttgaattttggtgaatagttggaacaaattggtgaagaaattttccagttttttaaactggaaaggtaagaccttactggtctcctaccccatcctatgaaataattacaacaacaacaacaaataaataggcttccaatcttcacactttgtttctatgttaatcgatccattgattcaccatttcaattgatctgctcttgggtactgacagattaatgaaataaactaaaacaatgcatttttcccatatggatcatgggattgttcgtgtttcatcatttggtttccttttgaaaattgaaaaatcaatcttgttgttttaacagagaatcaaattcagatcg

SEQ ID NO: 68503 - DNA, 961 bp, Cucumis sativus; identical to SEQ ID NO: 65927
  Intron number 2 from transcript Cucsa.398160.1 (locus Cucs a.398160) derived from phytozome v7.0 (chr-ID scaffold0415 8; pos 703727 to 704687)

SEQ ID NO: 68504 - DNA, 843 bp, Cucumis sativus
  Intron number 1 from transcript Cucsa.338610.1 (locus Cucs a.338610) derived from phytozome v7.0 (chr-ID scaffold0335 6; pos 1435187 to 1436029)
gtggtttgagaggtaaattttgttgttcgaagttgttttcttgacgaaatttaggtagcaggaaatattcttctgtcggaattcgaacttcaggtcgatattgatttgaatcctaatcatttttttgggtacttttgcacattgaatttttgggaaaaaaaagaagtttgacctaccttctcaaaccaaggttttctaatgctgggtcattaagtttttttttctttcccaatctagctttgctctggttcttgctggagatgaaatatagagaatgaatgtataggaagaagacaagaggaataagaaagggagagagattgaagaaaagaaaatactaaaaaatgtttgaagtgggtagtaaaatcttattttaaacaactgggtcaaattgttaaaaaaaatgtattttctaatagttgtttgagttcttcaatatgactttttgaaacatgccagggttctggtaataaattaaagactgtaatttccttgcaagaactatttattaggaatgtttagagtcttcttttgacacctatgaacaagtaagaaaaaaaggactcgttagaagaattttatccacatgctctcttcatcatgtactctaccctaagtttctttcattgcctccaacaaatagcattttggctcaactttttaggttcaaataatccagtttttgtgttgattttcacttgatcttcaagaaggtaatgatttctgaatgtgatgccctgttagcttcttttccctgattttaaattttgattgagatgaagtctgtttgagtagctctgtatatcagggactgtgaagtcttcattggatctgtctgaagaa

SEQ ID NO: 68505 - DNA, 220 bp, Cucumis sativus
  Intron number 2 from transcript Cucsa.337080.1 (locus Cucs a.337080) derived from phytozome v7.0 (chr-ID scaffold0335 6; pos 214340 to 214559)
aagttctactcgtcagtgatcctgataccgataaggtaaagccagctttcacttttcttttctttttttcttttttctttttgaatttgattatttttttcttaatgattttatattgggtgaatttgcttaaactagggctctgatttcttgaattcgtttgtgtcggtgtgtgttcttaaaatgtgattatctgattgagtttcagtgtgctgcttcc

SEQ ID NO: 68506 - DNA, 695 bp, Cucumis sativus
  Intron number 3 from transcript Cucsa.337080.1 (locus Cucs a.337080) derived from phytozome v7.0 (chr-ID scaffold0335 6; pos 214589 to 215283)
ccccgaaggcctagagggtttagcccattttcttggtgagaacttggttttgttcctttagactttcattggcgatgtttacgcttgcttctagttctctgatcatttgctagcttttacgtgttttgagaaggcttattcattatttaaggcatggcaaaacatttgagagatatagaatgaaaccatttgtttggaagacataactaaaaacagtttctgaagcaaatgttcttttctgcgaggatagttttggaaggcagtttcaaaagcagtttttattggtgcttttgaagttatttgtttaatgtactcattaattattttataaagtaatttgttttaaaatggattggagaaagttagaatttagttcccatattgtttaaataaatgcaaagataataacaataagtaaatatatattttgaatattggtttaatttaaaaatgtagaaaaaaaattaaaattgaacaattcaagcagttttaacttttaagaaacaacgtttagaaacttcaccaaatcctgcaaaacactgacatgtagtggaagaactatacaagggaggtttatgattggagttgctggggcatgttttatagtagtacgctagtttttaatctttattattattatttttttcactttggcttctttttgttaagcttatttacaattcttgacagagcat

SEQ ID NO: 68507 - DNA, 663 bp, Cucumis sativus
  Intron number 2 from transcript Cucsa.212410.1 (locus Cucs a.212410) derived from phytozome v7.0 (chr-ID scaffold0154 3; pos 236404 to 237066 reverse strand)
cgtgtagtgttactgaagttagagccttcgatcaggtatgttcatctgtcattgtgtttgatcaaattctattaggatgattaagcgttgcccagttgatatgaggttttagggtcaacatactagcgatagcttataagttattggacatcatttgtgaaagccatgctggttatttttgttatctcttttgttttttgttttggaaaaaaggaatgaatacgaaactcttcctccttgaaactgcaaattgttgtgtgaataatttaactctcggatcgaaaatgagatgaaggaatcggttgatggattgttctaagcccgcaacaaaacaacaggcattttatcttttgaacaatgtcaattaatatttagcagacgttacattctctcggaggaactagatacctgctgttttagtaaagctccaagtgctgttctttggaaataaatattttgaaaacgtcgtctgaacaatgctgaactagattcttgtatagatggatagggttcttagctttggattgatgacactgaaaatttgagaaggaaagtaagttctttccgtaaatggaaaagatttaacttcactatactaatattgtaatgtgcatgtaactttctttaggattcatttgattttgacataccatcgctcgacca

SEQ ID NO: 68508 - DNA, 597 bp, Cucumis sativus
  Intron number 1 from transcript Cucsa.212410.1 (locus Cucs a.212410) derived from phytozome v7.0 (chr-ID scaffold0154 3; pos 237072 to 237668 reverse strand)
tcaacgttagttttgcacttttgatcgttttctgcgacttgtcttctgtttgctattttgatccatttgtgtttgctttatggagaatttgttcttattcggtgaatcggagggcgctagtgagatattaaacgttgaaatgggagggggatgagaggaaatgatttatgttaaattagcaatcgaccaaaagcttaggaactgaggagttccagttacgaatattaggaagaatcgaccaagaagcttaaggtgatacagataggttatcgtaaatttaatgatatcggtattttgacggtagatagtaaagtcaagccaaacagagaggcttctggaaattcaagtgcgaatataagaaaactcttatttcaaactgatcgatcataattatctttagtatttgtttttcaactttgctgcgggcgtattgtcgttttcttatgattttgttgtttctaaatgcaaatttaatttcttatgaaagaatgttgttgttctcagcatcagttagtttgagtttggtcggatacttaaattcttaattttgcttcttgtgcagcttagagtgccgaaggttcataaaacccgccgcca

SEQ ID NO: 68509 - DNA, 846 bp, Cucumis sativus
  Intron number 2 from transcript Cucsa.341070.1 (locus Cucs a.341070) derived from phytozome v7.0 (chr-ID scaffold0335 6; pos 3444055 to 3444900 reverse strand)
aagtttcgggtatgactactgttgtgggcgtccttcaattttacatttgaactgtcttaatccgtcatgaatgcgatctcttttgattgaatttttggttttatattctctgatctctcttgtttgtgcataaatttttatctgatctcttagtttttggtttaaaatgttttgtgctcatggtttagctcatcaggcagaatcatggtgttcattgcgtaaattgtctattttatacttgttcggtttgactactgtagccgttgtctttcattattagttttataactgtcttaactcatcatgaatactatctattttgattaaatttggggttgtatatttctctggtctctcttgtttgtgcatcaaatttcgtctgatcattttgtttttggtttaaattattctgtgctcatagttcagttcatcagccagaatcatggtgttcattgcataaattgtctattttaaacttgttcgggtttgactactgttgcggttgtctttcattattactttttcaactgtcttaacccaacatgaatacggtctattttgattgtttggggttgtatattcttctggtctctcttgtttgtgcatcaaatttcatctgatcattttgtttttggtttaaattattctgtgctcatacttcagttcatcagccagaattatgctgttgattgtgtaacttagctattttaaacttgttttctgtctggctattggttgtacacaaacatgcatccttgcctgcaggctttaaaatttcaatgcctaattacacttggtaactcttcctcaggaacacctgtagactgtgtctctttagcattgtct

SEQ ID NO: 68510 - DNA, 922 bp, Cucumis sativus
  Intron number 1 from transcript Cucsa.362910.3 (locus Cucs a.362910) derived from phytozome v7.0 (chr-ID scaffold0361 1; pos 600344 to 601265)
tttctgcttctccttcttccaattccattttcctggtaattttgttcgtgggtttcgttttttgttgcaatttgtgttgttctgttctacgaccgatctgattgtttctgtccccttgtagttatttttctttctttccgaagttggggttgagaattttgcgaaaatggggctgatttctgggatctttatgggggttatctttgggattgcattgatggctgggtggcagcacatgatgaggcacagaagcaccaaaagagttgcgaaggtagttaagtcgtctcttctgcgtcttttagggtgtttctttttggagtttcctcagcttatcttgctcaaactcgtgttattaattttggttcattatgtaggtctctttttgttgattatttttctctgatttgatatttgcgtacggttattatatattttgcggatacatagaattctggctggctaaatttgtctcttatttgccgaatttcttggcatacacagttattagttcataatgattgttatgaagggaccgggaacttccttcctttatagtttataggctggacttgattggatctttgttgcaagggtactcttcatttctttttcttcaatagctcttgtgcaaattttgcagcgaaaatgattgtttggggctttttgggatgttgtagttctctacgaatttttaagaaaagactgataggtttttttagaaaactctctgtaagtttataaatgtggttagtgaaagacaatgcaatttgattggcaatgatatgttttgagtatttgactgtagattctggactaattttgtcttttatacgagttattgtatatagtatatgaagtctggccactacgttgttttctgagaacatgtttgcttgtttatttcattgtgcaggctgctgat

SEQ ID NO: 68511 - DNA, 712 bp, Cucumis sativus
  Intron number 1 from transcript Cucsa.381310.1 (locus Cucs a.381310) derived from phytozome v7.0 (chr-ID scaffold0385 0; pos 64296 to 65007 reverse strand)
gcagagaatcctcttcttggcccttccgcttccacgtgagcttgtttttctaatctttacatttctttttcaccggagtttgagttaatcagaacgaaagtaaacgaatattgacctagctttcggatttgatatattgctaatgctataattacattcttttactgtcgatttgctgatatgaataatcgagaagagaataacgtttctgtgcttcattctttcctcctgaagatcaatgtttctgacgtttagtctcggaatatactaatgcagttcttcgttcgatgtctgcttttatgatgcttgaaaaggattcatagttgtttttgtttattctggactcttcaataattattgtaggactgctagtttttgtcctcacggaagtaggctatttaaatttgaatttcttgagaaatgtccaatttaatggttacaatgttgaaatttaagacataagcaattcaatcaacgtttgtaaccaatctcaacgagaagaattgctaaatccatacctggaagaagttaccttcacagtttactgaattgatgctttctataaaccaaaaactgctttgttctgagacgaagtgtttgatgtgataacaaattaagtggaaaagctttgatttataacagcaatttgtttaagtttgtttactggtaagctacatttatattttccgtatcctgctacaggttagagaaa

SEQ ID NO: 68512 - DNA, 445 bp, Cucumis sativus
  Intron number 1 from transcript Cucsa.259230.1 (locus Cucs a.259230) derived from phytozome v7.0 (chr-ID scaffold0222 9; pos 5817426 to 5817870)
cctgcagcaactccaccacttgattttagagttcttttttcttttcttttttgtttcatgagatgggtatctgttgtatttcaacatcaacagaacatttgacttggtattgattctgtataatccgttaatgtgcaaattcgtagcttaaacagtgtgtttgcaacaactcgtagaaggctctccaaagttctgaacatcacaacgattcaaattccagagaattctctgctccatttcgtcctttttctacttgaaatgctcattgaactcagaaatcagaaccccttcttatggaaactgtcagtgtaggacttatatcgattcccttcatcttcaacggctcccctcaacgaactaggccttgctctaccaacttcttgtcttctgggtttcttcaatccaaaaagcttcgaagatttccccacaatttttcttgtattaa

SEQ ID NO: 68513 - DNA, 937 bp, Cucumis sativus
  Intron number 1 from transcript Cucsa.267100.1 (locus Cucs a.267100) derived from phytozome v7.0 (chr-ID scaffold0236 4; pos 189216 to 190152)
gcaacaacgaagtcactgtgagttctcaaccaaatcttttttctttttgaaaaatttgttacatgtattatcaaggcaacaaacaagattttggtttttagatttccaaaataattaaataaatgtttggtaactgttattggctttctttttaaataaaaaagactaaaaagtaaaaacatgtttgcccgactattttcaacaaattacgaaaaaaaaaccagagatttttgttgaacttgactcagagtccaatcactttctagttcttcgtaaccattattaacaatgtttcacacatcttacgaaccaagaaagctagagctttcattcgaatacaccaattgctacaactttccgttgtaagttgaagtacatggaagggaacaaaatttttgttttccatttgcaaaaacaagttttaaactccaaactcaaactctaataatacgttgtcggaagcctatggtgaacacatgaacccccaaataaataatcacaaaatagaatatttgagagaagaaataaaaaacttatttgaaagacttcaactctccttcatgtgtattcttcttcacactcagatactttacaatacaatatatcaatcctatttataggattgcatgagcacaactcacacgagagttaaacacacaacaatttaaatcctacacttagttcgttaacgtgaaactcatactaaattaactctaacattttaacttacatttcttattattattattattatttttgctaacactcataaatcacttcacatctaacttatttaattaaaacatgtttaattttgaacaaagtctgcttccctcgagtctagtcctaaccttttctgatttgatacagggtcttaacattttacatttttttattttattttatttttttgccaaaaacacaggtggcaccattg

SEQ ID NO: 68514 - DNA, 822 bp, Cucumis sativus
  Intron number 1 from transcript Cucsa.253460.1 (locus Cucs a.253460) derived from phytozome v7.0 (chr-ID scaffold0222 9; pos 2066930 to 2067751)
ttaccagagtgggctcaggtgagatttaatcaatggcgtactcttcatttcctggggttaattctgtagggtttttgttccttttctttgttatttgagctgtggctttcttgaactctgccaatttttggtggttcttcgagtttttgttgttgataggtttttgggacaatttttgatctgaacaattgaatggcgtttcgtttggttcttgtgggttgttttctttttgaattattgggtttgtgtttttgggacccttgttgtctttggtgctgttttgtttacttcctcattgtgttctctgtggtaatttctgctttgttcttgactgaggatggttttggaatatgttttaaactcaattggttttgattggtgatattttgcgaaacttttgactaaattagattattagaaggaactgtatggagtaggaagcgtagttcatggaaacgcttagaactatataaagggcaaaatgtgtgttcatctgtcagttggacaagcttaattaaagccctcatcactgttgttaatcgaagcacattcacaatactatgaccagcttaagaaatggaaatgtcaaattcagtagacttatgcgaacctcgttgcagagttatgttgtggtttgcatctggttgaagtttatggatatgttagaatttaacttcctatatctttctgtttgttactagaagtggaattggtattttgctaagtagtgacgtacttttgtagtttagtatgtcattatcgttagtactatgtctgagttgctagttttcacagataaatcaaaatcacggagtgtatctg

SEQ ID NO: 68515 - DNA, 362 bp, Cucumis sativus
  Intron number 2 from transcript Cucsa.259110.1 (locus Cucs a.259110) derived from phytozome v7.0 (chr-ID scaffold0222 9; pos 5754238 to 5754599 reverse strand)
gtgctaatttcccaaggtgaaatttcatttatcatcaattctttttaaattcacaacgaattaattagaatgtttagttagtgattaaccatttaattccacatgtttaaagaatagtcaacagacttaattcaattgggatgaagaatagtcaacaaatctaagttgcaagtggagcacatgaaattcacatacacacatcattaaaattattcttttcacatgtgtttttttctatacaataaacaaatcattaacccctatcaactacacaacttgcatctcatcgagagagatattactaaattacgaaagtctctaatcttttgaatttttctcttttctttttctgattattgcag

SEQ ID NO: 68516 - DNA, 672 bp, Cucumis sativus
  Intron number 1 from transcript Cucsa.284940.2 (locus Cucs a.284940) derived from phytozome v7.0 (chr-ID scaffold0265 3; pos 1485714 to 1486385)
gttgattattctctctcctttctgcccttaaaaatgtaagctttctcccggcttttttgtttcttaaagcaccgtttaatttcctactttgttcttccctaaattttaggcctttttttttttttttctttttcttctatgattgtttgtgtgttgtttttgaagtagggatactttcttattatcttttcccttgacgaccttgttttgggttttttttttttttttttttatatattattattattattcctttcttttctgcttgaatagtttctcttttctagtgctttagttttactctggaggcactgtgtgtcaaattgaaattattatggatttttgtttatttcgcttttaatttttttatttgttgtgtgtagttgcatttttagtaataccatttatgatggttgttaatgatatatatgatttcaggaatttagctaagttggcttggggacctctgattttggctatttgacgctgttcttgttgttttcctttgaatttactattttcttgattctttgcttgaaatgtatgttctttacctaattcagctatttccagcagctcattatgagctcattaaatgtgcatatgaaccttcttactgttggcttgatgagtttgtgacttcttattgtgacggtttttctgatggcagtt

SEQ ID NO: 68517 - DNA, 635 bp, Cucumis sativus
  Intron number 1 from transcript Cucsa.236670.1 (locus Cucs a.236670) derived from phytozome v7.0 (chr-ID scaffold0201 8; pos 586328 to 586962 reverse strand)
ggacctgatcttcccacacttaccctccaagccacgtaaatttctttcttcttctcttcttctctttttctaatgttttggttaatgcttaatctgttttattttattttgggtttattccaattttcagaaaaccaaaatatttataaatatggggcaatatctattagtataatactccttatatttctatatattttaagcatttttgttactagaaaacattatactttcgtgtatttgaaattggttttttttgctggagagagaacgaaattagagaaatgcttttgctcggtgtacttagaaattggaatgagttgggaataaatgccttctaaaccaaatcaaattttctaaagcatctgttttcaaaaagttcatagttaaattgagcaaattttgtatgggtgttaagaaggattcttttaatagaacagtggcaagcaattagatatatatatatagtaacatgttaaaaaatttataaatataacaaatacttttaaaaaaaaagtatgttataatagacatgttgcaaatattaataaaaatgcatgtaaatttttctatatttataatatgatatatggtatgcagttttgaaagcaaagaccggttgagagtacgaataa

SEQ ID NO: 68518 - DNA, 521 bp, Cucumis sativus
  Intron number 1 from transcript Cucsa.302420.1 (locus Cucs a.302420) derived from phytozome v7.0 (chr-ID scaffold0295 1; pos 607146 to 607666 reverse strand)
ttttgagttccttagatcttttactggcttaagaggtatggattttttcaaaccatgtttgacttccattgattcagaataatcttagatcgtttttatttggatgagaagaaaattttgggtttttacgttttctgaggttttgattttttttctcttgtcttttcgtcttccttgtttactctggtgggtagatagatagatgttcttgttttgttctgtttgatgtttctgcgaatccttgcgggttatgatactggaaatacttggtcgagttctgatttttttaaggaaattttctttctactttttgtttgatgagttttggattttgttactgtatttggattggatttttttttttggttttctgagaattttagggtttctagcaagaagatgaaaaagggaattgatcaaagatatgttcaatttgaatactgatatcgagttttgtttctttttttttgtgtttttttttctgaaactacagcgaattagaccaaacgagttggaaaaat

SEQ ID NO: 68519 - DNA, 916 bp, Cucumis sativus
  Intron number 2 from transcript Cucsa.385320.1 (locus Cucs a.385320) derived from phytozome v7.0 (chr-ID scaffold0390 4; pos 660358 to 661273 reverse strand)
cataagctgtgagaagcttgaggctgctgtaagaggtaaaccctgtctttgctgtaactatgaattgccccgtctttccatctaattttcaagttgcatgttgatggcacatcattcaagagttcaagtcgtcttctcaagttgaccaaagatgtggtttatagacatgctcaatatatttttaaaatagtgctcccttggttgtttttatgttatcggagctggaatcaatcaattatatagatggttttttctttgagatacttacaactcacacctctttgtcttccctattttgcaaactatattattttattttatttttagaaaaaattcataaatactcatgtgaattccaaaatctaagtaacggtaaatatcggttaaatattgcagttaaatttaacggaattggtcagtggactaaattctagttctaggtttgctatgtggatctacgttactacagtggactcacataagagtttgatttttaaagtactcaaagtatatgcatgtaactcttttcggttaaattgaaaatttgatctttataatttagaaaaaattattgcttttaaaagttagaattttgtactttagttttgataaaaccttataaacagtccttatactttgatagaatagtcttgcaaagattatttcaaaaagttttatcaaatcatagaaactaaattctaactctctaaatcatacggactaaatattcaatttaacagtcttttttcttttgctttggttactacagtcctgttagattagtcttcaccaactcgggtgaattatgcatgtttacctttgttaatttattcgataaaagttaaaagcgttattggttgtttagtcttttggtttcaccatagtatgagtttgacccgaaacaaaatgagcagca

SEQ ID NO: 68520 - DNA, 623 bp, Cucumis sativus
  Intron number 1 from transcript Cucsa.385320.1 (locus Cucs a.385320) derived from phytozome v7.0 (chr-ID scaffold0390 4; pos 661524 to 662146 reverse strand)
aacttctctgatgtaagtttgaattgaggaagacttttgtattcaactactatttacatatttctctcctttcatatattttattaatttttttttaatgaagcttcattttgaaatgaaattgatgggactccgtggagctggtttaggctttttggaatcagtctcttgttcatttcaaatgatcagtgaaagagttatctttgaactttgttttgattttcaattgagaaatcatagaaatttagaccatgtttaattgtgttttcaaagagaacgagtgtaatgcatgctaaaaagtttcttggaatcaagactttagtctgagttttcttctacactcccgtgactacataatttcttgccttgtattgttgttttcatatcttctttagaagatatttatgaagttcaaccgatgctctagtattccacctcttcttaagtttgtaatgaatgaataatttgaggttcatatattctagtatgcaagacgtttttcatggattgccatttattttggcaaagcctctttatcttggtgcacatgtttcaggtttctgtatatatattgcttgctaaatttactcgcatttttatcagcaagtccaaggagtttgtag

SEQ ID NO: 68521 - DNA, 918 bp, Cucumis sativus
  Intron number 1 from transcript Cucsa.241280.1 (locus Cucs a.241280) derived from phytozome v7.0 (chr-ID scaffold0204 7; pos 1358311 to 1359228 reverse strand)
agatcaaccaaaccgaaacgcacaagattctctccgtaagttctaccattttctctttaaagatcataatgtggactctaatctgatatttcattaaacgttgttatcatatttccatttttagattgcttacaaaacaatcctttttaagatttcacaagacacaaatctttaaaacgttgcgttatacccattgatgactcctttttctctttcgaatattttaagtcaaaccaaacaaactttggatggctaacaaatttcttacatatcaatatagatatatttggtctatgaaaaataaattatactccttttattcattgtggggtaggttaacgtgcttttagatataaagttggagcccacttatatattaaatgttatatctactaacatttaggaagaaatattaattgatatccaattaaatattgaatattaatatgaaataatgatgtctcttagatcgttgaaggcttcaataaaccatttgtaatttgcttcttttttatggtttgcaaacataacaaaggataattgttagttcatttttcttaaatgcattaaaaatttaaaataataaacaaaacaaatttgttaagaaacaatagtttggtgcatctaaactacaattatctgtttgttgtatacttcaattatattcaactttttgcgaactacacaacacgaagaacctaaaagtctattatgtaggaaaaataatcaaacgtagccgttttgtaatttgacaactaattgaactaagaacaattaggcacaatgcaacctaaaaatatttcctcctctaaaagtaactaaatactctttgaataaccatttcaatattttattatcccaaaacccaaaatcacgatatcaggagtgcaaattgagagggataaaattgagttcagt

SEQ ID NO: 68522 - DNA, 962 bp, Cucumis sativus
  Intron number 1 from transcript Cucsa.360070.1 (locus Cucs a.360070) derived from phytozome v7.0 (chr-ID scaffold0358 8; pos 829502 to 830463 reverse strand)
ccctttaccatcctggtctcttagctcaccctcaggttcgagttctttttttgctttttcgttttggttcacatttctatgatctacatgttttgctttggttatttctgtatgtttatttgttgtcgggttttgttcttgatctctgaatctcacgttatgaccgatttggtgctttctgttgtggcggtgtttttgttttcgtatttgtttactgtctcgagttctggatgattgtgaagaaatggtgtttttcccatgtcaagagactgattgtttcatttctttgtaatgggtattggtattttgctttcttgttagttgtgggtgatggatattgggcctgtttgaattattttcttttctggaagaaatttcttcttaacaagacgggaaacatgatctcttttgattttcatggggcgtcgataatggtatgatgtgccatgcattggttcacttccgaggctaaagttttccattaaagatgtttatatttcattttttcgttttatattttttaatccgttcttggttcgggcagattatactattttgtacattactcgttgtcttagttgatgacagctgacttctaccaacccagctgggttttaccagcttacattatcaatgaaatgatagttccatattacgtgattgtgtgacattatgagtcttttggttaccggtctgtgtttttcctgttattttcactgctttctttttttacttgtttggcctctgtcactccgacgtactgattgaaataccatcgaggttcagcttttcatttggttacatatttcgtgtagtctgtgtgattgcatccattataatctctttgctttcttcccatttcataaagattcgttatctttttcacttaacgttctaatggtttatttttctgtttccattatgcagcttgaaccaattccaagtgggaatttaccaccggg

SEQ ID NO: 68523 - DNA, 817 bp, Cucumis sativus
  Intron number 2 from transcript Cucsa.280250.1 (locus Cucs a.280250) derived from phytozome v7.0 (chr-ID scaffold0263 3; pos 169755 to 170571 reverse strand)
tcagaggtagcggatctttcatttaaaatacaacttcctgttagttatcgatctatcaaataacttttagaaaggggtacaataagacgctctagtgattatatagatttatctttaacgatcctgaactaaatgaaaattcccctaccgtaagcattgtgtggaaactagaaagcaagtcagtatgcttaatcttgtttggcttactaccttaatatatgaagataaacgatttgtttttgttaagaaacaaatttcattgatgtatgaaatctacaaaagaagcataaagccagagccaaagataaacgggtaggggaatacatcctttagataaggagaaaaaaattcttcaccgtcagttgttgaccagtatttatcagacctgcctcttttctttatttgtttattagttctgatggattctatcagttcatcattacaaactcctaattttaggtgttcagcgttgatagtggcgcttgtgccttacctgacaaaggcattaggtgtcaatattatatttgcctactacccgtcattatagtgctctatgttcctgttacttatgtttgctttttgcatggagcctttgactcctccctcttgactaatttgttatgcaagtatctcaatttttaacatttgttcttctgtctagactttggaattcactttctaatgatgactcatttgttggccttaaccgccattcttaattggctaatttttggtttctaccagggcattactcttatggattttcctttaacacatttttttttggataaaggggctacacttgttgtatctggag

SEQ ID NO: 68524 - DNA, 671 bp, Cucumis sativus
  Intron number 1 from transcript Cucsa.280250.1 (locus Cucs a.280250) derived from phytozome v7.0 (chr-ID scaffold0263 3; pos 170613 to 171283 reverse strand)
gccagaaacccggtacttccggcctccgcaagaaggttccttcaccatctccctctctatttcattttcacttcaatttcttcattgctttcttatcatctctctggatccgtctcattccttctctcttttttttttattgtgatttttcattccgttagatcttctgttgatcagtatattaggagaaggattctgagtttcttgttgatccgtaatgtctcgtagtatttcttttctcaacttgtaggttttactgatggatgcgtttctgtgttccttaatttgattccctcgtttctgagtgatgcatgatcgtttgatcttcttcttagatattcgattatgttggattggaacagtgcactggatctggtgccttacttaactaactctcatacgattgttatggataataatgaccttcctatctttactctcaattctcaaatatttttactctcagtttcaaacggatttaatcttttatttgttacatattctatttggacagtacaataatttcatatgctagttgatctttacatgatagggttttatattgttgcaatgccatgttccttcctttctgtttccacgctggactgattttttctgtggctggatcttttctaggtaaaagtattcattcaaccgaactacttggagaa

SEQ ID NO: 68525 - DNA, 362 bp, Cucumis sativus
  Intron number 1 from transcript Cucsa.259420.1 (locus Cucs a.259420) derived from phytozome v7.0 (chr-ID scaffold0222 9; pos 5932339 to 5932700 reverse strand)
attatcataacctcggcctggttcatagtactgaggtaagtttcatttcagctcgttcgaaacctcgtttttgagcctcggcattgctctggttgtggttcttttctaattcttacttccccttcatcagcaacgcgatgttggattgcgtgaattaaaattactagaagttccaactccaatgttagtcctgtttttagcttgccattgaaggatgtatgagagtgctgttttctatattggttttattttagttcaagtttaatggatttaagaattctgctattctaggtttatctgacatcattttgtttttgggtacatcgtattatcgatcatgttataggtggattctataggca

SEQ ID NO: 68526 - DNA, 919 bp, Cucumis sativus
  Intron number 1 from transcript Cucsa.313370.1 (locus Cucs a.313370) derived from phytozome v7.0 (chr-ID scaffold0299 5; pos 2548825 to 2549743)
atctccccggaactaccttcagccgagctctcaaggtaaacctttgctataaaaaatctgttacttgttaccatatgtgatcaatgacaaataataaatgtaacttatacaaatcactttcaaacatgactgattcaaaaggttagaatttttgtaacatataattgagaaacttaatgcatgattaatgacacgtaaatattttttgttccaattatttgaggagcacgtcttgtatatattattattacttttgctctacaagcacatgtctaccttttagcagcacatgtcaacttaattaaaatggagattttgtaagttttgtcgaataaaattaaaagtaagttttgaataattaatacaacttttaagatgaaagtttagatataagctagaaaatagttgaaagttaaaaaatggctaagtttaccttttatttttcatcttcttctgcaattttcctttttcttttctattttcttctcggttttttcttacattttttcttttatattatatatatatatatatattaaatcccttattaaaatgtactcatattttatgtcttcaaatgctgatatgttgtcaaaggaatttaatatcatgttttattgtttttgttctttttgttttttaggtgaaaatttgggtcttgtccttcacctaccatgctttataccttgatatgcacatatacccccaaagaaaataataaaaataaacaaacaaacaaataaatatacatgaaaaagacatcacattcacttggtcaaaactaaaaaaaagagttatatatataaaaaaatatttgtggttttcacagcctattattggttcaaccacttttctagtatatattttatatttatattgatgagggtaatttggttatgtactaaattgcaggcaagaa

SEQ ID NO: 68527 - DNA, 695 bp, Cucumis sativus
  Intron number 2 from transcript Cucsa.373220.1 (locus Cucs a.373220) derived from phytozome v7.0 (chr-ID scaffold0372 6; pos 44293 to 44987)
aagtgcccggataataaattgggtagcaaacacacagccaaaatggaaagacctacaacagaaagtctttgattcaccaatggtatgaaactgatcatttcacaacatattttatatgtagataataacatatagttgtaacatttttttcttcttgaaacatcttgaactaatcgcaatgctcgctacacctgacaaaatgagcaaaccatacttcacactgtttgatgtagaaaaaacaattctcagagaggcataaaagaagtttacaaagtgccaaaaatatgatcgtgtagctcacacatgtcgcttagtagaggcatgccatctacaagctaacttgatggactagccaagtctgttgagagtattaaacaaacccataaaaaaaaatgaaaaaaagtatgaagaagatgattggattgttcaagactgtggaggagaaaatgaacaaaaagtccgaagaactgcatgtcaacttaaacaacactgttgaagagatcaaaagaaaacaacttacttcttcaagtgcccaaaagaaacctgaatatatggtaagcatgatctttaaactttaagatacttctttgtttatgtgtatatgaaataaaatttgaaaatacactatatttgtaattcagaggacaatgtctattgagaagcaccttgataaggtatggggggaaagaaagaag

SEQ ID NO: 68528 - DNA, 754 bp, Cucumis sativus
  Intron number 2 from transcript Cucsa.242620.1 (locus Cucs a.242620) derived from phytozome v7.0 (chr-ID scaffold0204 7; pos 2332662 to 2333415 reverse strand)
tttacacctacgggtaaggtttatttgctcattcctatgaaaccagatgaactatatgaagttcttaatttaacttaattagttgacaatgatttcatcaaattttactctctattgagagtagtttcttggcatttttgagttctgtgctttttattacatatatgtgtttgtgcgcgcgtgtttttttttctttcagtttctctctcccttatcttttgtaaatttctgttttatcattcacgtgtcaaacatttttaatcaagtcctctgaatagtaagatttattattagttgagttagaatcatctatgttttaattcaaagagttgcttattcatcacataccatgtcagagtattgaaagcctattcactctacttactcccctcactaacgtgactaacttttatggattgttgtgaaagatgaacccatgacgcaactatactattaactgcccatctcattagaaaatactgattttaaatttatataatcatttcttacacatataggatgtaatattgtaatcgaatcatcaaggacaaaattgtgtacatatgaattagttgaaacatgaatagtgccatgatttgaacaaatatcaatgaactttgcaaatttgtgttgctttggatatcaaaaatatctttttcagtttgccaaattttatttgattgatataaatgattgattgtagtgatttttcttaccaggtacaagagactagaggttttggctgcatttacta

SEQ ID NO: 68529 - DNA, 591 bp, Cucumis sativus
  Intron number 2 from transcript Cucsa.322260.1 (locus Cucs a.322260) derived from phytozome v7.0 (chr-ID scaffold0308 0; pos 2038714 to 2039304)
ttcggttggcaatcggtggacaaacggtctctctggttaaggcattcgcgattaattttggctagatgatgatacagatactcttttactataatatagtacttcgttttttatgggaaatgttcattttattatttattgtaatcattagaacaaatatgatatcagttttcaccctctattttgttctaccaatatgatatatttcctaattattattactttactgtaaaagcgtaggaaaaagtgaagtttgtgcttgtcacttgcctacttccattgcttttttcgattaatatgatttgatttgctactttattttcagacgactctcctcaatcatattctgacatctcaacatggcaagcgaattgcggttattgaaaatgaggtatatactacacgctgtttatcagcctcacctatgctgtcttatttcattcttggcgataaggaattgctcaattttgtgcacaatttattcttcatttattagattgatcaagctgcgatcactgtttacagtttggtgaggtggatattgatggatctttggttgccagtcactcctctgtagctgaagaaattgtt

SEQ ID NO: 68530 - DNA, 585 bp, Cucumis sativus
  Intron number 1 from transcript Cucsa.368680.1 (locus Cucs a.368680) derived from phytozome v7.0 (chr-ID scaffold0363 9; pos 556323 to 556907 reverse strand)
cattggattgatcgctcggtatgtttctcttttcccattcttttattttctgtaatttttcatcctcttctattaggtatgtataagtttttttagggtttaaattataatttcatgtatcatatcataaatatttggatttttggatttttgttctctcttagcttctaaaataaaaattgagtagctattttttttgttatttcagtttttagaaagtttccaaaagaaaaaacaaaatggttattgaacaaaaatgtatatggttgtgattcgaaagtttgaattttgaacttttaattttgcggttaataaatcatagaattttaaagatatttaagggtgtgttttggtccaggagtcaaggctaattcaatttcttctttggtctaaacaatttgtaagttccaactaagaaatagtatttattttattttcacttctagtcccaaatgtctcctcatagatcccatggaattgtatagcatatagtttgactgagtagtcagtgagattaaacaattggagttaatgaatgattgatgatgtgattagtaatagtaatgcagaaagggagatatagat

SEQ ID NO: 68531 - DNA, 734 bp, Cucumis sativus
  Intron number 1 from transcript Cucsa.256530.2 (locus Cucs a.256530) derived from phytozome v7.0 (chr-ID scaffold0222 9; pos 4135934 to 4136667 reverse strand)
gttcttctctagctttgatctgtttcataacggtcagtagtttcttcaattcgtagactttgtttttctcttgcaattttgatttttattctacatgtttcgttgtattgctccgtgattgttgcgtttgaaggtttgaactgttcgtcagtttcatgaattccacgaggaagtaaaatcacgatggaaaaatggaaaaaatgaaaagagttcgtacagaagtcagggtcagcgtgttattttggttctaaatttgcttcagaaaacattgctatggttattagtgtcgttgtgttggagtcggtttactcttgacgtttcttatttgcacgataaagaattttaaggaatggtgtatgaaagttgcaattacgttttcttagcttagtgcgattctaggtttggcggtttctgtcgttttggatttgttaacttgaccaagaagtttagaaagatggaaagcctctttctgtctagacatttcacatcttcgggttgtttttgttaacgaatttggtcaattggatccttcagttctaagaattcatgatgattcagaaaagtttcctcatcaaatacatatttccttaagatgttgcagtatttgcttgggtcaaaaatggaagttgtttttactttgacttgtatctgtgttatttttttcatttacttattacttattaaagaatatgattacaggtttgtaaatcctgaacggtagcaggcaatttgag

SEQ ID NO: 68532 - DNA, 856 bp, Cucumis sativus
  Intron number 1 from transcript Cucsa.218960.1 (locus Cucs a.218960) derived from phytozome v7.0 (chr-ID scaffold0165 8; pos 854783 to 855638)
cggtggccctcccagtcgcgggacaggtaactctttccaacttcatcttagattataacattgatactaaaaagccaagatggggtgtgttctctctgttagaaagtaaggttttatgccatatctcttttggcatcaaagtgtgtgtttcttcataactaaattagacttacaattaaaactagtaccactcaattacagttaaaaaaagtttctaaacaaagtttaagtacattttttacgtttttttagaggtcataaatactcacgttcttgatgttttttaaaactagaaaacaattttttacagttttttcatatatataagataaagaatagttcttgacggcttttaaatgtcatgaacactcacattttttattgtttttactcatgaataatggtacaagactaatttcaatatagtagagtctatcccaagtgaaaaaaagactttttaggcaacactttttattactacatacacatcaaactgtctatatattacactttttttctcattagttatatcatgttcatgaatacttttagtataatggtagaatatagtaacagaaacatattatctagtaaaaaaatataacatttaacttagttgagtgtatactttttgcctataaatcacacatctcgttttgatttgatgatctccacaccaaaacttctcaacattttgtatatcataactctcgacaaaaccaaataatatggatatgttctcaagctctccctttaattccctcaccctcttttgtgtctttacctaatttgtcatgattttccatcttctcttgctcaagactcacctcaagacttcgtcggtgtccacaacgta

SEQ ID NO: 68533 - DNA, 713 bp, Cucumis sativus
  Intron number 1 from transcript Cucsa.250890.1 (locus Cucs a.250890) derived from phytozome v7.0 (chr-ID scaffold0222 9; pos 62790 to 63502)
agggaaaatcctctctttggcccttctgctaccacgtaagagttgcctttgctttacttccctttatacccatatacaaattttcggtttcacttgattttctcttgttatattccccttgggttagaattattatcactgtgttgcttgtttgagataattcaagtgtgtgttgttattttcaatatgggatatgcttacttttagtttgtaattaagttttgatgattttggttacctaacaacaactccactcgatgctgtgtttacattattctgaagttgtttcttgtttaatcattgtttgctgtggttacttttacttaagaggctctgcgatcaataagtttagtggctttttggcgagttactacttggggtgtggtggggttttagtcatactctccttattgtttctgtttattgaatttctaagagatgtgtaggttttgttttcttttgtactttttcacaatgccttacgaatgatggatgacttcctggagtaactttatagatgagcagggacatcaaagaatatcagtcaattctgaagaatttactggtaaaagaattagctttcgggtgtatgacaaatagaattgagctaagtggtgaattttcgtggtcctaagatggacagttggagtgtgtttaaatttgaaaagaaccaacaaatatggagttccttattatattacagattggagaag

SEQ ID NO: 68534 - DNA, 1044 bp, Cucumis sativus
  Intron number 2 from transcript Cucsa.301740.1 (locus Cucs a.301740) derived from phytozome v7.0 (chr-ID scaffold0295 1; pos 34901 to 35944 reverse strand)
cttgcctcctcctccaatttgttaccaacggcaaggtataataatttaattcctaaattatttttatttttctttccaccaatataatttttttgttataagaaatttaaatttaaattagatggtaaataaaaacaaataaactgaatagatatattaatagtttgtaagtatgaatgtatatagaaaaatgattgtaaatgataaaacgcctaaaaatgagttttcaattggtaatttatatatatattttttgttcggcaaaaaaaaagttacccattaaacattacatctaactaaacttttttatattctttgtttccatttatagacttttgaatttttaaataaatattctaaactttttatatattctaaacttttgagtatggaataaaattaagatataatcaagttatattattattattattagattatccattttgataaaataagttttaaatcaacaacaggaccaaagtaattgtgatggaaataaattttcttgtgttcaatttaacaaataaatcattttttaaaaaaaaatatttaacaattaataagtgtattttaaataattatttttaaaagaattcaaataaaaatgatttttttggtaaatttgtttattccttaagtcaacaaaaacaaaaacaagccctaatctaagttaatgaaatcaatattttaactttgtttttgttaaaatgtcgttttaatcaacctacttaaactaattccacttaaatctatgcacttttaataaacgaaaaaaagaagaagttggtttattaaataaacttcattatctactagatttttaaagcaaattcactaacatttttttaatgaaaatgattagtatcattaaacaatgtcaataacattcaatttcgcaatacaattttatatatatttttattaaaagtacattatacaaaatttgtactttaattaatttacttagtgtaagtttaattgaaagttttggtatttaatcttatagagcattccaacccacggcgtggcagcaggacttgg

SEQ ID NO: 68535 - DNA, 367 bp, Cucumis sativus
  Intron number 1 from transcript Cucsa.301740.1 (locus Cucs a.301740) derived from phytozome v7.0 (chr-ID scaffold0295 1; pos 36146 to 36512 reverse strand)
cgttttcgccggtgttggctccgccattgcctacggtctctttttctctttaactatcttttcctacattgttttttaaatattttttacttgaagatcaactaattgacacgaaattaagaataatgtctttgaattacgtttccaactatttaaataagtgtttaaaagtgataaaaaaaaagtataatgtatttgaaagacaccgacgttaaaatagtaatagcttagttgttacgagatctacgtccaaactcgtgtaatagtttgtaaatgaaattgatagtttctcattaaacatttcaagacaatttaactgatttggatctacgctatgtttctgtatatataggtaaattgacgtccg

SEQ ID NO: 68536 - DNA, 702 bp, Cucumis sativus
  Intron number 2 from transcript Cucsa.311090.1 (locus Cucs a.311090) derived from phytozome v7.0 (chr-ID scaffold0299 5; pos 753358 to 754059 reverse strand)
ttattggaaaaatcaaaatttgaagaaacttatttgttaggattatgtctaaaaaacaatgttaacagagtactttcatatgtgtcgaacatctgaaacagtccgaaattttttatacaaagagtttcctgaacattatgtataggacaaacatctacgaatttggaaggagaggaaaaaatgaatagctatatcacgcattgtaggagcaaatccaagggaagaagaaagatattacttgtgtttgctactaaatcatgtcaggggatcgacgtcatttgagtccttattgatagtcaatagaaaaagagttcaaacatttaaagattcagcaaaagaaagaggagtactactggaatctgatgaaaatgtaacataatgtttggatgaagcagcttcgtttgctatgccttatgcttttcgaagactttttgcaacaatcttagtgtattatgaacctgtagatgttagaaaactgtgagaatgatattctcatgaattgttacatgattatagaaaagacaagccaaagaatgtagaatatcaattgtaacacagtttaagagatataaaagtgttcttagagtcaatgaacaaacaaatcactatatatgatttgcctgaaatcaaacatatgccagaaggtggaaacaattgctatataaaaagaaataattgatgaaaaatcaattgtagtatcag

SEQ ID NO: 68537 - DNA, 288 bp, Cucumis sativus
  Intron number 1 from transcript Cucsa.255450.4 (locus Cucs a.255450) derived from phytozome v7.0 (chr-ID scaffold0222 9; pos 3443158 to 3443445)
tctcagaaacagagtaggtgagggataacatcaaggtctggatttttttttgacttttgtgtttaatatttgttcggaactcttatcggttaagaaattggaatccgtcgtaagcatctcttgtttttctcttttgatttttgggcaaaaactgcgatttgtttttcataattattcttcggccccacgtattggatcgatttaacctgaaatgctccattgacttggttccaccgttcttgtgctttttcagggctgggagtttgagggtgctcccattattgcaga

SEQ ID NO: 68538 - DNA, 679 bp, Cucumis sativus
  Intron number 1 from transcript Cucsa.244210.1 (locus Cucs a.244210) derived from phytozome v7.0 (chr-ID scaffold0213 5; pos 42412 to 43090)
gtaaataaatgagatccacttttcaaacataaacaacgacgaatttaattttaaagggagatagacatggtctgctttactcaaaatcaatacaatcaagccatgaacgaatgagtaagcttcaagattaaccattgacaacacaacacttggaatgtaaatggatcaaatatcaaccaaccatcgaattgatcaacaaagaggacaacgtgaagaaatacaaaacttcccaaaaatataaaagaataaagttttctgattctcaccattccttttgtttttttaatattaagaatcagaaggagtcaaggacaaagaaaaagaaagccattgctagcttttggatgactcatttccatgtgaaagtactgaacagaaggattgcttgttaattacttttacacacacacacacacctacttgttctcttttattttgtacatctttctttttcttctttttctccctcatcattccaatctctgttgagtataaaatagcagaaatagagtgaggaagaagaagaaacttaggttagaatagaaaaaagaaaagtatgggcggctaagaatcataaactgaacccatcaaatccacattgctttgaagtcaatgactgattccttggacttatcactattgagcaatccactgacacctgtcatttatcgatcatttt

SEQ ID NO: 68539 - DNA, 527 bp, Cucumis sativus
  Intron number 1 from transcript Cucsa.218080.2 (locus Cucs a.218080) derived from phytozome v7.0 (chr-ID scaffold0165 8; pos 256834 to 257360)
gctgaggccaccggtgtttctgacactgcccaagggtacctaattaatatcatttttgttttgaatttagagtatcttgaatctgttatcaatgatctcattgaccgattaataagtcaaagtctagaagcaactcctctagtgggtttttcgttgagaggacctaacctcttttgtacacatattcgtgatatttacgattttggttcaacggtctaaaagggtgccttctattcctacttcacaagataacacaatgcttgtaaatcacacaaatctttgttcgatttctttattgtttactatacacggaaatatttatctgtgtcggtttctctaatatgatctttcaatttgtacatgcttgcaacgaacttagtagtcagtgttggtgagccacataaatttttggattaatttctctgctgtttactatacacgctttcttttattcgttgatttggtagcaagtttctacctttactgtcttcttgttaacctccaagctatcctgatacacctgggat

SEQ ID NO: 68540 - DNA, 725 bp, Cucumis sativus
  Intron number 1 from transcript Cucsa.086020.1 (locus Cucs a.086020) derived from phytozome v7.0 (chr-ID scaffold0087 0; pos 323725 to 324449 reverse strand)
agttcaacttggttttaaacgattccaaattccaggtcccaaaattaacactttcttttttctttttttttttatttcttcctctttgttgggtactttgaattagttattgcttttcttgctcacttttttgcgttctttattacactagtttttcctctctacctcctatactttggtgctagctgcacatggctacacccatatttatgcatcttcttcgattacaaacttgaaaaatatttttttaacaaacaagaatttgtcacatagtcgcttttgtaattatacactcaagagtgagacacaaaaaagtgagtgcagactaaggaattcaccatatttctaaaaaacaaaaaggaagatacccaaaagtgcatctagggcttccctatctttcaacatctcactgcatcctctaagaccttattttaaaatgtaagttcttttttactttttaaatattttaatccattttttcttggtgtgatgagagtgaaacacacagaaagataggtggatgttgggatatgcacccacaaatattacttactaaaaaaatgtcagataacatttttgtccgactaatttgaatctatcaaatttatcttcaatatatagaaatttattattattttgagaaataagaaattaattgaagtaaatggttgtgtgtgtgtgtgtgagcaggaggagctggaggtggcgctgagggattttgttgg

SEQ ID NO: 68541 - DNA, 709 bp, Cucumis sativus
  Intron number 3 from transcript Cucsa.241860.4 (locus Cucs a.241860) derived from phytozome v7.0 (chr-ID scaffold0204 7; pos 1695469 to 1696177 reverse strand)
ctcatcgttctcttctcgctctttctattttgtttctcttttcttttctggattatgtgtgtattgcctgttgtatttttagagatgattcgagtggaattaaactttcaccaaatattcatctgatctgtaagttaacctttgatttaatcagagagggatagtttggtctatgatactgcattattgctctttgattcttcttatgttggcttggcttgatcttttggaaagtagtagtaaggatgagtttgctgtggtatgtttcttcaaacttttgtgccacaacatttttttggtttataagattgtttcaatgtggtctatgtaaggaattattgatctttattggatactaagagtgcttgattctctcaggaattttgtatgtcattttgcatgttttgattttgcttctgcctttcaacttgccctactattgaaggatcacaattccaatattgatcatgatcaagtgaaaattttggaacagatctgtgtgctttcttctaagtttctgacatgttatgttctcaatctcttgtagaatttgtttttatgctacatgttacattagtagattgtattgaaattatattcgtactggaataaatacattccttagggtcgcttttgttttgttttgttttgttttgtttttcttttttttctcttatctatatctctaagtggaataattcaggtatct

SEQ ID NO: 68542 - DNA, 473 bp, Cucumis sativus
  Intron number 4 from transcript Cucsa.301720.1 (locus Cucs a.301720) derived from phytozome v7.0 (chr-ID scaffold0295 1; pos 19210 to 19682)
tggtgagtaaccttccagttcttttttgagttcgaaaatattcctatgatatgatcaaagtaaatttatttttcataattctttctttacccaccatgttccttcctaaaccataattcgcatttgtcacattagcgttagactaattcatttcatttgtctaagccttacatttggtcctcttgattatctcattactaaaattaccatggaaaagttttctccatgtgaaaggagggggaaaaagaagagaaaaaaaaactgagactacatacttttaccattttacccatatttgagtaacgtctctaaggaaatcatatttctttgatattaatgctatgttttcctataaagacgtataaatagtctccataattcttttctttttttctctctactgttgtagtgttgacattgtatgtgatgttatgttgatttggtttaggaacttcctatctggctccgaccat

SEQ ID NO: 68543 - DNA, 694 bp, Cucumis sativus; identical to SEQ ID NO: 62381
  Intron number 5 from transcript Cucsa.119950.5 (locus Cucs a.119950) derived from phytozome v7.0 (chr-ID scaffold0099 8; pos 1908636 to 1909329)

SEQ ID NO: 68544 - DNA, 427 bp, Prunus persica
  Intron number 1 from transcript ppa006237m (locus ppa00454 5m.g) derived from phytozome v7.0 (chr-ID scaffold_3; pos 2714289 to 2714715)
tccggcgaccccacttcgtaccgtgaccggaaaaggtaaaccctctttgattctctcatatatgtatgtatacgcgtatatctatgaatgcttatagttataggtcactttgcacaatgtgtatatgtatttgattggtaattttcttttgtttaagtttgcccaagtgataattatatatggtttgtggattactctctctgtctatttcatttgcctgaatttattgtttttctcagttaccctttgttacaagtttaccatatttacatttgctaatgctacatggttgtgtttcttcggtgtccccaagacaaaacttaatttgtttctgagtttcatttacatttactgggttttctcaaatttgtgtaaattctgcggtgttttagtgattcggggtttggtgtgaccggctacggtggct

SEQ ID NO: 68545 - DNA, 705 bp, Prunus persica
  Intron number 1 from transcript ppa011711m (locus ppa01171 1m.g) derived from phytozome v7.0 (chr-ID scaffold_6; pos 1041098 to 1041802 reverse strand)
aagaagcacccttctggaattgtccctactctccagtgagtcccaattccttgttcacaacctgctttctaattcatgttctgggttgtcatgcctggttaagatatgattccattttcataaccattcaaaactagtatttcttttattgccctttcttgtagttaccaatgttttttgatttatagagtttatccctgaaaagttgatgactttgtgctacccacgaaaagtgattgtaattttctctaattctgtacttggaatgaacgtgctctctagtttgcatctatgctgcgtgtgaatgcatccctcgtaacgttgtctttactacggttacactttttccttgtttcttcaacaaaccagtctgttgtgtttcctcctttttctgtctctacacttgttgtgtgttcatctcgcgttagattgtttgctgtgattatgtgccaatataaatgttcatccatggaaccattgaatttaaattacatgaatatgtgtgctgtatgccaaatttttgggtcaagctctctctgattatatatttcgtgtaactgtgagcggttttctcaaattgcttcatgcatttaataagttgagtgtgttttttgcttaattattttatgcattacccgtaaaacaataaaggtgttgtctgtgctctcaggaatattgtctccacagtcaatttagactgcaaat

SEQ ID NO: 68546 - DNA, 473 bp, Prunus persica
  Intron number 2 from transcript ppa005146m (locus ppa00514 6m.g) derived from phytozome v7.0 (chr-ID scaffold_5; pos 13473787 to 13474259 reverse strand)
acaaggtattattctctgttcttgtaatctattatgaatttcacttgcttctgttgacagtcttgatccaaggatcaattcacattgtttctgttattgttttggagaatagaactgacttatttctttccttctctcattatatttttccactgagttttgtattacatatatgtaatatagtttctctaataccacatacgcatttctcccaaaggagttatatattttaggacaatgatgtaggcacctcattttttgttaaggagaatcgcccatgataagtccttaataaggctagcacataggcatctcaagttaaaaatccctctcccggacagaatagaaagatcaaaaagaattgactgttaatcttcaccttgtcaattcgtagtagcaaagatagttattatataactcaattatcttggattaacacttactttcaggtacttgcagctctggctgaaaca

SEQ ID NO: 68547 - DNA, 585 bp, Prunus persica
  Intron number 2 from transcript ppa027016m (locus ppa02701 6m.g) derived from phytozome v7.0 (chr-ID scaffold_2; pos 19358049 to 19358633 reverse strand)
acaaccttagcaggtctgtttttcttggcgtccatctctttctcatgatatcccatatgaaagagagttttttggctggatgaagtcaaaatttcttcagatcatatttcttgattggttttattgatcatccagatgatagagttcatgataagggttattaggttgcttcctcaagtttcttcctgctactgctcaaacttactgtgactcatataatttctgataacaaaaataatccatcagttttgtttcgaccagacaaataatttgcccaacttgtatgtgggattcatatgtggtctttcaaaaatttatgatatgctattctgattaatctatgtcccagttcagcatttccaacaaagtacagatagaaagaccacaatattataaaaaaataaataaacttattatttcgtttgttgctcttgattaagttacgtaataagtataaaaatatagaagaaagatagatcactgtctatcacaaacactatttctttcttttacaaagttgcctgacatgctgctttcctgtaactttgaactaggcttctctcagaatacttgggactggaaacg

SEQ ID NO: 68548 - DNA, 659 bp, Prunus persica
  Intron number 3 from transcript ppa016476m (locus ppa01647 6m.g) derived from phytozome v7.0 (chr-ID scaffold_2; pos 21834046 to 21834704)
tgaagggtgttgttacatatatgaatctatgatcatggacaatttggaagtgaagcctatgtctaccatttctggtataactatgcttaaggggttaatcttggcatgtaggaggtctgaattcctttatatatatcatctatatacttccctactttaattactagttttctattaataatttcagaccaaaaaatttcttattaataatcaattaaccaatgccagttagtcaatgtagtgtctccgtccctttctcaaatttgatataatcctatacattagaatagtttagaatatcgttttgtcaagaagaaaaaaaaaatcaattaatcgattagttgactctgttttgaaatattgggctatgttgatgcttcagttaaagtataaccttagattcttgcccttgagaaattaatactttctacttgagctccatcgtgtactacttacatcacaacattccaaaaacgggggttccagtagaacagaacaaacgatgtcaagccaagagcactttcattcctatataatataaaaatggtggatgtaagaatccacagcggatcattataggttatcactaattttgtatattttttagtcctttcgttttcttagggtttgaagccgctgaaggcatccttggagtccaa

SEQ ID NO: 68549 - DNA, 337 bp, Prunus persica
  Intron number 2 from transcript ppa007562m (locus ppa00756 2m.g) derived from phytozome v7.0 (chr-ID scaffold_5; pos 15770432 to 15770768)
ataatccacctccaagctcttttgggcaataggtaaagacttgctctcccccatcttttttccaaatttggatgtttgtttatttattttttgggcgtgaattttattgattaaacttttataattttattattatcttttgtttatggattttgatttggatatggtgggggttagatactcgcaaatcccaatagtgagattatattatattatgggataggatatatggaattgagttttttaatcttcttttttatttcaatcaggggaattttaaaaaataaaaaaaagaaggaacctcaattgatgattcaaatttttttaatgggtgcag

SEQ ID NO: 68550 - DNA, 985 bp, Prunus persica
  Intron number 1 from transcript ppa014506m (locus ppa01450 6m.g) derived from phytozome v7.0 (chr-ID scaffold_4; pos 10757326 to 10758310 reverse strand)
agcgactgtaactgcactgacagcagccagtgcacgtaagtgcttctttataattgtcagtttatataagtagatgcgtaattcttgcattaaaattaatatacagttaagttttacgtattattatggagcttatatgatcaagtttgtgcatggttaagtagttcatgtagctttaaacaaacacacacctacctagcaagaaacgattcaaagttacggaccaaccccttactacttcatattatctccaacttataatcacctacataacccagtatgcagagacgaatctaactattgggttgtatgggctatagcccatgcctttttttttttagttgtcaatatccatgtactctctctctctagcccatgcatttttaaaaaaaaaaattcaatacccatgttctctctttttcttattttcttcatttttctctctcttctttctatttctttttgtttttcggcctttctcttgttttttcttttgtttctccatttttcaatagtttggatcaactacgaattgagctttttcccaaagtttcttcttcctatatattttttttgcttttctcttgtttttatcccttcgtttttccttttttattctgcatatctcttttttctctcacacgtgttgtaaagtctaacttggtgcgatatggccctcactgttgaaatttcctccgtacgtaaggtaaatttagcccacagaattttgaaatcctagattcgtccttacccgtatacatggaattttatcacaaaagatttcggtgctattaattgtagaaccactcattacatattgtatttagttgtggactttacattcttcaacatgctttacacttctttgaattggtttagcttttccaatgaagttggtgcatatatacatgcaatctgagcattaacttaccagttctctgaaattgcaggaagaagggaagcagctacgacttggtcatagttg

SEQ ID NO: 68551 - DNA, 930 bp, Prunus persica
  Intron number 1 from transcript ppa015718m (locus ppa01571 8m.g) derived from phytozome v7.0 (chr-ID scaffold_1; pos 13922954 to 13923883)
tcctctgtgagagagaaaagctcaaggtgaaggcaggacagtttgtttttgttttttttcattttggtcaataaacgcaggacagttaggccacccatttttgatctcaaattttagttgactgttaaatttggtcaaatcttaaatgtattctgccttccaaaacagaacgctcaaactccataacctaaaaactacacgcccttcagcctcgcacccaaatatcagattttctctgttttcttttatttatttttctgaaggagaaagaaagaaaacaacaaacctccaaacaaaaatagaaaggaaaataactggaggtgcctcttcgatttccttcttcttcttcttcttcttcttcttcttcttcttctctctctctctctctctctctctcaaagtcacgagaagcaatctacagctcattcaaatttctcttcccatctataaaattcttctgattttgaaaaacagacatatcttttttttttcttccttgcgttctttttaagctacacacccttttcatcccaaacccttttaagcttgaacacacttctcttttcctctgtaattcgcaacgctttctctaacacgtttctctttcttatttcattcttttgagaacttgcaaaccgttggaatttcattttcattttctgatattcttgtgttcttttcaacctttggtcaacccaccagctgaaactcgggctttctttctgttctccaaccctcgtttctccggggcaagggcttttcgtttccattgattgcccataattttgttcttgattcttgttccatattgttgcagtgcccataatttcaactgggtttgtcttccttttcatttttagccattgattaatctctgcggtctaccctatgctgcctcagcagaaaaacccagctggggtttcccaatct

SEQ ID NO: 68552 - DNA, 578 bp, Prunus persica
  Intron number 2 from transcript ppa015718m (locus ppa01571 8m.g) derived from phytozome v7.0 (chr-ID scaffold_1; pos 13923914 to 13924491)
cttgaggaaccagagaaaagacccttctctataaggtgattgatcttcgcatattataatatatttgggagagagtgtgtgttttttcttgtcttttttatatatcttcatctagtttttcagattctatttcataacctgtatttgatttgtattttttttttcgagtggaaatgcatgtttctgtattttgatttcaattttgttccattaatttgaaaacagaatactgtttatttaatagaaccgtgcggtttttgttctttctgttttgggggttttcagaagaacaagtttggagtaaactaaatttccaggttatgaacaaatttcggttctccctaatttatgaggtcttgctcttttatttatctgtactgtgagtgagtttcatgtttatttccattcgtatatatctgatttcgtgtatttaatttttcctttgtttccttttgtgcaatagtatcgcgcatgttcattttatgttgaagaatgagttgcactacattcaacttaaagttttttgctccaaaaatcaactagcctctcatttataactatttctatttgcagacagt

SEQ ID NO: 68553 - DNA, 381 bp, Prunus persica
  Intron number 1 from transcript ppa007001m (locus ppa00700 1m.g) derived from phytozome v7.0 (chr-ID scaffold_1; pos 41310276 to 41310656 reverse strand)
ctcttgctcttcctctccgagcttcgtacgtctccttcttccttttttttgtttttttttttcctgttttgtcttgttatatttgtgtatgtttattcaatttctctgtgttaatagatctccatgattgtttggtttggttttggaaggaggatctattcgctttctagggtttgttgttgaattgctctgtttgaataatgtagtaataggaacataaaatgattgaattctgaattccaagttatgtaaagctgcatttttttttttggcatcctagtggatcatcatggaaactctttttgcatgaagacttagtatgtcagaatgttgttcttaatatgttaaattttcattacgttggttcagggttatatcttc

SEQ ID NO: 68554 - DNA, 830 bp, Prunus persica
  Intron number 1 from transcript ppa021600m (locus ppa02160 0m.g) derived from phytozome v7.0 (chr-ID scaffold_3; pos 16480107 to 16480936 reverse strand)
ttcggtgttgtttgtgctagtggccagggtctacggtacgatcaacatcatcaaacgaaccaccatgctcaatccgagtgttctcatgaacatgttccagatttctcttaccggtaacttatttttcctttttacaaaaaaatatttttgttttaagattaaattttcagaaattgatggtacgaagcttaggaaatcaaattatagggaaagtcaagaacttgaaccaggctttctagtattctatagagaaattgatagcaggatttagcttaggaaacatgatagggaacccatttcacttggaatgggattctgtacgtgtaactctcttagcctctgactagagctgggatttggggcattcgcagagcagagagaaggaagagagaaatgagagagagagaagatatttacaaaatttcccttgaaaggggtatgtgcacatcgaatgtcaaaatttaacagaaaagtggacagtgcatttcaatttttccaaagttcaaaggggtattgagagtattttatttgctttgcagggacaaagtgcagcgtgcactataattcaggggaatttcttctagttttatgaacttttcactccctcctctaagaaaaatgccatcttgtgtgtggggcgataagatatccttctgcattttctatttacaatcttagtttgttttgtgcttgtgtgctattggtaatggtatatcacaatgtatgcttttttaatttgattgattgtttgcttagtttgttgcttcaaattgatttccacgttatcgaatgcaggattcttgctgtttctttcagttattttggataga

SEQ ID NO: 68555 - DNA, 488 bp, Prunus persica
  Intron number 1 from transcript ppa006144m (locus ppa00614 4m.g) derived from phytozome v7.0 (chr-ID scaffold_5; pos 17912660 to 17913147 reverse strand)
aagggtggggtgctgtgattgccaaaactgtaagtcttgctcttcttttatttctgtgtttggatcgtcagtttgaattacaaaattgtgcgctagtgctgctgattgatggtagcttattcatctgtttgtttggttactgagaaatttggaagaaagaatgtgaaaatccagaatttgtttagcaaaggtactgcttttgatatctttgattttgtgtagctagtgccattctacctgaatgacttaaaatgaattgacaataatgttgaacatcttcagattcattgattttggggaaagcccattttctgaactttgttgcagaccttaattcttcaaaacgaattttgaggtcatttccgtagctgaaccatttccattgctggatattgagtcattttctgtcttttatgtgggttgcactttttgcattcaatcttaacttacgttttgataggtgtcactggacgcagcaaaggtaaaaa

SEQ ID NO: 68556 - DNA, 1026 bp, Prunus persica
  Intron number 1 from transcript ppa000331m (locus ppa00033 1m.g) derived from phytozome v7.0 (chr-ID scaffold_7; pos 16242427 to 16243452)
acttgcttggaaaacgcaaataacgtcacttcaaggtatgctctattctctcttatggatacagcctgaaatttttatgttgtcttagtaaagggaatcaaattattttttttttgtgcaaatggttataaagttcgatctttaagtcaaataaattgtgaagatggagaataaactcttgaacttaatggacatggtggatggaaattcgcaaggttgttggtgaagtgaaatatgcttctagagtatttggaaatgtataatttatgaattttaaaacaaactatatgaatgaccgtcatacattaattgaaataaagtagctttgattattattacgagcatatggatacggcctgaacttttatttagtaaaatggaatttaattctctttctcctttcatttgtccaagttggttataaagttggttcttgaagtcaaataaattctaaaggtggagaataaattcttaaacttgatggacatagtggacggaaattctacaaggtttttggtgaaatgaaatacgcttctaaagttttctgaaatgtagaaaatatgaatgggttggtcatacttacgtacaagtgcgtttgtatgcattaattttaccagatacagaagtttttatagataaagccaattcatgaaagaagtactctaatatcaaacttactggacagagttaggctaagattggttgaaggcattagctttacgtgattatgatgaacttacttgcattcttaatccaattggcttagtttcaaaatttgcaccaactactaattttttaatgttagttttctaggtttttttttctttttggaaattcaaattttattaaaagaaatgagaaacagttcaactttgaactgaataacaaatgagtttcctagttggtgataatttcagaattccattttaagtttcttgtctttggatttacattttccttgttttttcttcttcttttccttcttgaacagattcaaaaactttccctggcccatttgttgttgtt

SEQ ID NO: 68557 - DNA, 527 bp, Prunus persica
  Intron number 1 from transcript ppa007506m (locus ppa00750 6m.g) derived from phytozome v7.0 (chr-ID scaffold_1; pos 21298317 to 21298843 reverse strand)
gagctgctgccaaaggagcaggtttgcctctatccctcaccttacctccatggaccatgcctactagactgctagtattaattactaaagagaaataagaaataaaaagttctctttatcagctctatctattgcatattacggtttgtcttgatgggcataccccttcctgatattttattcttaaagtttgattctttctcaaatcgttggatggattcaatggcatgacgagcattttatttttctgttaaaactcatctgtttctttgaatgctcctgtggccaatttcacaatgataaggaaaaggaactgaccctgtttcctgaatgccttgagtcatatgattggtcttcatataatgtatttgcctaatttgtgctcatggaaatcatcatgtttgcataaaaaccagggcttattcaaatatttcaattgcagtaaactagagcatgccctgcagactgttagttaaattctttagtgatttcttgactcctgtgttctctatgtgcagtctgcctag

SEQ ID NO: 68558 - DNA, 750 bp, Prunus persica
  Intron number 1 from transcript ppa012513m (locus ppa01103 0m.g) derived from phytozome v7.0 (chr-ID scaffold_1; pos 21521921 to 21522670 reverse strand)
cctcctcgtcgttttgcttacgtggctcttctccggtactctcttcacttcttttcttatcagatccaattttttcaagttacttttgtgaatttcttagttcactgaagcaattgatgcttgaagtgggtcatcgatagactcatagtcagagcatcagatgagactctagagagtctgagatccaaaaagtttcgaactttatacaatttttgtgtctgcgtgagaattcatcatcttggttttcgaatgtggtaattgctgattgttagatgttagttacaggttgttattcatagctaagtttctatcttgtataaaaagtaaactactgcaattatcattattcaagtgaatgaaatcaggggaaaattccagatttacttttctaactttctcagcatccaaacacacaattccagatttctcatcaaaaacttgacaattctctcattagaaagacccaatatcattgctaatcacattttggattcatgggctcatttttgaagtcccttgcctgcacaaacaaacccacactcttatttgttattgacaatctaatgctctgtatctgttattttgatggttgccgtgtatttgttataggcaatctaatgctctgtagctacagatgttttgtttttgttcaaatcaatctaatggtctaattaacaatctaatgttttattttttacttcctgctatgtatataacagggcggtctccaaaaaaatcaaaaattgatag

SEQ ID NO: 68559 - DNA, 683 bp, Prunus persica
  Intron number 1 from transcript ppa000708m (locus ppa00070 8m.g) derived from phytozome v7.0 (chr-ID scaffold_7; pos 18854634 to 18855316)
ggtttttggcgacttcaggggaaggtgaaagttctactattcttttgtgccattacagcttctctcttcccctctttatcccttagtctatttactttttaagatttagctcagcttgatgctttaaaaatgctcacttggattttgatttctgtggcaagtggaagtactttcatggtcaggggtttgtttctctttatagtttattttcttggttaaacgtcttcttgttctcttaaagtttaaacaatttttcttgccatgtaacatttggatttcagattttgattctttgtttgcatatcgtgcattttcgaccgatataacttcattttgggaattaatcacttccggaaggaacatgcagacatttctatggatttgatacatacatcattcacagattttttttaaaatcttttaaaaacaatttgaaatcacttgtgaaataaaccttttttttttttttttttaacacaacagatcttgtgttcttgaaatctcatacaggtatttgttaattttagatatttgtatgctgtagtctcacaggaaaccaaccaattttaagaagttgagcacttcacatttattatcctgtcattacttctgacttgtcttcaacgctgatgaagttttgtttggtccgaaacaggagaacaaaagagaattaattcagagtt

SEQ ID NO: 68560 - DNA, 549 bp, Prunus persica
  Intron number 1 from transcript ppa011468m (locus ppa01135 4m.g) derived from phytozome v7.0 (chr-ID scaffold_2; pos 5974159 to 5974707 reverse strand)
ctgtccaaacccaggagaagcaaaaattgaatttggtatttatttcatcatatatactttccatttttatgtaatttagtttggttatttaatctggttatgaatggatcatggaacggaggaccaaattcatgtatacgttgccaagatttttgtttttgtttttgggtttttgtttttttttttttttttttgtgttgtactaaataatgcttgtagaatagctagagaaagaacccataccaacccacacaaacattaatgtgcatatatttttgtaaatgatcatgggttctgattaatggggtatgctatgctcttggaagctttggttgtttttttttttctttaaagtgttcttaaaaataaattataattgggttatgctatcttttctttatttcaggtacatattctaagaaatgtgtgtagttatttttgctaccagattttattccattttctgctgacattaagtatacctttgtttgatttgaagacggctacaattcaggtgctgaagaaggctggtagaccctcggagcgtct

SEQ ID NO: 68561 - DNA, 495 bp, Prunus persica
  Intron number 4 from transcript ppa010914m (locus ppa01091 4m.g) derived from phytozome v7.0 (chr-ID scaffold_4; pos 3643425 to 3643919)
agcacttcttgttcgtctcttcttctttattcctggtaggttctcttttgattccttgttttgagtgtaggatagataaatctctaaatagatagttatctggttttctcaaatgatagtttctaatttctgcctggtttgttgactttattggtttacttgattcaccactgggcaacaacccattcagtgtaatctacccttattggggcacttttcctataaacagctcaatattaattgaagattctgcccagttttttcagaatactgacccttatggtttagtgtgaaatctgaattcttgttttgggtcgcatattatggagtggttacttggcacttctctaactcttgttctgttttctactttcaatttgaaatttgaggtgcggtaatattacttacaatttcctctgtcaagtaataatatgtacggtctcattttgttcttttgcagccgaacttgagttgccattggtagcattactcctg

SEQ ID NO: 68562 - DNA, 541 bp, Prunus persica
  Intron number 2 from transcript ppa004700m (locus ppa00470 0m.g) derived from phytozome v7.0 (chr-ID scaffold_8; pos 18320475 to 18321015 reverse strand)
ctgaggtaactggatcactgtaatgatagtatgtatatcacacagtgcatattaattggctagttagatggatgttagaggaggcttcaatacagcagctgttttagtagcatcacatgcatgtagtttgtgatatacagtattttttgttgttgacagtactgtaatatcctatttagctttaacttgacctaatttgggttgattatgtgagtcctactctgcctctcaaccctatctgaaggtgataacttctgtggtttgacattgatgcaccaatgtagaagaccgattttatggtggatctatccaggaagagggaaaccaattaaattcaaaatatcaatgtccatgagcttttattgtttgttgaaaatggagcttgcatccaaaagtattaatttactgatcttccccagaggaaattaaacacagtactctttttaattctccttttagctcttgcatttaatcacaaataaaataactaatccttgtctatgcagatttttaaaggcaaggaagtttgacattgataaag

SEQ ID NO: 68563 - DNA, 869 bp, Prunus persica
  Intron number 2 from transcript ppa003489m (locus ppa00348 9m.g) derived from phytozome v7.0 (chr-ID scaffold_8; pos 4982080 to 4982948 reverse strand)
gtctcacaattcattggtaaatcccattagcctatagctagatctgcgtgtgtgttttttttcttttcacattgaccaagagtccaagactcgttgtcatggatagataactatgtgcggtttcaacataagcttcgtagatacttacccaaaaaaaaaattataagcttggtggaaaaagtatggatcgttgatagctaggtcctagtaggtgctttgggtggattgaaaagagcctttccgcttacaatatccttcattttcctatctcatgatggggctctcctgccgaattcgataagcttacttctaggaagagactcattaccattgagtagccagtgattgtttttctaacacagagagagagagagagagagagagagagagagagatcatgttttcatggggtatttcttctccaagggttctaaaaggataaaatactaaatttagaatgcgtgatgataacaaagtgaagatgtgaacacatatgtcgaaaaaaaagaggttatgagaaagtgaaagtgtgaataatttctgtcgaaaaaaaacaaacagatagggaggaggagggaagttgtgggcatcctcaatggaacactttccaccggctttagtttttttttttttcaataaacacaaaaatagaaccttccattttattttggcggcttgaaaaggtacaacatgaaaagaaaagaagaaaaaaacatctttgtcaatgggtatatccgataaaaaagggttttgattggttttaaatttgaatacctacgatagtgtatgtaaaaaaaaacctcgttcccatccctaactatgggaaaaaaacacacatactgatccttttgtttaatatatttacaggc

SEQ ID NO: 68564 - DNA, 394 bp, Prunus persica
  Intron number 3 from transcript ppa005853m (locus ppa00585 3m.g) derived from phytozome v7.0 (chr-ID scaffold_5; pos 16570837 to 16571230 reverse strand)
atcccagctcctcgcactgctgctgttgattttgggtaattatgtctttggaacctctgttatttgattactgtttgccctttgttgtttgccttatagctatgtgaatggttttgagtatgccacaaacgatatgggcattttctataatttattgttgtagacaaaacaggagatagagcaggcgcatgcccacccaagccctttaaaatttactattctttgtcttgaatgctttcatcattacctttcttcaaggaaaatgaaggagatggagggatcatttcattgtttttatcatataatatttgcaaaattttgtcaataaactgacgtttgcacatctcttgtgcaaacagtgcagtgcaggaaacaaaaggctcatcaaagagct

SEQ ID NO: 68565 - DNA, 628 bp, Prunus persica
  Intron number 1 from transcript ppa005853m (locus ppa00585 3m.g) derived from phytozome v7.0 (chr-ID scaffold_5; pos 16571479 to 16572106 reverse strand)
tcgtcgctcatcttcgcgacaacaatctctatcaggcaaacaagttcttcttcttcattacatatgtatatatatgtgtatatgttcgcgtgtgcgcttttggttgctgagtgagtgtaggaaaacttaagatattgaattttcaacataatggttcagttttggtttggtttgtggacagtaatgagtaattaagctgacttaagtattctcattcgttttccatgatcatattgggaagatgctgcagtctcaatctggaaagtgaacttcttttaactcgcagattgcttagttcccggaaaatgtagaaaattagtagctgtgaaactcgaatttgtaaacttgactcacccgaggccttcataagcatttggctctgctaaagtttcagtttttctttcttgttttcttggtttgtgggggagggataattatcttatggaagaaaatgttaaatgcctgttatgattgatgaaaaaaattgatgaagattatgatataatgagactttgagtattctgatcttatgttggaatagaagaaagaattttagcagattgagctgattgagctgattggtgatctttcttatttgtaggctgctagtgtcgttgcttccgcaaca

SEQ ID NO: 68566 - DNA, 515 bp, Prunus persica
  Intron number 2 from transcript ppa012700m (locus ppa01270 0m.g) derived from phytozome v7.0 (chr-ID scaffold_2; pos 14481677 to 14482191 reverse strand)
ctacattccattgggatattttactatcccagcaggtcagcttggtttctctcatgtgtttgcaagtttttttcaaagattttgttcatttggaactttgataatgttttgtcatagctaggggaatttaatgtttaaatcaaaataaggttactttgatcgggaaagaaaaaatttggtcagtgtttcttaatggaagagtttgtggagagagttcttacaaaatcagctatggtagtgaaaaaagggaaaagaaaagaaaattgctctggtggtgatttctatgtggtaattttgttttgtccttgaacactttttgtttttgaagtacaagcgatagtctaaattacaaggggggtgggggggtgggatgttctcacatacacactagtatgatgtcatggaggttcgaacctgagagctctagtctgcaagtcaaggcctttgaacactttcagttaatctttgaatttgtgttactattttcaggtattgggcattggcagtgccagctt

SEQ ID NO: 68567 - DNA, 524 bp, Prunus persica
  Intron number 2 from transcript ppa006068m (locus ppa00606 8m.g) derived from phytozome v7.0 (chr-ID scaffold_4; pos 25505050 to 25505573 reverse strand)
gaaggaagaagttgtagcacatccaatagctgcaagtaagtagtttgtgatctattttgtttgggaaacactcaaaatgtacgttatccattcatttgctttcgtgtgcacaaaacaatcaaattctgtcatagcattcaaattctggaccagatttccttttttgttgtcagtttcctaatttatttggtttggtttgttttcttattcctgtttggattaggatttattttttttatcctacatcagtatgcctatgcaggcatgtgtgtaagcatgtgctcgggtaagaccacatagttggaaattgtctgaaggataatgacaagatcctggttttttcccttaccatttagttgaagatcgaattgatttattcatcttcttctcagttcctaattgtctcttgctttcacagaatgaagtgcagaacatattcttacatagtttagctactctaaactataataatgtttaattgataatgtaaccataaaaacttacgttaattttcagcgaagatt

SEQ ID NO: 68568 - DNA, 357 bp, Prunus persica
  Intron number 1 from transcript ppa013191m (locus ppa01319 1m.g) derived from phytozome v7.0 (chr-ID scaffold_6; pos 27786691 to 27787047)
agaaaccactcttcttttacgtcaatcttgcaaaggtatgtttctatagtaaaataatttatttatttatttatttgacaaatgaaggaaagaaaaggaaaaggaaaaggaaaatgaaatttagtaaaataattaatttatttattaagctaattctatggatatacgaaactgaaatacttaagaatcaaaatcaaaatcagaatcatgaaaccacggaattcatcggttctttgaaaggaaagtaaggaagatgaaaagaatatgcatgtggtctttcttaaatcattctggtaacatgtatatttcgggtttacattgttttttctttgatgcagaggtatatagagcagcaca

SEQ ID NO: 68569 - DNA, 524 bp, Prunus persica
  Intron number 4 from transcript ppa008184m (locus ppa00818 4m.g) derived from phytozome v7.0 (chr-ID scaffold_1; pos 25260787 to 25261310 reverse strand)
agaaggaagagtttgatcagtacatcaaaattcaggtatttatgatcttttttgaatacaaggtatttatgatcttcaagtacaaatctctatatttataaatggccattctgtttccttttacaaatttccatatatatatctctctcttctcccccccccccccccccttcctttttcccctcccaaatccagaaaaattccaattactctattttctccattatgtggcattcaatttgaaatttcaatcatcctacttcatacagatattgaatttcaaagatttctgctacttatgatataacaaatcatccattcactaaacctagataatcatttgaactaagaaatgttgaatcccatctgaatatggcttaaaatttcgaacaggtcgtggtgtgttaccttttttcctcttttttgtgtgtggacatcatgctataactttcaatttgctcatgtaaatttaatcttggattcttattcaacaggaggaacacttggcaaagggggtaagggac

SEQ ID NO: 68570 - DNA, 397 bp, Prunus persica
  Intron number 1 from transcript ppa006623m (locus ppa00662 3m.g) derived from phytozome v7.0 (chr-ID scaffold_1; pos 44529241 to 44529637 reverse strand)
ttccttcagaggtacgttctttgagttttttttttcttctgatttctgttttcggagtttatgtcgtgattggttgccgagcaaatgtggacaaaagagaattgtggaagaattcagatttgatatcatagggaccagttaaatgggttttgaaatgacccaactgtcatgtaacttctaggtttccttcataaactggaaagtttgtcacgttatagatttgctcacccacgatgaacttagtgtgattgcaagctatgcctttgtggtttgatagatttagttgccttgttttctatatcagggagttctggatttcttgttatgaactgcaatggagtaaattttatataatcttgtttagtaatttactgctgctgtttgcagaacttttgta

SEQ ID NO: 68571 - DNA, 873 bp, Prunus persica
  Intron number 1 from transcript ppa011402m (locus ppa01140 2m.g) derived from phytozome v7.0 (chr-ID scaffold_5; pos 11051967 to 11052839 reverse strand)
attccaattccgatcgaagcgttttccatccacaggtactaaaaaatttccaactccgaaattcaaaaacgtttgctaaaaacgaactgtttagaatttacttcttcttctttgttttgttttttaattttcgaagaattttttagcaaaaacctattcgattgattttttttttcttcttcttagttcattggtttagagattttgtagctgattatatatttgtttcctctgagtgttggtatcttctgctttggcttttagcttttgtcttccataatattttgatgctgtgttttttgtgtgtatttgattgcccttttgcttagttttcgtgatttatgtaaggttttatacctttgctcttcgtactgagcgtttttttttaatatgcgcatcatagtttttgctgctttgttcatggtattggagaagtttggttttctctgatttttactttttattttatagctacatgtatttatgatgcagctaatatcaataagaacatgttgggtttactgggtttttcgctaatgagcatggtagagttttataagaatttgggccatttatataactttccaaaatctagaaagatatgatatgatccagttaatgatgattgctttgaactagtttcatcaaagtttaagaaggggaccctttgtgtttggacagctggtttaagctgtgggggtgtctaaacatagaaattgtattatcggttttgagatcgtaatttttcacaagaccaaacaaaataagatgttcaacatattagcttattgcgaactgtgcacatgttctgttatgtctaacagattttttctttttctttttttttctttttttttaaatgttgaaggggat

SEQ ID NO: 68572 - DNA, 430 bp, Prunus persica
  Intron number 2 from transcript ppa012608m (locus ppa01260 8m.g) derived from phytozome v7.0 (chr-ID scaffold_8; pos 21273658 to 21274087)
ctgacaaggctaagcaactttgcgctaccaaatcggtatttttctttttcttttcattttgttttaattctttcttgggatgcattatgaaagtttggtccttttaattttaatatatgattgttaaggttttgcttttcatgaaatttaagatcgcttaaacatttgcaccatgtcaatgtcatgaagcaggcatttcatctgagttttgcttactttgatttgtgaagaagactattgtggtcttcccaagtgtttttttttttttttttttcaataaattttttttaaaaaaaaaaaaacagaaagatatagccgaaactaatgacaatcctagtactactcttgcaagccttaggtgatatgattatgaacaacttgcatttccctagccggtttctgaacattacatattctatgcaggtgactg

SEQ ID NO: 68573 - DNA, 586 bp, Prunus persica
  Intron number 3 from transcript ppa013556m (locus ppa01344 1m.g) derived from phytozome v7.0 (chr-ID scaffold_8; pos 10959651 to 10960236 reverse strand)
ttggtaagaccaaatttacgtaaatatatattgcttttgccctcaattggaaaaatgaggggttctttagatttcgtattgcttggttgatgttctgaacctaattttatgttgtaagctccagagggtttgagccttcatatggggtattagttcggggagagaggattttggaattggcatgaaatgtcatcaatttggatttgatggggttatcaatgacaatatcattgttgcgcaattatgtggatcaatgtggttctatgcctccaattaactttgcgtccagatttttctttgtttttggaatgaatattgagggaccagctattgagctctctctaaagctttatctttgttcttattagtgcatagataatccaaatgtgttaaaaacttgaaatgaaagcttgcttttgtaaattccactaggttttgctatttctttatggtcttaaataatctctgtactttccataatatgttgtcgcgtggttttaatattttttttccttctcttctcttctcatttatcttttttgcatgtgcagttccttgggctcccggtggttcaaagtttcatcgg

SEQ ID NO: 68574 - DNA, 461 bp, Prunus persica
  Intron number 1 from transcript ppa012768m (locus ppa01276 8m.g) derived from phytozome v7.0 (chr-ID scaffold_7; pos 12893395 to 12893855 reverse strand)
ttaactactgcggttcgtctctctaatccttggctcttttcctttcataaattttattaaagtatgatactttgcttgcagattaagcttttacttatctgtttgattcccgagaaaatcattactttttttaccgcattttaactgattgtttgaagtcaaattcgatttgggctctgtttattttgacacaaacacaacatgaagaaatctttgatattgcgtagtcaaagttgaattttgcaattttcgtagtatttattttccaagacaagaaaaatatatatatctgaatgttgtttctctttaggaaattttggtatcggatgtatgcatgtattcaaacaaatggtgtttcagtgtcgtattttattatggtttctttgttgcttgttgcactgcttttggttcaatggaacttaagcgggtttttggaatatgttcagataagaaggctgact

SEQ ID NO: 68575 - DNA, 643 bp, Prunus persica
  Intron number 1 from transcript ppa001833m (locus ppa00183 3m.g) derived from phytozome v7.0 (chr-ID scaffold_6; pos 26187321 to 26187963)
ccatttctattggtaagctctctctctctctctctctctgttctttgatatttgtgctttaaatcctctgcttaagatggttatgctcaaggggatctagttcttaatactgttttactctttttttccctatttcataccactgactataagatgcatcctagcatgtccatttttatgaaaagtttctttaagaaatcatgtcagtgaagtttcttggttgctgctcttttgtgacagtaaattcttccatgctcctaaacattcttggacttaccccttttttttttggatgtggacatgaatttctatacttctaaatattgtatttcctctcttgttgtttgatccttgagataattccagaaacttataaaaacagtagacaaaatgttcaagagggaatttccttattttgtcttttgtgtaatgtttttttccttttaatttgttgccatacttttagtttatacttgttaatggttccaaaacaattttagtatggactcattgttctctcaaaagtatttgttatcctccttgtactaaactatgatacaagttatttgtgcagttaaatctgactttgatttgtatattgttcctaggggcgacctcttttctgtttacccaatacagatac

SEQ ID NO: 68576 - DNA, 665 bp, Prunus persica
  Intron number 2 from transcript ppa011465m (locus ppa01146 5m.g) derived from phytozome v7.0 (chr-ID scaffold_5; pos 13239784 to 13240448)
ttggaatagccctcttcgccaagctcctcgtaaaattaacttaactatttatccttcactatttcgacaaccccatttgtttgtttgctctctatttcctaaattttgttcctttatcataattcttaatagaatttgcagtctcattgaaaattcgaaactattcgtatctgtgttttgcactaagagttgttctgcctattgatgctgcttgtgttttgtaataaacaatcgttgcatgcattgcttgcagaatggtctcagatgatcatgtcaaccatggttttctacttctttgcaagttgtaattttttgggtttaagaatttaatttcattcagttgaatggagatgtaagttgctccgactgatgaaaaaagattagaccaaggccaaaaggtaagaaataaaaagattagatcttggaagttcaaaagtgttgtcttctttaaagtaacctgatgcttttcatttttgattttgcaaaggaaggtaaataaatagattataccttgttgaaagtatagaacgcttcttgtaaaggttttatttcatgttttcctggaaataaagggaatggcttgctccttttatgtggatagtgttttggcttccgttggttagtctattgagtgattaaagtaactggtctttcatgctggcagt

SEQ ID NO: 68577 - DNA, 783 bp, Prunus persica
  Intron number 1 from transcript ppa012066m (locus ppa01206 6m.g) derived from phytozome v7.0 (chr-ID scaffold_2; pos 22611236 to 22612018 reverse strand)
tggatatcctcctgctggccatcagggctcatctggtaaattcattcattcccaaattctctatgttcatgaacttgaaaactatgtgttgggttggcgttgaccctacaattttagggtttcgtaattgagattttatgcctgaatttattgtgactaaatggatccctcactgaaatcatggctgaattttgtgcctgattgtacttcgattctattttttctcttttggagattctcttgttcctagttcacgttttgatttctcgtccaaaataaagtaaaaggatatcaccattggatgacaaaaccctttatgaattatgatgcatcaagtaggaaagccgaaagtttttatttggtttcttagaatatcagaacaaatcttcttaattcgtgatatggtgtcatttgcaaaagaaaaagaaaatccggcaccaaattacccggaattggttttcacggtgttacttactgcctatgttgctgcaaatttattcaaagaatcgttcttttaatgtcggaatgatcttaattaatcaatttccatatgctcattggagtttgcttagcttgagaatgaggagctgttctctcaagtctcaagttagttatatatatatatatatatatatatatatatatatattagtgattgcttggtaatgttaaaattatagctgctgtgcatgtgttcatgtgcaagtatgatttgctaagtggttgtgttgtgttatttgatcttcagggcaccacggcgtagggggattgctggctggtggt

SEQ ID NO: 68578 - DNA, 590 bp, Prunus persica
  Intron number 1 from transcript ppa004365m (locus ppa00433 7m.g) derived from phytozome v7.0 (chr-ID scaffold_5; pos 17559461 to 17560050 reverse strand)
ggtacgtcaccttcagtctcatatacatatttctttatttctttatctaattacttgtgcataacaatcttgctttcctttttcttttaaatttgtctccacctctctaatttttaattttcgaagattttattttcccttgatcaaactccggtagatccactgggttataggcgattattagatgattttatgagttatggtctgaatcttccttgtgtttattctactttgtcagggtttgcctttttttttttttgtttcagttttttttgttcaaattgatatttttttgtggtatttgattaaattttaggattgattgacctcccgcagttcaacgccgatatcaagaaataagtccttttaatctatttgaattctcgttgtttctgagaaactgagcaatagagttcagaataaagtttagcgcataactataataatttcgcttgtaaattatatatttgctctggttagtagtcgtttatttgaggttgtggtgaaaattgagatatagttctaattacttattcaattttctgtaaatggtagatattgaggaggaaatccgatcgttacagcttgat

SEQ ID NO: 68579 - DNA, 1017 bp, Prunus persica
  Intron number 2 from transcript ppa016711m (locus ppa01671 1m.g) derived from phytozome v7.0 (chr-ID scaffold_3; pos 12840770 to 12841786 reverse strand)
ctaataattaggcttcacaagcttctaggaaacaggtaccaataaataaatgcctctttcctcgctcataacacacatggtactactgctgttgcgttggttgaaccctaacccctaaaaacaaaacaaaaataaaaaatacgaacatgtgccagcatatcccgtgctttttttttcttttttttttgtctcgaaaggacaaaataagtggagagtttggtgcgacaccaattaaacgacggcacaataatattctccccaacattattgtttcccatacctagcaaaaattaaattaatatatccatacggaggaaatttatttgctctttgttttcttgggtgaaattttatacctatgttgggctccttttccttttactttattcatctttgttattggtaaaatctttcaaacgcaaactagcatacaaggttggctccctttgacatagtttggagctctaaagagggaaagatgtttggtagcgttgggttcgggcttagttagtacgggactatgagtttagccggtatgacgttatgattttctttgggttgcctagaagatgtggtggtggtcttgttttagactaataattttcaaaaattctttaggagtttgctgtgattttttttctatttaaaatttttatttctttttaggttttggctttcgatacgaatttgctgtttctatcgtttgcgctgcgaatttgtattgtatgtctgagtacatgtgcttctgattgctagatcgacgatttagtcattgcttaagttgtgcatgattctctacggatcaattcaatatgttgtgtttggtcactggagaagatttacttatgttcggcacatagttgctttgtacttttatttgttcatcaataatatattatcgcttattttcataaaataaaataaaaattaaaaaaaaaactagcatacaaatgtattaactttctcatgctatgtattgaaggtggtcattgattgctcgaagacttccaggcagga

SEQ ID NO: 68580 - DNA, 1054 bp, Prunus persica
  Intron number 1 from transcript ppa023849m (locus ppa02384 9m.g) derived from phytozome v7.0 (chr-ID scaffold_6; pos 7139912 to 7140965)
ggggtgtttttgtccaattattttggggaagccttgtaactctcctaaccattgtgtcatacttcttccctgtgtatctctcttatgacatggctaatcacgaaataaaagagaggttatgaaacaaattgaagtttttgtcccaatttagagggcccgactttataaataatagtgaagtttatttttttttttcttttccactttatgtgtttacttataagcctagttagtaaaatacggaacgaaaagtacgaataaaatatgtacgtattttattcggtaaaattttggcaagatacaactgaaaagtgtatataatattttaatataatatatttaaatataatatgtatataatacgtgaattttgtctgtattattcaaaattttgtaaaaaaacacttgtattaaacgtgaaaaatacgtatgtacgtatataatacatgcattttgcgtttgttttttttttttaaaatgtgtattttatggagtctttaagacatatacgaaaaaatgaaagtattattgaaaaataagtacatgctagtataatacaagtattaaatggaaaaatgctaaattctttatatgggtaataattctaaaaaagtaaaaaatcaaaatgggataatagagcttcgggtaatggcctaataatactaaataatgctctaaaatattcctactgataaaagaaaaattgtgaaattttttatgtaaaatatatatagtatagccgcgtggctatactatttatatttttccgtttagtaagaagaacagtattgttactctgtaatccgatacaacaagggcctgctgtgctgacgtgaacatggtattacaagtattttgctcagcccaaggcgaaaagacgaagataccctcagtaggacattgtagcacgttcgagagaggcccaacttcctcatatttcagttgtttagcgcctctgcaagtccatagacaaccaatccagagaaactcgggataggggtcaggggccttagggcttgaaaccttgcagaagaagaagaagaagaagaagaag

SEQ ID NO: 68581 - DNA, 244 bp, Prunus persica
  Intron number 1 from transcript ppa008705m (locus ppa00870 5m.g) derived from phytozome v7.0 (chr-ID scaffold_1; pos 5319019 to 5319262)
caggtacttattctcattattataaccgttgttatgatgattattaatcttatttttggtgtttgtttccttcttttgataatttttgtgtctgttttttctttctctagggttcgattccattcaaagcattggacttcctttattttttccatttactaattttcaatattttcatcttcttcgttcccaccccttcaattctgtagttttgagccgttgaggccgcaaacagagaagttaa

SEQ ID NO: 68582 - DNA, 997 bp, Prunus persica
  Intron number 2 from transcript ppa008705m (locus ppa00870 5m.g) derived from phytozome v7.0 (chr-ID scaffold_1; pos 5319302 to 5320298)
caggtaatatatatacatacatgggtagctatttttgttttaatctataggatattggaagctatagaatagttgcgacttcgtccatatgtgatatgtatttaataaaacaaccacggaacattgcaagtgttaatatttcccagaggaagggctttcagggcctgaacgtttgattatggctgggaaaatttgtatttccgattaaatttatgtcggaacatgatagtttggagtacatcaagttgggtgaaagacttgtaagtggggatagtcacagtaacattggtttttttagcttatgtggaaggacctccttatgttttctggatggtctttaaaaggaatgacatctctaattatgcgttggctttcgtatgagttgcattttatttgcccatgaaataaaatagaagatggatgagaaattttgttaggaaatatccattgagcaggtgaagtttctgttgagtttatagtttgagggaccttttggacgaacatttagaatttggagtttctatcaaatttattaaatattggcttctcttctttacacactttgcttaggattttcattttccaccttctgtgtagcattatggtacaagcttctcctttctacctgtattcctcactttctttgtttcattttgttatacaaattcccaatactgtacacaaattcagaagctccaactagcatgattctgctactaaaaataaataaattatatgtttacactccaatttctatctcaatttcttttcttctcttgctttgctggtatgttattggttggcatcagaatgttagtttcaaacattgacttttaggcaagtaagtgcagaattctatacttttatgtacgagaattctatacttttatgtacgcttgtctgtgtttgagtgcacacatgtttctgtgttcatctcttgttttctgtgtcatggttggactttctgcatcaaactaacatctattggcaggaaatt

SEQ ID NO: 68583 - DNA, 571 bp, Prunus persica
  Intron number 1 from transcript ppa009966m (locus ppa00996 6m.g) derived from phytozome v7.0 (chr-ID scaffold_3; pos 364493 to 365063 reverse strand)
ctgctggagagctgttcctaagcttgcaggtctcatatccattatcatatttatacttcgtttttgtcactgcattctagagagagacagagaaagaaaaagagatgttgtgcaaatttgattgctctgttattcattctgtttctttccttcaggggagagagagaggggtaggagaacatgtgttttctgttaatgtgtttgaattccaaaacttttacaagtttctcttttgttttcagaaattgggtttattctaattcatcatttcatctcttcatctcttcatctcttcatctttgtttttaattttcttttctctctcagaaaaacaaaataaggtggctctgaagttttctttttgttttttgtttttgctctgggaaattaagggaaatgagctaacagtttaagaggcctgattctcatgattatcaatattaaagtggaaacttgttggaatttgaatgccccaatatattcaatgaattatcagctcactgattatagctatggtgggttggtctcaattgcaggattgttaaggtgtggaaaaagttgcaggctgaga

SEQ ID NO: 68584 - DNA, 331 bp, Prunus persica
  Intron number 3 from transcript ppa012133m (locus ppa01214 0m.g) derived from phytozome v7.0 (chr-ID scaffold_5; pos 17746683 to 17747013 reverse strand)
tttctgttacagaccccagcattccaatcaagctggtaagtgcttctgctattgcccccacttatttagtaggaacaagtgcacctttacattcctttccaattgtatatacatgaatggaaccatcatcttcagtcaatcccatctagagagcgatatgatctcttgcagtatctccctagctactcctctttgattctcctatttgaatcatcttgttcttttgcactattgcatcaatatttctactttgacaaggattttttttattattagtgtgctattgcatcaaggttgacagtttttgtttatgtgtgcctgtagactgtgt

SEQ ID NO: 68585 - DNA, 525 bp, Prunus persica
  Intron number 2 from transcript ppa012133m (locus ppa01214 0m.g) derived from phytozome v7.0 (chr-ID scaffold_5; pos 17747047 to 17747571 reverse strand)
ggtaaacaggtatactatgtctcctcctcctcctcctccatctttttccttcaattttgtgacttgtctgtttatttggctttgtttctcaatctgggttccttttccccttctttttccaaccaaaagattcttcctttccatatagaattgaacaattctgtttgtctgtctgtcgtttacccttttccagtcccaattgtgtttggcatgtccggaactggaaggcctcagttttgtttgaggtgtttaatctgatcttgcaagctttggagctccaagctttgtacataatatgatcctaataaactttttacaatttactcttaaatcttagagtcttagactgatttgacttgtgctctgttgcagcttgaccattttattttatttttcgtttcttgctttattgcttccatttcatttctgcatatgatccaattgacaagtatgttcctttcttctaaatatgtataaaaattgaatctttgatgcagaaacttaaaactcgtgtaattaaaaagg

SEQ ID NO: 68586 - DNA, 460 bp, Prunus persica
  Intron number 1 from transcript ppa007300m (locus ppa00730 0m.g) derived from phytozome v7.0 (chr-ID scaffold_1; pos 34897993 to 34898452 reverse strand)
acttctccagcttcattcgtcagcttaatacatatgtaagtgatcctcaaaaaacatgaactttattgcatcgtcttcatattgaatgcagaattctacatgggttcttttcttttttgcagttcccttttagtttgtgggctgacatgaaaaatttgagaaatcaagtaataataaagttggctgcttgctaattactgtaacatttttggttcagtgtaagaatttcaattattggttgtcatgctttttttattcgttctgcaactctgttaactagtttcgatgctctctttgaatttcttataaaagcaattccctttcttctgatggtcatgaatcatgatttgatttcattgctcgtcagtagggtttgctaattacatacctgtttagtaaatttcaatgcttgctcatcaactgattgcatgcagggttttagaaaggttgatcctgaccg

SEQ ID NO: 68587 - DNA, 513 bp, Prunus persica
  Intron number 1 from transcript ppa024426m (locus ppa02442 6m.g) derived from phytozome v7.0 (chr-ID scaffold_7; pos 13612110 to 13612622)
ctttgttccaggttattctctcttcctctgtttctttttcatgctgttatctcattgtgttagaaagtgcagctcggacaatatctccacgctatattgtccttccttttttcaatttaaatcccactagtcatggggtctttatttcctttaatttctgatgttacttgcttactattgtgtatatacggatgtttttactacaacatagaaacatatacagttttcccaaaaccttgcaccttgcaactcatatattaaacgtaaatgcaacgtgactatagtgttttgttttgggatttgggagctgtcaaacaccatgaacaaactcatattcagtgattactggatcttataagggaataatatcgccagacattttgagtggattttttaaaatcaatttatatgaccttaggcaggtcatctggaaaagattctaactctgtcgcatggaagttaaaacctatgtgattacttaaaatgcatctattatgatggaagtgtaggtat

SEQ ID NO: 68588 - DNA, 449 bp, Prunus persica
  Intron number 1 from transcript ppa009425m (locus ppa00942 5m.g) derived from phytozome v7.0 (chr-ID scaffold_1; pos 36651691 to 36652139)
tggcaatcgctgctgagaaccaagcccaagagaaggtcagatttaaagaaaaacctttcaagtcacctttcaagtttcaatttttttgtagccgttgggatcttgagtccccaaattcaaatgctagggttttaatttcttttcggttcttttgtttttctctgaagatgagatgtttaattatttttcttgatgatgaagataatggtttctttgggtatatgtgaattttgagatcgcattatcaaaattcgaattcgagcctctgactgtagggttttctgatttgaaatttaggaatttgggcttgaggtgtaggtcaattagcttcaatggggtttaaagtgctaattggtaaatgtttatatatttagattctatgaggatttttaaatatgggtttgctttcatcaggcttcttcggaggtttcagcgacggagacaagaag

SEQ ID NO: 68589 - DNA, 462 bp, Prunus persica
  Intron number 2 from transcript ppa005634m (locus ppa00563 4m.g) derived from phytozome v7.0 (chr-ID scaffold_1; pos 11636058 to 11636519)
gaggtttctaatctcaatcgccagttccttttcaggttacttgattttcttggtgcttttatgtttaactttctcgtgcgtattttttgaatgggtgagttacatgaatgtatgcgagtttattgcccagttcactgtatttcactgctaaaaattatttgaatactaatatggtaaaccttgcttggaagatggagcataagtggtgcactaactgtgtagtctctcaatactatggttttgctaaatttctcttagctgaagttctatgaacctgtttttggaatctcaatcgtgaactattgttgatgtttgtgtgttttacttcgatattagcagtttatctgctttggtattatctattttgatattcaatatgaaaaacaaaggaagaaaaagagttagcatttcagtttcttgttaaaatgctttgctcatgaagttattgttgtagacttgaag

SEQ ID NO: 68590 - DNA, 526 bp, Prunus persica
  Intron number 3 from transcript ppa005634m (locus ppa00563 4m.g) derived from phytozome v7.0 (chr-ID scaffold_1; pos 11636680 to 11637205)
gagctacataaattctgttgcttgtagttttcttggtatgtaccctcaacctatccattttgctcatattttgtctctctgtccaacagtttgtgtaatttattagaagtattacatgacttcagatgctcctgtaatcaggtttctgtgattatattttgcacttgttgattctttgatgatgatttctcaacctaaattgttgctgtagtattttgtctaattattttggtcaataagcttgctttttgatatatttgatatatattgcaagtttaaggcgccaaaattggttcagctttggtttgaacttttatctctagtaacagatcctttgtttcttggtgaaatttgccttgatgctcttttatataacgacattttcaggttcttttcaaattctttttatctaggtcttatcccatgctacccattactatcattcctgaaatgacttgtttttactgtactatacttgagctaaacgtggcctgttacattttttttcttttccatttggaagagt

SEQ ID NO: 68591 - DNA, 762 bp, Prunus persica
  Intron number 2 from transcript ppa011944m (locus ppa01194 4m.g) derived from phytozome v7.0 (chr-ID scaffold_2; pos 3022269 to 3023030 reverse strand)
taggagcaaaccgttgcagatttgggataaagaaggtgagtggttttggctttggaaatgtaaaacctgttgatgaaattttgagatgcttgttaaactcaacttatttcaaatatcaatgtaagatgcaattctgacaattcagtgttgtttatgccttttacatattttttcccaaatgtcgtctgaattaaataagtgcctgtagcttctacaaatctaaatagtttgaagtggtagcacaaggacgaaattggttgtatgcttttttatagtttaatacgtggaggtgcccagtcatggttcagtactgtcttattctttgcaatccatccccctttatttcatccttgtcatacaacatccatgttaacccaccatgtctttttgttaagattggtgactgatgagcatctaatctgctgatagacgcattagctaaaagacttggtaatctctaatggatggatcccttcgcactgcgatataccattaaattttagggtctctttaggtctgttcatgacatagtaaataatgaggcactcgcatgttggaaagtttgtagatttgatgtttatattggatggggcattgcttgatgctagagtggaaataactatttttctacttcagactgtagtataaggcggatgcctttaagatgttgacatgatgatggaatgacttagtgactggttgaattttctatgtttttcttttgttgagcagttgtcgacggccatattaaaagaccacagg

SEQ ID NO: 68592 - DNA, 681 bp, Prunus persica
  Intron number 2 from transcript ppa026834m (locus ppa02683 4m.g) derived from phytozome v7.0 (chr-ID scaffold_5; pos 10460175 to 10460855)
caaagatcaggagaaaaagagccaggtggcaaacggtcgggtttctagtctccctgaatttttagtatgatgttgagcttaatgccattacatagctctctttattttaattacttttaaaaagaaaaaaagaacctacaattctttgatgaagagtatgaagggatcgaattgttggggatactccacagtgtggttcaatgatctgaattatttagcttttaatcctcatttaagaatcatacatgcaaattaatgcggtcgtaagttcgattatttgattatatcgtcatgatcatttcattgtttgatacgaaatattgtgtttgtctacttattgtgttatagttagatgatcaaaaaaaaaaaaagagttcttattttgtcattaaatgagttcttattaaaaagataaatgcttcaagtcatctgatcacattgatggtttttctcctaccgagaaaaacttttcgagaatagtgaaaatgaatccctcattagaatgggattgtatataacatatacatatattttacggggtcatgagaacaaaatgattttgaattttttaaaaaaagtataatatgatgaatcattaattcacttgtattacatacctggtgaaattaatattaagaaaaaaaagtgtttgtgcaggtcaagggtctgaaccagattgga

SEQ ID NO: 68593 - DNA, 859 bp, Prunus persica
  Intron number 5 from transcript ppa000556m (locus ppa00055 6m.g) derived from phytozome v7.0 (chr-ID scaffold_8; pos 4043016 to 4043874 reverse strand)
gcacctctaggtatcagaagtgattacttccgctggtgagtgcacgtttttttgaggttgtgtcgttatttttgttgaaagtcgtaagtattatgttgttgatttcaagtcgtgtatatgtgcaaagcagcacatactctaatcacaaataaaaagagtaaacaagaggtttgttcttatttcttgcctattaagaggcagcactccatcagaaagtttttttttttataaattttatattttcaaatgactgtattgaccaatgaagttcaaacatgtcaactgttaaaaagtcttatttcccaataattcggcaaggaaaggtttaaatggatcaggtttggtggttgtttttctttgcgtccaatcggcctgctttttgttgaaaacactagttcttttgcaattcaacttttgaaacaattttcatggtgacgggatgttctcatccctccatcatagtgaaatttttgttatacaataatatctcaaatgatgaatgtatccaaattgattttttaaatgaaagggaaaatgggagaaaacggaagggaagtctgttttaaagaatagtataagggtataccttagagaagattaaactctgaaggaggttggtgttttcttgtggtccactttttacgtttttatgttagataggttttacattagttcaacaacattttcatgttaccgattgttcataattttaaaaagaacatttaaatgcaatcaaatggtagtttgaaacttgtcacaaaattgatgtaggaaatcatttcatcttgtttttgcttttcttattcattctcatgtgatataaaaaacctttgtatgttctaacaggtgtagcggggtt

SEQ ID NO: 68594 - DNA, 593 bp, Prunus persica
  Intron number 1 from transcript ppa020122m (locus ppa02012 2m.g) derived from phytozome v7.0 (chr-ID scaffold_3; pos 19411068 to 19411660)
gctctgtacgttttttatttttatataatcacctccttctatttttctgttctttcttatttttggaccgtctataatctaagtatgtagtttctcatacatttaaattcaacattttcttgtggttgaattttaagaacacgtacatttcacaaagcataaataagagcgttgcgttttgataaattagctgtgcaacactgatttattaaagaggttggtttagtttgaattttgattacatcaaactttttttatttatacaagtgatagtttaaacgtcttaatcgaaacaataaaaatttattttcgtgacatgtttataataaaggaggttaaaatttatatttagcgggggttttagtataattttccctttcgtaacctttaatttttgcccaacttgccaagtaacctgattttattttggcttatcttagctattaataattgggagtcgtatcttcttctcttgcattttgcctttttaattttcttaaaacatataataaaaatgaaaataaagtgactgactttgtttgtactgttcatcttgtgtttgcaagtattcaattttgacaagcggtattaca

SEQ ID NO: 68595 - DNA, 395 bp, Prunus persica
  Intron number 3 from transcript ppa010362m (locus ppa01036 2m.g) derived from phytozome v7.0 (chr-ID scaffold_3; pos 20302412 to 20302806)
gcacagtcactactaggtctgctttctgcttcaaaagtagcttgtgctcttcttatgttttcgcagttattaaatccttattttttgttctcctgttgatttatcctctccaccacaagcctaagatattaataaacgaatgtttgctaggttactacccctgtcctaattacactagttccactcaacttcaaaagtttttatgtaaacctttgttttgtttttatcttatgaaaacttattaatcttgtaatttaaaaaaaaaattatattattcttttctgaaaaggtgttattctccaagatgtatcattctatgactttgattaaatgaagttcccagcattgatttttccatatgataacctcctgcagggagattgtggtgcagttca

SEQ ID NO: 68596 - DNA, 498 bp, Prunus persica
  Intron number 1 from transcript ppa004974m (locus ppa00497 4m.g) derived from phytozome v7.0 (chr-ID scaffold_5; pos 4691477 to 4691974 reverse strand)
ctggacaccaaggcatgttgtttgctttttctctctcactctttgcctgctcatatcctatttaacttatagttaggagcacaggtttctgcatcaagaattgctgcattggcctgtatattttgtttttcttcactctgcttcttttcatgaagaaattttacatttattatgtaaacagtgattttcatttttactgttttagtttactccaaattgtgtatcataaaataggactggacttttgaaaaatgcagaaattgccctcttctagattaaaagtttcgtttacatttagcatgtgttaatttggattttcattctcaatatttagtgtactactctcaaatgaatgcctcatatttatcacattgtaaataattgttttagcataaaggctttgaatatctcatcctgattctttctaatcaccattgaggttatggttgatatatgatttttctttcttcatgcagggtcctgaggttagaagtggag

SEQ ID NO: 68597 - DNA, 840 bp, Prunus persica
  Intron number 1 from transcript ppa005722m (locus ppa00572 2m.g) derived from phytozome v7.0 (chr-ID scaffold_1; pos 40750206 to 40751045 reverse strand)
tcttctggaacagttttgattgcttggaacaagaggtacatatgtgtgtgtgtgtgtgtgtgtgtgtgtgtgtgtgtgtgtgtgtatccacaaacatttcttgatcatatatcagtctatcaacatatctttgcaatgccttgaaggaacaagtttaggtaaagtttcaaaaagactgattaaagatgtttgggaaattataagagaagaaaacttgaattggaatcataggctaaaatacatttttggtccatgtagtttgcaacttagtgtaaactacaagggtatatctttacgtttcttttaacggtagaacgaaattggaaattctagcaaactacatggattaaaagacataacatatggggcttgaggcttgtgttaattccgaattgaaatttagggagtacattttgaactgaagtatgaatattattttcccccattatttgaacaatggatggctttacgctttgctcaatattgtaaacaatgtttctgtgtattattgggagaggctaggatctatatttgaagggactaatattacctagctacgattgaactgacagaaaacaacaattcttcttgtgttgattatacatgttagattcttttttgtttttgttttttaaatgctgtatgcctagagtacatgttagcttgagttaaaatgcccctttggcaactatagccatagaatttgaggacacatattgcccacttctgttattaaagtgagacctactcaatgaaaaatagtcgataaatatggtacaaataattttatttgaatcttaaatagacgacaccttataatttcatcaggtggtgagctgg

SEQ ID NO: 68598 - DNA, 853 bp, Prunus persica
  Intron number 1 from transcript ppa001905m (locus ppa00190 5m.g) derived from phytozome v7.0 (chr-ID scaffold_6; pos 18006429 to 18007281 reverse strand)
tggttttgtatgatgcattggattaattaagctcttattgaatcaccaggcggctacaattgaatactaaccccctttattagtttgtgttagtattaatcagatactttctaagggttaactgtcaatataaagaaaaatactatcgagataagagtttgtaacttaagtagttaatagcagttatcatacgcatgagctcgttaggtcgtattttagtcaaatagcttaattcaatagaatgaaatagctagttggaggaggagaacatatggaaatgaccataaacagacactcaaacagtagctcttgtgtaagtacagttcatgcaatgaagacgcacatttataaggagggtggatatatagatagcaatctacctccgtacctgaaatgggaaggacagatacgacaataatatttttggatggggagttggcaggctcgccaatattcaccaaagcaatggaattaacagaggacaaaactaaattaatacgttcaaatcatcaaaagtccaagcaagcaaccaaagattatgtatgaacgtagaacgcgcttttgtctttgatgacaggacttagatttgcaataaaccatgtggttttatttattctttattaactgcacaaataaacaaaacaagtttatttttcttgctaaggaaaatataaaagaagaaaatgcgttggtcccacggcggcaagctgcaggctgcagctgatcatagctcacaacttgccatgcatttggaaatactttaaataccaagaaactgagaagttaagagttgaagttggcctttttcaaatttacttgaaaccacttggcatggagttgagttcttcaacta

SEQ ID NO: 68599 - DNA, 1026 bp, Prunus persica
  Intron number 3 from transcript ppa009338m (locus ppa00933 8m.g) derived from phytozome v7.0 (chr-ID scaffold_1; pos 32177665 to 32178690)
tacccctacaggtatttctatttcttgcctcgctttctttttcttaattttttttttaatctctttcttgttgctctacccggcttctatttttagatttctggaggtctaacttaattctctctctctctctctctctctctctctctctctgtgcagctactgcattttccattagtaaccgttctgagtctgcagacaaacctgagcttgctctggtggaatattcccccaaacacataaaagatcgtccgcatgtcattgaaggtgggtttatttttctcgatcctctctctccatcactcttgattgatatatacacaaaaatcctactggataagaatagtttcaatcacacaaccacaaattttttatgtgctttctcggcctcaaaattttatatttatcagtacgtctggcttgcttttgataaggaaaatttcctgacctttatcatttcactgaattatgaattacgaaaactttgcaattttcccatataatttttcttttgtcaagaaagaacaagaaaaaccaacgtgcacatgtggaaagttgagtgtattttcaatttcaccttctcagggccccactcctatcttatgtttacaaatatgcggctgcaatccatgtactaggtttgggttttcttgaattttgttaactgcatagataattgtatcacaatacaatatccatcgacgggtcgaggtcagtgatgatcaccccacatatgacatacgggaccagaccaacatcaggatttcaacgagtgattccaatacctcgtatcatgaatgagtcttttgtatcatttgcaaaaaaagctccttgtctaaaatacgagctttttgtttcggagcatgtagagatgttgatcattgatccatcagcttgaacttaatttgatacttgtcataaaaacgtgcacattttagatttgattggagtggcttgcctatcatagcattcatacctaatgtaactagctgctttgtattattattccaggtacgggaatcattg

SEQ ID NO: 68600 - DNA, 670 bp, Prunus persica
  Intron number 1 from transcript ppa024732m (locus ppa02473 2m.g) derived from phytozome v7.0 (chr-ID scaffold_2; pos 1881489 to 1882158 reverse strand)
cacagattagggagaaacttgagtacaatcatcgattgtctcgaaaaggatatgatggtttggaggatcaattggaggaaaccatgcctggggtagaaattgatcgatctaccttatggaagagagctagacaggacaaacatggtaacatcccggatccaaaggtggcagagaaagcaaaattaattgtaagcctactcactctgttttaaatttttattaaactgtgaataattcttattacgtcttatgttatattttgcgtcgtgtgaatgatattatcacgtcgaaagtttttaaaaaacgtcgttaaaggtctaaataggaatcactgctctgttttatgtaattatagcataagatgtcggtggttcattttcgcgtcgtttgtattaaattactacgtcgaaatgttttaaacaaggtcgttaaaggtgtgaatattgaatcatccctctgttatcagtaaataaagcataagacgtcggtggtttattcatttcgttgttttaaaaaattaaccacgtcggtataactaccgtcgtgataaattataataacgtcgatttatatgttattgcgtcgtgtgaaattatataatacgtcgtttgtatataaataaccgtcgtgtgttttttgttcttacttttttatatatctttgttttagg

SEQ ID NO: 68601 - DNA, 444 bp, Prunus persica
  Intron number 1 from transcript ppa023190m (locus ppa02319 0m.g) derived from phytozome v7.0 (chr-ID scaffold_1; pos 43997444 to 43997887 reverse strand)
gccttcctccttcctattgctcttatctttgaaaggtgaatattagtattgcatttctcttctttgatagaataaattaaaagttctttccatcttttgcgtttttcagaacgaagaaatattcaataatgtcatatttgctagagctttccctaattgcatcatgcgtgctctgttgatgacgtggtttcagtaatatctttcagaacattcaataagttcatcatatacacacgagaagtttcctttacaaaaacacactgggaaaataagaacgaaaagaaaagaaaaaaggaaaggaaaggaaagaaaagaaagggaaaaggaaatcaaatcccaagtgctaccttttgacattttgccacattgaccacttatatgtttcaaaccaattggtgtccaatttgttttatttacatgcaggaaaagcaggccaaagctcac

SEQ ID NO: 68602 - DNA, 631 bp, Prunus persica
  Intron number 1 from transcript ppa008605m (locus ppa00860 5m.g) derived from phytozome v7.0 (chr-ID scaffold_6; pos 6583875 to 6584505 reverse strand)
agaagggcttgtctgtaactgatattactgccacggtatagaatttcttggcttccagactcttttttcgaagtttttgcaaatgggtttggatttgtgtttgtaaattttgaggctttattgctgtctgattgtggatcatatgggattttaggaaatgcgtttggatggttacgctgaatgtttgagaagattggtttttgaattatatattgcaatgacaaagatttatgtgcaatagaatgatttaaatttgttagttttcttagtgccacatcaatgtgtatgttggaaatctaatagcaaaatttgatcagaaggacatcttattattcccaatttgaaatcttgtattggttgggtaaatgtgtgagccggactcccattgagcatctgtatctccctggtgtgagtgtgggaatgctttcattttccatgtattgtggtgttttccatatatagtatagccaatgcagcataatttagcagtaactgtggataaacaacctcaataatttgaacactgctattattttgcgagaggttatgactactttttttttggtcatccaattaaggatttcaaaagatatttgtcttagatctattctatttcatgttaacaacagga

SEQ ID NO: 68603 - DNA, 493 bp, Prunus persica
  Intron number 4 from transcript ppa008606m (locus ppa00860 6m.g) derived from phytozome v7.0 (chr-ID scaffold_1; pos 1040433 to 1040925)
cagaggcaaaggggcttatcacaccagggcaggttggttgtttgatagttatgtaagagtgttatgtttttgaagaacttgtgcatgaaaaaggggaggtggtttatgttttgaagaacttgtgcatgaaaaagaggaggcaaccgcgtcccccatattctatgcttagtttctccactagcatgtttcttttttcagttgctattaacgaaaaagatgcaaccatgcttttagcatgggatgttttagctagaaacataagtggtctgcagtgtctgtgaaattgtgcctttaataatagtctgaattttgtataactaccacattgtttggtttcaccaatattttgagcatgctagatgcatgaggaaagaaaagatgatttgagattttgatttgatggaaattgtgagctgacagatattactttgactttggttggtctgtgtttgctgaagagtgtcctcatcgagccaacaagtggtaacactgg

SEQ ID NO: 68604 - DNA, 1045 bp, Prunus persica
  Intron number 3 from transcript ppa012265m (locus ppa01226 5m.g) derived from phytozome v7.0 (chr-ID scaffold_6; pos 27617476 to 27618520)
gcattctattgtcatcaaaggacctgaagaggaaggtagcaatgaatttttctgaatagatacagttcaaccgcatgtgactatgcatgctaatattaagcttgttggtgctgtacttgaatttatattattacacactgacatgctttgatctgaatgcctacgcaactcttgatggaattcttttaaggtgtcatttgttttcactattgatgttacttttctttcattttttggcacttccttttaatcttttattataaattcttataacagtggaagccatcccaacctattatacttagggttcacagtaacatgtatttgaattcttgtcttcatttagcttcgatccactcttttaaggtttgtagtagatcaaatagaggttgcaaaaggatcaaatttgttggcatgcagagtaagaaaaactctggagcaataaatctaaggatcatggaactatgaatataaatacagataagtttttgtaaccatggggatttaagaagactaccaatctcaaaccaaaatgcacatatcagaggaaaacatttcatgtttctttcaagccctactgatccaaggccttgtcttcatagtatggaaggtgtttaaatttgtttgcatttactgaaaaattaattctgattaggtgattgtatttcaaaacatcagcctaaagagccaattctactagagtgaacgtgaaagtggatgatatcataatggttatatcatgatgttttcttctttatcagagaatcattcaacaaatatgagtttttcaggatgtaaatatgagttttcttctttccctgagaaatataatttttctgctgttttggctttgataccactgtctgtcatctttgtattttccttacctttttcttccagcctctttgttaactaaaattttgttgtgcattttaccttgcaaatcttctactgtaaatatccctgaaattgatgtttgatactgttctaatgttgagattgatttctaggtcctaagacggtgaaacttttttcaaacaaggag

SEQ ID NO: 68605 - DNA, 959 bp, Prunus persica
  Intron number 1 from transcript ppa011834m (locus ppa01183 4m.g) derived from phytozome v7.0 (chr-ID scaffold_2; pos 18042072 to 18043030 reverse strand)
ccgtcctcaaggagattcgccctcattttcttgaggtacatttcagacccatttgtcaaagtttgtatcttggtctgaatttgttgtaaatttggagaatttatgtgatctgggttttctttttattgaatttgtcttttaacttggttacattttgatttgaggtacattattcgggcttgtttgggttcacaatttgctttcttgagcatttctaatgatttatttctttttattgttccgtctctttcctttttcttttaaaaatttaaaaatggataatctttaataatttttttgtgtgggtgaaatcaaatgtataatctttgtcattctgcgcccttgtacttttgttttttggggtgcccttagcagctttcataggaaagttggtctaaatagtgattttgatggaaatgactttacttggtaaacatgtaccaatgattgctgcttttgattttgtttttattttagagggtctgtctctcttttaattttttggttgcacaggacatttaatataaagtgaaggatgaagacaagaaatttaaggttcaagtgaattgaggtgttgttagtttgcgttaagtgaaactctcaaaagtagggtctatttgctaccatttctgtttgtgcttgattgttttaggctcagatgaagtataatgcgtcatgcatgttatgtagtctatatgccatgggtagaattaggagatcatggctgctgtaaagtacattaggttctgtagagactgctggggataggccattgggtgttagcttggttcttaaattgttggtctatcaaagttgtggatgtaatcactctcaattaatagctctacatcctaatgttttgaactgcttcttttgtttgctacattatgtgaagtaaggagggctaactttttgtcttttgttatcttgaaggttctccggacccctgactttcgatt

SEQ ID NO: 68606 - DNA, 871 bp, Prunus persica
  Intron number 2 from transcript ppa012586m (locus ppa01258 6m.g) derived from phytozome v7.0 (chr-ID scaffold_7; pos 20453059 to 20453929)
atcaaagggtgttgacaaaattctgtgtcttagcggtaaagctctcacttcattttggtttacaagcagcaactgtagtggcacttttcaaggattattctttgaatttgattgatgtgtggattcataaactaagccaaaacacttttcttcagttgatcaatgatcatacatattattctgatatggttggcttggctggatcacaggttcataatatcataaattatagtgttttagatagtattatgtgggatataagagtttaaggagattcatgattctttgaagacaaagaacttaacttgagtgaggcaaatgcttcctatgtatacagttactgatagtaattaatcaagtgttcttaagaagaagaaaaaaaactagtgaagtgttcctagatatttgattagatcatcctatgttgcccggaacacctattggattattttgaatgagtaatgtttgcagacttggggttagtttgttttctattcttctgcattgaacacaaacacggcttcataacataagataacattcgtgttctgtgttatcacccgccccttgttgctgtgcatttccggtatatggtcattagattacttgatgcggtattgtcacggggttgccacatcagtttgtgaatgagaaagaatatgtgaagttttttgtacccctaacaatcaatcatgagaataagatgtgacttcgtccactgaacatatgtgttttcacgcttacttggtggtttactctgactgatccatagaaaatgtcgttgaattcgagtctatagtctctacaaaggaaatttcatttatgtggaatcaggtatctaatataaagctttggttcctgtttgcagtga

SEQ ID NO: 68607 - DNA, 271 bp, Prunus persica
  Intron number 2 from transcript ppa006586m (locus ppa00658 6m.g) derived from phytozome v7.0 (chr-ID scaffold_4; pos 20802600 to 20802870 reverse strand)
tgatattgaggaagaaacttcccacaagctcgcatgtaaagttatatcattttcactgatgttttattgaattggtttttgctacagactggatgtttgtgttcttttttgattgtcatgaaatgagtgcttctgagatgttctgtttgaagagataatgaacttttatgaggtttggtcattcgttattgctaatgttgttgaatgacttaattatttgtatgtaatttgtgtaggtttaccgggggttttatcggttaagcctgacccg

SEQ ID NO: 68608 - DNA, 536 bp, Prunus persica
  Intron number 3 from transcript ppa022295m (locus ppa02229 5m.g) derived from phytozome v7.0 (chr-ID scaffold_6; pos 22466841 to 22467376)
atagccaagctcttgaaggcataacattatcagtaagttgagaaattattaatgttttctcatatgcatcataccagtcttcttgtatagacaagtgctgagaatggatcatgctctctaattttgatcttaattaaatgacttggttgacatagattgaagtgtttgcttattttaccacttacaaggctaatcccctagtgcttatatgatgagtgaagtcatggggtcatataataacaaacggcaatcaagggtcaccaagaggtgcataataattgcattataagtagaaaagaactcttcttttattatacacggaaagtcaaaatgaaatggttctaatttgttgaagtttttttcctcctccctctaatctgtgtgcaaagttttagaatattttgatttatcccttcaagctttcccttgagttttagtgccattctgcatacattggttgggctttgtatttgctgatccatggagtttaaccgcaggttaactcttttgtatgactcagattcttgaagaaccaa

SEQ ID NO: 68609 - DNA, 1034 bp, Prunus persica
  Intron number 1 from transcript ppa017231m (locus ppa01723 1m.g) derived from phytozome v7.0 (chr-ID scaffold_8; pos 18001598 to 18002631 reverse strand)
caaccggggttgcttgaaatttaatcggtgtcgtggttagaaaggctaattatgttataattacggctagctaagccaagaaacaaaaaattgattatgttaatgtatacaatgtacgtggtttatgttctagggagaacaagggcctttcatggtgaaagacttgaggattttcatttgtattggataagtaacgttatagaaaagtgttttacttttctaatagactaatgcatgtgtgctctttactcttgccccttcaaaaagaaacggaacttttcatatgctttaccttttaattatttaaagatgaatactaactaatatattaggagatgatgatcatgtggcaatcataatgttatgtcatctccaatttgataacattcaaagtcacatctagataacataatgaagtcatccaaatgtcattccttatttggtgactcgatttgaattagaggaattaagttcaagtcagtttttataaatctcatttaaagatataatttgtaaaacatgccaaatgacggtgatggtattaattcaatttaattggaatagtccagtctgatttaccaaacaaggccaaagtaacattagattgaagaaatgacaaataggataatgaagttataaaacacttttcgtgggcattcatgatatatttgggaatgggaagaattttggggcgtgtttgttacattgtgcaggcatggactagcttggctaagattttattccacgtttgtttcatccagttctaaatttaaatgggtcccactaaaaacacctccttaggtgttcttagtgaaacacgtctagagatgagggactaacagtcgcaacccaagcgacgagcaaccaaccttacccaagctccccacaaccattgacccctcaagcggcagctatttgtgcaaatttctcatgggagattatttgcgggttgattcatcgaccttcgatcttccttttatctcttcctctatttatgcgaaataaatatgagtaaataaaccgcaccagagggg

SEQ ID NO: 68610 - DNA, 286 bp, Prunus persica
  Intron number 1 from transcript ppa000097m (locus ppa00009 7m.g) derived from phytozome v7.0 (chr-ID scaffold_4; pos 7348122 to 7348407)
gcaaaacaaggtaatgtgtcttactctctggctttgttttttcttccctttctttttgggctggaagggtccaagaattctactttagaaatgcaataaattgtatataattttgagtattcacttaactggcaaagcaaggtaatgtgcgtgtgcatttctctgtctttgaattttttgggttggtttcaagcttttaaagggattgagcttaataattaaaagtgggtacttatttgattatttggtcaattgggtttttgtagtttgaggagaatttggagca

SEQ ID NO: 68611 - DNA, 675 bp, Prunus persica
  Intron number 2 from transcript ppa000097m (locus ppa00009 7m.g) derived from phytozome v7.0 (chr-ID scaffold_4; pos 7348524 to 7349198)
agggtcctgacactgatattgagactggtatgtaaccccttctttcattcttggagccttttgcttacacgagcatacacaaatgggggtgcatttgggtctttacatcagaagggtgttaagtttttagattaatctctggaatggaaacattcataattggacaccacagacccttttctgttacacgtatgaaacccttctcataaaagtacacaattggtgtacacgtgtccattaccagtatctggtcgatacctattttcctagagtttttaattaatgataaatatttgattttttgttctgtatttgttattttctacacctggtttctaaagacaatataaagagaaaacaatggaatgcttgtaacttggttttttggcataacatatatagtttgtgaaaagtttaaaggtagttatagatatggggaatacatgctgttgtgaatttggcccgcctctaataggtgtcagtctagtgctggttaaagtggaagactggtgtaatccaagtactaaaattatttatttcaataggcacctgttagatgctaagtttttgtgataacaagtcagattgcagtaagattgagtgacactgcaggactgggttttgccattgacttcttcgtagagttcttgaaatatcttgatcctatttgcagaa

SEQ ID NO: 68612 - DNA, 786 bp, Prunus persica
  Intron number 1 from transcript ppa008327m (locus ppa00832 7m.g) derived from phytozome v7.0 (chr-ID scaffold_4; pos 4123514 to 4124299)
tcaatcaattccactacaatccaggcggcagagaggtatgtttttcgggtccttcccattcctagtcatgacttggttgccttagattctgctctgaaactttatttaggttcttttcatgtggttctgtagcacagattgttaaaaaattggcgtgagcggtcattactcgtgttccctctaatcgagtcacaaatacattgatttattgatttgtgatatcttaagagataagacattgtacttttgtctagcagttcagctggaggctaatgcctcagatgaattttttttttccagggaataggttcataatagattagactttgtacttttgtcaatgagagttgaatctaagaatatgttatcaaattccacatgaagaaggagaaattaactcaaaagcttgaaaaggcatgatcattgaaagtagggaaggagaaagtagaatgcagtttaagatcaaattgttgtcatggcttttgggaagaggctaacctgaaaaggccttaaagtctggttgcacatatgcatatgctttaagcaaatgcgtgactcatctaattttatctatgtatgccttctttgaccattttgacatttggaacaattgttcgacattaatggcatggagccatacaatctgccaattcttaatttgcttttagcatgagtcttatttgaaaagaaagaagactttgcactttattcttgttcacacaaaatggttgtgtttatggtggttttgtagctttctatcagtttacacagcagagcctccccgct

SEQ ID NO: 68613 - DNA, 545 bp, Prunus persica
  Intron number 1 from transcript ppa011911m (locus ppa01191 1m.g) derived from phytozome v7.0 (chr-ID scaffold_8; pos 20680975 to 20681519 reverse strand)
tgcgatatctgaagcttccaagtgctcagtcaaaggtaagctcttgcttaatcttttatggattcagattgtgggtatgccccagaaataacaagtatcacagctggttcagtgtgctttacctaatttgtgcttcaagtgggcatttcttgatttacagtgttttatgactgaaatccgactggttttttaatttatgtctattttggtggctcgatacgattgttgatagttttttttttcttattgcgtttaatttataattctctgatggtgtttggttttgtttagtttcttcttgaacttcttattttggttatttggtgggaatttgagcttgccccctttgtgaaatttccccggtggcttggaggaggaggttttgattgtttggttcaagttccatggaattcgccccttttttataaccttcagattgtgaacttgcttattgatgatataaattaagctaattaactgttctcttgctattgtatatgttggattcagggttacctgaagtaagaaatatcagtgcccttcca

SEQ ID NO: 68614 - DNA, 438 bp, Prunus persica
  Intron number 3 from transcript ppa001801m (locus ppa00180 1m.g) derived from phytozome v7.0 (chr-ID scaffold_7; pos 9391111 to 9391548 reverse strand)
ctgcgtgcagctgtgtgtattttctgtcttcttcctaaacaaatcttagtgggtgtgatttgatgtgagcaactttcttttttctttgatttctcaaatgatgcgtggggagaaaatgtttgaattcgcatatctaaatcacactcactgttttcgttttttacttcagtaagtaatatagagtttgcatgatatctactggtgtcagtccggatgacattatattgaatttatgttcatcttgttttgggttacacatgtttttgactgctttaaagtttaggatttataaatcatgattaattttttctctttgatctgatgtcaagtaattgagatctttgttagttgataccacatgcacatctcaacagatcttcgtgacgttatcttatggatgcagatccctcccagtcggtcgacatataacaacttgat

SEQ ID NO: 68615 - DNA, 875 bp, Prunus persica
  Intron number 1 from transcript ppa009353m (locus ppa00835 5m.g) derived from phytozome v7.0 (chr-ID scaffold_4; pos 4508906 to 4509780)
ctataaaggacatttctcatttcttcaattcactggtaatatgtcatctctctcatagatctttcactgaatcttttaattagttttgtcaggtgagcttttttttcatatgttatgttggtttctttcattttctggttctatgtgaatggtagcagtcgttagatggatttggaacctctgatttggaccagttttccacctttaatggcactttctatccgttttgaatgaacccatcattaaaactttgtcattccttcattgttgatttcagttttgatttggtaatgattaatttatttcgtttgattggagctttcatcatttggaacctgagaaaatcaacaatttcactaaactgtgcctacccaaagtttagttgatcccctttttcatcttttcaaatttgcgtggccaatattgccgcaaaataaaattctacccgtttttatccatttgtgaagctttattagccaaactatagatattgtaactttgaccaatagattcattttgaatttgatggggatgtttcaacaatcggcaacttcaaatgatatgaaacatacatccatggttatattgcatattcacagtggtatttggaatttcattgttttcaaacttatttttacttgcatatgagctccacggaattagctggttaagaaatatactggaattgcaatattatcttctttttgttttttggtcaatagattttatgctaaagaagttcaaattttgaggctttcatttggggtggtatcaggtgtctttgtttcgctttcggaatcatttttgctcagattggttgtttaactttccgttttccaggccacttcgtactgaatacttgaaaagaacaggct

SEQ ID NO: 68616 - DNA, 882 bp, Prunus persica
  Intron number 1 from transcript ppa016774m (locus ppa01677 4m.g) derived from phytozome v7.0 (chr-ID scaffold_8; pos 14246596 to 14247477 reverse strand)
tccctcgaaattgtggacctgtattacccccaattaatttcagggagcccttcccttgagcatttgtcagtatctttttgtttcgctaaattttatagatcacctaagattccacgttcttccagtctcaaatccttggaagtcagagatttcgattctaaggtagttcaagtgagtagaggatccaccatggggtcaatgtggtcagacgaccccatggcggccctggaaatggcttggaggtccttggtttctcttggcagccatgggagatgaccccatggagaagaagatacaaactgctagggagaagaaatagggaggaagaagaaagatagagatagggggaggaaaaagaaaaccagagggtgaagaaaagagagaggggtaggaagaagaagaagaacactgagagggagaagaaagaagccgtcacatattttaataaaaaggaagatatttgttggggtttttttataaatatttttaaaattctgtgtacacctataaatattaaaagtatacatcagtaacatgaagatattatttactatagtggtatgtgaattgaaaaggactgctaaggtcaacggttcaacaccctttgtgttcttttttctttctttttgatgaaatttatgatttacataatacatatatgagtttgatttattgaatgatgtttttattaattggaataagtttggtgtgttttttatttgttatttttgtattgtttaatcttaaaatgaaaatcaaaattttaacactatgaccccatagagtaacaattctgaatccgccactggagtggagctaagagtcttgaatcttttaccttggtttcagaatcttcaatgcagattgagagtatacggttgg

SEQ ID NO: 68617 - DNA, 519 bp, Prunus persica
  Intron number 2 from transcript ppa024780m (locus ppa02478 0m.g) derived from phytozome v7.0 (chr-ID scaffold_1; pos 32369523 to 32370041)
gtaattgagatagatcgtgagttcctttttgccatgtactggcaaaagaacatgtgtattttctgaaaaaaatttgtacgtttgaacatgtatgttactaatgcgaatcttagggtgtttttaattttgtaccagattaatatcacagcccaaaactaccttatatgtccatcgttgagtgtagttggggtaaagtttgatcttggaagggtcaagaactcataagttgatttagaattgtggttttcattgacaagaaatgagaattaggttatggacctcgtaatgggttatcaccgctaatgtctagtaaaactgtactaaactaaaatttagtaatggatcaaatgttggttgtttctttgatcttattttctgtgtcccaactcttcctggtaatgagtccgtataacgtcagcagtttctctacttctgtgctttagtcatgttttactggtctgctctaccaatcttattgaatttattctggtgcttcaaagctccagagagaggataaaa

SEQ ID NO: 68618 - DNA, 502 bp, Prunus persica
  Intron number 1 from transcript ppa004967m (locus ppa00496 7m.g) derived from phytozome v7.0 (chr-ID scaffold_1; pos 7635677 to 7636178 reverse strand)
gctcgttgccgtttctttacggtgcaaagaaattggtgaatttacttttcgttttgaattgctgtttggttgctgggaaaatgggggaagagaagtaaaagagggaaagtttcaatctttttgctttttgatatttgcgatttgacgagaatgggtattttttatgttcgggtttgtgggcaagagtagtttctttgttcgttttgggatcttatttgggttcgataaagaattaccatacatggtatatcagtcttattccatattggaatatttttctgaccaagattattacttgagattaatttcaatgattgaggcggggttttaaagagtaatcacatgaactagtggtatttttggagccatgtatttaaagttcttctgatcatgatgcttttcttgcattttttgctactctatgtttcactcacaaagtgtacttctcttttctttctttttttacttgttcttctttacttttggtttcatttcaggttga

SEQ ID NO: 68619 - DNA, 973 bp, Prunus persica
  Intron number 1 from transcript ppa002945m (locus ppa00294 5m.g) derived from phytozome v7.0 (chr-ID scaffold_2; pos 20914042 to 20915014)
gaaggtgaaagttttgcttcttgctgtgaaattttcatctagtatccattgtcataactttcccatttcataaatatatcttcttttttaaagctcttctttgctctgtggctttgctttacgacagtgacgattttgattcaggatcaattcacttctttctggatgtatgtaattagacaatataaagttgggtcctttgggaattaagttgccaattgatagtttgaagttcaatcctagcagctagattattgaacataaaccgggtgattggttttttattttttattttattataaatttgtatctgaagttggtttcgattattgcttaatgagtagaattagaatattgataaaagaaaacaaaagtaggcattcaatggttattttaagttgtgaactgtgtttggctgacagtggcatgaggtgcggtctatatattctgctcagatgatacactatttcattctgctattagcttgatatgtgctttgttgttgtgcaattttcgatcaagtaattatcgcattgtatgccactacttcgataactgttagacatgatacatattaagtttatgacaattcatgtaaacttcaaagaagatgatggcaattcaaactctcctattccaaatgttagtgctcctatactgtgattcagaataccaaatattgtgcagttcatcatcttgataaagaactaattttaatgaaatttggagatgggtttcaaggctcaaagaaacctttaatgcgttatttgtctataatttatgtggtagtcatatgctagaccctaaatttgcatcaaaggattggagattgctgtcttatagtctgaaatgatgaatgacaaacagctatttacactcgcggggaaaaatgcaagagaaataacataataaactaccttgattaatattatgaccgtgaaaactgataaaattgtaaaacttctatgcagca

SEQ ID NO: 68620 - DNA, 952 bp, Prunus persica
  Intron number 1 from transcript ppa013366m (locus ppa01336 6m.g) derived from phytozome v7.0 (chr-ID scaffold_1; pos 33789404 to 33790355)
tctcagcatagaaaaactccaagagccctaccaaagtaaacatatctgctgctccaaaaatagcatactgcaagcccagccaaaacacgctcatcggcagaggctcaatactgtccaccatgttgtgttcaatggccacagattttctgcgagtctctatgagcgcagcaaccgccatggaaataactgagagcaccaacccaaccgcgatccgctgaaggtgtcgtatcccagttggaattccagtgaattttcgagcaattggcacaaaaactctgtcgtatattgggatgagaaagaacataaccagtaaagggattactgggattgatgggccgggaattttgaagccaaggatatgcgtgtccatggtattgctttgttggactgagaaggtctgaagctgtgccaagcacgtgttcatgaagacagtactgaatatgattgggagcatgcgaattaggagctttgtttcttcaacttgtgtgactgtgcacaggttccaggatccatgagctttagatgttgaagaaccatcagcagcagtggcaccaaagactgccgcccggtccaagaatctgcaaaattatatttactattaagcttatttgaagtaggactgtaggagggggctggatttcaaagtgtagttattttaatgtacctgaattgatctgttctctgaagaatttcattttgttcccctgcttctttgtcatggatctcatatagctcatctgcattctccggaattcgaagctttcggtttttggtagcagccacaagaacctgaacattcaaaaacaaaactacatatcaatattgaggaaccaataaatttatgagcatatataacagagcagagtgatgcagtgcaggggaccaattattgacacaaaacttgtggctacctgtaggatacttaggagggggctgcccttgggaacattgt

SEQ ID NO: 68621 - DNA, 577 bp, Prunus persica
  Intron number 1 from transcript ppa003413m (locus ppa00341 3m.g) derived from phytozome v7.0 (chr-ID scaffold_4; pos 2466546 to 2467122)
ccaggtttcgctccgacgtcgtctcttttaatcaggttttttttctctttcttaagaaggaaagttcgttaatttttgcttttggcgcgaagtggtttctgggttttgattgtggttggttttgtgactggttggtggggaatgaatttggggaatattttggtcacatttggtgaagtgggttttggatatggttactatttatggctgttttgattacggtgctgggaaattctggatgaaacttgctgaatttgtgacattctattaatagcggcagaaattgagctcttttcttgattgagtgatggtgaatggctcatgcctaaataatttcatttggcactaacacagaacacaaatttgaaacttcagtttctttttaattgttaaaaaaatatgactctgctactactaagctcgagctttgggcacaagtatttctccattgctcttttttgatccatctgagaattctagttcttcttactcattactgaagtggaacaattggcctatattggttataaggaggttctcttttcttcatactttgtctacattggttgtattccag

SEQ ID NO: 68622 - DNA, 704 bp, Prunus persica
  Intron number 1 from transcript ppa016497m (locus ppa01649 7m.g) derived from phytozome v7.0 (chr-ID scaffold_9; pos 1062172 to 1062875 reverse strand)
aacctattcttgatccacagatagaggtgagtttgtttcttgatttgtatgatcgacctggcgcaaaaatgcctttttacactattcgattcccggaagaatgggaaatgttagaggatacttacacaaaatcctttaccgagaggggcaatcttacttcccttttcatcatttaacatttaacattgaaatgtaggtgtcgtttttcgggggctgaatttggatttgtttgtcttctgtccttgtgtatggattggcatatgctttgaattgaggctaatgaaccacccaataatcaagtagcccatccagtcctctctttacatcaaacttaggattcaaaactcaaaaaagtgacaatggttacgaacgtacatggttctgtaatgcagagataggaatctcattggcatcttcgaattaccaattgaaatttgaaacaagcaacgattagcatcccgtggcatagcattgttcccacgcccataagatctgtagttcagtagataactctcttagtaatgggatttcatggattctgttctgcactgatacctaatttgaacaagttcatatatggactctctagcatttgaacaaactttagccttacattaataaagttgcacacttataacggatcttggtttccttttttggttattgcaggcaatatcattgcttggagctcaaattttagagct

SEQ ID NO: 68623 - DNA, 480 bp, Prunus persica
  Intron number 3 from transcript ppa025236m (locus ppa02523 6m.g) derived from phytozome v7.0 (chr-ID scaffold_6; pos 1645394 to 1645873)
gagaggtcggcacctagggctccgcttgaccaggggtatctatctaacgactgtttatataatttaactggtgattgaaatgagttccatttgtgttgttcttgtgctatgttggcttctcacatcgtgggcaaaagtcagcaatcctgaatatgaatcccagatgctttatatttgcttgtttgttttataatttgtacttttttcttctggctaaccactgaaggtattattcaattggagtgttctgttaatgagggttatgttgtgatttttgaatgtggtttagagttggttgattttctttcttggttttgtcgatgctagtttgtgtgatgatttattttaactggggagaagtctctttgcaccaaggagtttctggttttctgacttgattcttgtgcaaataatttatctattttttcaggcggcatactgatttatttttctgtgaaaacagcggtggtagaggtggat

SEQ ID NO: 68624 - DNA, 183 bp, Prunus persica
  Intron number 1 from transcript ppb019693m (locus ppb01969 3m.g) derived from phytozome v7.0 (chr-ID scaffold_6; pos 27501230 to 27501412 reverse strand)
cagtacgtgggaaatttcggtaagaagaagaagaggtactactagagttttgttttctaacgttgttttctgttttcgagtggaagagtttctttgtaattatattaggtttagggtttgaattgaacgttatttctgttattcgtttgactctttttaaaaatgtgtgatacagacagcagc

SEQ ID NO: 68625 - DNA, 859 bp, Prunus persica
  Intron number 2 from transcript ppb006863m (locus ppb00686 3m.g) derived from phytozome v7.0 (chr-ID scaffold_3; pos 7899861 to 7900719)
gagagattactttgtgaaaggtaaactcatcatccttttgctttgttatatgaatttggtaattgcgaagtgagttgagttctttaaacatttttccaaataatctagtgcttacagcttaaatttcaaatgccggttgttttacagtttttattttctttttgtttgttaggatatatgttttttatattttgaaattaaggtttaaataggaacaattattgtgaaaaagatttcgtcttctcgctcttctttccaagattcaagtgatattttgttatgaaaaatatataatctattccataccatcttcaaccatcatagttgtggcctgtgtaaagattgagatgctgttggagtttatacctatgtttctgaatgggtaggagcaaaagatttagatttgtagagtttttagggaaactatattggtcgacctaggtcatgaagcatggagcttctctcataatctgtgaagcaacgtcatgaagacaagaatgacacaaataggtcagcacgttgaaaagagttgagcagaagaaagtacgtacacatgatccaggacacaggaatttgataactgattatatttcgtacttattattgtttgtataggttcctatctttgatgcctgatattaatgttaaatcagaatacattctgtggcatttgatttatcgtatagcctctcttggatgcctgatgttaatgttctttacaaaatatgcttcccttcttataattttgttgtcatatacttaatacttgtctgttacttagtaaattaactttgctatcaactaatgctacagatggactttgcctttcacagttgtacccacggctcttggaacagca

SEQ ID NO: 68626 - DNA, 354 bp, Prunus persica
  Intron number 1 from transcript ppa015358m (locus ppa01535 8m.g) derived from phytozome v7.0 (chr-ID scaffold_3; pos 5716779 to 5717132)
gctctgttttcggtacttttttaaaaacttcgtttctcgttttgactttgatctggaagctgctttttgaaatggagaaaatctgcttttggaaaaagctcttttggttagaatgagtatctaggaaacaacatctacataaagttaaacctttcttgcatctcttgtcttatgctaaaattatgacccaaaatgtctttttccttcttctttttttgttgtcttttttaatttgtcaaaatcatggggtccattatcactcacccaagtttctatttaccttttatggattttaggaattttattatttgggttgtttgtagagttaatgggatttcagttctacagaaattc

SEQ ID NO: 68627 - DNA, 798 bp, Prunus persica
  Intron number 3 from transcript ppa015358m (locus ppa01535 8m.g) derived from phytozome v7.0 (chr-ID scaffold_3; pos 5717396 to 5718193)
gagatcaagtatgtgccacattttccttttgaaaatatcaaatttgttaatgaacttatctagtatataatatacttttttggattgctgcaattttacaagagtttatggatgacttctataccatttttaaccaaatttatggtattgataactccatttgttgaaatgttacaagaatcgtacgtgcgttcaaagttcaaactccgatggggcaaggaacacattgttccaactcattgttttattgtttctgattgctttctcttaggggcatatgtgtataacatatgtacctgattgaatgaaggctagatggaaacactgatattcagacaaatatgatataactaattaagaacacaaacatgatgatcaacttgtataccattccatttttagccttgtttttttgagaactttgatgaagatttgaaataaaataaccttaaaggggattgagatacacatagagatgctacacagtataattaattagaactcatgcttctatttgaatgatagtgaattaagcataccctagcattcatgttgcatttatgtttgatccacagttcatcccttttatattccatgtgtttattctctctctggatgaagcaagcaatagcaatgtctaatgtcgttatttttgtgtatgctgtccacattaattaacttgttattatgccatttagccaagtgatgttatttcgtgcttcaatttgcaatagcagtgttcttcttattatgctaatgtttgttttctggtacatgcagcttcagttcattaggcat

SEQ ID NO: 68628 - DNA, 618 bp, Prunus persica
  Intron number 2 from transcript ppa004402m (locus ppa00440 2m.g) derived from phytozome v7.0 (chr-ID scaffold_5; pos 6359681 to 6360298)
catcgcctttaatcgccgtggtacccttcttgctggtaaagtttctacctttctccatccccttcgtttttttttttttgaactttttttcgttagaatgtaagtgctttgggcaatgtggcaatgtgagtatttcaaaaaatctgattttctgtttgtattcttttagttttgtcttgctgtttgtgggttcctttttgcttaagaaatggcttagtcataaataagaagaaggctgtaactttggttgcacattgggtggagaaacaccattgtcagtttatacgccactcacttcttcttcttcgtccacaatttgtacttttgaaatgaatataaggagttgaatccacaatttgtgacaaagtagaattgctagctatccaatttaaggatcaagcagatgcattatggaaccagaatttttttaggtgttgatgctttttagtgtcaaatttttccggcagtaatttcaggaaatcttcaaattaaatttattctttgcattcattacattcctcttggcatttggtgcactcaaatctttacgggagatattccaaatattctgctgtgctgatgcttcattttgatattcttgatcagctgggtgctctg

SEQ ID NO: 68629 - DNA, 658 bp, Prunus persica
  Intron number 1 from transcript ppa010223m (locus ppa01022 3m.g) derived from phytozome v7.0 (chr-ID scaffold_5; pos 13534953 to 13535610)
ccaaggccactgaagatcttgaccacccgaaagtatactgcaaaccctgattctatcgtgctccttttatgcatgcttgaatcttatgctgcactgcaactgtttttgacttgtatgtttgtggcttcgatgatttctgttgttggcgtgaaatgtagaatttcatacaatctcttgggattggaatacgatttcatttgtaaaatcctggtgtttgttcatgtgaatttaaactgatgaagcttattagatgatggaatttttttttcacatttgatgcattatgttaaacgagaaaaattatgcggctctgttctatctctctcactcatatcttcatccaattaaactgatttaagtgttggtttttggtttttttatccccaactcttatcttgtttgtttaagaagcttgcttttagcctttattgttgggaagatccataaatgtaaggctgacttcaatatttctgaaaacacttgtgggatgggattgttggtgtatcaattattcaacgtaattgtgttgtaaccccaattaaatttgtgacatacttagaattttagctactttttgtttggttttgtttgtttcaattgtctcattttctttcgttttgcaggctcccaaaagaggtgtaaaaccagctgctgcagc

SEQ ID NO: 68630 - DNA, 631 bp, Prunus persica
  Intron number 3 from transcript ppa010223m (locus ppa01022 3m.g) derived from phytozome v7.0 (chr-ID scaffold_5; pos 13535918 to 13536548)
taaccagttcaccaagactctggacaagaaccttggtatggactagactatcatgctagtttctgcttgagtaatttcaattgttaggattgttttgaatggatttgtttgaacaaggctatccaaatacttatattctatttttttggtcagaatacttagattcttaacatctttagaaaatgttttgttggataggtgaacataagttaatttcctagtgcttactattccactgcaaaaggaaaatattatcttaatgcacacagttttctacctctatgccactgtcacacttattccgcattccttctcatagataggcatataatgctattgatagtttaagcaaggatttgtaggtctaaacttactgatgtgagttgttaatgactattaccgtcatgttctgtcatgggatctttatcatgtttttagtataagaaacatacatggtggagctatcttttgattgtgttcgttgaagtatttaaatgatttttatgcttgtgttcttcaaacaattatcgttctagataaactcttataagtcatcaccacaaaacacttctcaatatttgtaacactgcctgcagctacaagtctcttcaagttgctgctcaagtacagg

SEQ ID NO: 68631 - DNA, 625 bp, Prunus persica
  Intron number 1 from transcript ppa008224m (locus ppa00822 4m.g) derived from phytozome v7.0 (chr-ID scaffold_1; pos 21961118 to 21961742)
taccacagtgatttcaggccctttgccaatatcaggtaattcataattcaatttactctttagcaaaagatgaaaaaaaaaaaaaaaaaaaagatgtgatctttgggtggaaatttcaaaatatggttacaagttggctgcatttcatttgggtttttgtggaatgtctttcgtgtttgaaattttttattttttggttgaaaaataagatttttggggagtgagtgatgagtgatggtacggagttggtgatagaatttcaaatggggacgttagctgagtctttttcttcagttgttttcttattgaaggatgctttttggggatttggtgaagcaggcccttggtggtgtcttgtgtgctcaaaagttgtatataatgtgtgggggggtgggggtcggggtgggggtgggggtggggtgaaaaatcaaagagactgtctttctacgaatttggggtcttggattggtttagtgctcttggggcttgggttttagggggcaaattgacagtgagggaaacaaatatgcgtatttgtctctgttggagactgttgctgatctttcaaatgtctttttgttgtgttatgattaacagagaagcagtacaaaccaatacctcaagg

SEQ ID NO: 68632 - DNA, 216 bp, Prunus persica
  Intron number 3 from transcript ppa027228m (locus ppa02722 8m.g) derived from phytozome v7.0 (chr-ID scaffold_8; pos 8496804 to 8497019)
atcttggtcctctgctacataagtaatttctccttcttcttttgttgtactcttcttattttcgttagagtttgcttcgtagactagccttggaagagcattttcttttagatttagttgcagaaatgtttgatttgtttcgttttcatattttttttaaaacttttgttcatctttattattcttctatctattattcaagctggggttattcca

SEQ ID NO: 68633 - DNA, 1010 bp, Prunus persica
  Intron number 1 from transcript ppa011063m (locus ppa01106 3m.g) derived from phytozome v7.0 (chr-ID scaffold_6; pos 18701711 to 18702720)
tccactggaaagctctttgaatacgccagctccaggtctctctatctcacaaactcaagccctctatttttattttattatatatatatatatatattttatcatccgtaaaaatagataggcttaaaatttgaggatacggttttgtttattttttggggggtgaaaaatgaggaggaggaagaaccacgtcaatggaagtagctgctccggtagtcaagctatattataataatattaagagggtgtatatatacatatatatatatatgtatatatatgtatgtgtgtatataaatgtatatataatagggtgaagggtctgcaacttggatgtggatgttgttttctgggatgaatataatcatataatatacataacaacaaacaagggataagacactgttcttattggggtctaatcagttgctgttcgtattggctaccgcccatttttgaccatggttgggtttgtgacgcaaaaatgaacaccgaatacaagtttgaccaaccatgactaaacaatttactacttagaaagaaatcaaaacagccaaaattaagaaattgcaccttaaggagttgataaattacagccatctatttttctttttcaagtttccctctattgggttttgtaacaatgcttcaaatttgtttgagaaaattttgtttctgttaaaaacacggtcatagtgttgttaattcacgtgttataacataaataaacgacaggtaaatattttaaaataaatttgtcatatcatgctatagcgtcacgatgacaacaaaaattgctcatatactatatatgtaagattctagaggggaaaaacattttaagtttaaaagtgtaacaagttgcagcagcatcttcgaaatgctaaaccaaaaagttgcactaaaatgtgaataacatcgctttatgtcttttccatttttactgctatttgctttgaagctttctagttaaccagctagtgaagtgtattatttttcttttctgaagc

SEQ ID NO: 68634 - DNA, 847 bp, Prunus persica
  Intron number 1 from transcript ppa004666m (locus ppa00466 6m.g) derived from phytozome v7.0 (chr-ID scaffold_1; pos 29120287 to 29121133 reverse strand)
cccttcatctttggtgagctaatcactagccagcggtttcttcttcttcttcttcttcttcttaatttaattattttttgtttgtttgttttggggttttaattagttgattaatatactaatggagattgtactgttgttcatgacttggtggttgtagctaatgagatttgtgagaagttggctgtggtgggtttcaatgctaatatgattagctacttgacaacacaacttcatatgccattaaccaaagcagccaacaccctcaccaacgttggtggcactgcgagcttgacccccttgcttggtgctttcctttctgatgcctacgctggccgcttctggactatagctattgcttccattatttaccagattgtaatcctcaaccctctctctctctctctctctctctctcttgtagacgcataacataaacatgaagattattaagagtatagaacatgtgaatgaaacaccaaaaggaatagtattgacttcttatcaatcatatcatagtgagttatatggctcattattttcaagatcaactacagaaaaaagaacatagaatttgtggccttttaaatgatttttcataaagggtttccaaaagaaaaacagagaaagtagaatttgacacaagggaacaagtttagttaagattattaaaagtgcatgtccaatatgattgagctcaagtgagtgacatacattcatcagtgttgtcacaatcaagcttgcaaagaatggatacaccagtccatttcctttgttattaatattattattaatcaaagactaattcttattaacatttgtattttcctacttaattaaacagggc

SEQ ID NO: 68635 - DNA, 767 bp, Prunus persica
  Intron number 1 from transcript ppa005537m (locus ppa00553 7m.g) derived from phytozome v7.0 (chr-ID scaffold_8; pos 17938611 to 17939377 reverse strand)
agagaccctgtgattgtttctacaggcgaggttggttttctttgccacttgggcttttacattttgctccgttttttctggtttttaatgtcaaattcgaagcttttagtcctgtgttggtgctttcagtttctgcaatctcccttcatcttctgttttgttgggctgagaaaatgtcggcaaggaaaagatcttagattctttatgcatttgaagtttttattttgttttcctttcactttctcagcaaccaaacggagctctgaggatttaatttgtgtggtacgtaaaaggaaggtgatttattgtcttcttccttggttacagttttttactgtttctagtattttttaaattttctggtggttggttggagttacagtgtggatttaaggtgctgtcctgtttgtactgattctggaacttgaatttaaagcactaattgtttgattggctaaagtttttgagattttttttccctcactatttatggtggtaaaattgaacatgtctgagtgtagtttcctttcagatataaatatttccagttttctgaggattttttagattaaattctggtgagtacaggtcctttgtgtgtatttgcttctctgtaaattcttcaaatcagtttaatcatggcagaagaatttacagagaagcaatatgttccaaatcacatgatctggtctcctccatgatctttaatttggcaactgtgttctaaatccgcttcatttttttttcttccttttattgacagacat

SEQ ID NO: 68636 - DNA, 1004 bp, Prunus persica
  Intron number 3 from transcript ppa023105m (locus ppa02310 5m.g) derived from phytozome v7.0 (chr-ID scaffold_8; pos 3960782 to 3961785 reverse strand)
caaaagttgagaagatatgtgaaaggcaaacaatcttttagcccttatgtttatttttttctcttcactttcttactttactggttttaaattttaaatttttatttttattgtgttgagcttttgattggtacagggaaagggttcttatagtttattgcctcatgccagtatagggattttacctttgggattatacatttgaagagtaacttcgtagctacagttaggaccatagtttgtgtccatttgtcaatcgggtgaaaatattggaccaaaaacttggttgcaaaagaagacagaatataaaggcgatgactgcttaaccatgtttactttggtagccatgtgaaatgagtttgctttacttcttttactcctcgaaactctgagattgctcatactccttcttgccagtcctagtcgttattgatgccaatttacctcaaagtgtggttttagaaattttcattgtgaggtagattcttatgtttatcttaccaagtaaaggacattatatttgttttacggtgcttagatgtcaaaaagatcactagaaatgtacttattttgtatagatagaacctattaaaaaaaattatcggtttggtcacttaagatttttgaatgcttagttggacacttagttacatgaagacttggtgtgaaggaaggttcaagaccttcatcatatatggtagatttttgatgttcaatatatgcaagaaacaacctcttcaatttcgatattatggaactcaaatttaaccctaatcttattgtggtgaatgatgtcagaagtgtgtttctggaagtagctgcagtagccttattttaattatctgtttaaatttagtttcattaactaacgtgctgagaaaaaaaaaaaagtctttcatttagagaggggtgtattttgcactcatagacaaacatcatattctttaccatgtttataaaaatgaccagtggacttctgttgcattttcagtaggttacgagat

SEQ ID NO: 68637 - DNA, 839 bp, Prunus persica
  Intron number 1 from transcript ppa015535m (locus ppa01553 5m.g) derived from phytozome v7.0 (chr-ID scaffold_2; pos 1970404 to 1971242)
ggctccgttgccggtgctctgttccgacatttgaggtgacatgcaagacgtcactctttcgtttttcttaatatatatctgtgtatatgcgtttatatatctatatctgtgtatatcaattagatgttgattagctagtttggaaatgttgaatgttaggggagaaataaactttgacatgttagactctcctcacttagacacttagacagccatcctgatttacattccggcaagaaacattaccgtatatttatatatggaattagacatttggtcttgataaaacaacatggattagagttcctcatttacattcgggcaagaaacgttaccatatatttataaatggaattagatttgtatacttaagaaaacaacatggattaatgaaagttcctcaccagtgaggtgtcagtatcacattggcgtgagttggttaaacaacttaagttatcgttgatggtaatcattggtttacaccccagaaataggatgtcccttgccattcacccgtttctaatattaatatgccggtacagagcactggttggcatgtgtacaattttggttttgattggccggcttaagagagatgttatgaatcctagttattcttgtctgttgcagtatctccttgacacaatttcacttgccttaactaagaaaatggttgttgcagttttctttttattatttatatgttttactgcagtcggtttattcagattcagtgaagggtcctttacccaacaattgaaaacctctgtatcgttcttgtcaccctaacaagttcaacaacatcactttgcagttctgattgggcagagagaagcgca

SEQ ID NO: 68638 - DNA, 605 bp, Prunus persica
  Intron number 1 from transcript ppa001299m (locus ppa00129 9m.g) derived from phytozome v7.0 (chr-ID scaffold_5; pos 3393458 to 3394062 reverse strand)
tttacagaagatagctccggaagcttcaaaatgtatgctatttgaactgattgactgtgtatgttttcttttcttactattgtcctcaaacatttgaattgattgactgtgtattacatttgtgattttgatacgtgtttggtggctggtatagacatgcacatgagtttgtgcagctcaccacctgtgtatgaacattttgacatccttaaaccaaatgcaagtgtttgttttctgttaatgatgcaaaagagaaagatgttattatggacctactgagacccatctaatgctagccgactaaagatttagtgttcttttttagtgctttttggattgatacaactgatttatttatcctagaaaagtagtcccgtctgtagtcagttcatgtaatattgactttgtgcaaaaaaccctaaaccagtcattatatgcaaaagttttctttgccatcgccatatgttattgaataatgttactaatctctttcctgtttcatgtaatacagtatcttttggagaaatatcgtgattatttttttctcaatgagcggaatatgaccaacttttccctttctaacctgcaatgtaatgttcaggtat

SEQ ID NO: 68639 - DNA, 563 bp, Prunus persica
  Intron number 3 from transcript ppa011456m (locus ppa01145 6m.g) derived from phytozome v7.0 (chr-ID scaffold_1; pos 27898879 to 27899441 reverse strand)
acccattatcccacttctctcaaagcaaattccaagtgcatcttccacaagctcagctgatgcttctataacagaagttaccccaatttcaaaaaaaagatacagagacgctgtcaaaagagctctgtttacctttcgtccatcaaaaaaaccaaaaaggttagaatttatataatcattaactcctttatatcaatatttacacatattctaacatttaccaatatatttctttcttttccatttagcatttctttaagtcatgttcaaactgaaaacgaatctgaaaaaatggttgcaacaaaaagtatggaggaaattgtatcagattctgatttaccaatcattggcttaaagaaaaaatcaagcatggagaatttgccaaccagtacttctaccccaaaaatagagtttgtattctctaattcactcatctcatttaaatacatattacatgcataatattcaattattcataccttctgtcatattctgattgatgctttgttttaatatattataagattctctctacttattatataggtctaaaaaccatttaa

SEQ ID NO: 68640 - DNA, 990 bp, Prunus persica
  Intron number 1 from transcript ppa010895m (locus ppa01089 5m.g) derived from phytozome v7.0 (chr-ID scaffold_4; pos 6586926 to 6587915)
gatgtaacaagattaatatatttctacaataaaattcttcttttgcataagaaagctgttattcacatttcaaaattcttgcaccggatcattactcattcaataaacatatatcctttcaaaattgacttagcattgacataacactagaaaagacactatacaacgtacaaccgaattaatatccatatttggagtattaggtacaaaccaaattaatatcgatctttggaatattaggtactatcgttgtaacatggttgtaacaagattaacatgtttataaaataaaattcttcttttgcataaggaaactgttattaacattccaaaattcctacaccggatcattacttattcaatcaacatgttatatatccctcgatcaaaataagcaaaaacgaaagtttgaaattttttaaaatttatttatttgtatcttctaactctttgaaaaatttcttgaagtccggccattgggtctctaggcaatataatttcttctcaaacatttttttaaaagataccgcagttgaagcacaaaggagaatttggtgtccttctgggatgactttctcagaatttcaataacagttacagttccattctacaattttgagggatcaaatttttatctttctatttgtttatttattggaaaaccactcattcaattcaatgaaataaaaaaacaaaagcccaaataaggaaagccgaaacggcccacaaaaagcatcaagtttgatccaaacccaaggagaactaaacatggccttttgtcctttttgtgcagcagcaccatcttattggatacttggtctagagaaattttttgtgtagaaaattttgtttctttgattttggggaaacctttttaagattggttttgaatgagagaatgaaagtgtaagaatctagatagtaaactagagagaattgagagagaatgaagcagcaatccaaggacccattcgaagcggcgtttgagga

SEQ ID NO: 68641 - DNA, 756 bp, Prunus persica
  Intron number 1 from transcript ppa009816m (locus ppa00981 6m.g) derived from phytozome v7.0 (chr-ID scaffold_5; pos 2026931 to 2027686 reverse strand)
gctaaacgttgaggttgaaattcaaggcgtccaaggtgcttatcctaagccctctctctctctctctctctctctctctctctctctctctctctctctcgtttattttttttttgggcgtgatatcaattttcttagctttaatttgaaacctaatcactgaggattctgataaatcagaaaaaaagtatttaagtggaataattgttcatgaagaatgttgactaatgggaaagtatattggcattatttgaagttgggtaaaattcaatcattttttttttttaatgctggaggacatttgagtgcaaaatgttaagtttgttcatataattgttagtgtagccgctgttttctgaaaatattgatggattaattccagaggaatctaggagagtatgaaattcagtcattttattgctgctaggtacctcgtgcaccaggctgccctttatttatagttgtattaggttcaactcatgcttcaagtttcttactattggcattcgtttcgtcgagtctaatttgtatcttaggcttttaatgcatttgacttttatgttttggtaatcaatggagatagtattttctgatttaaaatcagtaagaaagatatgagtattctgatagaatccgccatgaatgagttacagaagctctttcacttttttctttcatattcagagcacagtgtgatttatgcatatgtctcgtttcccagaccaaatcaagatattgcttgaccaacaggagagg

SEQ ID NO: 68642 - DNA, 751 bp, Prunus persica
  Intron number 3 from transcript ppa009763m (locus ppa00976 3m.g) derived from phytozome v7.0 (chr-ID scaffold_1; pos 40215948 to 40216698)
attggctttgctgtgagacaatcttcttcttcttgctgtctttgttctgtttctagtcttctttgtcatttataaataattttctattttttcataattttattgctaatataaagttgagacaacttctgcacaattttttttgaaggccggtttaggttcaaaatctccgactcactggtttgagatgtcttgttcaatctttaattttaaatgagttaaaatttcaaaattgggtgagctgtgggctctaaaaatacctaaatgttgtttttggaatgtggattgtgggctgtacttaaataaatttactttcaaaaattgcatatttctgctcagaatttatcacatacacataaaacactaattacattattatgaaaaaaaagagtagtacatatatacacgggagtcgggacaacctaaaattcattgaatgaaaaaagaaaaaaaaaataaattgttcaacgttctttgagtgaaacatattcacaacaatttgcctggcaggggcataattggcatgaatggccgaaagcttaagataaggtccaaaaaaaaactaaaagtgatttcacatcatacataagctttttaaataacatacacatacaaaataatgggctagtcatgtgtgataagaattagaagaagcttgaaatgttaccttctttttttcatcttttgttatgagcctttatttgcaaacattgcaggcatcattgttgggagaagcaattacagggaaagg

SEQ ID NO: 68643 - DNA, 618 bp, Prunus persica
  Intron number 2 from transcript ppa018194m (locus ppa01819 4m.g) derived from phytozome v7.0 (chr-ID scaffold_4; pos 2360446 to 2361063)
aacaaaaaggtacttcatttggattagaaaaataataacactttgtacttagtattatccaatgctattcatgttatgaaaatatttttgagtgtgatttacaacatctatatttgttataccaagggtcaaaccaaaaattcgtttttcttttattgttgcataataccatagggtttgaattagaaatcctcagctgccagttccagtccatgtatctgcttcctcaattttcttttagcttcacacactattgcattttcatgaggttttagtactcttgttcacacttcattagattactgaattggcactctattcagttgtcatctgtttatatgactgcttgcttctgcttctattaatattaataagatcatctttacttagaataaaatagttaggcgaatttaaagaaaaggagacacagacattgattatgacctttatatatgtaaaacatttagtaaagatacaacttagtggaaggtgataccaaaaagcacaaatagttctgcctgttaactgacaagaaataggttgagaatttttcatgaacattacttttgttaccaactgctaggcttcacatttgaagaagttggttctctccactca

SEQ ID NO: 68644 - DNA, 781 bp, Prunus persica
  Intron number 1 from transcript ppa017504m (locus ppa01750 4m.g) derived from phytozome v7.0 (chr-ID scaffold_1; pos 16183948 to 16184728)
ggtgtattcaattaggattataaaaaagttgaaccaaatctaggtgtattcgaaaggtcatatatttggaaggatttcattaagtgataaattttcataggttttaaggggagagttataaataacaaagaccaaaataaatccaacctccctcccaagtatttcatcagacgtttttctcttgccctagcttttctctctgcgaagacaaacagcttccttcctccacttgtgaaggtatgctccttattttttctttgaccaataccttgttgggttttctttttccatgattttttcttcatcgtgtttttcttgttattaggttttgttactagggtttatgcttgttactacttatttttcttctgaaatatctatatacgactagatagaaaattgaaataattgacaacctttttataatcgaacaaaaaaactgagacaaatatagatgaacattaaaaaaatgaaaatccaaaaatttaaacttttaaatgctgttttggaagcctaaacgacctcaaaagcccaaaatctaccatatgtcatagcaaagcaatgcgtttgactcgtggtatcgttcccttttcagaaaggtattatacaccccaatcggagttcagacgtcaaatctgtaaattcctactacgtcctttttccattcaacataagatgtgtcatgtttaatctatggttgatgatgtacattttttgtatattttttatgctctattttgtgatttacatgataaaattcatagatgcactcaaatagaat

SEQ ID NO: 68645 - DNA, 934 bp, Prunus persica
  Intron number 2 from transcript ppb021332m (locus ppb02133 2m.g) derived from phytozome v7.0 (chr-ID scaffold_8; pos 12978461 to 12979394 reverse strand)
aggaaactgtagcccacgcttctttggctggtaagcacgttggtgcaaaatgtagacgaggtatacaagtgttttgcacttgtgttcgaatcctcctcctcttcttgatatgaattgtataaagaaaataatcgaatactatttggaagtaattcaactcaacccacctgacaacatatgacagacttgtcatttggcttgtacaaatcttttgtaaacttaatacaattttatgagtcttatacggttacaaactttcttgaagtatcatataattaattttaaaaacaattaaaattgtttggtaattcaaattttgtaaagaaaacaaaattccgaggaacaatttaaaataaatcttggtatatatagttaataaattagaagtgcatccatgactatgagtgtattttttattattataatcataacatttatttttattcaaaattatattacgatcatgaaacaatattaccttctattttgatatgtgattaatgatataatcatgctataatcactgctttgatcaactgacctaactatgtatgctgctaataatgtttttattttaaaaaaaaagtgcacacatccttggttggacctactcacaatacaagtcaacaatcaaaacaatatgtagtcattttcatccttaaaatgtgaaaaacgaacaaaaaaacaacgtatagtttgttggattgaccaaaacgaaaataggaatcatggatcaaattgctaaacaatttatgatttatgataccttttacatccttagaagaaaacccaaaaataaacccttatgatcattagattatatctctctctctcttttatctttcttaaataaggacatccttaaaccgtagccatacattttttgagagtgaaaggtgtgatttgtctctcttccttttacaggagcgacaag

SEQ ID NO: 68646 - DNA, 817 bp, Prunus persica
  Intron number 2 from transcript ppa017090m (locus ppa01709 0m.g) derived from phytozome v7.0 (chr-ID scaffold_8; pos 3388821 to 3389637)
acctcagaagcaagtcaggtttctcacactgtctggttagtttaagtacttacgtgcctacttgttcatgtggttaatatagtaattgtatggaaatgtgagttaagcgagttgacgaatgcagtgtgctcggccccttgcaacccaagtttgctttgttgaaaaaaaagtaattgtatattaattttcttgaaatcatataaatatatgtaagaaaatgtattaaaatggcaccaagaggttgcaacccagatatatacaatacaacttacaagaggagttctaaaaggtagtttcacttgaaaaatatattataaatgtatatatgttaatcttgcacaagattatttgggccacttgcaaacatggttctacctgaaacctgtgttgattgatagtatggtttacccatgattcatatacctcattttgcttatggactatcatacgtatgtggattttacaatgttttggaagttgaaacggcggtagataaaatcatatgtttgcatcttataagccaaaagtacatttggaataattgacagttaactgcttgaataagcacaatatgatagacatacttctaacaacaccggatgatatgttaccactcagttaaaacttggctcaaagaaccttgaaggatggttgtacaaatgaattatgagttgtattaatattttatgaaaattgaaaattgtttctatgtgcaccaggaaccagtaatgcctagtgttcttcacttcaaaatccaatttaagacccttgattttgtgcaggtgagaagaagttgttaactccgcaaccccgttta

SEQ ID NO: 68647 - DNA, 188 bp, Prunus persica
  Intron number 1 from transcript ppa014268m (locus ppa01426 8m.g) derived from phytozome v7.0 (chr-ID scaffold_6; pos 5286600 to 5286787 reverse strand)
tgtggctcaaactgctcctgcggcagtagctgcaagtaactcttctattcctctaaccatacatgttatcattctctagaacatttaggaattatttgatttgttttttcgttttgcctaattttcttttctcatatgtatatatatgtgtagttgtgcctaccctgacttgagttactcagagacca

SEQ ID NO: 68648 - DNA, 965 bp, Prunus persica
  Intron number 2 from transcript ppa004805m (locus ppa00480 5m.g) derived from phytozome v7.0 (chr-ID scaffold_5; pos 17510334 to 17511298)
tttccttttcatccgtcaccggtttcagcttgctagtaagtttgctctcctctctcattaataaggactatttgaattaatttagacttatgtaatacaatatacatattggttttggagttccaaacttcggttggattccttatattatattatgttgcaccactttcgcctttatggcacatctacttgcttagttagtagatgctatcacacgtgcaatcatacttaattcgatggaattgtttgatcttaaatgggatcttctataatttcgaacgtgaggggttatttcttggtttcgtcccgtcattaataacttgattatttttagataatagtagatagaattttctaaattcagtcacattctgtggactttgcttgcctatctttccaaattttccaagaaatctcaaaattatcccgttccatttgtgttaaacatacagcttttggatgccctctaagaatctctgaaatgaagaatcactttatattaattacagaagttgattcatttgtgggaaacataactaaatttgttggcataacatgtatataataccccaaaccattatattagcagagaagacatgttgatattttgaactttgcttcttgtgtggaaatattgaacactaaatatcagtccatcatgaaacaccttttggatcttgacggctatgctctttttggatcttcatggataaatattggacacatttacttggtatttttatgtacattttagttaatacctttggatatgttattccatttatttgtctctacaatttctggtctgactttgtcctcttaatgcttgcttcaatttattttgccaaaacgaagatgatgagtctgatttcatataataacataactcttccaagttgcaacctggcgaaccgtttctaagtttctagtaatcattctgattttgattttttcaactcaaacag

SEQ ID NO: 68649 - DNA, 399 bp, Prunus persica
  Intron number 1 from transcript ppa003351m (locus ppa00335 1m.g) derived from phytozome v7.0 (chr-ID scaffold_4; pos 12847295 to 12847693)
ggtcgatttgaaggtaatcaagaaaaaatgtaatggggattgtgactgaacagaattacatgttttttcaaatatttgtgggcaatatttgtacatcttttgttttttttttggctgggattatcggatgtgaagaatgtggaaaatattatagtatcatcttgatctacttttaatttgtgccatgttaacctcactcttacttctcatggattttgagtttcatttgactataattattattatttttttatttttataaaactcaatatcttcttccttttggctaattttcagatagatagcaatccagaaaatgatttagatcatagtgacttgcctcaacccactgcatcccctcaaggcttttcaacaagagtgcaactcacagatttgggg

SEQ ID NO: 68650 - DNA, 942 bp, Prunus persica
  Intron number 1 from transcript ppa011495m (locus ppa01149 5m.g) derived from phytozome v7.0 (chr-ID scaffold_4; pos 14810367 to 14811308 reverse strand)
ggctccgtttttggctacggtcctctctctttccctctccttctctctgtgtatatgtaaatatatgtgtacatgcctatgtgtgtgatgctttaattgcttaattgtggtgtttctatatgggaatttgaatggtgctcatatgggattttgaatctttgacaaaatatgattttcttcaatagtgttttggtgtttgcgaaaaggagtgagttttctctttctgactaacgagctgttggagttttttggtgaggtatgctagtgttttgagatgtgaaattgtggtttttagggaaaatttgtgttatgttagttgatttattgtattagggagtgtaatttgtatcatttcctgctggaattgataagatggtagaacaataaattggggttaagatgattgtctgtggttgttaaggtttactcaggagtcattccaccatgtttggataatgccagtcatttctttgtgccatgttcacataatgagggcggtaggacaagccaagccactcaaacttggcttgagtttggctcgatttattcagcaatcactctgccatgtttagataatgccagtcatttatatgtgccatgttccacataatgagggcattagaacaaacgaagccactcaaacttggtttgggtttaggtcaatattgtgtttctcgatttggcctgaaattttatacttgttaaaaaagctagagatttgagactggcttgttatcaagtttagcaatggattattagatgagcaaaccctgcttaagcaatctactactcaactcaacctaatttatcttcttttttattttattttattttattttatttatgtttatgttgcatatgaatcaaactgagattttttgttttaccttgtgtgaatgtgtttcaggtgcggggttggttaagaaaaaaggctttaaagga

SEQ ID NO: 68651 - DNA, 908 bp, Prunus persica
  Intron number 1 from transcript ppa011825m (locus ppa01182 5m.g) derived from phytozome v7.0 (chr-ID scaffold_2; pos 26272208 to 26273115)
cgatcgagatccgtaactttttgggtgaaaagaaggtacccttttgctagattttagctggctttgctttgttttgcgttttttgtatctgagtcatttgtgatcaatgtttcttgtgcattttggtgtttttgtttgtttgatagtttcttacaactgttttttgatttgtgaagtatgcctttttgatttagaaatgagatttattgatccttttgtgctgatgttttggaatttcttaaactttccgtttgaatttagtgaaagcatgcttgtagtctatggttatctggttagcccgacttcatggctgtgcttaggcattaggtgacattagatattttagaccttactgacatatgctgtttaccgttgtcagttgtgtacttgttttcgatttcaatggaagagaaacagatttcattagcatgtggactattattgttgaagaaatattttcaaatagaatagtcatttgtcctccttataatcactttgttttctgtgtttatcatatgagtcccatatgcactaatttttatgttcaagaaagatgataccattttttttatctggaatctgtgcggcttttgaccccataaaatgcaattaggtattggaaatgatttcatgcaaatatatgggcatgtgaaaaagacctgtgttcaagctcttgcttgagctcagaaacctgaatggcatggttatgatgataaattagaatgttgtgctgtttgcagttatgaattactaacgaataagtcattggttaggttaaaatgttttgtcctgtgagccaataactgattttgatatggcacaattttgtttaatctaactaacaaagatttatagtgtgtgggtcttgatgaactatgtgtttgctcaatcaggtgagaaaggtggat

SEQ ID NO: 68652 - DNA, 605 bp, Prunus persica
  Intron number 1 from transcript ppa025328m (locus ppa02532 8m.g) derived from phytozome v7.0 (chr-ID scaffold_1; pos 43737862 to 43738466)
gaactgtgtacgaaggctttactgagtaagcgatagtttcctgcatccctttacacaaaatatttttactccaagtaaaacttgtgcgagtgttgctcagtttttatttatttttaattttaatttttttaaaattcttatgcctgtgttattagtgattagcattatgttaaatttgtctgaatatacctcagtctgaacaagactttgaatgttgaaaagaaaaaggggaaagaaaagaaataactatactttggtaggggactaggaatctgttgaagagtttaatgaatagaaacgtggggcgttatcactataaccttttccttttttctctttttttttttctcccttcctctttttggtgctagggagataatgactaccactttcctgaaaaatgggacaaccattcatggctatatgctaattctatagtttctcacattactgctcatccgtttatgcatttgttgtttcttaatcattcatgcatgtccctgaaaatattgttccataaaattaacatgttggtcttatataactttttaagttctcactctctctgtttctctcacgcttcatttatatattatcttgcagtg

SEQ ID NO: 68653 - DNA, 826 bp, Prunus persica
  Intron number 2 from transcript ppa002078m (locus ppa00207 8m.g) derived from phytozome v7.0 (chr-ID scaffold_1; pos 43554402 to 43555227 reverse strand)
caagagataattctgatattcatccttccctcaaggtgcgtagtacttagtgcaagtgaaactcatatctcatgatatatttgtgcactaaataagaattggtttacccataaggtggtttcttgaatatctcatatgagatgtggattttcctatattgctgcaaactttgagacacttttcagtctgtagagggtgaacgggatgatttgtgttctttgttagtgggttcttgctcagaagagttgcttatgattctctaaccttttcaaaaaattacaatttttgttatgaaatagtgtggtcttgactaatattatctatgtgcattgtacttgctttcctttgtttttattttttgcccccttgtttcaactttttagcaaatctgtaggcaacactcttgcagtctaagcagtccatgaacatatttcttcctgtaagcaaaattcgtggattgtactatagttatgtgtaaactggatttttctgtgtgtagagtatttcctgatagttatctattgagtaccatgttggccaaatctttggtctttggttgtaagaaatgtgctaatagtaaacatctgtgtatttgtttttattttttgtatctgtcttgaacctaaaacctgatgttgtccttagtgcttctgaactttttcagttcagtgattttgagttgagccaaaaaagtttctttttctcttcagtaaaatttcagttctaagattagtatctagcttaacttgtaatttggttcttctttctggccaatgttggtgcatccataggaacctgcgttccaaagactgatatttataacaat

SEQ ID NO: 68654 - DNA, 848 bp, Prunus persica
  Intron number 1 from transcript ppa004404m (locus ppa00440 4m.g) derived from phytozome v7.0 (chr-ID scaffold_1; pos 42614485 to 42615332)
ggttgagtccattttcaagcactgcaccaatcctggtacgtatttaattaattaatttcctcatttcataaattaaaaaataaataaattatcagtatatgttttatttatttttttggtttgatttttccttatcagtatatgttttttttataaaaaaaagttagtcaactaggtaggaggaggtggtgtaaaaaaaagaaaaaagaaaaagaaaagtcaacgataaggtcttattttgattattgaagcctattttgtccactttggttttgtcttgctgtaagttatgtgtatatatgtgctttgtcacgtctgtcctttcgtgagcttgaacaatatgccaaatgctatttggatataaatcttgagtgaaataaatactgccgattcgatattctattttaatctaatctaaattagaagatggaggatttgaattcgagtgcagaatagagaacaattcgctctagctaatttggctaaactcatgtctaaaaatgtcatttggattaaataatcaattatttttttaactataaattgtgctgcaatttatttatttatttataataaaagggtttctcccgcaatttttttttttaaaaaaaaaacagtataaaggcactgtataactttgatttatagaaaaaatttacatagttaattttgattaaagaaaattatagtacttagtgtgacagtaatatatatgcatagaaatattcatcacaatttggtgaaattttttttagtgaagaagtatttgggggcagtacttaatgttacgtcttaaatgatatgattgtaatttgttattgactttaattaccatattgcagaaaata

SEQ ID NO: 68655 - DNA, 1036 bp, Prunus persica
  Intron number 2 from transcript ppa010036m (locus ppa01003 6m.g) derived from phytozome v7.0 (chr-ID scaffold_1; pos 1116057 to 1117092 reverse strand)
cggaggtcttgctgctgctagtgttgcctggacaggtctctcatttgacatttctcttcttctgatttcttgtgtttttttttttttttaaaatttaaaatttaatcttccaattatgagtttctatatgttttaaatattgggaggtcagagttttgcaatgccattgatttctccaaagcttgtaattgtatgatataatagtagtggtacaggtgaacgactttttgttatgaaccaatttgacttgcattttgaattcaaattcaggacaacccacttgtgatttggtcatttttagttaacaatttggattggttttggatagagaaacatgggttcactagtagttcgacttctcattgttccacagttttaaggtagttaacatgagatgtctgcagattactacacatagattcgaacacctgtcaataaattcatgcgtagtatgtttcaaggctgcttgttagaaaacaaaactataatgaaggtttacatgatatgcactatgtacagtctattgaatcatgtgggctgccctgcttggagaagagcaatccattgatacatctgctttcttgttccttttttttctttcttctttttctcattttcacttttttattgaaacagttcaagtggaaaaggatatcagttccgcaattgaaattatatggtttatagagttgtactgcttacatatttcctggtgcttttaagagtcatttaccgtctgcatatcaataatgtactcgatttttttcatgctcattcgagtgatcgagctggtgaaaaatatggtaggattctttaataaacaattttgtatattttttcgccgcctttaacttaggttaaaagatcataggttatttttttgggtcctataatgattcaagttttgtttactgtgaatatggattgctattacttctttttcatcattttcgtttatttctgtgtttccttttttaacaatctcaattgctttatggcagcatcttcaaagctgaataagcttattcgaatcaac

SEQ ID NO: 68656 - DNA, 583 bp, Prunus persica
  Intron number 1 from transcript ppa023887m (locus ppa02388 7m.g) derived from phytozome v7.0 (chr-ID scaffold_4; pos 9208817 to 9209399)
gccaagccgccataagtgttagtattacaatactaccccctcccctcctcctctacttattctctctttttggagcattgtttttaattttgattttatatataaacattaaaacccataaattaaattgaaggaaaaaacccaaaaaaggtcagatgtcttaatttttaagttgagtggtgtgtgaaatacaattactatccttgcaaagttaaatggtgtttttcttagagtttgagtattgtaaggtttttttttctatagtttaagccgtatttatgggctattatatgtgaaactctctttagtttttctggcttgttaactaaagacttcctaagactatataaaatagaacaaaatagaaaatcaggttcttacctcctcaaacataaattttgtaacttacaaatataactgaccattgatcaaatcaaatcttggttgaattttttgtttaaatgtgcagtagcatgtcaacagatttcttctgacaaagagcagcaaagcaaacattgtcattcgctaacaaaatacatagatttatgaactaaattgtttcttaaacaggttgccgagcact

SEQ ID NO: 68657 - DNA, 635 bp, Prunus persica
  Intron number 1 from transcript ppa021860m (locus ppa02186 0m.g) derived from phytozome v7.0 (chr-ID scaffold_1; pos 43640759 to 43641393)
cttgctggtctttcaggtacgtatattaattacatttatatacacacgcatacgtatttaattggctagttagtgttcaaacctaagaccactagtatgtatgtcaaaactctttttcattggactagatgccattgacattcataagtatatttaagataatgtagtaagtaccaaatttatatacttataatatattcctaagtatattcaaattgcaatctaacactcggagtttattgaaaaagtaatcttctgttcttatttaaggctgaaaatctaactggcctatattgtaagcaaagaagaatctaattagcatgtatggggtagttagataacctaaacccttgattttctttttctaagtgagggatagttgagacagttttgagtggtatggtgaacgacatgtattttatatatatatatatatatatatctcatggaactagctagggaatagttttatagataaatacatgcattataagtaaatttgcaacaccacatgacagtcttgctatgatttttttgagattgaatatagtaaagatatcttgtgtacattttcatgcatgtaaactaattatattattattttaaacgttatcaggcaagcaatataatcatcc

SEQ ID NO: 68658 - DNA, 411 bp, Prunus persica
  Intron number 1 from transcript ppa001962m (locus ppa00196 2m.g) derived from phytozome v7.0 (chr-ID scaffold_1; pos 18124623 to 18125033 reverse strand)
tctgtaagttttacaattcttccatattaattttgaaattgatgttatttagtttttacttgttattagtttgcttaagtgtactgtgggttgatttaaattggttctgttcctttatttgagattagattgatttctcatttggtggatcttctgagagaaaattttgattttggagataaacaactcaaattaaatgtgccagcaattatgaattttagggtttgaaaaatcttcttcttctctctctggtttggattcgattttgcggtaaattccaaaagatgtaggaagtaattcaatgtttggtgtttttttttctcttgtacaaatcaaaatactatatttattatttgaaaaaacttgcatttgccaggctcctagaaaaagtacatcaagtgagaggttgcc

SEQ ID NO: 68659 - DNA, 826 bp, Prunus persica
  Intron number 1 from transcript ppa013969m (locus ppa01385 7m.g) derived from phytozome v7.0 (chr-ID scaffold_6; pos 25650667 to 25651492)
actcaaccatgtacttctcttcaaaacccatgttactaactgggccccaagtttgcaaaccattacattttactctacattgaaatatgagatgcccaatttaattgtaacactatcggcccaatttaataatttaaataaaaatttatctaactaattccctatgaaccaaggcaaagtttttgttttttttgtttttttttttaaatctttgggatcctgttattgggcagctagtcaccaacgtcggcaacatgttaaaagctatcgtatacatttcaattttgataagaccactgtttcatataagttcttctgtcgtttggtcgttttggggagaacctccaccacggccgttgctgcagcgcgcagtggcaacgtaagctccgttagatcttccttacagcctggtcaatacattccagtgggtcccacctcgggaaccccacaatcaagtggaataatgttgttattatcatgtgagctccctaaatatctcaaaaaccattagatattttatgcatatgtgacacaatttcttatgaaaaaataaatttaaataaataaattatgtcggtagacacaatggtccattcagaacaagacgcacataagggccagacacgtgtcacgctcacctatttatggaacttagctgtataaatcattttcctttattcggatatatgtgctgtgtgtgcacccaataaacagcctccacgtagtggcacccccccccccagcagcagaaggagcaaactctatataaaaccacactctacactccccagttcctgtcaaacaacacaaagcggttggatttttt

SEQ ID NO: 68660 - DNA, 344 bp, Prunus persica
  Intron number 3 from transcript ppa011277m (locus ppa01127 7m.g) derived from phytozome v7.0 (chr-ID scaffold_1; pos 32813290 to 32813633)
ctggtgttaggtaaactctctacatttgcgcatacatacaaatctccattattaaaggttttgtattggtttaagatggttgagagtgcgaatatcgatttgattgtctgagaaccgagtttgatgtggtttattttgcttgaattgttcatgatattagcagtttgttcggtgctaagcgtagtatttactaccatgtttttagttttgcacgacatttgttttgaaagtattgcgttaccaattttggtgtcttgtcacgtttttgttggaagtttcctcttctgaatgtgtttttgtactatgcagagccaacgcccagcagccaaagctttttgttggga

SEQ ID NO: 68661 - DNA, 960 bp, Prunus persica
  Intron number 2 from transcript ppa013571m (locus ppa01357 1m.g) derived from phytozome v7.0 (chr-ID scaffold_1; pos 4509794 to 4510753)
acgttgaggtgagcccaattacttgtttgttacattagattgcctaaattttgcagcttcaatctacttgtcgtatactagaaatgtagaatattactcttcatattgcataaagcataaattacttttatctggccttccaaatatttacccttttctgtggtacttctagttctagtggtagagcactttatctccaaacccacgagaacaatttgattattgtcctaactagtggaagaattagcttccatttcttgggaaggaacagaacaatacagatctattgcttgggaagtcaataatatagatttttctatatttttcaaacaattatagaagtttaatataaaatttacatgaaatgctagagtgtagaagggtcacggccacttcgggctgaagtgtggctcctcacttggagctaaccccgctgtgcactaatggggtggggagatgccatttctctcaaagtccattcacaacatatctctaagaagcttggtttgtcacaaagccaccagactgcaagacggaccgactctaagaagcttctaccaaataactcattctattctagtcttttgtcgtagtgaactcctgtagcaagtatccactgaacctattgtatcttcacctctcgttgatttgcaaattggtcatagctaaagtagttaaagttagttaaatcactttccacataaattgatgcctttattagcccgtaacttaattcttgtaagcaagcctctgtcatttgagagattatcgtttgagcatgatgtttttagttagatatgggtggtatatttaaaccaataattcaattaaaatgaatatttatctaatgttgaaatgctgtttgtagcaataatatgttcatccactactaactagtttatataatcatccttttctgttccagcggcccttctttgggtttaacggctcaacattttg

SEQ ID NO: 68662 - DNA, 438 bp, Prunus persica
  Intron number 2 from transcript ppa014995m (locus ppa01499 5m.g) derived from phytozome v7.0 (chr-ID scaffold_4; pos 11951496 to 11951933)
ttgttgcatttgccgtaagagttcgaagttcaaaggtaatatttcttctatcaccaccttctttgcttttttcttttctcaattagatattgtaaagaggggagttacttctccattctgcaatttaatatcctgagcaggaatactttgatgtgttctcatttagtttcaactttctacgcttaagaacgccataagtaaacactctgagattttggcacatcgacatcatctcaagtgactctctgaattctgaggcaggcatggtgaaactaatggatatggaatgacttgcattacaaataatgattaaaagaaaccaaaaagggaaagaaaaaaaaactatctgggagtgttgttgatataagcttaatatgggcaagaagtttctttccaatttgtggtaacttatatctagcatgcttcttattagagaaa

SEQ ID NO: 68663 - DNA, 643 bp, Prunus persica
  Intron number 1 from transcript ppa010792m (locus ppa01079 2m.g) derived from phytozome v7.0 (chr-ID scaffold_4; pos 13797188 to 13797830)
atcaggtcttttcttttcctttttctttttcatgtctctcttgcgatttctgtgtgggactttgctttatttgggaaaagagaaaacaaagcattttaggtggaatttagttgggtatattttagttggatatttatgtttgccgagtttttttttttttttttttttttttaattcgtgtaaattgaggacataattcattgaaagagacaaggtttagaattgtactacagtagttatcttctgaaaaaacaaaattagaatttcactacagtttgccaatttcttttgagccaaggtttagtaagtgaggaagtaccacccatccccaataattcttaacatgaacggatgacaacaactcatgcatgtgtggacaactatctttaacatttctcttgtttgttttttagtgaaagggaaaccaaagtccaaaaaaacaaaaatgacacataaaaaagttgtttgtatatcagcgtgcgagtgcctatatttcgactaaccatacttttccgcttaaaatttggttaaaagatttttacttgttagtaaattgttttcatattaggtttaatgagaatttttttaaatttatttcataattccaggtcgcaaagtttactgaaggagtaattaaaggaaa

SEQ ID NO: 68664 - DNA, 514 bp, Prunus persica
  Intron number 5 from transcript ppa004673m (locus ppa00467 3m.g) derived from phytozome v7.0 (chr-ID scaffold_1; pos 432307 to 432820)
ttgatttcaactggaagaaacttttgcataagaaggttggttagcagagtttgagtgttaaatttcactctccttaatatcatgtgtgttgccttgcaaaattattacaaagttaccaattggggacttcttggttcgtctaattgttatcaaaatcacaaaagatttgaaaatttcaattgcggttgaatttgttataatttttttaattaaagaaacaaagatgattttttgatagaaaattcactaaggcacaacaagaagaccaccaaaaatattattgtggggttttattttcctattatatttaagaactactacaatgaaactccatttggaaggtagatatctttgattggtttgatttctttatataatgaattgttgttttgaaatccagaaataaattttcctcatttcattttaattgcctttattacttattaattatttaataactcaaaactgatatttacctatcttctttcacagacagaggaaataattcgattaa

SEQ ID NO: 68665 - DNA, 657 bp, Prunus persica
  Intron number 1 from transcript ppa008953m (locus ppa00895 3m.g) derived from phytozome v7.0 (chr-ID scaffold_8; pos 19034795 to 19035451 reverse strand)
gtgccaggtaagacttgactcggaaaaaaaaggtttttttggcctttttgttttaaagtttcattcattcattgatgttctagttttaggtactctaggctttctccttctcttattgcacacaataaattattgttagcattatagctttccaaacgtggttctgttccatgttaaccttgatttgattttatgacatactttctatttttaggaaatgttgttagatttaagaacctagcatcctgacaaggaatccccattatcctttaacttcataattagtattccatattggcagttggtctggaggcaaataatctctgcttgcttagcacaatgctaaatatccttgatggaagcattggtttacatctaggagttataatactcgtgtatatcggaacaacactatggttctacattattacgcacacaatcgtatttgtgattttgtaattacccagaagcattaaagtagctatttttcttttcattgttgtttgaaaaaatatgggttgcatagtggtcattagctgctgtccttgagtcctatgtattgagctatggtaattttcttctgttttttaaaagtttttcgtttttgttttcttgactgattgtatcttttgttggttgaagcagtcaggttgtggg

SEQ ID NO: 68666 - DNA, 1011 bp, Prunus persica
  Intron number 1 from transcript ppb018307m (locus ppb01830 7m.g) derived from phytozome v7.0 (chr-ID scaffold_1; pos 40604757 to 40605767)
taccagttctggcctaagaacccaccttcttacaggttagtcacactatttgttttgagcaatgctaggtatggatgcatctctagcatatgtgagtcggtcttttctctattattgtctagaatttttaaattgtaagggtccctaccctaacccaaaatcaattgtacacaaaccggtcgttgttgaaagcctttacagtgaaaaagatatcactctaactttagggctcctacttaagtttgataaaattcttcaaagaaaaaaaaaagtatatcccattctagttaagtacgtaaaaacaaagtagacgtggctgatccctatctactaaaattcataataaacttaaggttgataaatctttcgcagaattaatggaaatgagattcgaacttgatacatctctcaatatatatatatatatatatatatcccacaaattaaaaactaatgtagattatgacatattggtggttctaattttgatgggtgcagggaagctaatgaagagtatgtgaagcatctgcacaaggtggtggacaagttgttcaaggtgctctctttagggttagggcttgaaggacaagagttgaagaaggctgctggaggagatgacatggtttatcttctgaaaattaattattaccctccatgtccccgccctgaccttgctcttggagtggtggcccacactgacatgtctgccctaaccatacttgtcccaaacgatgtccagggcctacaggcttgcagagatggccaatggtacgatgtgaggtacatccctaatgccctggtcatccacattggtgatcagatggaggttaggaccttctctttatattatctatattattattaagataaaccttgcgttaatcttaatgattttaataacgtactaacttaattaagtgataataactttgtggtagattatgagcaatggaaagtacaagagtgtcctccatagaagcactgtgaataaagagaagacgagactctcgt

SEQ ID NO: 68667 - DNA, 902 bp, Prunus persica
  Intron number 1 from transcript ppa008564m (locus ppa00856 4m.g) derived from phytozome v7.0 (chr-ID scaffold_2; pos 24890350 to 24891251 reverse strand)
aaggagaaccctctcttcggcccttcttcttccacgtaattgaaaaatctttggtcttctctcatacccatttcccaattttcggttttttgttttgttggtgtttctgttttggtgcttaaaatctcggtgttgctccttttgaagcacttgatatatgttggtggttaagttttctgggcacttgtgatttgattactttattgctactttacagatttttcagccttcaaattcttacttctttgtttcacttagaaaatgagttgaattgtagttactgccactaggatctattgaatgtctaattttgataacaaggatatattaatggtattagattagtgcaaatttagttcctttatagctagagcttgtgtttcattgcatatcctgataattatgatttagattgagtttctgagacactacgaattccggttactctgcatataagaagaggaagctcttaggtcgtttttgtttggtgggttctgttaggcagattgcatcttgagatagttagtatcaatgctgagaatcccctaagaaaacaagtacaatccttgaagggtcgtaacaagttctagcaaactgtatgagctgaaagcttttttgcctcaaaagaatagccactggatactaaacatagtgcttgtgcaagctaacggaaaagctttcaaacatccaaagtctcgggctttcttattcttgtaatatgtttaaatgtttttgcaccagttacttaaactacgctgaaagtgtgtctttttcattgacccaccttattatgacagattgccctttctcttactgtttgtgttttttttcctcctcctccttcaaaacctttgcaatttgaacaatgcataaccttttcatgattttgaagattagagaag

SEQ ID NO: 68668 - DNA, 741 bp, Prunus persica
  Intron number 3 from transcript ppa011584m (locus ppa01158 4m.g) derived from phytozome v7.0 (chr-ID scaffold_6; pos 2394734 to 2395474 reverse strand)
gcaaaaatctatcgcaggaatcataacagagagaggtacttttatattaaaggcttctgtggctcatctactggatacataagacatttctatgcctgttttgactctataattgtttcctgagaatattttaggcaataatgattgtagatcactttgaatgaggaaaacaccaatggaaagttggaaggtcattgttcaactcttatgtgagttgaatttgagccttagtcttgactatagaaacaaattcataagttaataaggttgaagaaaaagcattgagtaggatgtatgaactcatatatgcacttcttgcagaaaaagaagctaaaatagagtagtaatttagtgagcacctataggaaaccacatcggaagaaaataacagttgggcaaccacgaggtaaagtttgaagaacaatcactttgtatggttttcatggaccttgattagaagatgattttcattttaaattcaatttaatagctgaccggatataattagaataattgctactcaaaagcaactttaagaaagaaaaaaaaaggtttgctaggagtaaaggggtttgtatgatcaaaagaatctttcttgaatgataggtcataactcattgccaaattagaaatgtttttgaattctcggtcacaattgagttcctcacaattaactgtgttttctgctttggtggataatttgtagattatctcaggaagatcatagtgcagggaagatca

SEQ ID NO: 68669 - DNA, 1010 bp, Prunus persica
  Intron number 1 from transcript ppa011584m (locus ppa01158 4m.g) derived from phytozome v7.0 (chr-ID scaffold_6; pos 2395890 to 2396899 reverse strand)
cgaaagcagaaatcgcagctgccctgccccctcaggtaattgtccttctctctcacacaatctcctcctccttcttcaaccttttgccagcttaccaagtcttatctgaaacttatatggttgaaataaatcaatgatttctaaagttttttcttttcttttttcatttatcaaagattgatctttggtgcttgtgcttgattttcaattttttttcttcttttttttggattttgggttctaaagttagtgattcatatatgactttatctgatcgaatcaagtgttatttggttgctgtgatcccatatcggctaagtatgttagtaacttagcagtgattatgtaagctgctggacactctttctttgcaagctgattttacgagggaaagttccatctgtggatttatataatcaatactaatttaatggaagagaggaattttaggacatgtttttatcagtgtgtcaaaaattgtttctgaagattttgacattttccagttttgtattcactttttattaaaagtcttgattgcattggatgactttggttgatcacatggatttagaagtcaagcttacttaactcgagattggctggctgcacacttggaactttaaagtccttaatgattagtagatttggtaattgcttattttggtttggtatatgcttggtagacccaattccatgagacttttttttgtagggtaattggcttccaagaaattaccttatgttgatttattttccttctttattttaccaaatttgtagctttatcgtagcgcaatgtgtttatgtagggatccaaaacccagagactaagaccaattgatcaacaaaaccaacccaaattggaaagctatactgattgagactaaatagaaggaatacaaattaaatggagtcaatagcataatatcaccctagcatatgcatgaaaggcttattactaaatccattgtgaaggaaaatataacctatctcttcagacaggtaaa

SEQ ID NO: 68670 - DNA, 223 bp, Prunus persica
  Intron number 3 from transcript ppb006523m (locus ppb00652 3m.g) derived from phytozome v7.0 (chr-ID scaffold_7; pos 21669594 to 21669816)
gaggtacttattgtagcctatcaaaatttgatctttggttttttatagtacaagcgatagtttaaacaacgggagggtgggggtttttctcacacatacaattatgatgtcgtgggggtttgaacttgagaactctggagataatgatatgcaagtcaaggcccttttccactagcctatcaaaatttgatctttgtttatttttcttcttcttttgcagata

SEQ ID NO: 68671 - DNA, 590 bp, Prunus persica
  Intron number 2 from transcript ppa020465m (locus ppa02046 5m.g) derived from phytozome v7.0 (chr-ID scaffold_3; pos 19803242 to 19803831)
ttcttcaggatcacaataacaagcttcaggctgaggtaagttttcatacagttccttccactgcagattggttttcttcttccttcctccctcccgcttgattctcctgggatttacacaagatcagtttgaagtagctagaatgataattaatttttcaaaatttaattaattaacttggtattataaataatatccataggatcagcatggattatggtgcattatgattactaggacatcttaattccagtggctgctggagctcttgatccaatgcacataaatatataattactaccaaaagtcattgtaatattccctaatttctcttaatcagtgtcagtctgtctgtcagatgtgcatctgatgaacaaaagtattttaattaatcttacttagttgcttacctgcttgcaattttttaatgtttatatgtttgatattcaaaaagttccatttttgtttttcattaattggttggaaatggaagaacttgcatctgagagtgatcatcatcagtttttaatatcataatttcatacttaatcttgattgcttgggttcaaattatgctgcagttattgtct

SEQ ID NO: 68672 - DNA, 795 bp, Prunus persica
  Intron number 1 from transcript ppa019497m (locus ppa01949 7m.g) derived from phytozome v7.0 (chr-ID scaffold_8; pos 2503263 to 2504057)
aaaaatatgtatttaatgttggctcatttcaaggaaaaacatgaaatatactgccaaagtgaaatgaccaagaccaacaaaatgaaatgaaatttcaaggcaaaagtgatctagtccaagcaagttcccaactttcgttttatttttctagggaggaagatatttacatgacaacttgaagctgtccactttagtaaggaatcaaatcaatacgaacaaacactttagtaaggaaatccacatcaccccactatagaaaggaaataatgagaaaggacaaatgttttccacaacaccccacttggtgggatgcgttctctttcttctcacaaaagtgattcgttttatttttctagggaggaagatatttacatgacaacttgaagctgtccactttagtaaggaatcaaatcaataggaacaaacactttagtaaggaaatccacgtcaccccactatagaaaggaaataatgagaaaggacaaatgttttccacaacaccccacttggtgggatgcgttctctttcttctcacaaaagtgattgtgtccagcttactgatgccgagggaattgaacacataattgctaagttaatggcttgacttgagttttaagtaattgcattaatacttacctgcgtagcttcctggaacctctatctgtgctgatttttcttttctttctaatcattctagttccacaatcccgtgctcacagaagatttcttgaaaccactactttccaatggcatcgagcagccaaagggccttcacttcagctactgcagtttgtt

SEQ ID NO: 68673 - DNA, 717 bp, Prunus persica
  Intron number 1 from transcript ppa006464m (locus ppa00647 3m.g) derived from phytozome v7.0 (chr-ID scaffold_6; pos 25819923 to 25820639)
tcccgccttgagctttgccaattattgcttaatcggtacaattttcttcctctgagtatcttctcctataaagctccttttttatctttccttttttgggttttttctgtgatatatttggtggtttttgttggtttcgttttgggtatttggatcggcttgttttggtattcaggattaagtgtctgaactccccttttctctattttttattattatttataaataaatgttttgttttgtttttttttttggtggtagggagagaatgattatgactggatattcaggtagttcatttgtgtgaattttgggttgtattgtttggctttaattgttggatctcgggtttcatgttaatatgtttatgggtatgtatagaaggtcaaagacttgccttttatttgcttcatctcatttgtggggttcatttattgttcttttttgtgctgtacataaaatttccgttgtggcctgtggtttacaaattttgatttcttcctgtatttatctattttctggtaaatatgagtttaattttcagctaagctgagttgatcggctacaaatttcctgttttctatatttcataaaactttacgtagctcttagtatggattgtggataatgggtaaagaaatgctactcagattgtacatattgcagtttcatagtcgcaattttaactgtcactgcttaattgattgcagtaggttg

SEQ ID NO: 68674 - DNA, 342 bp, Prunus persica
  Intron number 1 from transcript ppa006567m (locus ppa00656 7m.g) derived from phytozome v7.0 (chr-ID scaffold_3; pos 18147783 to 18148124 reverse strand)
actagcctcagcttcacgctccttcaatacctcgggtacctcttctccttcttcttcttcagctcctagctcgataattggatgtatttagctctgtttgattgccgagaaactcgatggaaacagaaagaaaatagaaacgttgaaaaaaaacgaaagtctagcaaattcattttatattgaataatattgaagtttatgtatttatataataatgtgcttcattacttttctgtgactccataaagctttaatttcacttcattctttttttgctgctcaactttgaaaatttgtgttatttctaatcatttattttcattcagggtaggctaccggtgg

SEQ ID NO: 68675 - DNA, 489 bp, Prunus persica
  Intron number 1 from transcript ppa004391m (locus ppa00439 1m.g) derived from phytozome v7.0 (chr-ID scaffold_3; pos 21580206 to 21580694)
agccaagctcaacaactcgcaagcaagcatagagagtatcctctttctgacatcatatggaaatcaatgttttctttagaattttttaaagtataaatctagaccattttcctcgctgttttgattgatatagtgagtcaggtttctatttgtgggataaagtagcacccttttgtttcataattctcttccatatctcatttctttgaaattttggggtacctatgaggatttatttgtgcggaaagcttaattggattttgcaatccattgtcaaatccacatattcaatggattttccatgtcaaatttgaattgctttacctgctactccatgatcactgtttactttattgttgagttgatatttatactttctaagtagttcaattacaagttataactaatacttgttgttatctttggtgttgattacttggatgttctccttaatgcaattaagctttatcacattggtgcattttccat

SEQ ID NO: 68676 - DNA, 481 bp, Prunus persica
  Intron number 2 from transcript ppa007032m (locus ppa00703 2m.g) derived from phytozome v7.0 (chr-ID scaffold_1; pos 29130007 to 29130487 reverse strand)
ttgactaaggtattataatttttgtattcgatagtttagagtgctacattttccattaaataataaattagagacagtaattatgcttgtattatagctaatgtcttgctaaacatccatcatggaaatggaaattattgtatggcattcatttcttttgaaatttctatttggcgctaatgtcttattcttgtattgtgaatttcctgtttattcacgtctagtttatgcccaactcctgtcattccctaatgtaaaatttgttttacttgaagttggtgatgtcgttttgatacccctatttcgttcgcatctgatttatgccaactatttgtggtgttgaaattccttctcccaccagataatgttgctcaatcttctcttctttgtcagtttagaatgatgacaagttgttttgacttactttatatacctaacaatgctagagtaagagctcgcttggtgaaggttcaggtgcatc

SEQ ID NO: 68677 - DNA, 739 bp, Prunus persica
  Intron number 1 from transcript ppa002527m (locus ppa00252 7m.g) derived from phytozome v7.0 (chr-ID scaffold_1; pos 39689993 to 39690731 reverse strand)
agatacgaatacactggcctcagagcagggacgaggtaatttggattgaaatgtgtgaactttgatttctgtttttggtaaagttgtttgctttatttgaattggtttgagtgttgctgttcctgatacattgaattttgttatgtaagtgaaagttcagcaattgatatcaactattaaatttcaatggtaaagagttagcttaggcatgtcaggacaggggacaagtgaagtggtgtcattgttagtgtagagttcaagtcttgcactcatcttgtaaaaatgtggatggagacggaattttcattgggaatggttttgaaatttagatggaagactttgaaaagtgatgatggcaatatgctgttctccttctcttaactttaagctgtaggattggcagaagttggtcccttgtttttacaatgtaaaaagatgagaagtaatgaaccaatagttctgaattctttctttttttgttgttttttttttcattcatgacaatctcttttctgaagctgtatatccacagttgctttcaatgttacgtaaactggtaacaattggtaacatccctttgtagagcagttttctgggtcactactgaaaactccttcctgaaaaagatctttccttctgttgctcttagtgtatagcatattaccgtttcgcctggtttgagaaaaaatgagtgttcttttgtgctaacaatagatatgataacaggtgtggttcagta

SEQ ID NO: 68678 - DNA, 392 bp, Prunus persica
  Intron number 3 from transcript ppa010210m (locus ppa01021 0m.g) derived from phytozome v7.0 (chr-ID scaffold_7; pos 7179260 to 7179651)
ccataatttagagggagatccaaaaataagaaattgtaagttttatcttttccatgtttgaagttcgatgctgtcaatatgcttggtttgtatagtcatatatagattctctatataataaaacgtacttggatgtttcttggctttcaaactgttaatgcttttgatccagaaaagaaaatgttgattccatacaaaagtctgcacattggctgaacatgaaataacttctcaattaaattagtttgttagaagatcttgctattttttatttttaagcattgtcaaatagcatctagatgtttccagtctttaggtttgaattttatctcaggcagtatacgggatgtaaggatttgttgttgtgaattcagcaaaatttggtacacaac

SEQ ID NO: 68679 - DNA, 947 bp, Prunus persica
  Intron number 1 from transcript ppa019423m (locus ppa01942 3m.g) derived from phytozome v7.0 (chr-ID scaffold_5; pos 15741813 to 15742759 reverse strand)
tgggaaggaagttcaagggtgggtgattaaacgtggtgcagaagatgtctttgttgggactactattgtggatttatatgccaaatgtggaaaaatgaatgaagctgtcaagaaattctcacgtatgccaacccgtaatgtggtttcttggactgccatcatttcaggttttgtgcataaggacgattctgtttctgccctaaaagctttcagagaaatgagaaaaatgggagaacaaatgaataagtacactgttactagtatacttactgcatgtgctaaaacatccatggctgaagaggcaacccaaattcattctttgatattaaaagctggattctattcagccgcagttgtggggtcagctttaattaatgcgtactcaaaaataggagcagttgatctatctgagatggtgttcagagagatggaaaatataaaggatctgggtacatgggctgcgatgatatcttcttttgctcagaatcaaaattccggaagggcaattgaattgttccagagaatgttagaaggaagtgtgagaccagacaagttttgtacttccagtgtcttgagtattgtagactgtttaaatctagggagacagatacacagctacactcttaaaattgggctggtctctgttgtttctgttggtagttctcttttcacaatgtactcgaagtgtgatagtctagaagaatcttacaaagtttttcagcaaattcccgacaaagacaatgtttcatgggcctcaatgatttccggttttgtagaacatggctgtgcagatcaagcccttcaactatgtagagaaatgctatcagaagaagttatacccgaccagataactttaactgcaattctaacggcatgttctgcttctcgttccctacagacgggtaaggaaattcatggtcatgcccttcgcaaaggagtccaacaag

SEQ ID NO: 68680 - DNA, 837 bp, Prunus persica
  Intron number 1 from transcript ppa009287m (locus ppa00928 7m.g) derived from phytozome v7.0 (chr-ID scaffold_5; pos 6380878 to 6381714 reverse strand)
tgttggtatcggtgttggtcgccccataaatctaggtaccgctctgtctattgaactctctctttttcttccacagctttctctgtctatagtctagttttatgtggaagatggacttggggaagctcttcaaacccaaaaatgctgaaaaccatcagacacaagttgctaagaaaccgtgtattacttttcattttctctgtcattgcctttgttgtttgtttttggaacttgggtctgtttggttgctgagaaaatgtaggaaatgcgataaagctgccattttgaatttttggtgtatcgttttagtaggaacctttttaatctaagaatttacagcaactgcccggatggttggttggttcggattttgaatttgattttttgctaatatgcgtgtaatgtttgtgaaattagaatttggttgttctgaatctgaagtttgtgcattgttatcttaatcaatgtgtattcatgagtagtgtccattctcgagctatggtttgtctgtaagctgactttagatatcagttattttcaagcatgctttcagcacatatgtttttaaagagttaaatctagagaaaggaatagggtggcaagagacaattctattttgcaaaaatatcttgatccatgcaattcagtatttggatgattgataagtgatgagcgtttaagttgtgcaactttgtatcttttcaagtggagatgctattgacaacaatactatcaaatttctcttctatggttgttatggttgtagcagatattagttaacccacatattgatttaaattatgtacaccaggtgcaataccagtactaaatcaagtc

SEQ ID NO: 68681 - DNA, 459 bp, Prunus persica
  Intron number 3 from transcript ppa010555m (locus ppa01055 5m.g) derived from phytozome v7.0 (chr-ID scaffold_1; pos 28823623 to 28824081)
tgggtttgatctgcatcctcttgtttggagctcaggttctgttcttcatactttactcatattttcttttgttcaactaattactgggtttaagttcaacttttggagttcggtgcaagatgcttaatgacagaagtctgtcatttcaatattatcatgaagcagagatgcttagtaagcaagtagtaggccatcaatatgtatcaatcaaaataattcatcaaatgggtccagaaaataattcagcgaatgggccagcaggaaggcaaatggcccagtactaataattttgccttccttctccccccacccaacccaaattaataaataaaataacccaaaaaagaaaagaaaaaggaaagttcgatcgtgttgtgaggcaagataagctaataatttatgatgtttatgaagaaacagtgactgagctgatattagatttctaaattgcagtggttg

SEQ ID NO: 68682 - DNA, 697 bp, Prunus persica
  Intron number 1 from transcript ppa007254m (locus ppa00725 4m.g) derived from phytozome v7.0 (chr-ID scaffold_5; pos 11194250 to 11194946 reverse strand)
gcattgtctggtaagctttctacgttcaaaaattgatctttagcttcttttgctatgtggggcacttttaattttatatttctacttttgtttagttttgttgacatttctatctatatattttgctttactttagaattggtttcaatgtctttatgttgagtttggtctgttgagtaatttgagtgatattcctttatccggatgatattcaagataatattgtagaaaacatgcctaaaatggagtaagaaggaactctgtatagaattcgtactttgttgttgaaatcatttgatatctcaatggaggggcattttattgtacataacaggttcaataatttattatactgttattttgttttctgtgtgtgtattggttttatatcaatttggttacaaatgctaacatacagcagatctggtttcttgaatatagctgatgcttattagccactccttttggattaggcatctattctttgcaattgtttttttgctgttcatgaagttggtatgcgtggtttcatgccttgcttctgctcatcatgtgttgtgaagagcagattagcctagaagactgcttgaaatactgaggaaagcgtttccttatggtttctttttcttgacaagtatgatttttgggatacagtgtggtggataacacaatttctttcttttcagtgcggctgtca

SEQ ID NO: 68683 - DNA, 647 bp, Prunus persica
  Intron number 1 from transcript ppa003420m (locus ppa00342 0m.g) derived from phytozome v7.0 (chr-ID scaffold_1; pos 11216971 to 11217617)
gagcagcttgtcaactttattattcggcctcccaggtaacaataccctttaacctctcttactttctagctctttctttatgtgtgagattctgttcttgcttttgagattgaattcttgatgggtttttgtttatgctctgagaaagatgaattgggagctgaaattttgaatcttagttactttcccatgtgggtctgtaggaaaatgaaaccctttatttaactaagcccaattaaactattcgttcaagtagaatttagcttttttccaattttttccttaattttgttgagtataaagaattagagtatgaagcatatgattgattttgattagtatcttctcaaactaagcagagcaaaatattgctttttcggtggtagagctggagttgaaccttctttttcttcctcatatgtgggaaagcaagacattttaatttcagtttttctctttcccagtttattcctgtctaaattttaaattatgggcaattaatttgtcgtacttgataccatacgaaattgttgaaatttaaatgatttattttccctttagagatataaacttaagtaattgttaattatttgaagagattatgagtttatccatgtttggtttcagggctgaatacgacccaaaaa

SEQ ID NO: 68684 - DNA, 793 bp, Prunus persica
  Intron number 1 from transcript ppa003317m (locus ppa00331 7m.g) derived from phytozome v7.0 (chr-ID scaffold_4; pos 1766653 to 1767445)
gcctcgcagccattgccactcactgcaagtaagtgtctttcaatttggcccccttggcccctttggaagttttgatttttgttattgggttttgggtttccagaattgagatccgggttgcggtggtttgagtttcagaaagcacaaaacttgataatgggttttataaaaattttaattttttgacccgtaaaactcacaagtaggggtttttttgttggtaaatatccttttaaagcgtacaataaattgtgtaattttctgcacttacacgtgggctgcagaaactacaaccaagcacccaggaaataacccagaaactgaaatgattctgttattctttttctacctctttctcttgaggcgacgtttgaactgttaatccaaagtctaaaagaaacaattcatttttctggctagaatattttacttatattctacaataaccaccgcccaaatttggttcacatgataggtaggtcaattgttctggcaaaaaaagaaaaataggtaggtcaattaatgagaaaaaagaagtagttaattgcacataatcaaagacaggtatacagaattttgatctcaataaagtattttacttttcaaatttgtcagattttgattcaactgctggtgatcatgaattttcaaagctgttcgagataattaaaattcccatatgaagctcatagtttacttaagctttatgcttaacttcagttgttgaagaaaataactaatatcccatcctaatttggtttcaggaatttgactgagctggacatacaggaga

SEQ ID NO: 68685 - DNA, 896 bp, Prunus persica
  Intron number 3 from transcript ppa013591m (locus ppa01287 1m.g) derived from phytozome v7.0 (chr-ID scaffold_5; pos 8278833 to 8279728 reverse strand)
ccatcagtacaggtattgccttgttcttgaaaatctctttttcttagcattattttctggtttgtgattatgtgctcagatagattgatcttgacttgagaagctattatcctaagttgcttatactaaaaatatataggctttcatggaggtacccttcatgtaaatttgtgttaaaatttgtttcaagccattatgctgtccgcattagttacacaccttccagaaaactgcatttatatgcattttaattattcttttattaggttatcgtccaggagcctctttctcttatgaaaaaaaaaaagagcaatgaaattttggaaaaacgaaactgaagaatgaatacattgtaagagagaaaacaaaaaactgaataatcctcgtttttttacagcataacttaactgaagtttctttagaacactgttctcgttctttcatcaaacactatatgcttaaaaacttgttattgcacgaccaaaggattcgaacaaaaagaaaaatttctgcaatcatgtctaggagattgcttaacgctgaaatgggctggtgaagaatgcgaatcttcataaattctgtaatctggcgtataccctgaccaattggttcctttgcatcttctttggaagaggatctttctgtaattgagtttgtaagaagacttgtgaatccttgagtgattacacacaataagtgaataatcaaactggaattagaccaggcatgcatgcatcattaatcagacaaaacgattgagtaaaaatgatagttgatttttctcattttgatcaaaggttctccaaacgatttcggttatgaaagagttttgagtgtgattttagactgtccttttgatagatttggctttcatcaacctccattcaactctgtta

SEQ ID NO: 68686 - DNA, 418 bp, Prunus persica
  Intron number 1 from transcript ppa006596m (locus ppa00659 6m.g) derived from phytozome v7.0 (chr-ID scaffold_3; pos 14155263 to 14155680)
gccaattggttttggggtggaacctcaacttccttcaagactaaccctattcagaagatagaaaattacacaagtcttttaaacgctgtccacatattttcatgtatgaccagctatgcaatagcaaagcatattccttgaatttggcttctctctctcctcagtaacatgcacacatcgttattagcctttggaagcaatataaagaggggagtttttttatattgcaatagactcaaaaaactactggacacccatttgccaacgaccctttcaaaaccttgccttaccctccaatctctccataagagcgcctcaacctcacagcttacagccttacattaagaaagctgaacccaaaaggcaagataacagcaagagatcaattgggttttctcagtcttgcttttcttctgag

SEQ ID NO: 68687 - DNA, 588 bp, Prunus persica
  Intron number 2 from transcript ppa006596m (locus ppa00659 6m.g) derived from phytozome v7.0 (chr-ID scaffold_3; pos 14156024 to 14156611)
ccaagacgttttacttgggtaagaggtgtttcaggctttcagctcatctctctctctctctctgtggttctgttttagtctttgtttatctgctctttttcttatttctttaatcgggtccactcattttcttggatatactggtggactcagcacttgattctgtttcctttttttatttgccaagcagtagtgtgaacatttgggatccaaaaaagtactttacattatcattgactagaggaaatttatttggttgccatgaaaatggagaaatgagaacttttggaaatttgacagcagttgaacttgattcccaataatcattgaatacaaactattctttgccttcttttggataggatcttaatggttattagtctcttatatagaaataactattatggtagtgtaatgaagatttagattctaaactatcaaaactttaaagataggatgtgcttcttcagattccataatattgcaggagggaaaatttatgcaatttacaacttgatgttgatacttactaatttccaaggcaatgtccttatcagtttctttctgtgattttcaggcacattactc

SEQ ID NO: 68688 - DNA, 942 bp, Prunus persica
  Intron number 1 from transcript ppa003193m (locus ppa00319 3m.g) derived from phytozome v7.0 (chr-ID scaffold_3; pos 21477200 to 21478141 reverse strand)
ttactggtcgagctcctactctgtctttgtgggctgtgagtatctaaaggagactctctctctctctctctctctctctctctctctctctctctctctctctctctctgtgttcttttcaagcatttgattttccttttattggtgatcttaaaatagtacaaggtttggttatttgttgatctagtttgattgtatattttgccattgtgggttggttttcgatggtccttttctctttctcaacgttgatttctcatcgatttaatttgatttttcattcgattcatgaatatactgattgaacagtttgaggaagatacaggaatggatggtttctctggaaatggatattctttctggtatctttggtttgagttgatgataagacacagtttaatcatatatgtccttaagaaaggagctatcttttgccttaaactgtgctatttgttagttttaagtaaagtttgtcttccttgtccacattcgagaacatcggattgaagaattgagtatatgccctctgtttaaggctctgtttggatcctggagaggtaaagaaaatggagagaattcgcagaattgctattcagggtccctggaggctggagtcggcatttctgcattttcaagatcctctaaaaaatttgcttaattgcatttttaatttgatatgacagacaaaagaaatggtcatcctgctagagttcaatagtggttttttatgtttgcttttaaaagatcttctactgcgttagtaaacctcgttcatgattacttttgatagagcaacaaagttcgtaacaaatttagaaaccatttgaacacaatatgattagcaatgggcaggggcgccatgcattctttacacaaattacgaaaatgattcaatatttctttttgtcactttgctgttgttaaaccgttgcatttttgcag

SEQ ID NO: 68689 - DNA, 537 bp, Prunus persica
  Intron number 3 from transcript ppa017404m (locus ppa01740 4m.g) derived from phytozome v7.0 (chr-ID scaffold_6; pos 26327580 to 26328116 reverse strand)
tgttcgttacggtataaataccagcattacagtttgactttgttctaaatatttattttttaagtcgtaattcttcattctgcagtgtttttggattgacttatgtatcttacatgactttgcttcattaatatttatgttccaatgttgtgttgctatgagataacttgggaggaggatacattaatttagcatagaacattgtcgatgtctgaatttcatagatttaaaggttttgttgatgggtgaataaacatgggaatgaagattcatatttgtgaccctgttctgcatcagtagaaaaagtgccgacaaggcgaatacaagttgaaaggataaatatcaatatttagtatgccttgaaaggaccacccatccctccaacccttcaaaaagaagaaaagaaaaatagaaccctgtcatgttcatggtattttgttcaacgattgtcttgctataatgataacgtgaaactacttatatattgtgattttccctgcagggaagattcgtcttataaagactggagaaagcatc

SEQ ID NO: 68690 - DNA, 868 bp, Prunus persica
  Intron number 1 from transcript ppa015364m (locus ppa01536 4m.g) derived from phytozome v7.0 (chr-ID scaffold_3; pos 5060573 to 5061440)
ggtggttctggtcaattttacagcaagaggtctttgggtatggattttgactctactaaaagtttaatttgttgaaattggttgcttgacttcattaaagtatgtctggcccattgtgagaggatcaattgatttctcatgagtcatggcccataagaactctagtttcgtttcactggttcattatgtcagaagaggcacccaggggatattggtctaatggacttggtatttggaatgcatgattggtgatggtattcataatgctgttgcaattttctcaattcttatttagaaggtgaccaggcttctccaaggaaattgatattatatatgtatgatttcatagtggccttataaggtttttgctcttgctgcaagttggtttataacttataagtttatggagagcgatacagtctttcagtgcctggttgtctgattgatgcatcgaatgtttgacatgaacttaattactcctcttaaatttttgttgttgttgtattgacagtttctttacttttttttttcttttttccatgtgctctaaagagaaatggtaagttgttaatgcgcataaccttcattttgggcatttgagctgtgtcttttctattttgtttttcaagtacataaccttcattttgtactgatcattacaaaatgacacccattattggtagccatttgtagtgatgaaccagaggccgttatgatatcctgcagaaccaatctagagttatgaattgctgattgttcacattcatcaatgtcccttttgattgactaagagatgctcaatattgtgggatgtgcaatgattctcagaaaactaaaatctgagttgtatccttgttttacagaacta

SEQ ID NO: 68691 - DNA, 657 bp, Prunus persica; identical to SEQ ID NO: 68665
  Intron number 1 from transcript ppa008961m (locus ppa00895 3m.g) derived from phytozome v7.0 (chr-ID scaffold_8; pos 19034795 to 19035451 reverse strand)

SEQ ID NO: 68692 - DNA, 869 bp, Prunus persica
  Intron number 1 from transcript ppa002849m (locus ppa00284 9m.g) derived from phytozome v7.0 (chr-ID scaffold_4; pos 6459577 to 6460445 reverse strand)
ttctcgccccaccattgctgttcttgatcgtggaggtaaatcaattcattctatttctctctgcaattcgtaaatttcagagtccttatgctctctctcctgatgtctcagtaagtttgacttgagaatcgagatcattttcccccattgctatgcttcttaagaatttgattgatgatcatgcaataaagtctgtctagaaatgggtatttgtttttttttgcaacggttttttaattttaattttattttatagtttaatttccttttttgtcgtgtgttttgaattcctacagattggagaagggtgagctttaagtttccttgtttgaattgaatttgttcaatttagtgactgctccagctagcatgagatgttttcaaaaatggtttctttttttcgattcgttattggaggttgtgaatttaagcatgctttcatgtagtagctctgcttttcccctgttctccgacccttagttctattttagtaacatcgactcatcaaaagtctcttttcagtcttctattctattgccttttggttttagcttttcattaactgttcaattgatgtgaaatagatactgaactctttctaactgtccaattcagatgctcattttgtttttatttctggggtcaaagccgcatgaactttcatttctttacgctatggttgctatttaaatcctgaattggatgaaatgaatcagaacaataattccaatagccttttacattgtctaatcataagcaattgaaccttgttgtgagtcgtatgttacagaaccatgcttcttggattctactcagacaactttattctattgcccttgtaggttgctactttgctttgaaggtctgga

SEQ ID NO: 68693 - DNA, 542 bp, Prunus persica
  Intron number 1 from transcript ppa006865m (locus ppa00686 5m.g) derived from phytozome v7.0 (chr-ID scaffold_1; pos 31601586 to 31602127)
cctcccgacattcccacactctccaattgttttaggtatactgctccattcctttccatttaaaaaaataataataataaatttcttttttacttgatatataaattcattgaactagcaattcatatgccctttagtgagttttgattgaatttcatttcttattattttttccttacttttttttttttctgtttgttttccgattctcattttgtacgggtgcaaatcaatttgctagcttctctgttacaaactttatttctcttgatattccttaaaagttgtagtgacgcccaataagttatcgtgtcttgatcacatcctaaactcctgcaggaccttcggaatcttataagagtatcattcactttggtttagcaaaacaatgcaggaatcaacctgaatcaatttacacaattcttctttggatggttttaatgttgactactttagctacacacatgcatgtatatgtatgtatgcatgcttgtatgtggtccaaactctgattccttttcttttgcaaagccaacgagaag

SEQ ID NO: 68694 - DNA, 832 bp, Prunus persica
  Intron number 2 from transcript ppa006865m (locus ppa00686 5m.g) derived from phytozome v7.0 (chr-ID scaffold_1; pos 31602135 to 31602966)
tgagcttttctccgaaggattgacctcagtggcaggtttcattccacctgtactttccatatttctcttttcaccatcattttctatcacattatataaataagcttgttgcttattttaatcttgtaaaatataacactcaaatatccataagaatgtgttagcgtattatccggtggaattccttttagatgtttcttcaagaatgtgttagcgtatattgcttgttgctattcaacctacactgggacacgtctttcagcatagcttgtgattttataaatttactgatacctatgttgacaaggaaaactaaccttctaagtcaagtccaactgctgagcaaaatcggggacacaaagtagatacagaatcacaaaagtggaaagattttttatatcaacgtagctgcaaaacttatccttgttttagacatagaacactcttgagtatagttatggattaagagaacttccaagttcctttccgttgggtatctgcaccattatgaaattgccaattatattttcagtcatttaacaagtttcatcagtgcactccccctttatttccaaaaagttttctactgaaaaaaaacattatctcctccagaaggatgcaactcttgtggactatatctttccatattttcatttgggcctgattttgaccctatacaatgtgtatctgctgtatcctcatatataaggctttccatttgttctttgtatattgacttctttgatacgttgtgtgtaatcatcttaagacactcaacttattgcacttttattattgttcctaggaggaatagttgcgctgggaaaatttg

SEQ ID NO: 68695 - DNA, 613 bp, Prunus persica
  Intron number 2 from transcript ppa004481m (locus ppa00448 1m.g) derived from phytozome v7.0 (chr-ID scaffold_6; pos 6127167 to 6127779 reverse strand)
gcgaggaggtctctagggttttgggcttgctaaaggtatgtgctttggcttttacttttgccttttcttgactgtagctatcagcatttccatttctggtttgtcttatcttgtgtttggttgctgagaaagtgtttgggtgaggcagaaatcttttgtttggttattggttttcacttttgagataaatggtataagtgtgaataccaggaaaaattctgtgagtttagtttactgaacaagtctctgtctttgagcaatgtgtaagctacatgaaatttgaaaataaacaaaactaattgtaccaaaattagagaaataaagaaaattaacttgatatatcataaaaatagtacaaacgaaaaaaccaacaacgtttttaaaaacaaacagtcccatcttccattttgcagtgcaaaagattgtatttttgttcttcatttttttttttttggttttttggctgtctgattttagctgggtagctgtattaatttgggttcttgaggatatgtttggactataaggaagagtaatatgttttttgttcattgagtttgcgatgttgaatatttgtacaattacttttgtgctgtaggtatctgctgctatc

SEQ ID NO: 68696 - DNA, 582 bp, Prunus persica
  Intron number 2 from transcript ppa004752m (locus ppa00475 2m.g) derived from phytozome v7.0 (chr-ID scaffold_1; pos 40852535 to 40853116 reverse strand)
gttgttcagaagaggagctcgacagtgctggcgaagtgagtttgagtttgatattaactaaacgcgtagcattttagttttgcttgcatatatgaatgatcatgaattaattgccaagagggattaagtgaaaggctaaagcatcattgcttaagtgggtgtttgttgttgtaagcacagcagctcatcttcttctgcccccttctagtttctaccggggaagaagaaacatgtcttaatgacactttacatatgaaataaaagaaaaccgaaattgaaagctgaacgcacccatcaaagagaacctcgcactcccttctggcagtgtagaatgaagatttatgaaaatgtaaaagatattgtacttcataccttcttgtataatgtatatcattcttctttgaggaactctgtagtttttctttcatcttctaggacctgtattattttagcatatctctccctctcagatggttttttttttcttcccttttaatactttatgttaatatgtgatgtcttactgatgttgttggcttttttttcttcttggattctgttaaatacagggactggagaagt

SEQ ID NO: 68697 - DNA, 475 bp, Prunus persica
  Intron number 1 from transcript ppa025530m (locus ppa02553 0m.g) derived from phytozome v7.0 (chr-ID scaffold_6; pos 12798838 to 12799312 reverse strand)
aggttaggaatagaattaaagataaaactggtggtgttattccttatttgacatatacctatggggaattatcctttgaaatttgcccagaagaattagccctttgcaccgatatgaaattaaagaaacagcttgataagcaaaagaccctaagaagaaaagaattatgagacttttgtgaacaatttgattttgaaccaacaaaatcatattcacataaaccacataaaaagggaaagaaattttgggggcgtaagactaagaaatatgagaaatacgagtctaagtttgagcctaagaaaccgtatagaacctctaggaaaaagaaatacgcaggaaaaactagtaaaaatgctagtaaaggaaagaaaggtgcggtcctaatattctataactgtcgaaaagtcggacattaaaaatctgaatgtaaaatgaaagataaaatcaataacttaagcaacaactttgccaaata

SEQ ID NO: 68698 - DNA, 420 bp, Prunus persica
  Intron number 1 from transcript ppa012103m (locus ppa01210 3m.g) derived from phytozome v7.0 (chr-ID scaffold_7; pos 20494825 to 20495244 reverse strand)
ttcaagaccctcatcctcattggagcttctcctaggtactctttctctctcaagccttccatattttgttttgtaatttatttacctgatttctaattttctccttaattttcatttttggtttcttctacttttcttttctggttagacacttgatataagctatatatatatttgtggccacagattaatttcagctatatattatatgagaattgtcctcttctagcttttttgatagaagtgatagtctaaactattttatgttaatctaatatagcgggaactcgaacttgggtgaaggggggaactcactgtcatggcccacgtctgttagctatttttgttacaatatttctgttcatgccattaatgcataaatataaatatatttatataggtacataaatacagaagact

SEQ ID NO: 68699 - DNA, 981 bp, Prunus persica
  Intron number 1 from transcript ppa002184m (locus ppa00218 4m.g) derived from phytozome v7.0 (chr-ID scaffold_6; pos 21125747 to 21126727 reverse strand)
gtgaataaaggtgcattcattctttcctttttatctgaaatctgttcgtaggagtacagttgaagatatactgattggcatgtcctttaataatatgatttcacttgttaagaatctgcctttttgatacactttaacaaaaactagggggtctactacaaatatatgtataagtttattttcatggaggggacatgtcttgcatgtcaagccagccagcaagaccaaaggaaaaatacaaatgttggtgagttaagtaaatattaaagaacaatgggtgggtgttattaaaaaaaaaaatcttaaaacaagatggcttgttcaggaatgattttgttggtgtgtaaattttgtaaaacaagttaatatgctgcaagaaacacattataatgatttataagagtagatacatgaatattataggggagtaaaaggcattgtaaaaactgattgtacttgccttttcaaaattattagagactctctctctctctctctctctctctctctataaacacgacacgagtgcaggcatgccagtgtatgggtgtgtattgtaaaaattgaattgacaattatgctgcaactgtgcagaatgctgatttcaaatatcgttggataagccttgaaagcagttacagaaagaaaaaaaaatctacatattgaatatatatgcaagtagaatatctgtcagttcgcctagatttgaattataaatctgttcgagttcagcctcttcattaagatggacttttctggtactagtccaattttgttgattccaatttttagaagggtgaactcatttgaatgtaacttcataggaaatcagttatcattattgtgcttatgcgatatggtcgttattattttgaaaactattttgtgtatgcttttccattacttcttaagactttgtctctattcctttcattctgcaaagagactatttttacttgtttatatattgacacaggtgtg

SEQ ID NO: 68700 - DNA, 612 bp, Prunus persica
  Intron number 1 from transcript ppa015228m (locus ppa01522 8m.g) derived from phytozome v7.0 (chr-ID scaffold_1; pos 5385333 to 5385944)
caggaattattgaattgaacagaagtattatccaggtgagttcttaagcaaacataagttgttcatgatattattgattgtcttttatgattctggtattgcaaattttgtttttccaaatgctgtatgaagaactgttaattgatttctatctgcaaatcattcgagttattgttcacataaggagaggtttttaatgttgagtttacaatctataccaatgaaagcaatttaagatgacagctcgtttaatcatcacagattgatgtatttgcatgaatagcattagtttgcgttcttatttgtgtgcaaaagaatcttctttgaatctctgttttcacattaattattagaatttgtaaaacatgctatatggtgttccctctcaatcatagtacagttccttttttcaattaatcagtgaatgggatgggatagtgccgttggctactacgcttctaaacaacctactttgatacttcacatgcttgtgtttattttattttactgtatattttgtagcacctatactttttgtactttgtgtggtagaaatgttttttggtgcacaatttgattttctgttccaggcagggggtgctccaacacaaa

SEQ ID NO: 68701 - DNA, 581 bp, Prunus persica
  Intron number 1 from transcript ppa001049m (locus ppa00104 9m.g) derived from phytozome v7.0 (chr-ID scaffold_1; pos 34996314 to 34996894)
aagcccccttcgagattctctcacttcgctattgggtacgtttttctaatagaaatatttctagggttaatcattttcccgcatttacgacttaatctgagccaattggagtggattaggttttctgcaaactttgaatattgttcgttgtgtttatatggaatggtaatttgcatttcgtttcttggatcattttctaaccatagggcgatgataatggtgtgaggattatctttaaaaggtttgatagctgaactatggattgctttgtattgcttacggtgccattttcttaacaatttcatgttgaatcattgtgccagttatgttaggcgggtgcttcttgttagttcggtaccaaaaaatttgtgagccgtaagaatagtgcattggttcaaggataattattggtttcattttgcaattacaattactttccaaccttatctgaatcaagttccttcggttttatttttcttctttgcgtcttaagtttgaatttggtgcggtatagttctttaatattgtcaatttcgatgaaattagcttcttaacaaatttttataacatgcagagccaga

SEQ ID NO: 68702 - DNA, 957 bp, Prunus persica
  Intron number 3 from transcript ppa009627m (locus ppa00962 7m.g) derived from phytozome v7.0 (chr-ID scaffold_7; pos 18550256 to 18551212 reverse strand)
tagttttgccgattgtccatactggatttgaacaggtaatttactctacttaggattcttcccctttatctggacttatgtttcgatcaattccatatatttcttttaagattttgactacattgctataagatgttagtgaactgctaagatggcaacctacccctccccgctctccccactgaaaatgtttctgtgacatgatttccatacagtgcatttgtacaacagtatcacaagtcagatttaatggtttttttcattctctgtgaaaagtatgacgtgaacctgtgaatcactttgcatccattaaacacaatggttgttgtttgatttcagatttccatttccttgttatttatctttttatgtcataaatgataaacatatgtttctttgcatccaacatactcttgtcatataatatagtcaggtcctgatgatttgacttagcacttcagccatgacattgtgatctgacatccaaatggctaactgtctagttctgtgaatgattgctacaccgaagtgttagcgttacattttatgggatagtagaatttccttgtggctggaattggaccttattgatgtggcagttaaaatgtttctattatgcatttaatatgtcataaactttgcactactgaattatggttttccaaggatgttgaggttatcaaaggcgcagctgatattgcaaacttcttttatgctatgtaatgattttatccaatttttggtatgcatgtccagctctttgaagtcctggacaatgatgtaaataaacagcggcattcatgtggcagaactttatccatctatgtaaaaaggaagaatatatatttagccttaaatttatgcttcatatttattagaatctgatgatggatcttctatggcccatttgttcaattttgctcatttcacattggtcactgtttgtatttgcaggtg

SEQ ID NO: 68703 - DNA, 455 bp, Prunus persica
  Intron number 1 from transcript ppa000891m (locus ppa00089 1m.g) derived from phytozome v7.0 (chr-ID scaffold_6; pos 10395741 to 10396195 reverse strand)
ggtaatctctttcctaccacttcttttatttacagtctctttctaaagttaaaatactgaaaatggacttttcagtctttgtgtttttttttttgcaaactcactcctaaaactaaatataattccttccgacgggttactatcagggtgcgttaattataatatttctgaattttccaataaatgtttttaggatagataactaatccatgaaaatcaaaatggaacacaaatttacaattccgtaagaatgtttttcagaaaccccaacctcattttaagcaaatcaaacaaatctgaaagttgggtttttcaaatgagaagatgtgcaaaaattgatggaaaaatcaacttagttgacggattgtaccattgcaaggattttttaattcttttttcatttggtttgcaacttttcagacacgagtcaaagtttatcaacaagattgttcaag

SEQ ID NO: 68704 - DNA, 609 bp, Prunus persica
  Intron number 3 from transcript ppa004973m (locus ppa00497 3m.g) derived from phytozome v7.0 (chr-ID scaffold_5; pos 3041409 to 3042017 reverse strand)
tgggacaccatcgccggcggcgattctgaggttatcatcagtattttgttttccttttagcatttgggttttattctgaggttacaaatatggtggggttgtgcgattttgtgagttgctctcgactgttaaatgattgagttgaattggtcttcgtttgctttgttttaacaattatgatgtatacatagtttttaaaaatagttgtttgatttgtttttgctgattttatctttgaatttgcaagccgatgaagtgttatatagattgaagagcttaatttctgatatctacaacaacttttgtctagaagtatttaattgatgtagtttttctgtcatggttttgcaagaataatggtttatagtgaaaaatgtcttggttcttgttatcccattttcttctaaaagattttacatttaaattgtgccaactgcaattttgtcagcgagaatctgtttgtttgatgatgttcagaatctataggtgttaaataaccgtgcctgattgatttttgttttccataactacaatgtattgtcttactgatattcacttaagcttacttttgtaacttactaattgttttctcctgttcaattttatagg

SEQ ID NO: 68705 - DNA, 422 bp, Prunus persica
  Intron number 3 from transcript ppa005548m (locus ppa00554 8m.g) derived from phytozome v7.0 (chr-ID scaffold_3; pos 1259263 to 1259684 reverse strand)
ttgctagtgaggtgatgtgcgttttttttgctttttccagatgaactgaccagtgccaatgctagttgtgaatagttcttttttgcattcattagctgtatcgcaatggttgtgtcattcatttatttgtgtcaatttggttcttcttaggtcttactatatgagactgaggtacatactttcatgttcctaaacagaaaaggttgccattctctcagtttatgaagatcctaaaagataatttctggtcatcttttattgaagatagaagttatatttctcttttcataagagatctattatgtttgcattttgatgcttatttttctagtttttggtcttgttgaatccttttatgaagttactaatttgaaaaaaaatttctctttggatgtaggctctccaacctcagtccctcagat

SEQ ID NO: 68706 - DNA, 528 bp, Prunus persica
  Intron number 2 from transcript ppa019987m (locus ppa01998 7m.g) derived from phytozome v7.0 (chr-ID scaffold_1; pos 38321800 to 38322327 reverse strand)
tttgccaggtactataatgagatgtgatttagttttctgttttatttgtatttatttcatagatttgctgtatatatattccttgtctctcaaagacttgattcttgcttagaataggaaatcctttgtgtagacaccaagcaaagcattgtgtataattatcacacgattgttcaatgaaaatcattgagaatattcaaaacctttcatggtatcaagagcctgagactcacagtcttcgatcctcaatcttcttgttccctttttttttccagcacccatggcttcttcctcctctattgattttcctagcattcatcatgttatctccattagtctcgagggtgataattatccactcgagacgaatggagataacatggtgggactaatctgcatagatgattatgtaaatgctggtttatagcgtcttcatctatgcatgttgcaggaactgatctcacattctcttgtttttttctttggattctagattggaaaaagacaggaactatagctacttctggg

SEQ ID NO: 68707 - DNA, 360 bp, Prunus persica
  Intron number 1 from transcript ppa019987m (locus ppa01998 7m.g) derived from phytozome v7.0 (chr-ID scaffold_1; pos 38322665 to 38323024 reverse strand)
cgtttcattatcactccctttcattctcattacaggtgagagactctctctctctctctctctctcaattcaattcaagtttcaaaattttcttgttggttttgcatgtcaatgtctgtgttcaaatgggttgatatgatttgatttgtacaatgcatgagatcatgaaaaactagaatttttatggcccagtttggttcttcttttatgatgttttcaatcgtccatggggtttttatgctgtgtcttgatgggttttatgtatcattttgagtgtgacattttgtttttgaaatccttgcattaataaagtttacattttgggtcttaattttgcagactttggcagtcatttctggt

SEQ ID NO: 68708 - DNA, 845 bp, Prunus persica
  Intron number 2 from transcript ppa002222m (locus ppa00222 2m.g) derived from phytozome v7.0 (chr-ID scaffold_4; pos 16628891 to 16629735)
ggaaacagtttgccgctgaagaaatttcagctcaggtataattttgtggggtatttgtgtttgggttttgtttgcttctgtgtttttggtgattgtttgttcaaattttacttatttgggtctctttaggtattggaaaaagtaagagaatagaaatggggtgaatttttggagtaatctgttgccttatgctgttttgatttatagaaaataagattttgaagtcatttcttggtagtcaatgattttggtgatgggttttgtggaatttgtatatgggtttgtttgtatgctgggaaaatgaaagaaaaacatgaaatttactggtaattttgttggatggtaatgtatggacagtgtataacttgcattgaatgagctggtgagtaaaactaggcacaactgagactggatggattgctgaattgtgatgcttcattgcaatgctgggaaattgcgtgttcttggcacatctgggttgtaagtttgattttttttcaaatggaaacctctggcttggaattatgagcggcaaatcttcttattttcatttgcccaccctgagccagactaaataagtgggcggtagataactgggtataatgtgggtagctagttaagttctaaggacgtttgtacttgtcttttaacgtgaatttgtgaaacattaaaacatttgggcattacttgttttccataaaaaaatgtcgtttcatttaccttctgaagctatttgcatgattctgttaatagaatttgatttgttttcaaaaccagtgtaatactttgattgtcttatttttaattccttttatcactggtttaggttttgaggaagcttgtgg

SEQ ID NO: 68709 - DNA, 503 bp, Prunus persica
  Intron number 5 from transcript ppa026780m (locus ppa02678 0m.g) derived from phytozome v7.0 (chr-ID scaffold_7; pos 726576 to 727078)
agaggttctatttgagcggccgattacaaaaaccagtatgccttcttcattgattctcattctttttgtctttatgttcgtggaagattaatcttcagcttcgtatttgtcctcctttcattttgattttagttaacttcctgtttagttacattattttctaactagcaccacccttcacatagcatgaagatggtctaagttttagaactttcaatcatattcaatgataatcttagtgatgtaattcttggaaaaaaaaaaaaaaaaaaacccccctctgctagtttgattaacaaatttttaccttattgaaatattttgtagcacacggaaattgcctgaaactaatgaaaattaaaatacatgttcttatgctttgtcttaaaaataatgccattctgttgaagacccaagactcggattgtctcatgtagttcatgttatgatacattatctttatattcaacatgagagttttcaatgtttttttctacaggttc

SEQ ID NO: 68710 - DNA, 647 bp, Prunus persica
  Intron number 1 from transcript ppa008256m (locus ppa00825 6m.g) derived from phytozome v7.0 (chr-ID scaffold_3; pos 9331998 to 9332644 reverse strand)
accctgactcttccactcaagccactactgttcaggtttcaatttcattagtcttttctttttttctgagctgattgatttcgtatctgggtttgtttcgtttagtgtttcttatgtttgtcatttgattggatggtttggttgggtaatttgattgtaaatattgatgtttgggtggttggagaataatgggttattcaaatgtatggattttgatatgatattagatttttttacatgtatgttgatttagcttagtaatctattagatgggtttttgtttgttcgtcaatttggcgtctttcttgttacttagacattttggtttggttactgaagaactgaaaggaaagaaagaaaaggaggaatttgaacattgcgttactggctatcgtgattcgtcgtatgatatctaaaccaagcccctttcatcgttttctggctgaatttggcttaacaaggaaaaaagaaagcacgataataattcatgttcctttccttgttttttcctagcaatgaaaacatagtcttggtgaatgctcatgtggtctttttctttgtgaatggtttatgtggttttgctgtgtgatcaagcgtgtttggtgtaatcaggaaaagccttctgggtttcttagcttgaatagagt

SEQ ID NO: 68711 - DNA, 991 bp, Prunus persica
  Intron number 1 from transcript ppa014358m (locus ppa01435 8m.g) derived from phytozome v7.0 (chr-ID scaffold_6; pos 24324614 to 24325604)
aggttctggttaatagccttgccaacaggtacctctcgatcctgtaatcctatttgattagcttttgatttgttgaaagcttctttctctggccacacggacatcactctgttcccgattggctcgttcccttgaagcaaaattatctcaaagcgtcaatcttgtttcagctgtggcgcgaaaattttatgcgctatggaaatttagatgcttgaggaaatttttccccgcaaaagaacatttttttatggttgtattatgattttatatgatcttgtatatgtgatttgttccattttgtcgctgctaatgagtattgagctagtgaataaagcttcttaataagccattaaattcctgattggtatgctcccagaagcgaaacaaattcaaaacctctaatttggagcgttgagaatattttgccacagttctgggtgttgttttagtttaagattctatattttactgttcttttcttgttgttttactttctggtttgatgcattctatgtgggcatgctatttacaatactggtgatgcatactggtttgaatcctgaagcattctaagtaaagcttttttttgtggccttgaggaatattcgctaccacaatggatttgcttattggttgtgaaatatttgtagttatgtgagataaatttcattcttttttttgcatgtatgtgtgcccccttgtaagagaaatgttgtcacttagacctgtaatcagtcctgctcagcaccggattttctcctgcgtcgtcattctgtttatagtgttatgcttatgatgactctgtgtaggcttgtaatgattgtggagatgactgcacaaactaaaaaaccaaagatattgggcctttttctttcttgaaaattatgttctgcattccttgagctatgcttgtaatggaactgatctcttacatgaaatttgtctggtcttttcagccgtgcattccagaggtttgctgtgaggacgtcaa

SEQ ID NO: 68712 - DNA, 633 bp, Prunus persica
  Intron number 1 from transcript ppa000032m (locus ppa00003 2m.g) derived from phytozome v7.0 (chr-ID scaffold_3; pos 5700408 to 5701040)
tcaggaagatcattaggttagttttcttctgtttaatttttgatgcatatagttttccttatcgttttggatttgaaagatctttaggttatttttggataattggatttactttgtgtttttgtgcttattggacaaagaagtgactagacaatctatacgaagaagaatgaagaataggtttgtgttagtgtttcctagtcgaaattgctcacgaagcctgtaaatggggttattgaagaggctaggttgctttaggtgtttttgattcattgttattgtcgaggggttaaatattgcaggagaaactttttgtagtgtcgatggaacactaaaacgagcagtagctaaatggtttttttggtggaatgtgcaagattttcatctggacaattcctcaactagaaattagggatttcaattcgagtatgattttcttatgctttatcactttttatccagatgatatatgttgtttcgtgctttgaatctttaacttatattccatattttgtttcaagtgtggccttcgcttggtttcatgtaatgaatgtgcttgtaatcatgaaattagtacagtacataggtctcacctgcatgataattaagtttgtgtttatgttgacagagacc

SEQ ID NO: 68713 - DNA, 739 bp, Prunus persica
  Intron number 1 from transcript ppa022082m (locus ppa02208 2m.g) derived from phytozome v7.0 (chr-ID scaffold_2; pos 10450967 to 10451705)
tttggtgatggagtcaagcattacatatgagtaccacaaagataggcagactctctctgattacatgattcgtcataataaagttcaatctccacatgtgcatcagagtctccgaaatgatttgatcaaccacctttggaggagctttggagtggtgaatgtggtcaacaattgtttcaatcctcattttgtgtatttttttaatgttgtgtgtttacttttggaataaaattaaatttatgaaatttcaatttttttaaggtcaaattgttcaaaaaaataaattatgatgttatttaaaaagattaaatgaagaaaagttatccataaaaaaaaaaaaaattagacttaaacaatttaattaagttgcggacctaaaatttgagtccgtagggttgggagaaaaaacaatttgagtccgggcaaaacccaaatagtcactctttgaagaggaaaaatttaggtttatagcccctcatgggtcggagaaggcctaagatgacctttcggtcttcattttgtatgtttcatgttctctcaaaacttaaaggagtgtgtttttgttctcaaacaagtctctcgagctgtcctttctagtttcttccgtactacccaaatgacagcctacgtttttgtttttttataaataaaatatttatatattaaaagaaaaaacataatttccttttgttgttggctggtaggtcttgctcctgaaattcctgaggatctataccat

SEQ ID NO: 68714 - DNA, 696 bp, Prunus persica
  Intron number 1 from transcript ppa004596m (locus ppa00459 6m.g) derived from phytozome v7.0 (chr-ID scaffold_1; pos 24309655 to 24310350)
ctagcccttctaagtgttccagtgaagtcaaagaggttagtccttgcaaaatttcacgtctttgattctttggtgtttaaagttttgcaattgatgggtttttcatattttttcgtaatctttaatgggtctttatccaattgctctgtttttctcgccttgtggtttgtttagctgctcagaaatcgtggggaaatgagaatttgggtaaatgggtattggataaagatggctattgttctgtttgttgtttagcgaccaaagtgcgcgtagtgttatagtttaggcggttcgtgggtttccattggatgccttcggttcatgatttcgttcgggttgttccaaatcttgcgttattgcttctcctcgatgagagagagagagagagtgagtgacagagccttttagacctatgaaaaaaacagcaatttttaaccagtttcgtttcctctattaaagttctctagcttccctaatcctgcatggcattcttttggatttaggcagtgagcttcttcatggtggattaaatgttatgggtatctctttgttaaaattctgcaattgttttttcttctatggatgtactttgatggtttcgtttccttttcacaagtttctagaattcactgaggaaattgagatgtgattttaattgcagggggacccccttcgttgcctaggagaatcaatctc

SEQ ID NO: 68715 - DNA, 1008 bp, Prunus persica
  Intron number 1 from transcript ppa002846m (locus ppa00284 6m.g) derived from phytozome v7.0 (chr-ID scaffold_1; pos 28102625 to 28103632 reverse strand)
gctagggttttccccctgttttttttcctggaaaggtgaggttcagtcgtccatttttacatttgattttctgcatatttgtccaattttcagccttcgattatgatttttgaatttctgtgtcttcgttatgtttacgcgtcaatatatggattcctgataaatgattttattcaataggctccctgagattttgattgaatttagggtttggttgttatgcaattcccttcggtaagcgattatgctttgtttcatttaaaatagttgaaatttgatttctttctttagggtttcaagtaagagttgcgtaaactttattgggtcgttgtttcaattgcgtatacaggatttcattggtgttattcacctataatatttttgcttcgactgaaaacaagccctaacagatttttaggtgaagagtttttgtatttgcaagccactggtgtggcatttgtacgagtttaaagatgaatgtgtgctttgatgacctatttccatcataattacagacataaacagaaagacacattaaaagtttgtttgatgagaattggttgtagtaaactgctcctacaaggcgcaaccatttggatctttagatttcttaggagtaatgcttacctgatgaaacttacttgagatgaaaagcggtatctgcccatgaaagttttatctaagttcctgacaattattccttgtctttagctaatttctttcaactaagtagcatgcagggtatgcaaatattgattccgtttgaattctatatttatgaacatgtttaaatgagtctattgaattgtatacttataagcatgcttagatgagtcctatgaaattttcaactttgtgcaaaaggattccatttccatttattattatgcctttacagtacataatttttggattttgattgtcaatatttattttatcagctacgaaggccgaaatgtatgtgatgggaactcaaatttctctcatattttttggatgcagaagtag

SEQ ID NO: 68716 - DNA, 584 bp, Prunus persica
  Intron number 1 from transcript ppa026347m (locus ppa02634 7m.g) derived from phytozome v7.0 (chr-ID scaffold_7; pos 5646158 to 5646741)
gaggtgagcttaccattcacttatttgcatcttttagaaatcttactagattttgtgagcgtgtttatacatgtaagcgcgcgcactttcatacatgcaagaagtttcgagttagaattctagcattaaagaaaactgtgaacatatatcttctgccctgcaatttaatgattagaagctttcaagttttagattttattttttttttgaagattatgcgtaccaaaaaatagtcaaatttaaaatagtttcactactatttgattattgtcattagtatttcgttcttgactgagaaactgtaattgtctacaaattttgaagtacaaaacggtttccaagttggcctgttttttgtaacaatcatctttgaagaatgacctaaaatactgacgattacgatcattaaactacattgtggggcagccatatggaggaatgagaacatcctcacttgaaaattttcctacatctatattatccttacatttacatacatgtaatcaactagtgaaaccagatagtaattgaactttatgagtaatgaagggcctggctgttcatctgttggagctggagccttc

SEQ ID NO: 68717 - DNA, 670 bp, Prunus persica
  Intron number 2 from transcript ppa000426m (locus ppa00042 6m.g) derived from phytozome v7.0 (chr-ID scaffold_1; pos 23811041 to 23811710 reverse strand)
actggtgaattatactttttcttttttctgatttcttaagttatcgttgctgtattactaattttatgatgtgctttgcattctgaagaaccaaaaacatgattaaattgcatctaggaacaattttcatgtgttttacaatttgaaagggtatgtgttttaaattttaaaatcatgattcaccaaaaccaaggttgtaagacaagtgtcttgcccgtgaaactgggaattgttatgttacgtagaccacaataatttacttttttggatgacaaagaaagcagaagtttttatgttttttttggatgacaaacaattttaaataacagtatgcactcctcacatgcgagataatagaggagtgtgggaagtgattttctgagtgccaaaatcatctctaagagggtttttctatttaatgtatattttgatttatctgagaatttaaagcttttctgtccaaaagctgcaaaatgtcattgcctgaaattgtccatttattcacagagcaaaaactgagcggtcattatgttatgagaaatgcattgcattttgttcttttcatgatacttttcagtgtccgccctgtttgtccctttttattgatggaatgatctggtgtttatatgtcaaaggttattaacgcctcccgacacccctctttttcctt

SEQ ID NO: 68718 - DNA, 627 bp, Prunus persica
  Intron number 1 from transcript ppa012165m (locus ppa01216 5m.g) derived from phytozome v7.0 (chr-ID scaffold_6; pos 26453802 to 26454428)
ttcaaaaagtaagctttgtacacgagcgcgcacacgcatataaatgttttcgtcgatattattgtgtatgtgggtgtgtatttccaagtatatgtcttttgtttgtttactttgttgatatttgagacatatgattcctgggtttagttcgatgaaaatacaatcagattgttttaatttggtattgttaattatgtttttatgtgggttttggttttcgatttatgccttgaatttcattgtattttggtttgatgcgagtatgcgtttgaatgatgccgttacttctttgtgctttaagcaaccgtgaaatggttgtatatggtttcttaagcttcagctttctcatcaaagttgatttttttttttgctgtatatgagatattgttatatagtgaatcttgaaagtccacttattttgaggttaattatttgaagaggatggtcagggttctcattaatttgtcttctttgtgctagctgtttgtaattgcaaagtcttcgctgttaagggaaatattttgttatatgattgcatatatacatcagcaaaaacattcctccattacccataatatgtgctatgttgtagattttcctctgaagaggtgtctgcacaaaaccaag

SEQ ID NO: 68719 - DNA, 671 bp, Prunus persica
  Intron number 1 from transcript ppa007524m (locus ppa00751 1m.g) derived from phytozome v7.0 (chr-ID scaffold_2; pos 26229219 to 26229889 reverse strand)
aatcaggacaaggtccttgttgagagctggtaaccttttttcttcttcctcatctcaatttaacaatcagttatcaatgtattgttaatggtttgatcaaattttcaatgttactaactgtgagctgtgacttgattgctttcctagtttgttcatctaggccctccttagccttattcgcttaatcattatgctggctgggggataagccaaattattttatggggacttgattagccgagaaagaaaaaaagaaagaaaaaggcagaagatgttgttgaggccctgccaaaccttttttgactattgtgggtcattttagtatagagagacgatacttgtttcatactcaaacaatattcattatatacaaacaaaatctctatgagtcatgactactagtggtcttttgaggatcaccattcaaaatctctatgagttgggaagtggggaccaccacttcacctaccgcaacatagttcattaaacgacaagccgttttctccatctttataaattatatgatctatgcttttggctatgtttctcagtttctgtctatgaatattgttgagcgacacaaatgagttggatgtaggttacattttactatttttccattttggacttgtgtaggtatcacttgaaagacgcagttcttgaaggtggca

SEQ ID NO: 68720 - DNA, 638 bp, Prunus persica
  Intron number 2 from transcript ppa016019m (locus ppa01601 9m.g) derived from phytozome v7.0 (chr-ID scaffold_4; pos 2266465 to 2267102 reverse strand)
ataaggtaggtacatatttattgttgcccattgtgttttactgcatttacccaaacaaatgaatgtcagtatttcatattctcggaaattgaaatcacaagttcattctgatatcttgtagctgtacaatgtactggtgttatattcataggaagtagggagattgaatttctagttattcccgtttgttattgacccttatgttgttactcttcctatacggcattgcattattatgaaacctgtgataccaatttccttgtaaggtacatctcagacattcatccggcaatgctagtagtgtagtatggaagccaaactagtgaacttacattcaactttcctctaatcttttgtttctgcttcttctggcttgttttgtaatagctctcttgatgtctgtttcagaacttagataattagatgaaacaaaggcttttttttctatttttctggggagtttgatgattttgcctagttgtcagactatatgagatcaaattgttgtaacttgtatcacttcggattttcttgtggatttattttttctaattttatatatgaactgaattatttaatggttcaaattctcgtctattacagttaatattgaacaaggttctcttgctgggctcaag

SEQ ID NO: 68721 - DNA, 643 bp, Prunus persica
  Intron number 1 from transcript ppa011624m (locus ppa01162 4m.g) derived from phytozome v7.0 (chr-ID scaffold_2; pos 17259230 to 17259872 reverse strand)
ttgagcaggtatgtctgaattgcctgtcctatatttgttttctcagctaggaaatctgatttgaggtagttttctgaattatgaatacctcttatgtctgtatgtatttttgttttcagttgaatatgcttgaatgattgttttgtaactgggatcaatatgtgagttagcttctcagtagcttatttgggtaggctggtttgtgtttcatgattttcatttgttttgatggcttgttatgttcttgttttgatatgaactctgctgtagttgagagaatcaactctgctatatgttgcaatgtactagttttccctagtgtgttgacaatacaaattactgaaaagaaaggataaataaaaaatggcgtggccttgaacaatagctttgatatttgattgttctatttgaatcatacaaagaactcctacgtcttcatggtttttagttttgataacccaagagactgaattggtttccttcatgcccttttgcttttgtggtcactgctactgatgtcattccaccaaaacttgagagtttttcgtgttgtcattgtaacttaaggtttgagcaatggattctaaggtttcattgtttgctggcagccagagcatcaggccagtggccttgaacaagttgt

SEQ ID NO: 68722 - DNA, 836 bp, Prunus persica
  Intron number 2 from transcript ppa005018m (locus ppa00501 8m.g) derived from phytozome v7.0 (chr-ID scaffold_1; pos 33530388 to 33531223)
ggtcggagagaccgatcagatctcagaggccgccggttcgttttttttaaattccccttttctttcctgttactaattcttaaggtaaactttggaaaaattaaaggagagagaaattttttaaaggaagttaagatgggcaaaattactcttatttatttttaaattttttaagaaattttttatattttcatgtctttagtttgaaaattgaaagatttgtatgtctttataaaaaaaaattttggcttttttcaaaagggaaatttttttttttatggataaaacttaaatttattaaattgttatcacattgacgtcacgtgcaagaaaaataagtttggtttttgtacgtatccattaaagaaggctaattaataattaatagaagctggccaacacatggcaattccttattaaaacaatcccactgaaaaacaaagaaatctttttttatttaaagacttagatttgtggtattaattaattaatcatatcattcacaagtttggccaaatctttctttccttctttccttctttctttaatcaaaagattattactttctttgtttctagaattgttcattaatttgctgaaaatgggcttgtctcaaggccatcgacgcctataagtcttcccagccccaaagccaacttgtttgcccaaaaatggaagtcactttttctctgccttttaaaattttctccttgtcggaagattgccctgtagtttttttcttctctgttttcgtaacttcccatttgtgagttggtacttctgtaaagtttgacaagtattggggtctttatggtgcaggaaagtttgctctgtgg

SEQ ID NO: 68723 - DNA, 642 bp, Prunus persica
  Intron number 2 from transcript ppb007460m (locus ppb00746 0m.g) derived from phytozome v7.0 (chr-ID scaffold_7; pos 22216236 to 22216877)
atcacaattggattatcttcgccagtgtttgccaggtaacttgctctccaataagttaaattttcatttccttaagttagcatcggtattgttttttttttcatatggctgaggaacggggggtttagccctgcgctttaatgcagtgtttaaaaaatgaccagatgaccgaacattttactgctggctttcttgaatgcatgcttcaattgattgtttcttctggagagtggttcataaggcctaaaggtcatgtttctttttgcttaattaggaaaaggattgcaatttttttttttgggtgaagcttcgccttatttcacatttatataatgacctctttcttgacagtttgacaagagagcgttattatttatgtattctatgcacacacataacggtgtcagccagtttgtttacttataacttaaccatgcataaaatgaaaaatgctcgtcattgtttgttctatattgtgttgttcatgttctcacaaacaagattatttcagtgtttcatactcatccattttcaagaacggtttgctggcatccatttgtcattatccgatctctcctcatcgttatcctaagcctgaattttccacttctgattggacttttgaatcttattcgataggtt

SEQ ID NO: 68724 - DNA, 474 bp, Prunus persica
  Intron number 4 from transcript ppa026505m (locus ppa02650 5m.g) derived from phytozome v7.0 (chr-ID scaffold_2; pos 17883880 to 17884353)
tttgcaattacagttgtacatatcacaactaccatgtcagttcttgttcatatccaagaaaagagtccttttttcttcggtttttgccctagttagatctttatatctatatcaggacaaaccaatactgcgattatacttattcttctttcttgcaggtggggttgcatctccgagttcactgttgtctcccccaaaaaaatctcaccaacagaacgtggttcgtctttggacgagcttaatgtttcaataaatgaagaggctctgccaaatactaatggtaatgggattttatacttgtcctcttctttgttctatatttgctaaaaatttatgtttccatttttcaccataatgtggtgggttgaatatttttctagtgaatgttggcagcttctttttgagaaaagaatcattacttttgacgtgagatttgagtcatgtagcatctgtatgttaccatattttcaggtg

SEQ ID NO: 68725 - DNA, 763 bp, Prunus persica
  Intron number 1 from transcript ppa008437m (locus ppa00843 7m.g) derived from phytozome v7.0 (chr-ID scaffold_7; pos 19784309 to 19785071 reverse strand)
ttgcaccacttgaacgtatcaagattttgtttcaggtacaattgtgttaaattctccttcaaaatatggacttagattgattctttactttttttggtgtgaaaggggctaaagttgactcttcattttgggcactgtaaagattggtattacatttggcttcttgggtgtttgagtttctgggatttattcagtgggtagatttcatctaagatgactgcttttcactgaactggtgcaaatttttatggattgtgaaattggttctggcgttgggtgtttgctcgtatcagattgaataatactgtgatcattagaagttcaatgggttactttatttgattcgatttttcgatactttgttctccatggctttgtttttatagaggcagtcatggggtcaatagtatacaaacagaatttcaggagttccaagcaagaaaatccgagttaactttccttccccgacccaaaaaggaaaaacaaaagaagagaacttgtaaggttttttgagagagagagagagataaatagcttatttaacacatgtcttgattttgtgtgtggttttgctgttttttcttcttccttgagtgggaaactggaggttaagatattccttcatgtttcccatggcgattagaaacaaattattaactttaaactggatttaccattaagcagattatccttgaagattgaaataatttgtttgttgtcttttgcagaccagaagagcagagtatcaaagcatagggctgtt

SEQ ID NO: 68726 - DNA, 518 bp, Prunus persica
  Intron number 1 from transcript ppa003097m (locus ppa00309 7m.g) derived from phytozome v7.0 (chr-ID scaffold_6; pos 26099896 to 26100413)
ttgaatttgaaccacatatctgtgggttctcgtaggtaaagcttgtgtttttggtttgttgagttttatatcattgtttgctaagaaagtgaaggaaatattattggcgctctgttgagtctagtgctcttacgcattttaattggacttcaattcgtagtcagagttttaatcgagtttatgataagcgtgtgtaaggtttgtgacttatatgttcttttgattgctagctagaagtgcagaaagttcgaattttggattgttatatattactcggacttttacttgatggttctttttagtgttgtatataagcacccttgtaagtgttaagctctaaaaattttaagcaatggcaaaattgttattaaaaagaaaacatcttaaaaccttgaattctcagttacgagttggaggaaagtgaaatgaaatctgaagccatggtcatgacttgacagaactgcggaaatgtgattgttaactccttgtcttttcctgttggttgggtaacagattca

SEQ ID NO: 68727 - DNA, 851 bp, Prunus persica
  Intron number 4 from transcript ppa002852m (locus ppa00285 2m.g) derived from phytozome v7.0 (chr-ID scaffold_1; pos 14281598 to 14282448)
agccaggctaataaaagaaattgataacatagaaggtatttccttggtgaaatagtgtttttgttggctgttttcttagatacttttcttagagttgattccagttataatttaattgacaatgtccactacttgaaaatttattttattttttcaatttgttttaatcaagatattatcgatctactgttgttaaaatttggtttattaagtctaacatgcattgagtttttcttgcatattttttttttattaaaaaaaattacaggcagaatttagaagtgtataaggtcagttaacaatgtgttgtgcgtctgtgtttgactgagggctgccctgtgtgggtgtggctctgagactgtattttatgtaaatctaccctaaaatatactccggaaatgtttatagtgaaatcacgttttctcttgtaaaatttggcttcttttatatgctttctggagttctcatgctttgtaatttatcctgcctgtctcatcactctgctttttgttgaacctcttagattatgataaaattttacaaagaaagggccatgttgatgatcatagctggattaaagatctaactttgagggtggtacagctctgttagctttaggctcccatgttatatatatttatatcccatccccaacataaactgcttgtatagaccaatgaaattcctggtgatatatatatataatgttaaatagtttgtggtaatggatgtaaaccaaagacatcacatgatgattttgtttgtgatccaagttcttccttttgaccaaatgcctctttggagtgtccaagtcaaactacttttttttcgtttctgtggcagagtcattt

SEQ ID NO: 68728 - DNA, 772 bp, Prunus persica
  Intron number 4 from transcript ppa009843m (locus ppa00984 3m.g) derived from phytozome v7.0 (chr-ID scaffold_7; pos 12853312 to 12854083)
ataaagttcaagcaatcttaaagggcatcaaacaggtattgatattgcgctctggttgcatcgttataaagctttgtaatggattctaaagttttatgggatttggtttttgatgcatctgggcatcaaacactttgttctatcatgtggtatgttcctttgctgcccaataatcaaatttaatttttgggtaaacatttgtgcatgactaccaattttaccttagaattgatgaccaatgaagaggggggcggggcggggggggggggggggggggggggaggtggtgaaaacaagttcctagaaaggaaaatatcatacctgtttctgattacgtgtgtaatgtatttagaaatgattggatggctgactgaacaagttcctctgaaaacaaatattattccttttttctgattatgtgggtatgtgtgatgtatttaagaaaggacaacagtgaaaacagtaatcttgcagacattctctatgccacagggaggcatgccttttgttaagaatgatgtctattccttttttttcattcagtttggatgttaatagtcctagcattggagttgtttcttggatagttcatgttcttgcagtttagacattaacgtaaaggatccctggtcacctaaatggctgttctaaaatttgtatagttgatattattttcaagtttcccccttatacgtaaatacttttagtgatgttagctcactcacttccactctcagagtcctaagaaggttaacttggttgctgcactggt

SEQ ID NO: 68729 - DNA, 451 bp, Prunus persica
  Intron number 1 from transcript ppa006411m (locus ppa00641 1m.g) derived from phytozome v7.0 (chr-ID scaffold_5; pos 14690158 to 14690608)
tattcaacatctacttcaatatttacaataaacaggtagtgtttgttaattcgattctgattattattattttgcggaaatgtgcgattgttgcggatttgttgaatttagtgtagttttggatgaatgttaattgttttgcaattcaaacggtgacaatttcttgttagaattgatttgtttttgttttgactctgttttatttggtggattttattcattattgaataaaaggatatgtaattttaaaaacatagtattttttttaaaggtgataaaaagagaatatgtaacagttaggatggaaatttatgccaatactttggccaaagcaagttaaaatatagtgaaagcgtagattttgtttggtaaatgcaatttatggagcatgattagcgaaaacaacttcttcacaggtcttgaaggtgttcccaaacccagtaactgtcac

SEQ ID NO: 68730 - DNA, 554 bp, Prunus persica
  Intron number 2 from transcript ppa017520m (locus ppa01752 0m.g) derived from phytozome v7.0 (chr-ID scaffold_7; pos 14653279 to 14653832 reverse strand)
ttattgctccattattagtaaacacactgagcaaggtaatatttcataacatggatgtctcattactttataaagttgttttgagttagtatatagtagaaaaggtcatacctagctaaaactaaaagtacattctagcattagccttataagatacaactttatgagattatcaaatggataaaaaaaaaatctcattcacaaggcaacaagctgacaattgttttatatttgggacttatcagttaaatctagttgtttttaggcaactggatcttgcaaggaattgcagaaagcagagaaggcgcatgcttttagagttggggattatattgcttcttgattgccttcttttcttgtcatttcactcagacagggaaaataaaaaataatttgctttggtaaatttggcctaatataattcattgtatacataaatgtatgtttgtttggctttgctatactttatctggtttaatgtctaaaatctatagtttgtactcttacatttgtgtatgtgttttataattgatgtcccatgtttgtgtagattg

SEQ ID NO: 68731 - DNA, 919 bp, Prunus persica
  Intron number 1 from transcript ppa010293m (locus ppa01029 3m.g) derived from phytozome v7.0 (chr-ID scaffold_8; pos 3400783 to 3401701 reverse strand)
ctccgccaagctcccccaactcctccactcgcgaggtctgtctgtctattactctctcaaccctcaacctctttgtcactttagaaaaatatcttcccaatttggaaatctatgaagtttggggatttaattagagtgagaaaaattgattgtgaatttgaacaaccataatgagtttatgtttatgtatctatgtaagtggaacttggctgatctcttaatttttcttcctgtttgtgtagttaataattgaatgctgaatttttcctaattagcttttggaggctctagagctatgagatgcttggagaaagatagagaaattagggactctgtataaaacatgggtataattacttgggtagctccctttgaggttgttatgatggtaaaagatcaccataaacaagaatggatgtcaatacccaaagctcattttgagctctaaataaactagaaatgatataatctttgagcaatggatctctccatactcccaagcttgaagtaccgtttgtgcaaatataatatgttctgagaaccgttaaagataataaattaaaaactaaaaccaaaatgttaacaaattatggtgcacagtaggttttgtatcaagtggttttgggcacttatgttagtcttttcctgcatctagtcctatttgcagtcattatttactgaaattctctctctctctctctctctctctctctctctctctctctctctctctctctctcatggacaagtcattcatgctggagacattagttactgcagagcactaccctgttggttctattcatgcaagagtatttgtttttattgagttatttttgtttattattggcaatgcatatagcttacaaaacaattcttgttcctgctgtactgctttgacccttgaatttcatcaggc

SEQ ID NO: 68732 - DNA, 824 bp, Prunus persica
  Intron number 1 from transcript ppa014091m (locus ppa01409 1m.g) derived from phytozome v7.0 (chr-ID scaffold_6; pos 19912299 to 19913122)
tgttcgccgcctcttcgatttccttgtccaattcggtacatccctttccaacccgtattctctcggttttggttttggtttttctgtttgtcctagtttgtttctagtcttttgctggtttgggtatgtctcaaaatcttgtctgtattgttgacttgcttcagttggtttcctggttcttgctgattttggtgctgacccaactgagatttggaccaatttctctaagttgctgatagttttagtgagtttgctgatttgggtgtggattttagacttggtatatgcctcccttgagggtcctagaccattaaatatttgtctaatttattttcattgcatattagcctgaaacttagcaccttagccaaaattccaccttgttctgccaaagatctggttctaatttatctactttaaatgggagtgcacatatatttggttgaatttcgtgacccgaaacaacgaatgtaggatagttaatcatcatcttgttcaagcaccaagctttctcttaactgaactcttcttgcagccctggtttgaatctttctataggtgcatagttggaatgactactttgcccagcttcagcgcaatccgttattcagtaataatttagtttgctggagtccttgcatctggtttcgaatctgatttttccttttaggatggtggtttgttttcatttgatctacttgttggacaaattggaaatttctcttcctttcgggatttaattaatgttacacactcttgggctaatttttgtttttcttgttattgaagaggctacaacaaagagcaaattggcatcactgaat

SEQ ID NO: 68733 - DNA, 623 bp, Prunus persica
  Intron number 1 from transcript ppa007014m (locus ppa00701 4m.g) derived from phytozome v7.0 (chr-ID scaffold_8; pos 17337713 to 17338335 reverse strand)
ttgaagatttttcttaagctaaccaaaacagtacggcaagtattatcatcatcagttcatcacccaccaactattttgctctttaattctatgatttgcatatgtcacgcttgattctttgtggctgaagagttgtctggtttggtgtgtgatttgtgttgcagttttgagtaataagttttgggttttgttgctcaactgcttttgcctattttgtgctggtttctgtatttggatttgttgtatgcagtttaaatctgtgaattatagtttttattttaaatgaaaactatgtttttatacttcccagaattagaataaagtcatggtctttgtttctggtttttcttttctgaaatctgatatgggttgtggcagattttggtgatttggattgtgatatgggtttgtggatagtcctgaaatggcaaagttgttatttaaatatgctttttggggagtttatgtttagggtacatacttgtagctggtggttcaacagattaactgggctgtttgatctttaattttagctcaacaaaataattgagaagtaagttgagaattttctggtcattttctactcaggtgtccatcaaagtatctgaagaaacaacccaaaa

SEQ ID NO: 68734 - DNA, 810 bp, Prunus persica
  Intron number 3 from transcript ppa024690m (locus ppa02469 0m.g) derived from phytozome v7.0 (chr-ID scaffold_1; pos 43001902 to 43002711)
ctagtcggtattctcgtattttgatccttaactttatcaagtcttttattttgttttgtttgtatgattagttaatgatgtatgtattcatattcctgagtggttttcggaatatttgataatgcaggtaagcaaggtgctagattcaaatctgacaaattaaatgtagatgtgaaacatttaagtaatttatgtcttgcacgctaatactcatatggtgtcttgcccacttcactacttgtacacctccttcaataattgcacatcggttacatatttctttgagcatattcaaaactgtatgcccttctatccatatatatcttgtatatatttttgtctgaagtccttgccaaaatcttgcagattactaatctgtttcttatcatatatttatcataagatgtttcttgtcatttcacctaaaaattggtatgaagttatgcatcactttgtgattttagtccacttggttgtcgagacatgctaagtgttcatatggtgcatctgattcgaatcgccttctggtctgctggcttctcttcccgtttaagaataagcattgagggtgcctttgggggttaaatctcctcaaattggtacttatagaaaatgtttatagttttaaaggcagggatagtgatattaggggattcaaaagagcaagatggccaaaattggatatttggtgaaccctgcaataaatgttaaccaaaatgttttgtggagtcatctgttttagtcttgttcttgatggatggtttgtaaaatgcagtcaaagctttgccacttaagaggtgctaatcccga

SEQ ID NO: 68735 - DNA, 961 bp, Prunus persica
  Intron number 1 from transcript ppa021024m (locus ppa02102 4m.g) derived from phytozome v7.0 (chr-ID scaffold_5; pos 6071198 to 6072158 reverse strand)
cagttgtacatttaaaaattttctatttatagagtatagccgctcggttagagtattgaattttctatttgttgggtatagccgctctgctatattggtgaaatattctattctttaaagatatttccacattgcactaagaataaaaatatagatttattttcgggttagtttaataatgctctatagacatcttgaagacataaatcaattttctgcgtggtgatatgtatgttaattaattctttaaagacaaatatcataatgcgatgggtaaatatcaagataatttggacttatatgagaggatatatatatcgcaaaattatcgcctccagaaataaactttgtacttttgagtgtttgagtgcttgagtgtttttatattccaagtgctgcttctgcgaagcttttgttaagcactactgcccttctacttttatgtaagtttgctaaatattaatgttatcgttaatatcgtttttaatttcgttatattcttatccctgcttttggctttgtatgtttaaatttttgataattattctgtttattctctacatctctacactaccttccgcgcataaactaaagcaaaaaattgattaaaaatttgctcttaagaggcccagccagtacctggtatcaaagcctaaagtccctagaagagttgttagtttgaaggttttctgtcaagtttcctttactcactagtcatcgagttgtctagctgtcggataggctcgttggccattgctagaaaggtgtaaggcgttgaagtgacctaggcagggactagcaaccttgaattaggaggagaacataaggaaagcataaaacccagactattaaaattgcaagccttaggagaatcttgtctactcgttcttctggagatgcaggtgttagtagcagttctagccataaaaccctaagggtgaaaaactctcaagaaatatcc

SEQ ID NO: 68736 - DNA, 865 bp, Prunus persica
  Intron number 1 from transcript ppa012122m (locus ppa01212 2m.g) derived from phytozome v7.0 (chr-ID scaffold_7; pos 16495269 to 16496133)
tgttagattttccaggaattccattcaggtgcttaaaggactgaacttttttctgccctaacccgtattttgttttttgttacttttgtatgatttattattctaccacttgggttttggcatctgattggataattgtgtttgtaaacttgggaggtttattgggttttagctttttgagcaagatttgattttttttgtctccctgtaactgtttaagaaatttgttagtggcttcacttctccttttcttgttaatatgacttcatactttatttcttctttttatgtgatggacttgtcttaatttgaaaaggcattactattgtgaggatttcgttactgtttgatcactttgagatcattgttatggtgattaaagatgagattgtaatttgttggagaatatcatctttaatttcatgattttgagtataaagctgtcagtgaatggacaattgtattgccatttagcctgatagggcctcaaaagaaaaaagaaaagcaaagaagatgaattaaaggaccattcaccagtgaatattgaggtttcttgacttgtttttttttggttggtttgtactaaatttgattttcatttggttatattttacttcatgttccacaagaaaaaattggcctgcttggcatatcttctatagttctgtttagattgattcaccccttactttggtctacttgtgtgtggagattctatgtcattgtttttcgatgtcatagactctttgtctcacgatcttttttttgttttcaagctaccagtgtgattgttgttattagcacaaaaatataacccctttaggccctttaggataattgtttattttttttattttcaggagat

SEQ ID NO: 68737 - DNA, 708 bp, Prunus persica
  Intron number 2 from transcript ppa012122m (locus ppa01212 2m.g) derived from phytozome v7.0 (chr-ID scaffold_7; pos 16496208 to 16496915)
gaagcaatctgctggggaattacgtcttcataaaggttttccttctctctaatgatcatatcctttgatttatttgaagctcttactttttcaatattcttctagcttttgcatgcccttcatttctgattccagaaagagtttgttgattgtttaaagcaatatggatcagaccagttagatggtttctataatattgacagttgtattgctttttgggttgagtggtttttaaatgatgatatagaacatccttcttggtccttggttacgcaataagaattatataaagggttctcaggttggtggtactttgaagaaaatttagaaaataacagttttttgaaaatggattaaccccctggactgcttaatgtgtatctttttgtacatcaagttgatatataaagttgtgataagtttatgctgagtacagagtcattattcaattgaaatttttagcattcttgattgcatatttaaatgttggtgctacaataagtcattatccaaaaatgctataatttggttaaggaggcaggttttaaactgcttctcttgctgaattatttttactggtttttttggactatgcgtgcagttttattgtttcactaaatttgactatccattcattttttttaaaatttacttgttgtggcatctgatgcagatatatctgagctgaatctaccaaaatcttgtaac

SEQ ID NO: 68738 - DNA, 934 bp, Prunus persica
  Intron number 1 from transcript ppa019450m (locus ppa01945 0m.g) derived from phytozome v7.0 (chr-ID scaffold_6; pos 8635365 to 8636298 reverse strand)
acattctaggtacctatatatcagtatgaaatccttttctttcatttttaaattgtcagagagaaaatataaaaaaaaacctgaatgcaaaaagaatgtggcttgtctgccattgactgtaatggcccttgtcaatttctcctttttggctatacaacatcttcagagttatttacactcttacttcctgaggttttcgaatttttcacaaaactccctgaggtttcagaaattacacaaacactctttaggattttaaattgttttcacaaaactttttttcattgatttttcgcccaaatattaatgattttatacaaaaaatttctctaaatgacaaaattttcctttgagattagattgcatatgcattcattgaggttaattttttcatttgcataagtgtattttaaatgaaatcatcaattttggatgaacaatcaaagaaaagggattttgtgaaaacaaattgaaacctaaaggagtccttgcaaacaatacattgatatacaaaatagtgagcaaaatcgattccacattatgaaaacctaaaaataagaaactaaagacataaagaagattcctagaaccactgcatccactacgtttttgttttgtgattttatgtatggttgaggccggtttaggatggtcttaattgagtatcccttgtattttgctttatatgatgaattatgtctcttttaacaggcaaggtcttgagttcgaatcctagcatctgtgttgtgtgtgtgagtttaatatgctatcacccctttcaataggaaaggtcctcaaaaaataaaaattaataaaaataaaattaataataaaaaaggttgacattatttaattgaaactgtactggattctacagggcctggatggagtcgctattttgttggcccaagtcagttcctcttttgggaggaca

SEQ ID NO: 68739 - DNA, 592 bp, Prunus persica
  Intron number 1 from transcript ppa002279m (locus ppa00227 9m.g) derived from phytozome v7.0 (chr-ID scaffold_3; pos 17299036 to 17299627)
gtgcgtgccctctattacaatctggctaagggaaggtcagatctttgtttctgcaattcgttttctccatctttcttttatgggtttctgattatttataacaaacacatgttcttcttgttgtttcttttcttttttacttatcctgtattgggttgtgtttgattttcagtttgtcaccaatttcaatgttaattatacttattgagcatttccaagtatatttcttttttctttttcccatctagctatctgaaggagctaattgtttatgcattcgaattgtttttattattttatatatattgcttttggtttatatattgcaacaacaacataaagaatttatgatcaatttatatgattagcacattatacttttattagagctttagtgtgtatacaagcaagcatgagatttcactccatcttttggcatggattcttgcaagttcatgttgtgttgttgtacctcagattgaaattataacccattatgttatattcctgtattgtttccctgggcggtacataaactttgaagtcactttttagtttttccttctgtttctcaggccagcagctcttgtgt

SEQ ID NO: 68740 - DNA, 715 bp, Prunus persica
  Intron number 2 from transcript ppa016092m (locus ppa01609 2m.g) derived from phytozome v7.0 (chr-ID scaffold_1; pos 23121376 to 23122090)
ttgtagcttcaaggttatccaaagattttgagtctgtgcattctcaacatgcacagattagggagaaacttgagtacaatcatcgattgtctcgaaaaggatatgctggtttggaggatcaattggaggaaaccatgcctggggtagaaattgatcgatctaccttatggaagagagctagacaggacaaacatgttaacatcccggatccaaaggtggcagagaaaacaaaattaattgtaagcctactcactatgttttaaatttttattaaactgtgaataattcttattacgtcttatgttatattttgggtcgtgtgaatgatattaccacgtcgaaattttttaaaaaacgtcgttaaaggtctaaatcaggaatcactactctgttttctgtaattatagcataagatgtcggtggttcattttcgcatcgtttgtattaaattactacgtcgaaatgttttaaacaaggtcgttaaaggtgtgaatattgaatcatccctctgttatctgtaaataagacgtcggtggtttattcatttcgtcgttttaaaaaactaaccacgtcggtataactaccgtcgtgataaattataataacgtcgatttatatgttactgcgtcgtctgaaattatataatacgtcgtttgtatataaataaccgtcgtgtgttttttgttcttacttttttatatatctttgttttagg

SEQ ID NO: 68741 - DNA, 778 bp, Prunus persica
  Intron number 3 from transcript ppa011938m (locus ppa01193 8m.g) derived from phytozome v7.0 (chr-ID scaffold_5; pos 15545615 to 15546392 reverse strand)
gccaccaggtttgcttcccctttatctcttcacatatttctatatgtatgggtgagcaagtaagtatgttttagtatcttaagaatttggattgacctgtcaataagcagatgatcttgccctgtttaaataatctacaccaagtaatattctggttgtttggatcaaatacttatgctggtttacgagttccttaccctcagttactattataataagcttatgatgtcaattcatcatgtgccccatttttagattctcctcgttctacaatgccttcaacataaagcagattactctttcttgcacttttaggcaaaaaatgagaagacagtgggaaaaaagactaggaggaatactttttttttttttagcgcataagaataaataatacttgaaacatgtccagtaattcttgggaagagaccaataataatttgcattagttcatcagtttatttgatctagaaaaattccttttaagagcagcaaatgaaatttttgctcctgaaagactttgagtaaatcagtacctctatccaagagaatgattgctgctttgtaatgagtgtaagtagttctaaaatgctgttatttggaatgaggtaattagatgtggtaccgtaacagtgtttatgtttggcatatctcattcattttaaatttgatggtgacgagagaaatttatctcaaggatttgctttgtccttttatctgaccatatttcaggcagtgatcatgaaatcctaattggctttgatgttatgtaggttattcc

SEQ ID NO: 68742 - DNA, 704 bp, Prunus persica
  Intron number 2 from transcript ppa011938m (locus ppa01193 8m.g) derived from phytozome v7.0 (chr-ID scaffold_5; pos 15546516 to 15547219 reverse strand)
agcacatcatttgcactggaaatctttgtatcaaagtatgtttcttttcatgtttctgcccgttcttcattgattcccctcagttttccttactgggtctagcttaatttacatttcgaaagaatctttgagttagttttactgtgtttttctttgtttggtatcccagaaaataaaatcttacatataggaacggcattccctatccgggttcttgtcaaacttatgtgcatgttgctgtatagacttgtatcaagaataatttcaacaaactaatgacaatttgatacaactatgggagatggtgcatatccacccatgtattagtttattctgaattccatgaatttctacttagccaccgcttgattgggtaatgtctgcatgtaccttgttggaattgctagattcttggatagaacattcatttggttgatttatacagttggttggaatttattcatttgctagattcttgcacagactttggcagatattgcgaatatgtcatatatttgtgtcatcctatctgcctggtcttagacaaatctcaagttttgtaacagctcatgcaactgctaatgatttacctttaatttttgtagcagcactactatagaaatatgtttttcaattaacaaattaatttggctgtacattatgctacttctcagaaatttgttactaatgatttcaggaagttc

SEQ ID NO: 68743 - DNA, 721 bp, Prunus persica
  Intron number 1 from transcript ppa008212m (locus ppa00821 2m.g) derived from phytozome v7.0 (chr-ID scaffold_1; pos 37096872 to 37097592)
gtaatttgtaattattattttttcttaattttttttttttggaattttgaaaagaaaacatgtatagatgaatataacattggaatttatgagttatcaaggaactaaagtatgtcatttcaagcatacgtgctctccactctgcactcgaatttgaattccccttccgtagtttagattagattaaagtataaaatcgcttatataaaaataaagtatgtcatttcaaaattcttaaatattgcccaaatctccatatatcaaagaacactactaggattttagtataaccaatttctatttgggattttcaatgttgaaagagattttaaaattccaaatctcccctcccccattaattaaaaaacaaaagagcataaaatatgtaaacatttatctctattttgtcaaaagatcatatgttataaacaagagttcttttgttttttgtgttgaaatttaaggaaaagtttaaagaaaagaagagattgtgtttcccactatgtacccgagctcgaatcctccttccgtagtttagaactttagattaaaattattgtatcaagaaaaaaaaaatgtttaaaaagggggcaaaattgaaatttactcaaagaagaaggaagataaaagaaaagaaaaaaagggggccaaaaataggaccgggaaggaggagcaaacatacaaagggaaaatctgtcttcccggtttatctctggaaccc

SEQ ID NO: 68744 - DNA, 577 bp, Prunus persica
  Intron number 1 from transcript ppa019511m (locus ppa01951 1m.g) derived from phytozome v7.0 (chr-ID scaffold_2; pos 1116372 to 1116948)
ccctgcaccagcctcgtattgtcgctgatattcttgtaagtagtcttagctcttatgaatattgaaatgtcatatcttcttatataaatgcgaaaaaaaaaaaaacttaaatctactttcgtacaaagtgagttcaataggattttcatcttaaaattgtgttattcatccatattcggaaagatatgctaacgcaactgttcgtttgttattattatctgtgtaagcgtgttatatgtgttgattcttataaaataagaatagagtataatttgttgagtgcattttcaaccgtgacatggaagttctagccgcaatatgcatccattaatgaacaccatttgaaataccatttgttgagtgaattgcaccattgtagtttgattatcccaaccaacttttttcttaatctccattaggaattattcttgtaaaaagaaaagaaaaaacatatcaaccaaattggtcgacaatcaaataacctctatttgtgaggaattgctcaattaaaggggactgtatgttttttttaattttgtgagggtggcgtgctagtgggtccatctgttatcggcgg

SEQ ID NO: 68745 - DNA, 622 bp, Prunus persica
  Intron number 1 from transcript ppa024484m (locus ppa02448 4m.g) derived from phytozome v7.0 (chr-ID scaffold_8; pos 14200070 to 14200691 reverse strand)
tcgacgctctagtcaggtgcctttgatttttacttccattttctttttggttggagaatttagcttagcatttttgaatttctacagctgcaccgcacctagggtttgttctttttatgtggtgtgaaattgccttttatgtgtgctttgaccattcatttcttttactaattgagattttatggggttgccttcctgtttggttattgagaaaatgatggagaatgaaataaaaccaattatttggatcatagggttcagattggtttgttttctaagaaatgagttgcttttttgttttttggtatataacggggctaaagaaatgatattgcttgactaagctgtttggtgctattgctcttactggatgttaaggttcttcgcatctgagttctcaattaacaatgaaaaacgctgagggttcaatttaaggtttttcattgtgcaataatttatgtaaattggaatctctctagatcctggtggtcaattggctcattcgtaattggaattgttggtatatgggctttttaaatccaaatttcgtgcttcaactgaaatttgtggcaatgcttttatgtcagaggtaaccttgtcgtgaaaagacagtcactgcttc

SEQ ID NO: 68746 - DNA, 276 bp, Prunus persica
  Intron number 4 from transcript ppa000633m (locus ppa00063 3m.g) derived from phytozome v7.0 (chr-ID scaffold_3; pos 19936744 to 19937019 reverse strand)
ctgctttaaggaagtaagctatgttgttcttcatgtacagattctatgaaatgcaaccatcatatgtatgtgtgtgtgtgtactgtgaaactcacaattctattcagtttggttttggaaccttttcactgcattaaaagggtctctttacatacttttcccttgttctttgaattcatggagggctttttccttcttcttttttgtcttatctgtaaggaaaagtagtttatttatctaaatatctgttctttttatccagaccttttctagtaa

SEQ ID NO: 68747 - DNA, 985 bp, Prunus persica
  Intron number 1 from transcript ppa003147m (locus ppa00314 7m.g) derived from phytozome v7.0 (chr-ID scaffold_5; pos 12318950 to 12319934 reverse strand)
ggtgacactgatcccagagttggtgaaacttgcaggtctaaatttccctgctttttacttttattttcaattttgtgggttgccgtgcatgggtttttgtgtgtgcttataaggatcggtttaattgtttggagattgctgaaaagattagttcttttattttattttctcttgtagaagtaatattaatggtttttgtttgagatttctttggataatgggtcaaagatggaagatatatagtgcggtttaaaaaactcggtagagaattatggtagaatgcgtagccaaatttggagaatttgttaatagtttctgccagtgtttattatgcgggctgaaaatttgggccttgaaatgtagaacacaatcaaatttgaccaaatgtgaaggaaacaaagataaataagtatatttaaactggggcaaaatcgagaaattgaactgattggttgactgtaacttgaggttagcatattgttaagctcattgcgtaattgaccttggtgttcatgttcgttaaactcatttccaaattgataagttttgaaaacatttgcatgtaatgtgggttgatgccaatatgaactgaatttggcgggacagaataaggctttcttttcctgaaatgcttaagttgaaatgaaacacctgggatacatggcataaacattgacttgacacagtattgttttctaggtatctaccctggagaaagggatagattcttaaggggcttttatgaaatcagctaccagttaaagatgcaatgctatcaaccacatatcaattatagttgtgcaagtgttttgcttcccagagtgtgtcttgtgtctttttctttttgggttaatattttttttgaaatgaatgcttaaattcttcaactgaactaagctaattttagtgatggcttgaaataaagttagagcaattgaattttaagtgaaccggggttggatatgcagatatttagctgaggccc

SEQ ID NO: 68748 - DNA, 787 bp, Prunus persica
  Intron number 1 from transcript ppb023971m (locus ppb02397 1m.g) derived from phytozome v7.0 (chr-ID scaffold_6; pos 5190040 to 5190826 reverse strand)
cacaaaagaacgagcttgaagttcataagcaagtattatcgttttctcaacttagttaaaaccaattaacttatcttttgattgtttagtcatctcctttgggcaagaaaatgatcggtttagatgttcttggcaattatgatttaatatgagctaatgctgtgcctttttctctcagtatgaggaaactaccttggagaaaaggaaaatctatcatgaaaggaaactaccttattgtttccatcataaactttggctctgtttgtaactttgtatattattgagatgtatctctggcattaacttctgggttgcatgtgatacttgttcagagtcagtttaaacgtgacgtaggttgtaaattggtgtgctaacattggaattagaattttagaaggataagagagaaccaagagaataagatcaacgaaatagaacatttacattaagtttccttttacatttatctgctgccgaacttatttgatattccactagtataacaccaacatgtcagaaactcttgtcctatgtgcttctggtttgagttggtagagtacgttaaggatgtacaaagttgaccttgtattctagtttcaattttgtgcaaactcaaccttgattttctatattttcgaagtcagacatcatagtaatctttagattgtctggtcctcttctttgtctaatctagcgtccagaatctcattaggtgtgatattactggcaattattaattagtttaggctgatagtttttttttttttttttttggttctcttctaga

SEQ ID NO: 68749 - DNA, 696 bp, Prunus persica
  Intron number 2 from transcript ppa006388m (locus ppa00638 8m.g) derived from phytozome v7.0 (chr-ID scaffold_1; pos 29422626 to 29423321 reverse strand)
gaaattaaaaccgcctatagaaagcttgctctcaagtaagttcaattttttctcttcttcagaattcaccatcttcgccgttgatttgagatttcaatatttggtgtgcattagatgaattcctgctaggggttgatatatttttttttcaaaagaatctagctttatacctgacgattgtaaatcactagccacgaggttcactgttgagcttgattaggagcaagaatatagcaacacgtatattacaaaattgagttttcagagatgtgtggaaaatatgtattgttggcggcggtagtcttatattgcattggtttgttgtgaatataattaattcttgaatttctaattggttttgaggtcttaacattcttgtcttataagccattgtgctttgactaaatcttcaccattctagctgattgaatattatgcatttttcatagagaattgatcgtgccatgaaaattgggaattgagctgccttaatgtgttttaaatccatttctgtgggatagatctctacagagatggcactattttcttgtttattgcaatttgtatataatatcatttgagttcacatgactattgattcagtagatgataataattacaatgctattctgagacatattttcacatacaatcttgtttggaaccaaattatggaaaggtatcatccagacaaga

SEQ ID NO: 68750 - DNA, 626 bp, Prunus persica
  Intron number 2 from transcript ppa010414m (locus ppa01041 4m.g) derived from phytozome v7.0 (chr-ID scaffold_5; pos 10671291 to 10671916 reverse strand)
agccaaacgtcaacacaaatctcctgaattcaaaagtatgccttttttttttatgtagtttctattgaattgggtttaataattggtggttagtttttccaaagttcatttactaataataaattggttagaaaacatatttgggtaattgggttatgtcacatgttggtggatagttgcaaattctgagactcaattgtgtggaactgaattattcatattggatgataaccatgcaagagggtataaggcatgggaaggctactttgtagtttcccattgccactttgatgaaaaagggaaaaacaagtgagttgtaggaaatacatgatttgctaatcagcacaattgaatcacttcagaagaaccctataaaaaaaatcacataagaagagtcgttaattaatcgggtttaattagtgagtttagaaacaatatgtagtaaattttttatgatgactggtgtcctagcatagtggtaaagtatctagtcatctactctactgaaactgaaaagaaaaataaataaaaaacagagaaggcatttatgttggatgagcgggatgatatctcctcaatgactgttggttttttgtttttggatatgacttgtagaaataaaccct

SEQ ID NO: 68751 - DNA, 564 bp, Prunus persica
  Intron number 2 from transcript ppa015546m (locus ppa01554 6m.g) derived from phytozome v7.0 (chr-ID scaffold_3; pos 6551297 to 6551860)
agaagggccaccttccagtgcctaaaccacaagaagttccattaaaattcaatcttaaatcttgtctttagtgcggaaataaacgtcgcaatggtattttaatattagatgacaagtttgtaataagaatattttataaatattctgtgtggcctacatgaagtgacttatgtagtgaataaattatttaataaatattatttatatattttggtcaaattaagagaagtaattttagaggctatgcggagagagaagttctgacctagtagctctctccctgtgtaaggaaaaactccatagagggggaagaggaagaagcatcattgtccatgccctcatttcttgtcatcttttccttttgggctatgttttcaatcaaaatcattctcccaaaacccgctctctaacactactcatgttctctaaatttggctctacatcgtatttgatgggggttgctacaaattacccaattatttggcatggttttttgttttcgtttatttgttcgctcttatttgcaagttaatcactgtaaatcatatttttcctagatctatt

SEQ ID NO: 68752 - DNA, 666 bp, Prunus persica
  Intron number 1 from transcript ppa004316m (locus ppa00431 6m.g) derived from phytozome v7.0 (chr-ID scaffold_1; pos 20079602 to 20080267 reverse strand)
gccggaaacataactgggactctaatccgattaaggtctctctctttctctctctctatgatctatcatacatatatataaaccctagatgttgaaaatgaattagcgccgttcggttgctgagaaatgatggggaagtagggttcggttgatatattcaggtttttttattcggcttttaaaattagctatgaatgaagattctattgttggaggacaaaagacaatgcaaagaaatgtttctcttcaattgtgtgtaaaggaagttgcacattctgtaaaaaaaataaaagaagaagaagaaaaaaagagcctatgaactagcctattgttactgtgcataagttcaacaacagggaatgtgaaatttggcaccaaaggtaactggtaacttgaaggttcaatagaatttgattaaaatttgatgtgttgggtaatatttttaaaaaatacttgaaggttcaatgattcatgtctttgtttattgagattttgcatattatttaagcaaaattgttccattggcagaaaaaaaggcagaattgttcttcataaatctgttatgaatgaagaattatggctcatacaaaatctaacccgtaaatcactttcccaaaacttttatcaacaggttcagggtaagctttccttgacatatatacctct

SEQ ID NO: 68753 - DNA, 502 bp, Prunus persica
  Intron number 4 from transcript ppa008572m (locus ppa00857 2m.g) derived from phytozome v7.0 (chr-ID scaffold_8; pos 20671749 to 20672250)
aacttacctgacggcatccaggtatagctgttagcccgaattggtagcatgcatcagtagtgataaatttcctttaccagagaagcaagctaacaagtaatggtgatattgaagatattgacacaaagcacggagttctgttctatagattcatgtaaatctgttagatggtctgtttttctttgtttgaactttcgtttatcaatctgaaggctgatgcaaattgtgagttggaagtatggaaattctttccttttgatcctctaaattctgtttctttagataactagtggatattccactaactgggaaaagatgcatgagtatcagtattacatgaatatagttagagagcatcttttggcatttacaagggaaaacacatttgagcaactctgatattaattctaatataaaacgcaaggaaaattgctccattttcccttctattcccccttttaagttttactctttcattgctagaggcgacgaactgctctgg

SEQ ID NO: 68754 - DNA, 563 bp, Prunus persica
  Intron number 1 from transcript ppa005212m (locus ppa00521 2m.g) derived from phytozome v7.0 (chr-ID scaffold_4; pos 4063065 to 4063627)
aacacagcgcccacaagtcagttctttatctttttcctcctgatcttcggttctcgttcaaaaatttctcttcttttttttttttttttctgtcacttaagttgttcttcattttgcaatctgggttttgcttgttttcatctaattccctctttgtggattttggatgtgtgcctgatgggttttttttgttttttcttcgtgtcttgagctcggtgtgattgaattctgtgtcttttttctacttttggaccctttgttgattgatccgagtgaaattttcattttttttcttttctggagtaccattaattctgataatcacgggaaaactatataaaatgaggatattggtatgggatggttatggcaaggtccggcctcctccgtggaaaaggtgttctggagctcccttgctccttctaagtttttgccttgatggtttacacgtgttaaattctttgcttggagtaatttacagagtttcagtgatatcgttttgacaaactttcctggtgcaatttgcagttaccacccaattcccgtcgtattctctcaagcaa

SEQ ID NO: 68755 - DNA, 527 bp, Prunus persica
  Intron number 1 from transcript ppa007229m (locus ppa00722 9m.g) derived from phytozome v7.0 (chr-ID scaffold_2; pos 20098338 to 20098864 reverse strand)
acattgattcaagacagggtcttcttggaaagctggttagtttaagctctctttaacctaccactaattaattatatcctctttcctttcctcctttattcatctatttttaatttttttacttatgtttttatatatatttaagtttgattaacatattggcacatgcattacacatgattatattaaaattagtataatggggaaaccaaaaaactactgaaaaatgattgaatttgggtgtatagggacagacttgctattatacgcacatttgtaaacaatctcactccttaaaatgacataattaaagtcagtctgggaatcttggctagggaaataactattaaaattataaatggtccacccaataatagaagaaaggccctatataattcaacttttatgaagttccccaaatcaaagaaacaaaccacatagtttgtgctaattataatacaaatagccaatagggtatctaattccaactttctacacataataaattcacaggtctcaactgaaag

SEQ ID NO: 68756 - DNA, 440 bp, Prunus persica
  Intron number 3 from transcript ppa006266m (locus ppa00626 6m.g) derived from phytozome v7.0 (chr-ID scaffold_4; pos 10403006 to 10403445)
gtgcttctctcataccccactatgtatggcttcatttctgtagctaactgatttcctgtcactaatgattcacgttcttgtgaaaaatgaaagagggattgtcatgaatttgattaggattcaactactcctttaatgaaatttcaaagctttgtctgctcttgcatcagcttattatgatgtataagaatgcttataggggatgctctgttgatgacaatgttgctctggttcaatgcaataaaggaaattaaaccatacatgccttttgttctactctttttatttctaaagtctagtaatcttcagaaataaagaagctttttttgttttgtttttgtttttgcgtattatatgtcttctgggatctagattcttaaatatttctctttgttctcccttcagcctttcatacaagttggcctgacagcagagtctca

SEQ ID NO: 68757 - DNA, 979 bp, Prunus persica
  Intron number 2 from transcript ppa025584m (locus ppa02558 4m.g) derived from phytozome v7.0 (chr-ID scaffold_2; pos 4339527 to 4340505 reverse strand)
gaatcaagttgaccgtgataagtcaatcacagtaggtaaattatctactcttcatgttgtttatttcacatttttaatgtgtagtttgctgctgtgaattgaaagtgaactccatgtacattttaattctggtttactctcagaaactttagagaaaaagattggtaacttttactttcccatacaagagaagagagattccttctgaagaaaatagtttaacttgggagagtgtcttattgttcatcgtacatttttcttttcttacgtcatctcacccttctaggaaataccatgtttggtcaattccctgaaggcaattaacattacgtcctttttcttttttctcaattaattttccgtacagcattaaacattatttcttttcttctattttctcttactgaaattgaacaaagcattgtgtaaatttggtcatttgtttcccggtcttcatctagtaatatctttccttcgtgggcttttacttgctgattttaaggttcatttcctctttaacatttcaatgaaaacagttgccctcggaaaattgtttcgaaataagactacatatggcaacagagcttgttggtaattactggaaagacataaaacaaactcctccatgtgcagcatgtgtggatgtttacttttattacgctgaaaatgtgtgtgaaaatgtcatccacgatttccttttaaagtggagctgtccagtttatatatatttccagatggtgtgggacattaggtgatgagattctcaaattagataattttgcagatgaaatcatatctatttgtgttgcgcaaacatactagactatattagaagagaacatagctgtatatatgatagtaactttggaacgagtttcctttattattatgcttttattatctattttctgttcatttttattttattttttatgaatgttttgtaatccattgtattttgattttacagaaactaaac

SEQ ID NO: 68758 - DNA, 689 bp, Prunus persica
  Intron number 1 from transcript ppa009567m (locus ppa00956 7m.g) derived from phytozome v7.0 (chr-ID scaffold_3; pos 5625807 to 5626495 reverse strand)
ccaagcttaacaccttgctcgctggtcttaacacggtactaatttaattctaattatcttttaaagaaaaaattattataatttttaatatcaattctttcaattgacattgtttttgtattttttttctccccctttcttgttctgggtttgttttgtcttgttatgtttagagttgtatggagaggttttgtggtgatttgtgaatttaactattttggcacttttgggcaattgggtttttgtcattttagaaagaaccatcacatttctgacagaggctgcattttattgtctttgttctctggtcaatggctgcagatttacatttatgtatggggtatgctattttgccttctgtttctacactgaattttggaccacagattcaagcaaaaatcaacttcatcaatgacccaggtccaaaattcagagtctgacaagaacatttctgttaatgttttttctttttttcttaaggcattgtgattgattttgactgcattttcatttgaaaactgtgagttaagtagatttcaaagactttgattctctttacaattttgggctctctttaaattttgggttcaaagacattggatttgctatgcaattattgcaaaattgatgacattttgctgtcctgttttgtgattaattaatctcttgtgctctaggtgtttgtggga

SEQ ID NO: 68759 - DNA, 496 bp, Prunus persica
  Intron number 1 from transcript ppa007962m (locus ppa00796 2m.g) derived from phytozome v7.0 (chr-ID scaffold_5; pos 10338666 to 10339161 reverse strand)
gccctaagctctctcagaagctccactttcatttggtatatcgctatcctcactttcacttgttcattggctatggccgcttctctttttcttctttttcttgtctttttgctctttttcttgtttagtgaacttgctgctttggctttacgctgctctgtttggttccctagataattttaaaattggaaaagaaaattttgacttcttgatgctctgttacttattttgggaattagagtgaatgtgaaagggaattttggattcctgataactgtgcttcgtttcttgaaattaagttgaacatagtcttgctcggctcagttggtttagaatcgtctccaattattgcaataaaattcttagtttcttataagcctaacactgtgttttgtgttttcactttggcctcgttctcattaattcaattacttatgctttctttttttttttggttgcagggtgatctcagaaataaggacgatttggagaggct

SEQ ID NO: 68760 - DNA, 903 bp, Prunus persica
  Intron number 1 from transcript ppa001704m (locus ppa00170 4m.g) derived from phytozome v7.0 (chr-ID scaffold_5; pos 12976831 to 12977733 reverse strand)
tttccaggtaataattactaatcaaaaattatatttttctttttcttctgattttcagcatttttggcattcccaatattgattattgatgggtttttgcaaaattcctttcttgaaaacaaaaaaaaaaaaaagaaaaaaaaaagaaaaaaaaaaaggaaaagaaaaaaaaaggggaagaaatgatttgatttctgcaaatatacatacacagccagccagccgcacatgggacatgggggcttctatctctttccatcacgattcacgagtcgggcatctttctttctttctttcttttctttcttggaatatagagcggctcagatccactgcatgacttgtaaccaatcccccctatccctcgctcccctctcttttttgttttttctctccttcaaaatataattttattgcccaaaaatttgaaaatcccgataagatttccccacatcataattataatatagtaattttttcccactcttttctctcttaaccccttattttaatgcttctaatttcccactatggacaggtaatattacattattctataggagagatagagaccaagtgaggggccattgggagagaggggggggggagcctggattgttctctcccctctcatttttcttcttcctcttttgtcttcttccaactcaggtcctagttgggaatatgatcaggatcaagatttaatttttttaatttttttatacatgcggtattcgctatcgggaatttgaacacaagacttcggatgcaagacctcgaatataaaatacattacatttttttttataaagattttataatattgtagtagtgagagtgagtgcatggtttcgtacacattgtgcaggaagctagcggagttggggtacaaaagaagtgcca

SEQ ID NO: 68761 - DNA, 690 bp, Prunus persica
  Intron number 1 from transcript ppa001312m (locus ppa00131 2m.g) derived from phytozome v7.0 (chr-ID scaffold_7; pos 14466620 to 14467309)
cctctctctcttcctcaccaacagctccttctctcgtaccccctctccctctatttctttttcccctcatttttcatttccaataatgtgtgctttcgattcggtttctctgcgtgttggaagttctgtcaagagaatacgaatttatttattttttaatatgttaatatttttttttctttttagtttttgaaattatgctaggttgattgttttagtggtcagtgtctggagcttgcttggatatgccgtgagcttttggaagctcagaacagtgtacttgtaatggagacgtatgcttttgaagagaaaaagaataaagcatatcaattttgatacggattatatggacgtaatgttatgttacgatgactgatagcagtttctcttttttaatttgttgaaaaagcaaagctgatctttctggtaccaaatgggattttagaaaagggatttttttttgtctgtttctctagggttctacttttgggttacgcgattccaattgaatcttttgtttggtcgattggacttatattggcaatcacgtgtgtttaaaagatgaatttattatcttaaaaatgatttcttttctcagtgattgtctacatgttattgttgtcttgttatataatgttaagctaatttgatgctcgtttgtagggaagatctttgctggaaagtcttcgt

SEQ ID NO: 68762 - DNA, 647 bp, Prunus persica
  Intron number 1 from transcript ppa011612m (locus ppa01161 2m.g) derived from phytozome v7.0 (chr-ID scaffold_2; pos 1361069 to 1361715)
cgaacagtgaacaaagtaatttacgtggtatttaaatggttaaaagcactttgtttttccgtataacagtgatcaatagattgtatttggtttgcctcgtttttttcttcttgttattgccagccttaggtaggtaaatgcatagtgttaactggtgaacccacatagttttaaaagaaatttataaataaataaataaaaaccaaattgtttattagagcctaaacaactttgagtaatttgaacctctgctatagattccttctttctttgctacaataaggatgcttggtgagctaaataaatctttgttttccttaaagcttatcacattcaagacactttggataagagtgtattcttatatttgcatctaaaaatttacatttacactgtaacactgtagtaaatgtacatcaaagaactccttttaatcagaacacatctatgctctgtgaagtggacacactgtagtaaatttccatgcatatgcgctctgtgaagtgggtattctgtctgatactagttgactgaggaagctaatactcacaacaaagttaactgctgtagtcttgctgttttctgtactaagaaatctgttgtttaatgtcttgcagaccttgatagggttgagttgtgtcgtggag

SEQ ID NO: 68763 - DNA, 406 bp, Prunus persica
  Intron number 1 from transcript ppb014769m (locus ppb01476 9m.g) derived from phytozome v7.0 (chr-ID scaffold_1; pos 24545254 to 24545659)
ggtcctcagccgtgtgatcaacgaatacggaggcggtactttctccagtgacattgtggacaaggtatgcaaaatcatggaactaactgtcatggctttcaaactgtcctgaggtattgaattttggttagtcttaccagttcatatggctaagaaagtgcaacacatattctttacagtactcactctggctgctctttgttgcaattggagttggaatatctgctttcattggtattatgttaactttgagccttattggtttttgtggccaagtctttacccctgaaaacatgtatttcaacaacactcatttgattgtatcattttgaatgttgtgtgattaatgttattgacctgtcaacattcaggatttgcagaaggaatttgttggaccggaactgct

SEQ ID NO: 68764 - DNA, 532 bp, Prunus persica
  Intron number 2 from transcript ppa021476m (locus ppa02147 6m.g) derived from phytozome v7.0 (chr-ID scaffold_2; pos 11870508 to 11871039 reverse strand)
ttggtcttggcgccactaggttagtgtgtttcatttttcaagactgcttattcattaatgatacgtttcttgattggttttaaatttttgatgttcttgtttgatcactaagagaatagtggaaaaactataattagattaaatttgtagcactgaccatttggtctaatgatataaggtaatctcaactttgtgttggaggagtttctaagttcaaatctgatgaaacacagttgtttgaaacttggaatcctgatttgtaacgactcagacatgacatgtatggttatgacttgcaaactaaacaatggatcatggttttacccttttgtgaaagaaaagtatgttctcctaaatgtgctaccaggttatcaatctcttttggctatttgttgtttaatattttatttgcgatgatttacagaatcacagtaaagaagaaaaacataagaacgaaagaagaagaaagtgtcttggtagtcttccatttccacaaagttttgaactttgtgtgcgtttgtgtgtgatagag

SEQ ID NO: 68765 - DNA, 922 bp, Prunus persica
  Intron number 3 from transcript ppa021987m (locus ppa02198 7m.g) derived from phytozome v7.0 (chr-ID scaffold_1; pos 32423122 to 32424043)
agagataattgaggaatttaagatttctaagcctcgtagggtaaagttttagatttaaatagtttaattttatattgcattgcatttacttcttgttttttttgttaagcttttatttatatatagatatgcatatttgagggtaaggctcattatgtaccccaatgactaggtgtatcttttttatttttataaataaaattcactcgtacaatcgaatttttaaggtaagttttgcctacttgacttttgaatcctgaatccgccacttttcaatgggcttttctatcaatggacattgatttagtagaaaaaaatttcttattgttttagggtttgtttgtacttcaagtaattataagcatttactttacattcaaggtgctatgttcaattatcatttcctaatatcgcttgtatgaaggaaaaaaatacataattatataattattcaccacaaaaactctgttcctaaataaataaatatactttatgtcctcattataatattgaaaaatacagccaataaaaaaacgaagaatatactggcggtaaggactacattagattcttagccaatgtctattcttttggtgtcggcaaatctaggagtcaaattttgatgcaatctgaatagtaatagcaaacgagcaacttgagaacggataaagatggaaggcaagtactatataaccgtaattgtaataatgtcacaaaaaaaataattagaaggcgaaaaaagtaataaaaatagcaagaagtcaaaagcccaaaatagaaagtaaccattatccgccttctagatatttttattaattcactaatttaaaatttccccacgattccgtaacgctgtaaccggaaacgcgccctgtctttattgtgaaacgaatgatattgaaattggacagagagagagtag

SEQ ID NO: 68766 - DNA, 649 bp, Prunus persica
  Intron number 4 from transcript ppa002460m (locus ppa00246 0m.g) derived from phytozome v7.0 (chr-ID scaffold_6; pos 20097449 to 20098097)
gctggaaaagcagactgctgttgcaaaacctcaaggtaccttgagcccgcattcacttgatttatacctctttcttatttggaaggcccaaaattatacttttggttcctatcctaggcctgatttcactttagtacctgtagttgtaattttaacgaatttgccatcttaatttggtaaccttcgcattatgttctaaatttacatttctgtcatattggttgatggaatatccgaatttttgttctgatttatcaaggcagaaaattcaaattgagaaaaatgtgaagtgggtcatgctgaaggtacatttgcttatttattgaaaatcttcattaaccaatgtgacagaatgtaaagttggaacgcatttaaaaaattaaaaaactataaatgtacatttattgaaactggaattataagaatcaatgtgtgattgagcataaactacagaaaccaaaagtgtaatttgggcaggcttatgtaccattatgcaatgatatctttgtatttttacttgagtaggaaacatagaaggacaatgttctatgatcatattcttcgcaaaagaaacaagtctagagttcatgaaggttaaagtttaataatgtcttttttattgatgtcctgtaaatcagataggctatca

SEQ ID NO: 68767 - DNA, 611 bp, Prunus persica
  Intron number 1 from transcript ppa014794m (locus ppa01479 4m.g) derived from phytozome v7.0 (chr-ID scaffold_4; pos 20797762 to 20798372 reverse strand)
gtctcgtgcttactgattatataggttccttttctctctcttaagagtattttcctcaatccaaaaatatatgttagatcatgagtgtatgtttgcctctatagttgaattttactttttctagtatgtttgcatgtgaaatatttgacaagaaattattcttcatatattatttaaacatggacaatttaaatatatattatataaatatttttaggtctatttgtttggggaaaaaaaacacacacacacaaaaacaaatttagacaagaaaatcaaatatatatctttggatttacatattccctattagacacatttatacccttcggaggtgtaaagaggatgttaaagtggctttacacccccaaaaatgcacccctaactatggatgctttgactactagattgggattttgagtgcatgattttgtctatattttaatttgtaattgcattattatttgtttaaccaaattctaaaaacaaaaagaaaacaagaaaaaaaccagtattttattttattttaattttgttttatgaaatgcctctctgagatgttgcaatatttcgcagcttcctttttgggcataagatctccagtgccttac

SEQ ID NO: 68768 - DNA, 640 bp, Prunus persica
  Intron number 1 from transcript ppa001986m (locus ppa00198 6m.g) derived from phytozome v7.0 (chr-ID scaffold_5; pos 14867355 to 14867994 reverse strand)
gtagattgattgttcaggtatggctatccatttcttctttgtgtatgttgttgtttcagctcaacccattatatgttttcccttttggtatgtttttggattactttcaggggtcaactgcacaagaacgtgatgttattgttgatgggttcgtgttgtttatccatgttattggttttaatcgttgtcatgtttcaattcggtgatgggttgtatgtaaaacgtatttattttggttgattgtttgtacttgtttgtaaagatctgatgagggcactttcagctattgttcattgtttcctttcatttgcaaatataaattttgcatttttgtaggttattacttcatatgttcctcaagtttatgggtgaacatacaaattttcaaaagcatatttctgaaattcccagacatgaatttttttggatattgttaatgcattttgctttctgttcaaggttatttcaatatctgtcaactgtagatttgtgtagtatgtatgcatttgaactctgctaaagttatctgcttcggttttttggatttgtttataacagttgtttcatattttccttttcctttttgaatgaaacatttgttgcagataagttatttgatatagagattttgttgatttgg

SEQ ID NO: 68769 - DNA, 892 bp, Prunus persica
  Intron number 3 from transcript ppa011295m (locus ppa01129 5m.g) derived from phytozome v7.0 (chr-ID scaffold_3; pos 16327704 to 16328595)
caaggactggtaaatgcacaccattcgtttctttaatgcttggtattattcatccgtttcaaagtttgtatgcacttttttccattaatcatcgagtgctttggcaattatcattttataagctttcataattagcagcgtgtagaatagaaaatggaaattgtgactgctcatgccatatgattccatttgtagaaggtgatgattgttaaattcatttgctactgaggttttgcagattatgagataagatgtttgtccaaatttcagatcctcttgatggcaaacacattgaaggctataaatgtttgcttattcttaacgtagtgtgcgtctcttgcacacagtcttcttttggtttattaagtttgatgattgtttggcgagttcttgagagcttgatttaaggaaaggttttaaatactgattgtagtggatatattgaaggtttgaaattagggaaatctttatagaaatattgataaaaatatcaatatcaagagaaattggattggaaatttgaattggtgctttatgattttctttttctacgttaagctttacttatgttacttttgtcaaagcccatcatattacttaattaatttaggatcagatggaccaaattatgaacaaaatagtggttggttgctgttaaaactcttgaaaatagtggaataatttctttttgacagtctcattaaggtccacaatctatgtaatggtgtttttaaaaattttttttttttactgtggcaatgcctttgccttggcaacataattatatgttggtgatttcatttgaaactaacaattaaagatttgtataaacggtaataacagatacgcttccatttttgcgtgcatcttttgcaggtttcatccctcttgt

SEQ ID NO: 68770 - DNA, 937 bp, Prunus persica
  Intron number 1 from transcript ppa004637m (locus ppa00463 7m.g) derived from phytozome v7.0 (chr-ID scaffold_7; pos 20079831 to 20080767)
ctcatcagctacgtcgataacctccccactgggtattccaatttatctcacccgccctttattttgttttttaaataattgggattgaaagactcgtaatttgagctttggattggataaaatgggttcgataattttgaactgtgacaatcaatgtctgtttttggattgagttattggcctttaatgttaatttctttttagaagggctaaagatcgattttttctctgttttatttttgaattcgtaactcatttatttgttttgattaataaatacgggttagttatgttgatgttatgcttatttggcgatttcgtggaacttggttttatgtttctgtattgggtataatgtattcactgatttctccttatcttaggtttttaccaatatcacctttgctgtttttgatttgttacacagtctgattttcagtctctgtcgcctggtcgattatttcttctttattttttcttttatttatttgaagctctcaattttgcttctggtaattgattgtaggaattgtgcatttacatgctctcccatgtgagtgtttgcttcaaagtaattccttttatatttgatctaaatctagaaatgatggcttggttttctaaaattagcggtaaggcgtacaaggttgcaaattccttatcccatatgtgcatatgatggggcttttattgttctctaattagtctccatctttagcatgttcttcatggtttgtggcctgcgttatgtgagtatatcgaagtgtcatactgggtagattatattgatggtttgtgttaataaactgagctgagtgactgaccatgtgtgagccatatttcgtgtcttttcccccctttattacatgtttgactaattgggggcctatttgatgtgtagtactttcccattactttcatccttatcttttcaggg

SEQ ID NO: 68771 - DNA, 792 bp, Prunus persica
  Intron number 2 from transcript ppa008828m (locus ppa00882 8m.g) derived from phytozome v7.0 (chr-ID scaffold_4; pos 2574382 to 2575173)
tgggatttgctatactcacccagaaaagctaccaggtaatttgttttttattcattttttgtaaattttttatttttaaccctatctagaaacaataatgaagacactaattatcacgggcgtctctcattcatttgattccaaacttgacagttttaatttcttggtattcatatcgtaattgtatggattgggacttaaccaaagatactcacagatactcttttttttttttttttttttaaagatacttgagattttatattttcccaaagaatattgttattttttttgggaggtatatacgtctctatttttagatgtcacaattgaaacaaacatataaccagcacatgggtttgcttgcttctccttattaaatcattcaaatttggtatgcttgtgtttcttacttttttcttttcaagcatgttatttgcatgtgaatgcacagaggttggctatgcatatatggatcctaacaccaaacgcaatcgcatatatagatatagatatagagcctcggttctcttatatatatagaccatgtaaacctccatgttaaaattccttcggctcaatttgcatgttaaatcttttctttccatctgttggtgacaccattttatggactaatttgttcgactttcccttcaaatatatcaatatcttcaatttttctcaatgtgtatgtgcctttacaagttataattacaattctctccaagtgataaaaatgcaacacattttgtttggacatcctgtctgacgtccatgcaggagtgaacaaag

SEQ ID NO: 68772 - DNA, 991 bp, Prunus persica
  Intron number 1 from transcript ppa004870m (locus ppa00487 0m.g) derived from phytozome v7.0 (chr-ID scaffold_6; pos 25189069 to 25190059)
gctttgtccctccgctccgtctgcacccttcccaggtaagcattctctcctcctaatcttctctacatgttcttttcgtcataattggagttccgtttctgtttggttaccgagaaacggtaggaaaaataacagaaagtctagtttttagcctgaacaacctggttttagatctaaagtttcgttctttgcattactttatgtttatatcattacaccgagatcaacgaattgctgctgagctgttttgagatctagtcatagttaagatgaattgctttcgttttgtcctgactatggcgggctatacaaccttcgcctgaaatctaaaagcttggccttctcctatctccgtttcacaattttgggctttgtaggatctccaattatgttttttttactgtaatgtgttttgctttgcgcattagtaattgtttgtcttatgtatttgttttacgctttagcttttgttctgataaagggcatctcgaatcctccctaaacttttcctccaatcaagttaagtgtttgtgatttcccaaactcttcccaaatcaaaatttgggttatggagggaaattaattttggagggaacaattaagtaaagggattttcttaggataatataggaattttcaaaaagttttgcagaaaaattgaactttcccaatgaagtgatcccaagtcttaaccaatggactttcactcaaatttatacttggctttacatgttcaaattcgttaccagtgaaagagttctgcttcacctcatttacataataacacaggttaaattaatatcatagttgacttttggattcttttctatgaatgtctctatttcagtttgtttcttttacttaaattttgttgtgaagatcgtgatatcataatagagaagcatatttgtttccgagttgttttttggtcttacagcactaactaatccttgtatttggtcttgaactcagatctgatagcttaatcttc

SEQ ID NO: 68773 - DNA, 701 bp, Prunus persica
  Intron number 1 from transcript ppa006420m (locus ppa00642 0m.g) derived from phytozome v7.0 (chr-ID scaffold_8; pos 11253747 to 11254447 reverse strand)
ttattcaacagctcggcactgagcttcgtaacgctgtaagttttgtttcttcgtttggtatatacataagagtgtttgtttctgtatctgcttttctttttccaagtggtgatttgtgggtttacagaaatttacttgattatggtcttgactgttgatttatctggggattaaattttttatttatggcctgtgtttagtagaattggtgatttgttcctttttggctgaaggatgatgctaatggttcacatctgtccattttctgtaggcagtcaattttatcgcttataataaaaagggtagtcattcttattgcggtttaaaagaagagaaatttggtattatttacggagggtattttgatgggtatcggattatctactttgtggaatatgaaaattggttttgattggtagattgtttttatgtttattatttgtctttttctgcattttctggaatatgaatcgtatatgtaagcatgaacttgattgaaggatagacatggagtaattttcagttctggccttaattcatttggtgaagagattgttgtttactgttataattaattgttcttaaggtccttacagactactacattttccatcttttgtttgattttattgtcattttctgatgttgacttttgtggttttgcaggtctgtatattttatctggttcttcgagctctaga

SEQ ID NO: 68774 - DNA, 784 bp, Prunus persica
  Intron number 1 from transcript ppa001285m (locus ppa00128 5m.g) derived from phytozome v7.0 (chr-ID scaffold_1; pos 33481461 to 33482244)
gttctaagctacgagtcgccgtcgctatcctcaaggtgagctctctcagttttttatttgtcacttattttctgggtagaagaatttggggtttaagttttgttttctcttgcaaatttcagttaaaaatttcttgttatgcttggtttctgagaaatttggggaagagatggaaaaatttgggattttggcactgcactgaccctaaatcagttgtttgttatctggtttctcattcttttttttgtttgttttttcctggggaacctaacggcagattagggcttcaggttaagggaagcaactgtctttagtacgtgatggatttattgcttttgatgtttccactttctaagctatttcctcttgcttgtttctgcttccaattcgtttttttatttccttttctggaaactgtttattagtgcttgagggggaacatttttgttcctttttttggaataaatttcagctgatctgtgggttgggtttggccaatagttagtattaatggttttttgaggttgaagcagatttgggttgctggaccaaaccgtggcatctccgttgatgtgctattaggattgagacactttgtatttgattttccatattattatgagactaagtttgttagatctgctctagaatggttgattttttttcctgtccaccttgtgcgtgaacagtaaatttgttgaaaaccaaggtcttaagtttgcacattttcatcacattaatggttcttttgttttgttgtgctttaggttatattgctagtgat

SEQ ID NO: 68775 - DNA, 491 bp, Prunus persica
  Intron number 2 from transcript ppa011631m (locus ppa01163 1m.g) derived from phytozome v7.0 (chr-ID scaffold_2; pos 19422814 to 19423304)
ccagacctcatttctgggtaaatatttctttctttcatttcttttatctaatcatttggttttatttttagttgcctcacattctggcttgcacttttttctacctgttatcacatgacattataaattcgatggagaagaaatgaactctagttagtttttgagaaactggtccaaagccattagaggtctcctagctttttgcaaaaggaggaggtcccctacatcaaagtgtacccaactaagcaggtctctaagtacaacaacataaattgggttgtgtagggtaggctgggaaggggaatgagggtgagagaacatgttatgttggcaggttggggccaaggctttgtacttgggaaaagtcttttaagtttttagaatttcgtttggtaattttgaagtttttatattttatattttatgtatttgatgtaaaattactttgatttgcagacaacaatttgccagggcttgaagcaggcagttcc

SEQ ID NO: 68776 - DNA, 316 bp, Prunus persica
  Intron number 1 from transcript ppa010115m (locus ppa01011 5m.g) derived from phytozome v7.0 (chr-ID scaffold_3; pos 20929232 to 20929547)
ttcaagcaagaccctctttctcggtatttcaatttatttctcttccatcatcctcactcgtaaagattttagctttgactgttttctaaataatttcactgtgcttattgcttctcgtcggtttcttaaagaaatcccagctaaaaagataaaagtaaatgtttcaatgttgaatttacgtgtgcttactgttttctaaattgtgaataaatatacaaaatgcttgtatttttagtttttcctggcaacaaagcagagagctttcgtgttcatgctgataccttgttcgttttcttctttctgcagttcaaagttg

SEQ ID NO: 68777 - DNA, 1001 bp, Prunus persica
  Intron number 1 from transcript ppa005887m (locus ppa00588 7m.g) derived from phytozome v7.0 (chr-ID scaffold_2; pos 26724630 to 26725630)
tggccagcaccgcataccttatatcgccttcggaggtacctacttattacttcctacaccacaccacaccacaccacaccacaccaatttcttttttctttctttcctgaatggatggtggcttcatcttcgtcaccttttggaaaacctaattttgaacttcgttatgaattatcattgattaattattccttttgtaaaacctaattttgaacttcgttattaattattgtaaagaaaaataatttttgtttacaggattggccttttttgtcttaagcttcttttttatttactttgtcggtgtcgatgtagttttgaattaataatttgatctaaggaatcagcgcagtgcagaatacaacagggagtgcacacagacagggcccggctccctttttctttttacatggaatttggattagaatttgaatcattcaaactcctcatatcataagcctcaatgctttcgtttgctcaaagattctggagcagcaaaatagccaaataaaaactgcagtaacagatgtgctaatacttatccacagctctttaaacccagcttgtatttcctcctccccatttaattaggataaagatgcaacttctttgtgatgagtcaactattactcttttgattatgtctcccaatatacaacgatgtgccatcacacaatagaattttctgcatgtctaaatatcggttcaaacattgaaatttagtactttgccataaaaaaatcattagttagtttaagtaaatgtaacattcatataatgcaccccgtttttgttcacatgataaaaataataatatttcctccttaaaaaaaatgagaatgtgaagtttctattatcctaggcttaaatttggttcatagatccaccaatttaatcatagttctagttcattcctgactctctctctcttttttttttgggtctgaagttcatttctaacacaactcatctgttgttgcagctttcttacaagcagtgtc

SEQ ID NO: 68778 - DNA, 432 bp, Prunus persica
  Intron number 2 from transcript ppa010957m (locus ppa01095 7m.g) derived from phytozome v7.0 (chr-ID scaffold_7; pos 22244035 to 22244466 reverse strand)
aacaagcagcttttctctattctctattttgtcaggtgagaattaatgcttttgaaaaattcatttatgttgtttggacttgtggatttagaagaagagatttgcatttactgtaacattttatatgagattttaaaagtttattttagggttgatggagggtttcaaatgcgcaagaaaatatgagtattcacctcttaaccacttaaataataataataatccacaaccaaaagtgtgacaactctctctttttgagtttttctttactaaacatttgatgcaaataaactttaaactaaatcgtgaaatctaaatctctcatttcaaatacgcagtccaaatgaaaccttagtttttgcactgtatctttttcaatgtctatgttgggtataatatatgattaagtttgctgttccagctttgtctgtg

SEQ ID NO: 68779 - DNA, 675 bp, Prunus persica
  Intron number 1 from transcript ppa015403m (locus ppa01540 3m.g) derived from phytozome v7.0 (chr-ID scaffold_2; pos 18441233 to 18441907)
actaccgatactccctgtaagttgtgatttgtattggttcgtgcattgttcttcagtttctgtttggttcccgagaaaatgagaggcaaatgaagaaaacagagaaggaaaccaatgggacatatacagaggggtcttcttataattggatttgtctttctttgttacgttttgactgtttgataattggtttatgagaaaacaaaaagaacagaggaaaaaaataaataataggaagaaacgaattcgaagatttgagtcctgctgctactgagactccatgcagatttgagtgccttttttttcttttttagctgaataggttttgacttttgtgcatatacgatccatgtgacgtaagttcttttttgttttctcttgttcactctgtctgatggtagccaaatgcaggttatacttgcagttgtttggtttctgagaaagagaaacgggaaaatgattgaaaaaaaagtgtagtttttttgtctcaaaaggaatgggaaaattagaattatatatttttatatcatcagctccacatggctttactttagacgtatggatttttggtatttctttctttatgtgaatatgatctgaccttcaattttaatcttattgtgatctgtttgttctgcagattgttgctttgcagctttctggtaagcactctta

SEQ ID NO: 68780 - DNA, 644 bp, Prunus persica
  Intron number 1 from transcript ppa003210m (locus ppa00321 0m.g) derived from phytozome v7.0 (chr-ID scaffold_1; pos 36741177 to 36741820 reverse strand)
gactgcctctgttgcaaggtgacgcagacagctcttttctaaccgttatggcatagttataaatggtttttattttttattttttataattgtgtttttgcattttgtctggaacttatcatagttgtctctatatgttttttttttgttttttttattttttaaatttataaaagttttgctcctttttagataagtgtctggaaattggtgttttaaggctcaatttagtttgcaggtttgggctatagatcaaatggtagacctttttcagttggtttctctgacaaaactttgttttagattccaatgagaaaattatccaaaattattcttctcagatttatagggatcacagagacaatggatgtgttggtatgagcagattgttttttctcttcagaaaattgtattggaacttaaatttgtagggctgacttttttattccccagcttgttcttagatttcacttagcctttagatgtttttctctcttcatttcatgccctttgaaaccatgtttctagttaatgaatcaattgccagaaacttaaatatgcagaattttaattcttttgtgcatcatctgcaatccaaatgtgttacagtggatatactttgctgcgtgatccacactacaaca

SEQ ID NO: 68781 - DNA, 365 bp, Prunus persica
  Intron number 1 from transcript ppa000841m (locus ppa00084 1m.g) derived from phytozome v7.0 (chr-ID scaffold_10; pos 184857 to 185221 reverse strand)
ccaagcagggcgagtctttggattctcttttacctgtgagcattttgaaactttgttgcttcgtttattatatcttctattctcactttgtggtgttctctagcatggtaattaaacatgggttttgtgtttttgaatgtgtttattgctcagtctggggatgctactgaattgttgttgttggataactattttaatgatgattgtttgaatgatcgaaccaattcctctaaggtgtaactgtggcttacatactagtttttcatttatagttgaagtgctatatttgctttcagtatatttataaccaaagaagcactaccatttcaggaagcattcgctgtcataagagaggcttcgaagag

SEQ ID NO: 68782 - DNA, 475 bp, Prunus persica
  Intron number 2 from transcript ppa009337m (locus ppa00933 7m.g) derived from phytozome v7.0 (chr-ID scaffold_2; pos 23213379 to 23213853)
actctcccggaggtcaagctcacaatcccaaagtacttgcatccctctcacctgttttttcttcattttgcaatttttttatctcctcgtttttatttctcttttcgccgatcgtcatagaattttttctcttattattatcgttttcaaatccgcataatatgtaatacccagatctagattttcatgttgggtctttaacctctttcggctttttactgtaaattccgttttcatgattttctgcattgcctgaaaagtgaaataagctcaaatttcagctatgctgcttggttttggttctggatgttataacgttatttcctgtatagatttaagagccagagagtcgaaaataagtttttttgcaagctgagtttgttttcttatacaaatggggtcatttggggtgctgaactttatgcttgtggcttttacaggcaagagggttgaagaagcatttaaagaggctcaa

SEQ ID NO: 68783 - DNA, 569 bp, Prunus persica
  Intron number 1 from transcript ppa002646m (locus ppa00264 6m.g) derived from phytozome v7.0 (chr-ID scaffold_6; pos 5423070 to 5423638)
aaccccatcaacactgtcttcggtgagttttcatgtttttcaatcaatctctctaaaatctaaaagcaacgtcgtttccgcgtggtttcgtttcttttgattctacgcgtacgcatatgcataatgcatgtctttgcagatcacgtgtttgatttggttttgttcgatgtggtttaaaatgatttatttgtatgaatccttgtaaatatttggtgttttgattaggttattgtttttttttcttttctgatataaagattaattaggttattgttaaataagccattgtgatttggtttaatctaattaataagccaatatcaaataactaatttcattggttgtattgttgatcacatacggatgtgtacgagatctagtaatttattaatggtggggttcctctcctccctttactactgttgagattgtgtcgatgatgtttgtcatctctatgcttgaattaagttttttcccttgcgatgttttagttataaataaaatttagttttggtaatggttttgatatgcggctctaatctcttaaacttttgtttccgctgtgttag

SEQ ID NO: 68784 - DNA, 722 bp, Prunus persica
  Intron number 1 from transcript ppa015075m (locus ppa01507 5m.g) derived from phytozome v7.0 (chr-ID scaffold_3; pos 8069479 to 8070200)
gccgtttcggtaggcgactattgctttggagagaggtatcccttcggcaggtcaagaagatgatgacatcattagtattttaagccgaatatgctcgggcgattatggtgtaaacacatgttagatatatatgttttatttttgtttttatccccaaaacctcccttaactacaacacattgtagccctcggagtagttccgctctcgctcccacttcacccaatatatattgtccatgtattacacttgagttataccgcaggtgagggtgcgtgttgagagtaaactgtcattataatagaatactttgaaaatttggttgttttccacttgacttttcgttagtggctgactgtaatttctctttgagcatcatttgtatccctacccaattatacaagagcattatttaatttcaaatataaattcgggtgctaatgctttttactaggttcccactttaaaaagtcaacaatttcaactaggccatacatgaccagtacttttagaaacttcctaaatgtgtatttatagagtatgttctggacagaagcataaataaacggaacaaattacccactttgagtttcagccaaaatgttcttctccaaatcaatccctctctgtttcttactcttctgtcttttacaccatgcagcgcttggtgcttcacttttccatttttgtttcagcaaggaaaactacactgcccatagcccat

SEQ ID NO: 68785 - DNA, 413 bp, Prunus persica
  Intron number 1 from transcript ppa023662m (locus ppa02366 2m.g) derived from phytozome v7.0 (chr-ID scaffold_8; pos 19895382 to 19895794)
aacctcgagaggttacacatataacccatcaccaggtctctctttcctatcttctgatttatcttcccatggttttcatacaactttatgatttatcttttgtgatggcatgaatctaattatatggaaatatccacctgtttaattccagactgatactctcttttttttttttcagatgatttttttataaaatcaggaatttgttgtaattaaactcaaaattttatcattctgaatcagctattgttaattaatatgacacagaagaaactgcaacataatttaatagagtattgtaaaatcaaattgctgtagaaaaaacaaaggatcttcagaaacccaattgagtggagtttgtgatttgcttatccgcagagccgtttctgcttaaaagagtgaaacttcctact

SEQ ID NO: 68786 - DNA, 501 bp, Prunus persica
  Intron number 2 from transcript ppa000677m (locus ppa00067 7m.g) derived from phytozome v7.0 (chr-ID scaffold_7; pos 12179511 to 12180011 reverse strand)
catacggtatttatctattttccattaaacaaatagtcttgcattctctttatttattgagcttgtgtagaggaagaaaatagtaaatcaaagcttaatgatcttgaggtctaatgaatttgcacataaataatgacttggtttttatccattacactagatatggatgactgagatgaattgagatcttactcactttgcatcttagtcatccatatataagaaacaggtccttgccagagaataactctatatgataaaggccatagcacatcagaagtcaatgcagcatagttttacccttaatttagtagaagtttatgatttcccataagaaaaaatgttatatttccatatcttgttagggaaatattttatccaatgcgttgaacgtaaaactcacataagttaatttttggttgagccttgtattttgtctcatggtttctttattctatgcttctagatagggtgtttggccctaccaccacaacacgccat

SEQ ID NO: 68787 - DNA, 665 bp, Prunus persica
  Intron number 4 from transcript ppa010431m (locus ppa01043 1m.g) derived from phytozome v7.0 (chr-ID scaffold_6; pos 6275291 to 6275955)
tccccttccatccaggaagagaggtcagtaacttttgtttttcttcgtataatggattagtaaaagttgtaattgttatttaattactatgaatatatcgaatttttctttgcccttgatcttgtttgggatatttcgttttttgatgggattttttgcttcgttttcaattgaatgtatgttatctgtgtgctcctgttatctgtgtgctcctggtgcaagaaacccaaatacgtcgagttagaagattgtattgccgtggatagtcatctattttgaacgattttattccagaaagagcttaatttgttctgtaaatcagattaataatgtttggttgatcgccctcatttcctgtaattgagttcgttatggtttcacaacaaattttcttttgcctcagtttttttttttcctgtggttgttcagtagtcttagatttaaacaaatttgttttgactatttagggaatcttgatctttttgtgccttcttttcttcttcaaataaaggtgtttgctttgctataatatcaattggttcagtttttgaattatgcattggatatgctagtacaatgttttgtttgcttcattgtcttgttatattgatatttctcttcttgtgccaggacaagcctgagccacctccagaaggccgtcttcc

SEQ ID NO: 68788 - DNA, 233 bp, Prunus persica
  Intron number 1 from transcript ppa026758m (locus ppa02675 8m.g) derived from phytozome v7.0 (chr-ID scaffold_7; pos 18306118 to 18306350 reverse strand)
gctatcgtgtggaccaaaagttgtatcatcttcaggttggttctgtttttatcttcttgtcttttagtcttatttgtatattttgattgtgagctaccttcctgcactaactcatacttgtttccttttcatcatggttttaatgcttttcttactcacactaattcattattaaattgaaaactggggcattgccagacccctcaatctcccattgtacacacaagtgcata

SEQ ID NO: 68789 - DNA, 570 bp, Prunus persica
  Intron number 3 from transcript ppa010516m (locus ppa01051 6m.g) derived from phytozome v7.0 (chr-ID scaffold_1; pos 33420589 to 33421158)
ggtaaatcgactggcaaaaataggtattctttcatcacccactcttttcagagttacatgaaatttgatttggtgaattgtttacacacaaaaatttccatcaagaattgttcttagccattttgggtttaagcactcatttgactatacttgaatcattgctagttatttaatcccttatttgttgtctacctccccataagttcagtgagagagactttccattacctttcttttaaagctgcgtataagcctgcctgccatgtctgccagaaaatttcagagtgaaaattttagcaaccttaaaacatgttccggatgaattacactaattaacccagttctttccttcaatagctgttggttgctgattgtatcgattgattttaccgtagatttattaatcagtgtatggaattctgattgtcgtttgctaagatctttctttgagtgtatggttacaaattgtgtttcatctggtcctctttgtatattttggaggagtgtgtgtaatatccaaagtgaaattaactttattccatgtgattattaatatgtggtaggttcaat

SEQ ID NO: 68790 - DNA, 457 bp, Prunus persica
  Intron number 2 from transcript ppa004241m (locus ppa00424 1m.g) derived from phytozome v7.0 (chr-ID scaffold_1; pos 29400448 to 29400904)
acaaggtgagagttttgaatcgtataatgagctaattttgattgcattccttcctttcttttctttgattagtgtggactctcgttttcattcatttaaaactctaacaatactcttctacattcttgctttataggagtaaactgcagtgtttaatgtttcagtcgtcatcataattctattatgctatctcattttagttaaaatatttccttttggctggactgaagtgcaccacaaatctgcttgcctttttttagaactaaattttcctgatattaaggttgaaactctgttacacatgtaatccatacaaatttatcttttgaatcttcttttaataaacactgatgatccattgcctgactgttcttgttcattttcattttcattgagtacttaaatgctcatgttgagcttgctaatatttggacatttcagataattaatcgagcaa

SEQ ID NO: 68791 - DNA, 770 bp, Prunus persica
  Intron number 1 from transcript ppa001568m (locus ppa00156 8m.g) derived from phytozome v7.0 (chr-ID scaffold_7; pos 12185765 to 12186534)
cgcttaaacgcattttagtgacttgtgcagcacaggttcgtacttgtctctgtcttttggtcaattttgattaaattgtatacgggaatgaattttgatgtattttctttttttggtctgagaataaattttgatccaagaaggtgtattttgcatgttctttgatgtttttgtggtcgagttgttgattggggatatttgatttaagtttacgatagcaagagattgggaggagctgtacaatgacttgtacctgggaatttaaacaaggttttaaatttgggtcgagaagatgtggccttaggtttttggatccgtgggaagtttctgtgtaatccgattaaatgaaattgttaaagaatagagtatgatatataatttaaaatgttaatattatgtagagttctacttaattggatcaaacggaattgttaaagagtggactatagactggagagattatgttgtggaatcgaataagtaattttaatgttgcatagatgtattcttatcatggggactatggggagatattggtgaaggtagaaattgagttactgaactttgacatcatgttcattagaagaagacagaatatgtgtataatacactatttcgttctttggttattatgtatatgtgaaaaaaataaaattatgcagatggtttaaacgatattctctaggagctgcccatagacaaaaccttggaatctgcacggcacattgtgcataatttaaaattgatctcttccttgtaggcaaaagaat

SEQ ID NO: 68792 - DNA, 426 bp, Prunus persica
  Intron number 1 from transcript ppa003029m (locus ppa00302 9m.g) derived from phytozome v7.0 (chr-ID scaffold_5; pos 12087378 to 12087803)
actcccttcccgccatcgccgtcgtcggtggccaggtccgcttccgatccctcaccttctcttatctctctcatcgatccgagtatatgaactttgatttgtgtttctttttatctgctctgtaacttagcccccgagtttgaccaaagcttaatgcttcgaactagtttatactcgtggtgcttaaaaacaaatgaattgcttttatgcgtttcggttgaactgctaggaattgtctacgctaagtggaacatgcttgctaattgggaaaaaaaaaaagaaacaagacttgtggaatatgatagcaaattttagaagaattggttgaagtactgaatttgttgtgatgctaatatataatgtttgcttatatttttgttctgtcgtgcagagttcagggaagtcttctgtcttggagagcattgt

SEQ ID NO: 68793 - DNA, 947 bp, Prunus persica
  Intron number 2 from transcript ppa010051m (locus ppa01005 1m.g) derived from phytozome v7.0 (chr-ID scaffold_4; pos 26133793 to 26134739)
ttagcgggagtggaaagactgttcttttctatcaagtaagcattgacattattggattttgttctccttaaacattgttattagactcaatgtgtagcggactcgactaatgtcatgcttcttcgtgcatgatatgtaatgcaaacaaattacatctcgaccatatgactctggttattttcattatgccaattaagaacttcaaaattatgcaagctttctactaattaattttgcagtgttttcaaaggcgtgcatgaggctcaccttgaggctcagacatccatctgtgctacaaaatgctgcaaagccttatgcctttctattgtagcatacttctcactgtttgttttgcaaaagtggaagagacccccttttttaagtgtgcccaacccagacgacatcctttggctggggtatttggaaaagggaataaaccatccaaataagaggcagaagcctgttccacctgaaatattaccctttgactgaccatgtgcttgaatgacaatatgtattatgattttttacgttaattcgaggcctgaaaggcttatgtctcaatgcctcaaggcttaattcttgcctgacgagacctaagtgccctgtcataccttcacttctgaaaacactggttttgcaataagaatttctggtttcgtcttattactcaactttgttagacaatatcatgttattttgaatattgagtttgtcctttgtttatgttgtatccttttccttttgataaaatttgaaactctgtcattctttgtgataaggtgctgtttagtacttgggaaataaaatttggttaaaaattctaaatgccttgtattaagtatgtccttttttccccgttttcagtttctttgatgatctatttatgccatagcagtgttgatccaacttttgtggcatgattttatgcacgtgccagctgcggg

SEQ ID NO: 68794 - DNA, 934 bp, Prunus persica
  Intron number 1 from transcript ppa003746m (locus ppa00374 6m.g) derived from phytozome v7.0 (chr-ID scaffold_2; pos 20702185 to 20703118)
gggaaacaaaagcaagaatccaaagaacaaaaaaggtttacttttctttacttctttagtttttttgggtgctctgaagctcctgtaatagcatgacacttctcgcctttgaagatttccttagttaatttttctttctggtattcattacgttcctctgaattgtaccagaagactttatacatactctgtcgcatcccttgtttggtttccgagaaaaccgaggaaaaacaaaagaaaatttccgatcacatatcctgatatccgctttgctagttctttgtttttcttaaatttttattacagaatccgggcttagctgaattgggtttattgttttgtttaggataatgcatcaatcagtggtttcagaccttaagtcagctttgtcttttcctttattttctcggaaaccaaacagagtgtagcatgtaacatgcagggtccttttgaaaacttcaaacttcagccagctagaatttctgctaaatccgtgtaccattatgtctctaccaatctgagtgtattcttttactaaacgatttttagttttctctctatggtatgcaatttcatgttttatttttttttggtcttctttgttatgatttgcatttttgctagctgttactgtcatgtcattaagcttatttagctggcaatataaattttttattttttgactacattcagacgttctgttaatcccaaacaaagaagccattatctctaccttcttagtatcaaacaaaaaagaaaaatgtgtcccaagcctaactttgttctcatccgattcatattttttcactgttttcccaagtaggccaattgcaatttggaaaccctttagcctgatcaagattttcattggtttcttggtgttttgggagtttctgcagaaggtaattggcagaggaagatttgaagaagaaga

SEQ ID NO: 68795 - DNA, 864 bp, Prunus persica
  Intron number 2 from transcript ppa003746m (locus ppa00374 6m.g) derived from phytozome v7.0 (chr-ID scaffold_2; pos 20703288 to 20704151)
gcctcaaagttacaggttctctctctctctctctctctctctctctctctctctctctctgttaggctgcttgaaattctcagctcgttgtataattttccatgattctttcttgtccagttaggatttttaccgcagaaatatgtagtaaaggaaaatttactacttcgatatgtaaaattttgtgggagagtagtgacaacatggtttctgctggagaaaatgaatggtaaaatttgttggatttggtgataaaatcttacttactgagaatagaactcaaaacatgttactattgcagtggtgatttacagtcaactaaaataatctcctagaaactctatacaaagtaaaagaaatccgttccaatattgaagtaaagtcggccaaaatttcagttgggtcaacgtcaatatttggctgctttaacattttggattgtttaggccaaaagaatagaactttaatttgggattattaggtggtaatgtaggatgaaaaagtaaatttgctttgttgctctttgaatccttctttttaactcgctggaaaaagggagtgattgatatggccaatggctctatcaaaggtctccacagaagtataggctggctttaggcttgtacttttgctacaatgacttgctctttgatctttttagttgtctttttcggctccatcaaatgtctctagagaagtttacattgatcagtcaaatgaatgaaataactgataaaaaactgactgatttgttatgctattctggtgatgtatttttttcaattttagttccaaattaatacctactgtttgtcatttactgtttcaggcaatccattgatctgtatagtagtgtaccatccc

SEQ ID NO: 68796 - DNA, 979 bp, Prunus persica
  Intron number 2 from transcript ppa011515m (locus ppa01151 5m.g) derived from phytozome v7.0 (chr-ID scaffold_5; pos 16970409 to 16971387)
atcacagctttctctacaggtaagcttgattagtaccaatgtttaatctctatatgtatgattatgatgacgatgatgttcttgatggactaaattcaaagcctttaattttgaaattcagtgatgagataaggtgagtttcataggaaggtcctggcagaacagacgaggtcaactgtcagatgggtttaggtggatttcacattattcactttatggtacgccttatttaatgtgtaccgtgtgaaattgccattgccaaatagctagcagcatggccctttagtgggagataaattttcttgtatcgggatgtcagtatttcaagtcaatcacatattactatgcgttttagctctcttatatgaaaatatatgattgacttcagatgttgtcacaatagcatctcgtcacaaataaatttattctcctttagtgggatgagaatgggacgggaccatggtccttggttcatttgagttatgtacaaacaagctatgcatgtgacatgttggtgaaacaaaatcgctagccagaaatttttgggctccactctacttagacttagcaaatagtttgagacaacatatatatatatatatatatatatataaatacaaagtttatctgggtgaccccgcagtagggtgtgttgaatgatataagattatcccttttggctttttgatataacatgtggctcatcaagaatcattggattaggtagtcgaatcccatattaaccaaacatgatgctgtttacatgacgccagttttagaaatgttagtaaatgccattgctatctagctagccacctctgttctgttggtaatcatagaagaagtggtcctgagtttccctatcaaagtttttggatgtttcttttatttcttctgcacgcaccgataattctttcctatcaacttgaagtaaaacttgtttatatatttctcatttggtaattggtataggttggca

SEQ ID NO: 68797 - DNA, 942 bp, Prunus persica
  Intron number 1 from transcript ppa020114m (locus ppa02011 4m.g) derived from phytozome v7.0 (chr-ID scaffold_8; pos 11368428 to 11369369)
ctcctcttcaccttctccccgccaagaggtacttcttttacaaacttttctttttttgttcattcaactccagtccctctctctctctctctctatttatgcatttgtatgcataaaattacaacttgtggagctttgaaaaaatgtaaaaaagagcaaaatgttggagcttttactttgtaattggtgtttggagatagattttgaatattgttgacaatttgctttttttaaaaaaaaaaaaattatattttgaataggtatattattgcggtggattaagaacttcatttctcaagaattgggatgttacgggggtgtcgagttcaaagcggttcggctccaccactcatatgaattggaagaggaggtattgtcaactcaattgtcattctctttctaccgtcgctcaatgttggggcaatgtctttatttatttgttttttaaagaaagaaaaccccaagaattgtggtttagtttgttagaaatgatgattcttactttttggggtttttttcccttttaatttgagttcctcaattgttgtttttctgtagagaaattgattattgtggtcattatagccgttaatagtttactatttgtttttcgaaagaaaaaaaagaagaaaactaagaatgatcatttgtagccgttaataacttattcagctagttgtgaaggactattctttctagtttcttttttcttgggttgtttggttattcttttaaatcttatggcctacattgtccgttttttgttggaaagtcagttgccatggtcattgcttttctgttgatgcctccatatgctgatttgttttgttccatttttatggttgcgctattcttgaatctggttgatggaattgtcaatagtaaatttgagtgtttcgatctaataaaacaggagaactttgatctgtgcagtcaatcaag

SEQ ID NO: 68798 - DNA, 877 bp, Prunus persica
  Intron number 1 from transcript ppa026018m (locus ppa02601 8m.g) derived from phytozome v7.0 (chr-ID scaffold_6; pos 4642136 to 4643012 reverse strand)
tttagaaatttattggtgtgattgtcacactgtcacgtgatgttatcaattcactcatgttataacgtgtatatttatcttttgagacagcagtcaatgtcaaccactcatatgatataattgattcagaaatcaaggttaaaaactacaacttctaaaaagatcaaaaaaattgaaaataccataaagattaaaaaagaaaaaaggaaatatctctctcacacttggtggaacttgcaaagaattctgataccatattagacaaccactccacccacacactttgtccaaaagattaagctaatgagcagcaaggactttagaatattagcagcgagacttcatcctcatcccaatttgtttacacttatagaaggtacatggcattctatgaatttagaattgttgtttaggaatgaattgtgtaagttagctgcaataccaaatacttttaaaaggaaggagacaaatcctggatgcttagtggagatggccagtataaagtcctcttcaccttgcccacaaagtgtttgagaaattgacaatggctaagcatagagctcttctgttttatcatgcttccataattctcatcctcactctgagtttattttgcaaagcaacttctgaggatagaaaggtaagagtcatctttgttgtaaaacaatagtcttctcttttgcttgatggctaggaagattaaaactatgctattcaatctgccatttataacaaataaattagaaatttcatcttattgggaactccctcatcagtgccaattatttttagttttatttttatttttcttcttgagtgtgaatacaatcatgctgatgcaggtgtatattgtgtacttgggatcacttcctgattg

SEQ ID NO: 68799 - DNA, 573 bp, Prunus persica
  Intron number 1 from transcript ppa026694m (locus ppa02669 4m.g) derived from phytozome v7.0 (chr-ID scaffold_8; pos 5171647 to 5172219)
gcaaacatcaggaagaaaaggtaacaaatctgaactttgaattctctgtttttttaaaaaccattagacgtcgttattattaataaaaccgtcgtttgaaatacataccacgacgattttaaaaataaaccgtcgtttgtatttcaataccacgtcgtatttagtttacttgttttacacgccattaaacgtcgttatttttaaaactttgtggtttttagacgacggaggtaatcattcccgacgtcatagatgaagagaataaagaagaaaaacaagatgaaaaggagaaagaagatgacgaccaggtatgttcacataactttgccttttttatttgtttttcaaaattccagacgtcgatatttttctttaaaccgtcgtttgtttacaacttagacggcggaattgttttctaagacgtaataaataatttaccacgacggttatttcaccgtcgtttaaattcttttcagacgacgttttattctttaaaccgtcgtttttattgaattaccacgtcattttttttatttctttaaacaggttattaaagttgttgattattcaaat

SEQ ID NO: 68800 - DNA, 547 bp, Prunus persica
  Intron number 1 from transcript ppa017394m (locus ppa01739 4m.g) derived from phytozome v7.0 (chr-ID scaffold_2; pos 9024510 to 9025056)
gttctggtagctggccaagattcaagtgctgtaagttaaatctttctgctcaactccaatttagatgatttgcttgattgtttatttattgagaagattgtctggtttttactatctacatcgtcatttacatgaaagaacttcagtttaatcatgaaccatataaatctacttaatatctgcctgactgagctataaattgtcagatttctatttaaatttcaatatcttgatacattcatagagctgagcatgaggttctgttcctgatcttgcttttctacaaatttagagttacaatgaaaattagtactgcttaacaaaactgacatcctcaccgtctttattatgtagagacttcccatcttttgaaagagctgtttctgtatagtaattactgttttttgttttgttggcataaacccttaacaatatcctttttcacagcatgaacttcaagtttttctctggctacctttgaacaaattttattttattgtcaacaaaaattgaagtagcttatagaataacactgcttgttctcagt

SEQ ID NO: 68801 - DNA, 509 bp, Prunus persica
  Intron number 2 from transcript ppa026252m (locus ppa02625 2m.g) derived from phytozome v7.0 (chr-ID scaffold_2; pos 11758899 to 11759407 reverse strand)
ttggtcttggcgccactaggttagtgtgtttcatttttcaagactgcttattcattaatgacacgtttcttgattggttttaaatttttgatgtttttgtttgatcactaagagaatagtggaaaaactataattagattaaatttgtagcactgaccatttggtctaatgatataaggtaatctcaactttgtgttggaggagtttctaagttcaaatctgatgaaacacagttgtttgaaacttggaatcctgattcgtgacgactcagacatgacatgtatggttatgacttgcaaactaaacaatggatcatggttttacccttttgtgaaacaaaagtatgttctcctaaatgtgctaccagcttatcaatctcttttgtctgtgatgatttacagaatcacagtaaagaagaaaaacataagaacgaaagaaaaagaaagtgtcttggtagtcttccatttccacaaacttttgaactttgtgtgcgtttatgtgtgatagag

SEQ ID NO: 68802 - DNA, 536 bp, Prunus persica
  Intron number 1 from transcript ppa005436m (locus ppa00543 6m.g) derived from phytozome v7.0 (chr-ID scaffold_5; pos 12495256 to 12495791 reverse strand)
ggtaagcttagatctgtcatttctttctcatttctcatctgggttttctttattctgtgctgtatgtactgcaatgtcgctcttcttttggatttggatattcagatcgaattggactaaaattagagattcaactatatacagtttcttggattggcaattttatgtaatgagcaagcatgttgtttgttcaagattattgatctagttatattccagtcattataaccccttctaatgatttcttgttgcttctcccttatctgtttacgttggttgatggtatcagtgctgtaattgatgtactgctctttgctatggtgtctgagtcttttgattgtagtgctacacttgattgcattggttatggatggtaatataaatatttaaggtcaagagtattatgttatttgaaaactgcttggaattgaagtagattgttgcttttcgttatgaatcatccttgaaatgttttatcattctggatctgattaaattggttgtggctatagccggggattggttgcagggtccat

SEQ ID NO: 68803 - DNA, 675 bp, Prunus persica
  Intron number 2 from transcript ppa003710m (locus ppa00371 0m.g) derived from phytozome v7.0 (chr-ID scaffold_2; pos 23670425 to 23671099)
acaagctcaggatcttttctcctctcgcttccaaggtactttatttctctctccatttcacttttggatttcgtgtttaaattttgggttcttgtgtttacctcaatctttatctttatttgtgttttttgtttgtctttcactaccaaacacacccacatgaacatgaatagtagattatacaggatttcaaacttctactatggttatgttgtgctcatattgatatgttaaatcatgaagaaacaagctttgaaaccctttcgtacttctataacaatttcttggtgtttcgtttaacgggtacctcgagaaatgatactccttttttcacttcttttaattgagccattagcggttgccttttccgttaaagtaaggatgtgaaacctagttatagaaactgttggaccagaagtaaaactcttttgcttggcagacagtaatattctcaggaaaattaggaaattttgattcacgggttttttctcagacctgctattgctctttttctgaattcagtttagaccttggcatgaacattctactctgcattgttcaagtttgaattcgttgttttcctgatcactctattgatttaatactttgcgctgaagctagaagttcttgttgttatcagatagtatccaagacttgcccaaactggtcgaggac

SEQ ID NO: 68804 - DNA, 532 bp, Prunus persica
  Intron number 1 from transcript ppa020058m (locus ppa02005 8m.g) derived from phytozome v7.0 (chr-ID scaffold_1; pos 22719681 to 22720212 reverse strand)
atttgcaccctactcccacatgtctttacttttttagttttcgggactgttccatgagttttggtttattggattattatattgtggtttgagttacttttaagtcaacatgtagtatacttatattatattgactttgctcgagattctttaaacattgggggttgccccccaaacaacaacttatgcacatcgtcttttaatttctttatatatattttttcttctggtacaagtgtttctttacattttaaattactattacaacatatttgcatagtataataaaaatatcatagattaatggtctgtacagctttgtttggataaatattttctttctttttactgcttcctatagttattatcattgatatgttatattaccttctaatcttctcaatttattgatttttttacatttatttttgtgttatatgctacgaaaattatttcttcctatagttattcattatcatctcacaaaaattatttctttcattgaataatgtagtcattgatctcggaagtg

SEQ ID NO: 68805 - DNA, 774 bp, Prunus persica
  Intron number 3 from transcript ppa002038m (locus ppa00204 1m.g) derived from phytozome v7.0 (chr-ID scaffold_7; pos 21856244 to 21857017 reverse strand)
atcagcttctctctgcctatcgtatcctatttggtcttttgactcgtgaaagaatttttgagttttgaaaatcttgtggcactctctaggttaattaggattttctgttcttctgcgttctaaactggaacttgcaatagtgttaatagtagtcgtgttcgtatgtgtataattttcaatcataatcagatttgcctctgcagcaagatatgcaacagaagataattcagttagaagtgaacatagataaagttactcaaaatctcctatgcaaaatatgaaataataataatgtcaaccattactgtgaaagatagattaagacaactttgatatgctaactaaagatttaatactagctatgtttcgggtaatgttgtgaaaaatccattgaacaaatgggtgggggcttatgactcctgtggtaatgaccttaccctcatgcccagagccaaagttctaacctccctctcctcctttggtctcctttttacgaaaagtaaaaaagaatacattgaacaaatgtcacatactcttgctaagagatttcctctatcaatagcaaaggtttaatacttgccagctctttttctagattaagttcgaaaaaaattaggcattatatgaacaaatgcagctatgaatattgtgtgagatcggggtttattattggttcctctagtcaacatcatgttccatttttcttttaaatgaagtttcactcaccaacttttcatgttaagcatttgaaagtattttcttagcacagtttag

SEQ ID NO: 68806 - DNA, 334 bp, Prunus persica
  Intron number 1 from transcript ppa007633m (locus ppa00763 3m.g) derived from phytozome v7.0 (chr-ID scaffold_8; pos 12557814 to 12558147 reverse strand)
acttccatcttgcttggttgtaaatatgcttaaaacttcagcttctattttttatttttgggggttcccgaaacgttacctcgtatctagataattactcttaaccactaagtttgatacttcaattattaaagcaatcttaattttgatgtgtttttttgtttcttctttctctatgttcttatgtgttaaagaaattaatggagacttatttccaaaaaaatgggaaacattgttggaagcttttatgtttgttttggtttttagaaagtttctaaacaaagctgcctccatgcatgtgttgttgctggttttctgtacagatattggtgtg

SEQ ID NO: 68807 - DNA, 595 bp, Prunus persica
  Intron number 1 from transcript ppa015179m (locus ppa01517 9m.g) derived from phytozome v7.0 (chr-ID scaffold_7; pos 22233052 to 22233646 reverse strand)
gaagtcacttttcaaccttcccatgctgtactctgtatatatcatccttttctcgttttgtttcttttttttttttttaaattatggacaagaattaaaatttgggctgacactctctgtggttacttcaacgtatcagatcacaggcaatcgaggtttgcttcaacatcgtctttgttgccggtagttcttctataccttttttatttatttataatttatcccattttctctagctgtcttcctttgattcaaatctgtttgacttacgggaaaagaaaagttttcatttttaatcaagttgaggaatttgtagtttgatgtctatataatataatgcattttgaattatgggcaatgaacaccaattcagcaggctacacacacttagcatcatcacaactttggtaaaggctttggtgtatttatgtggcagtagccctttatgttttttaatttgatcccttcgcctaccatcgttggtagaagaagcaccaaacccactgccctcttccctccattgctggtgtaattgctttgacattttcttcataatgcagccattcacttacaagggactctcgattcggtgctc

SEQ ID NO: 68808 - DNA, 555 bp, Prunus persica
  Intron number 1 from transcript ppa004386m (locus ppa00438 6m.g) derived from phytozome v7.0 (chr-ID scaffold_8; pos 933582 to 934136 reverse strand)
acttaaccctgaaaggtatttcttcatttccgttttctttttctagtttagggtttaatttctaatgggatattatatcataatgtttgctctgttctgttgagaaatgtcacattcactggaatccagtcagtttttctgtgttgctgagcttcttttgtttgtttgtttgttttttctgcagctgtaaatataatttatgtgtttttggctttgtgttcgtgtgtctgtatatataatcttatgtgttcttgtgtttgtgtgtagtctcttgtgtttatgtgtaatcttatgtgttcttgtctctgttgaagcttactgatattacatttggtcatgaagtttcttattttgatgctgtttattttctaactagtagaagattattaatccattattagggtgaatttgctatttcttagaatgtcagatcgagtgtatggatttctatttttctgatagctatttagttaattatctgttcatgtggttccatccttatcatccagttcttgtttcttctcgaatctgaatttgcagccttagttcaatcag

SEQ ID NO: 68809 - DNA, 802 bp, Prunus persica
  Intron number 1 from transcript ppa006709m (locus ppa00670 9m.g) derived from phytozome v7.0 (chr-ID scaffold_6; pos 21058704 to 21059505 reverse strand)
aggttgtcttcaattatctgattttaattattcgattttaaactcattttcatctactttttttggttatgatgaatgaacattacatggtttgggaagtgattatacttaaattttcattcaaaagaaaaaaaaagtcttgaaatttataattggattagtgaaaaaggaattggggtttgtattatagctagattaaaaatcttatgtttgggagaactttattgcttggattcttagaagaacaaataggatgtttactgcaatttccgtgtaccaactgacactgcagcttatctgtggcatgctgcgggtatcacattagtctgtgtaggctgtaggaaatgtaccatataaattgccacttcagtttgttttgtaagaaatactaaacttttggtaactcgaccattaaaatggaagaggctacaaatagaaaattgacctctttttgcctccaccaaaataaaaaagtctcttagcaaacaaagggacagacaaaaatgaaattatccaatttatcctgtctttcctaaacagcttgtgccgtagtctaaagcaatggaacaatgaaggaaaatatggtcaataccctcagtatcttctttgcacatgatgcactaataaagtgatacaaacaataggccttcttctttgaataagatcgtaggtatttacccttctatgagcaatcatccaaagaggaatttacaaattacaaggcaaatacaggtattctgacctgactgcactatcgataatggattgcagattctttcagattgcgaaaagagggcccatt

SEQ ID NO: 68810 - DNA, 854 bp, Prunus persica
  Intron number 2 from transcript ppa011343m (locus ppa01134 3m.g) derived from phytozome v7.0 (chr-ID scaffold_7; pos 16541397 to 16542250)
gcactgtttctgagaatcgcaagcttgaatccgaggttcatatctctctctctctctctctctctctctctctctacacatgtcatttggtttatgtgaattctacatctttgactttgttgggtttagtttagtttccaaggaaaatcgaggaaaatatatataaaaactcaagcgtagataggatttaaactgttagtttcttcaaaattttcttcagttttttttggaaaccaagggtgggtttaaaagtagatcattttcttgtttagggtcgatgtgcattctttatttttatttttatttttattttttaaaaactattcattatttcatttcttaaaaatatcatggggtccctaggtatagtttaattcattaattttagaggaaaatatcacactcaagctgatattaatggctttttaagtatgtccaagtactcttaaccttcgaaaaggagagaaaaaaagagagaaaaggacaaggtgacccaccacataggcacacataggaacgtgcatgagctcttggctcgaagaaagccatgccaccttgttgggtttggccacagaaacacacataaggggtggggaaaaaaatgacaaacagtagcttgctgccaccgaatcagacaacaaaaggtacttgtgttccaggcctcaagggatgtccgtacaatgtgttttaaggtggttggtggtgttggccccgttggggggccttgccaagactcattctgggaaggaacatcacgtgatcactcacgtgagatatcatgtagcccataacacacaccttgatatgtatatatgtatagtcccataatataacatttggtaccattgttgcag

SEQ ID NO: 68811 - DNA, 664 bp, Prunus persica
  Intron number 1 from transcript ppb013122m (locus ppb01312 2m.g) derived from phytozome v7.0 (chr-ID scaffold_4; pos 1992624 to 1993287)
gacgaggtatttgtccacttctcatctctaactgggtttattttctggtgttttgtgtgtgtgtgttggtgttttatttaaataatcaggttatgtaaatatggggtcttagtttgaaattgagttttgggttttattattattgataagtacatgataatagtggcagtatgaatcttatttttaatgagatttaactattgacaggctcaggttgtgatgccaaacttaaattgttaagagtggtggtagaagttcaatggcatcattttgtttgtttgactaggtatcttttgtttgtttaagacctagatacccagtgaatttcagatcaaaaaacaaaagcccatgaactttaccccaacaatacaaacataaaaaaacaaaaacaaaaaacaagatcctcttttcttctctctccagccaatccaaaaacaaaaacaacaacacaaacataaaaaaagaccatcagatattaaaagaaacctttatcaattcgaactaccatccactcaaaaagtgatttactaaatctgagagaattttagatggtggttttctttattgtactgcaacttgaggtgtttagatgtcacatgcaatagaacgcttaactttgttgttctcttggtcatatttgttgtttctgctgtctcttggcagg

SEQ ID NO: 68812 - DNA, 594 bp, Prunus persica
  Intron number 1 from transcript ppa009990m (locus ppa00999 0m.g) derived from phytozome v7.0 (chr-ID scaffold_4; pos 15981239 to 15981832 reverse strand)
ttcatcctttggtggcttatcattagaaccaagtaactacttttggaccctgtaaaagtgtattgtttttcaccaaccttgatgcttgttcactctttatttcgggtttggcagcttcagacatttgtttcatcaatggggtggtttctctggtaggatcctctccaagtggacaagtacagtgtgagagatatgctgaaaaggaggtctcagcatctcatcctggtaccactgagtacatctcattctgatgcacattaaccttcttgttcttgttattgagttgaggcaagattttgttgatgtcggttttagattgacaattgcttgatggaaagttattgtgaagataataactctgacataatgatggagatatttttctcaactctggaccattatatatttatgttcatgtgggatccagattttatgtgggtccatgataatctgaaatctcttttgtacacgtgaatttgtatacttcacttatatgggttttctagattgtgtactggttcatgataatttgaatgttcttttgtacatgtagtaagtagtaactgatgactgcaagtttttcagggggatcac

SEQ ID NO: 68813 - DNA, 552 bp, Prunus persica
  Intron number 2 from transcript ppa012120m (locus ppa01212 0m.g) derived from phytozome v7.0 (chr-ID scaffold_2; pos 18382029 to 18382580 reverse strand)
gacccagtgaaagtaaactttcattacccctctcttattttctaatttttagtgcttctacaagatatttttttgctttttaagttggcttctgttatgggtctttgctaattttgattctctattgatttagctaagttggcaatttgtagatgttatcagctgtagattattttgccaaaaaaaaaaaaaaatcttttctctatcattttcttttactgtatattttggaattgcagttttgttctcttctattttatccactttttttccagttactacttttgattgcaaatctggaagaaatctaaccccttgatgatcataaagaaattaatttgctctttgtttcttgttataactgtgtttgataacagctaaacaagtttgttgtttggccattgctctatttggatttgataatttggtttgggaaatagctacttgaatctccggtaaattttctcttcttttcgactccgtaatcccgtttgctccatatcatggattctggcaggtccttatcagggaggggtgtggaggataagagtt

SEQ ID NO: 68814 - DNA, 435 bp, Prunus persica
  Intron number 1 from transcript ppa013082m (locus ppa01308 2m.g) derived from phytozome v7.0 (chr-ID scaffold_1; pos 46841528 to 46841962)
cctctgccttctgatccttcttctgggacttcttggtacgtccgattcttgatctgttggaatattttttgtataattaatatcccatatatgttttttaatttactttgttgtacactgtgtatgcaggaaattatggcttgtggggatacttatctcagtagttgtacccttttggaagaacaaatggtggccattgcaaaagttcagaggtaaggaatcaaaagttattaatgtcattatcgtcatcacaatcgttgtcattttttttccttttgatcttggaaggagagattcgaaaagttgagactttttctcgtatattagaaagagataccattaaactaagaactagttgatgcatcagtaaatatttataatttaattgggttatgtacagaacaaatcgaaacgacgctggattcagtagaagat

SEQ ID NO: 68815 - DNA, 896 bp, Prunus persica
  Intron number 1 from transcript ppa019624m (locus ppa01962 4m.g) derived from phytozome v7.0 (chr-ID scaffold_7; pos 15752234 to 15753129)
aaaggaacgcccaataataaaagagagaaaaaaaggtaaaaagaagattggttggtcttgaattatgataagtagtagagggaatcaaaagagggaatgtgagtgctgtgtgtgtgcatgttaattcataatgagagaattgggttgtcacacacaaaagggctaaaagttgcaacttgcaccactcaatcacattcctgtttctcttgccaggtcactctctctctctctctctctctctctctctctctcacttgggttggagcacagtcacaccaagtagtcagtacaagaagaagaagaagccctaaagttttgaaggagtgggagagagagggtgtgtgtttttagtgcatgtctctatctctctctaactttcatgtttgttagtttaaagaaagattgaacaaataataattagtagctaataatatatacattgttgcaattaaaactttggcttggccttggccctgattgttgtttgcaatataataatagcagaaacacactgcacagttgggttctttgtccatctgctataggggtgggcataaaaaccgataaaccgatcaaaccgaccgaaccaaaccaaaccaaaccgaaaaataaggtttttttgaccaaaccgaaaaagtcaacgctggacctgaaccgaaccgttgacttcggttcaggcttcgggtctaaatttttttgaaccgttggacctgaaccgaaccgaccattatttaattatatatgcatttgacacatggcgttgtctcattggcttaaataagaactttgggtgggtctgcttgcactatattagaacctctctcaattatttgtttattattttttcaataaccctatcagactctctctcacactcactcggccgtctctctctc

SEQ ID NO: 68816 - DNA, 480 bp, Prunus persica
  Intron number 2 from transcript ppa012966m (locus ppa01296 6m.g) derived from phytozome v7.0 (chr-ID scaffold_8; pos 1323359 to 1323838)
cagaggtatatagagcagcacaatgaggttgagctctctgcaatttgtttgtaattaaatttgctttattttgttatgtttttagattgtaacttttatattaatgcttgatatttgttgttttgtcaaaaaagtgtattaatgcttgatgaattcattcaatttgcaacatgtgtatatgaattgggccaatcgtgaataattaagctcaaaagtttttaaattttaattgggctgaaacttaaaaaaattgaagaagaataaaaaaattcaattgagatgaagagtcggtccaaactgtaaacaccgaaactgaattggatctaaatcaattcgagtacctgaatcagaccagaccaaatatatagttccaattccagttttaagttgagatgagaaccgtaccgtacccaaccctaattgattatactaatttgctcaaaagaagaagaaaaaaagggtgttttaatcccatcatct

SEQ ID NO: 68817 - DNA, 697 bp, Prunus persica
  Intron number 1 from transcript ppa023760m (locus ppa02376 0m.g) derived from phytozome v7.0 (chr-ID scaffold_8; pos 12210964 to 12211660)
tcgtggcggtcaagaaccttctcaacgacgggtacgtgtctttttactcaatttcaaatcttcccctctttttttttcatcgaaatatttcttgaatcaatagctaatatagagtaaacctcgttggcttcactgaatcaataactaatatagtaatcactgtttatacactcagtgacctgcttttcttttgattaaaaagaaaaagagcctccctttgttccgctgtacgaggaaaagaaaattactatgcgcttttaacacttttattcttcagtctttttatttttagtatctttactgtatacaatttcaactttgttctttcttcatgcctcattgttatgtctgatcttcagagcttgttttcacttttcatcattgattttctacttttgattgaccaaatattactttgtcatcgaaacattcccattttaatattaaatatattaaaataccataccagaaacaataggagcaaaaacataaacagtgccgtggctccatgatggatgttgaaaatttttcctgtgaaatgaaattatatgaagtgcagttgcttttttgccatgaatgcaaattttcagatttgaacttggtctttgtataacatatctgttaactcaaaatttaattgctgcttgccatcttacatataggggtcaggcagagatactgtttaaggcggaagtgg

SEQ ID NO: 68818 - DNA, 814 bp, Prunus persica
  Intron number 1 from transcript ppa002456m (locus ppa00245 6m.g) derived from phytozome v7.0 (chr-ID scaffold_7; pos 22574797 to 22575610)
aaagcttgaagcttgaattaatttatagatgttggtaataaaggtccagaattggaatagtgttggaagaaagatgagattattatgagataggatttgcgagaaagtgaaaatgtgaaggaattattaccgatgccagggtcggtgtcaatgatgatcttcttgggttcagtcactgccattgtcgacgactgtcaaacagtcaaaaggaaaaaaaagactcaactacttattaaggacgctcgctcgctgctactgcctctgcctctggcctggcccgctgatgaagatgaagatgcagatgcagatgatgcactgtttgattgattgattatttgtaccagaaaagaaactgtgagttggaaaaagagaaaaagaaactgtgagtgtgagagagactgagaaaaagttcttattattctaaacaaccgcactgctgcagttgtcccctcctaaaataaaaagctaaaacaaacaaacaaacaaaccgcacaaaagctgacgctgatcccatatgctcgttttgctagctattaacggctatgagggaccacggccccacttgagaagtgatggcatttcagaaaatatatctgaaaataatgggtatgttgataaaacaatgatgaccttcccccttaccctctctccctccgttagattttgaaatcatttccttttcagatctgctgtttcccttgcttaacactcgctcacacacacgcagagtgaggccttcatacgatatgaaccgatcgttgtcgtcaaaactcgccaagaaaccctctccagctccgtctccgtctccggcacc

SEQ ID NO: 68819 - DNA, 861 bp, Prunus persica
  Intron number 2 from transcript ppa006124m (locus ppa00612 4m.g) derived from phytozome v7.0 (chr-ID scaffold_2; pos 23272052 to 23272912)
gcagccgcacggctgtgatcttcccaggtcagtggctcagtctcttgctctacgcacccattaaacgcattttttagctgctcgtttattgtataacgctttatttcctcgtttaattggttttcttggggaaagttgaaccgattttgctttccgttgctttacccaaaaaaaaaaaacaaaacaaaacaaaatcaaagactcgtacgatgggaactctcctgttctcgatccctactcacgaatctcatcaccgacaaacaaaaccgtttgtccctttgtctttgttttgccgaacctgttttttccaatcgaaccggccgggtggaccagtcatgcatgggtttagaataagctgcgttaaattcaaggggaatcgaaatcgcttgtacctttcttccatctgtccccgtgtgacacaagctatgaacggggaaccaatttgtgtatgaacacgtgtatgttttcaacggctgtgatggccgccgttaatttcgtatgtatccgccgctaaggctccgaaatgagaaaggcccaaaacatagtgggcgtgggcacggcccagtttgctgatcatttcctgtgcaattaatgtagaaaactatgtaattttaacttgattgtcaaaactcaaaactatgttaatatacgtaatttaatttctctaataatatatacttcttctgctctctttttttcttctgtttagggtcttctgtttaatttaatttctgtaattactaattagtaggtgatcaactattacaaaatcatatacttgatgttggattttctaatttcccagtaatgtaaagtgtaaaagattctactcacaaatgatacagcttcaacgcaacattg

SEQ ID NO: 68820 - DNA, 562 bp, Prunus persica
  Intron number 4 from transcript ppb013415m (locus ppb01341 5m.g) derived from phytozome v7.0 (chr-ID scaffold_2; pos 21486944 to 21487505)
taattgacattttagctcttcttccacttccacaggtaattaagagcatccttttcatattcttctcacactaattaattaatttgatttgaatgctggtataaattaaacattgtattttgtcactcacaggtggtaattatccttttcttttctaaagcaaagggctggagatctttgaacatagcgatgcttatgaattctcttgctatggtgcaatatgtgccacggattcttcgaatttacttctcatgtaaggaacttaaagagagttttaatgaacgtattggactatggattaaaagtgtactcaatttctttatgtacatccttgctagtcatgtaagtttcagtctcttcatctttaatttatgtaaaggttgatgcataatttttcttttcttttttttcttcgttttttttcttgatcaaagcttaggttcttaaatgaatcaaccttacaggtccagctaccgaagcatatttgacaattcgttctaatgaactataatttgtcaattctttaggtactcggagctttttggtacttttttgctattca

SEQ ID NO: 68821 - DNA, 473 bp, Prunus persica
  Intron number 1 from transcript ppa008314m (locus ppa00831 4m.g) derived from phytozome v7.0 (chr-ID scaffold_3; pos 21069318 to 21069790 reverse strand)
tagctaaggccattgctgctgagtgggaataccaggtgtgctgcttttatgccctattttcaacttagaagttattagctcaaataagtttcactcaagcttggaaatggggcctttgagtttaatagtaacttggctcaaatgggtttctctaaattgattttttttttcttctccttgattgtgtttctatattcctatctactttggatgttttgcattagtaataggtagctcagttcaaattggtattttgaaagttgaaagttacacaagtgggttcctttctcaattgaacttctgccctccattcctggagctctgttctctggtttacattaaacttttttgtgcaagctactggaactactgctaataaaaatgaaaaaactttgaggttgtgtgtttttcttgacttgtgttaagatgtttggtggttgtcttatgaaacttcaattatttttagcaaacag

SEQ ID NO: 68822 - DNA, 823 bp, Prunus persica
  Intron number 1 from transcript ppa015320m (locus ppa01532 0m.g) derived from phytozome v7.0 (chr-ID scaffold_4; pos 17010210 to 17011032)
cccagccctaaaagttactgatgagagagagggacgaagagagagatggagagagagagggagcaacaaagcttcaagcttctgctatggaggcttgaagcttgagctcagagcaagcgttgctcgagcgatgagacgagtagaaaaaaaaattcgaaaaaaacagaattttttatgttttctaatttgttggtgtttttgagtttattttgagtttgagtttttaattttatatgattatatttgaagggaaaaaaaaaacccaaaattcaagtgttatatctctgtttattaattaaattattaaagttgaacctttcatgctcatatttttagtttctttattgatattgcctctatcttgatgtggtgattgttgagatttttattttttatttttaagaaaatctcgacggaacgagaaaaactttattgataaaatgaagaattacaacgcgaggaacaataagactgaccctgacacaaaaaatcacataataaggtgttctaaataagatcatcaaaccaaataaaaatatccacattatgcagaccgaatcgagcaagtcaccaatgtgcaacaccatttgcttcccaatgagtaaattgaaaaagagatccaggaatctcaaataaagttgaggattttattgttattagttgcttttattataaaatttaaaactctggaaaccttaaaaagacaaaaataaaaataaaaagaagacattactctaaaaagatatttggattaatattttctttaaaaaaatcgatgattagtttataaaataaaataaacaaactacaattttagtgatta

SEQ ID NO: 68823 - DNA, 479 bp, Prunus persica
  Intron number 1 from transcript ppa026941m (locus ppa02694 1m.g) derived from phytozome v7.0 (chr-ID scaffold_4; pos 5103098 to 5103576)
tttaaaaaattgtatagccggtcggctgtactacagtatatatttcaaaaaataatatagccgtctggctagacttattttgacatgtgggtacctaagcgctaggctgccctttttctatagatagtatagccgcgcggctatactttaatttgttttctcaattagtatagccgaccggctagacccgggatttttagtttgttttaaaaatagtatgcctcccggctagacccggaatttttaatttgttttaaaaatagtatggccgcacggatatactatttttaagaatcatttataaaaccgagcatagccgcgcatcttctcattgtagctttctcctcaacctttcagaatgttgcaattgttatcagccataaaagttaagaacttattgcgataattacatcatacgattttccttgaaggttgacttattatgattatattctaattaatcagggctcttggcactg

SEQ ID NO: 68824 - DNA, 527 bp, Prunus persica
  Intron number 1 from transcript ppa011481m (locus ppa01148 1m.g) derived from phytozome v7.0 (chr-ID scaffold_2; pos 20424472 to 20424998)
ttccaactttgtacaagacctgtctcccaccattggtatttcttcttcttttattttcttcgaatgcccttttttttccctctcccaagattttcatttcaaggtttcagtcctgtgaagtgctgatgttctgtatctttctgttgcaaattaagtacatgttggtttctttatattggtggcaatggcatatgcatttttttgatagttttaatagattagttttgagttgtctacttttattgtaattttttgtaccgaggggtgagggagtgaagaaattgcaaaggttttcttgtatttttcatgatgcaatatgcaaaatctgtgactagaatcggggtgttcatatatgtaggtagattaattggtgactaagttaagagcataggaaattattctgcctaccttaatgtgcaatttcaaggaaaattgtagaactttttactttcttgtgttttagtgctgatatgctttaacaaccatttcaaggtgtggatttcaagatcaaacagcttttagttggt

SEQ ID NO: 68825 - DNA, 919 bp, Prunus persica
  Intron number 1 from transcript ppa013736m (locus ppa01373 6m.g) derived from phytozome v7.0 (chr-ID scaffold_1; pos 32053637 to 32054555 reverse strand)
ttcttctcctccacctctaatcatactttatcaaggtttgcccaccccttccgtttctcctttaacctttgattttttattttctttgctgtctgattgtgggatctaaattcttaacaatttgattcgaaacctatcgttccattaaatttgcttctccaatttgagctagatcagattttgatctattttggctttgataattgccaagcttttataggctaaactttagcttcgatacctaagtccctgtcgttgaagctcggataatttgatagttctaggtctgtagttttttcatttctttcctttttctttaaaaaaaaaaaaaaaaaatcacttgggaattatgtgaaattttcctttgtggtaaataattattgtctggaagaagctatgttatctattttcctaatacgctaatggtagaaaataaggaatagaatcacggtagttgaaatagaagtggaaaatataatgaggatcaaaagtttctgttggtatagtgcctgcctgtttttcaaacttgggagtggctgtctgccatcaggattcaggtgcctctttagatgcacataatataaatccagatgattgatccattttagggaggaaagtttcccatattgttgtctgcattctctaaacgaatttccaacaaataggaaaagggttatcttggatagtcattgcatttgagcacaaatgttgtctttgatcgtactcttgccttttgtacttaaagagcttggtttgaactggggttgaggtatcttttttatccatgtataccattgctaaccatgtggaagttttgtggttgagttatctcatttgtgcttgtttttaatccttttggtataccattgttgatgataatattattcctttttctccccaacttgtggatgcagggtgg

SEQ ID NO: 68826 - DNA, 470 bp, Prunus persica
  Intron number 1 from transcript ppa026789m (locus ppa02678 9m.g) derived from phytozome v7.0 (chr-ID scaffold_8; pos 19788622 to 19789091)
gaccgcttatctgcctcgccgcccgataaggtttgcttcacgctcagcttctgactgtgtgcgtaaaaagtttagttcttttttgttgggtaatctttgtatttctttcactgtaccattgaaattaacccatttgagttttttccttttgatttcaataagtaagtaggaaattttgtttatttttagaactgaagtaaaagaactgaatttgtttatttgttgggattgttgattacagcttgctttgtgctcaagctataactttagacttcgtataatggttaccgctttttttttttgggtgaaaataatggttactgctattggtttgtcaaaagtatgttttttgcgttatgtattgtctgtaaagaacattgataatttatacacgtctgctgatacattcttcaactttgattatatgcttctacatttagcaatactgggaagctggtggaaactgcaat

SEQ ID NO: 68827 - DNA, 734 bp, Prunus persica
  Intron number 1 from transcript ppa005244m (locus ppa00524 4m.g) derived from phytozome v7.0 (chr-ID scaffold_1; pos 37133245 to 37133978 reverse strand)
caaggccttctcttgtggttagagatacagtaagaactctctctctctctctcaatctctcaatctctcaatctctcaatctctcaatctctcaatcttcaaacaaatgccattaaagtgttcttaaggtttttgcagtctttgagtttttgattttggtttcttcctctctttttcactacacaaagacttaaactttgaatgagtttttagattctaagaaaaacccattttcagaaatttgttctctcttgctatgctatatctttcaagttctcatgacagttagagccattgactggtttttgtccaaaaaagaaacagccccaacccaacccacttattacttcaagttccaacggtttctcaaagatgattaagcaagaagaatataaaaaacctccatttttggcaaaacaaatttccttcgatctttcactttcttgggactccccaagcatgcgtaacattggtcagaagaaactcagcatacccttttgatttcccaagctccccttttctttttatgttttgaaaaagaaatatcagtaaccttaatattctcagtccttagctagctagctagctagttgcttagccaggcaaagcaaacaacataaatggggctcacacatcacttccatgttcaattttgattgcctttttgacctttttccgaatgtaattttaactatatattttttgggtttcttttttttgaataaattaggtac

SEQ ID NO: 68828 - DNA, 625 bp, Prunus persica
  Intron number 2 from transcript ppa014253m (locus ppa01425 3m.g) derived from phytozome v7.0 (chr-ID scaffold_6; pos 21033098 to 21033722 reverse strand)
tccatccaggtaattctttggggtgtttctaactcctttttagtttctgaggaaaattacttaactagttgttgattactatgtttcctagtcaattcaaaaactatttgtttaagtctgtcgcgattttagtcttgatgggtttgtaataaatacttttctgcttattagtataaatggaatttgattgagggtgggttatcaaggaatgttcaatttgtgcctgccaatgctgcttgttcgttttttattcttctttttgtgggactttttgataaattcagctcctttgttgcaaacttgaggtgatagtgattataatttataattcattggttaagatgactgcataattcaagagcatcttgttgtatatattgataatttgtagctggtgatgaagcctctttgttttcgcctatcattctttattttgtgctaagtgagtgatttgtatgagtttgggggctaggatagttaaagtacagaacaattagttttgggctgatcaatatagtcaattctaattgtttcccagggagctaatgtgttctctttcatctgcatactatgaccgattattgagtaatggtattgcaaatgttgactgcagtgcaaggtgtgt

SEQ ID NO: 68829 - DNA, 901 bp, Prunus persica
  Intron number 3 from transcript ppa007870m (locus ppa00787 0m.g) derived from phytozome v7.0 (chr-ID scaffold_7; pos 12378549 to 12379449 reverse strand)
ttgaagacaagcatcttgaactcataaagaacaaggtaacaagacattctagtatgatcttgtgtcaaattttatatttcaaagaactataacattattgattttctgatgtgtgagaaaattcagctgtattaaatattaataataatgcttgtgaacattagaaggaaggtaaatattgtaatgttcttttttcattccatattaaaccgtgtctatacttttaactaatagtaatagaaatgcctgacaaggtgcattgggatgttgttgattttccagcataaatgcagtataatggattttaataaggctgtaatgtaggccactggcactgatattggtattccttgttacatagaaagcatagcatgaaattcttataaaaagccataaaatattgttacctaatatattggttgatatttataaggtatgagaagtgagacacggttaggacctcccttggttgaggttagctctatgtttgggttaggattcacggtttcaaatttccaattatagaatcaactaagcttctgtccctatcttttaaattatttgttgtttgtggagctgaagattttacagcacaaggcatgttttcgtagcatgagattgtgaatagaaagaagactaatttctctatcagacctagattttcctaacctctataactgcatggtagatcttctgttattataattttactttttttcttctgcactatagaatctaggtgacttagttaaccgtagttcatataaaagctctatgagtacttggtgaagtatacaatactttttgtaaatagatgcttttgaacaacttttgattgtttaaaagaaaattatgcatttccacagtgtctagattctcttcaaaacctggaggttttgaa

SEQ ID NO: 68830 - DNA, 805 bp, Prunus persica
  Intron number 2 from transcript ppa012236m (locus ppa01223 6m.g) derived from phytozome v7.0 (chr-ID scaffold_5; pos 10711685 to 10712489 reverse strand)
attttcagagtttggtgagtttgttgttcattttctaaagttttgtcttttttaatatttattttagcaatgttctttgaaggtgcctaaaacaattattgggttaggcttaaaaaaaaacaactattgggttcttttttcttcttctggggattcaaaatttaattcacagattgaaattgaatattggttgtgcgggtttgacaattgaagtaacacagtggcaactgcttctaataatcatgaccatttgtttatttgactttgcatctggcaatgtggtcttggttatgatacggctcatacggggtgttaaaaggcttttgattttgtcaaagacacgtatatatttcagccatggcattatcccccttacttcctcattcctaaggccaattggccgaatgccttccattgctttcctctgtctgggtcttgccatatatgactgaagacatcatcatattataatgcattttcaaaattattgaagttattttcagagcgaaatctaggaattttcctctgcatcattgcagcataaaaaatgtcgatatgtatttcttcttttttcatgattggttcttagagttgtgattctcccggccctacccaagtgttcaattatccttagattacaagtggcatagcaccgagcctgtatacatttcaaatcatacatgatagtacctcaatgatgtaaactgttttctacactttgatccttcatttccgagccagagtcataattgctttggttttatgtgcagatctctgaactttctctggagggcttcattgttgg

SEQ ID NO: 68831 - DNA, 876 bp, Prunus persica
  Intron number 1 from transcript ppa014546m (locus ppa01454 6m.g) derived from phytozome v7.0 (chr-ID scaffold_8; pos 21549275 to 21550150)
cgtttcttgttgtcgcagcctccttctcgtctcaggtaaaaccctaacatcgacggccgcacttgactcttttgttttgatttttcttttcctcttattattctctttgaactatcaaatcgtgtttatagggtttgtctgaaatgatttccttactttgctatttgaatccaattactttgcgtttctagtagattcgatctggattttcgtgttgtttttacttatctgtttgattcacctgaaaatgtattataaaattcgatcttgggatgaagggtttggagaaaaccaaactctggaccccagcaagcatgtaacacacttgtaaaactttcatggattgtacaaacaggtttagatcctaactaaaatatattgtgtcatgccaaactcattttgtggataacctttttgttctgaaagtttcccatagtttttaactttttgggcatcctatcaaaagattaaattttgaggcgtaaactttgttgccaaagtgtgatactggtctgtttagttatgttcttgtatacgttttcctacggggacacactccttattgataaagccacaaaaatcctagtcctgttttgggttcaatcccaggtggtgtccctttgttgcccaacttcaaacgaagttcttaaatatgtactgaaactaacttcaacttgttagtggattttataacagagtaatatctaatccaagtttctgttctgaaattagtctgaacgatgttaaatgcataaatttcagcgttagtttgaatgcaataggcttgttgcttgttgatatgtttcattttagctttgagcctaatcgtgcaagcataatgagaatatgaaactcttctattgcagatcaagcgga

SEQ ID NO: 68832 - DNA, 659 bp, Prunus persica
  Intron number 1 from transcript ppa012918m (locus ppa01291 8m.g) derived from phytozome v7.0 (chr-ID scaffold_9; pos 1267939 to 1268597 reverse strand)
accaaggtacataattcatgattgttagcttatagatgaattaatacacgaattatttaattaaataagtaattatttgtgaatatatggtatatgtgttctgtagatttgggttgttggtttgaatgggttttgatagggtttgaagtgtgtttaactgtttgttttgaggagaattgaaaacagcggattagggttaatttctgtgttgggtttgtttttggttcatgagaagctttagttaattgtaagtgaatttctgctttgcgtaatgtttttcattgtttggagaccaaactatgatctttaatcctgctatttgtgtacaatcagataaataaatatgcctgtcttcaatgggctattatttggtctaagttgtgattcaactccgttttgatagttttgtcttctgtatttattctccatcaacatagaacagtgaaggcggtatccaaatattgttagatggtatcccttctctgttcttagggtcttgcatttgtgtgttaatgcctttggttgataaatgaaagaagcctggcactactttatatgtgtccatgcctgttgtcgctagcctttttggtactcggaggattgttggtttgcattatgtgtaaatgatgaagttacaatttatacgtgcagttgacaca

SEQ ID NO: 68833 - DNA, 647 bp, Prunus persica
  Intron number 1 from transcript ppa025654m (locus ppa02565 4m.g) derived from phytozome v7.0 (chr-ID scaffold_8; pos 13501831 to 13502477)
ggtatatgactaaatatcttttttttttttttttggatatccaaggtgttttcatacataacattgtcacttgaacaaaattggtcaaggatttaactcaattgaatagtattacaaagcaagtttcaaaactttgaatctcaataacagtatttaatttgttgttatgtgtactatcccgtattctaagaatgaatgaaaacaaaaatattatgcacgaacatcaaaccattcgactacaatgatcctacaaagattcaacatttgaaaatttgctcaccatcgttgcaattgtcaaagtatttggcatcaacaaccttgttggtaagagaccaaaatgcttgttaactaacctcttaagtctttagagatccaattttaaattgaagtcaaaattcaaagaaaggaaaaaaaaatggtcaaacaagcaaagccagaaagcctatcagtacttttgaatccaataaataatatgaagacacatacaaacaatgaatatatatttcccaatcaaattggggtgaccaaaccagaaacataaacacatggatcaaagaaagaaaattttgatcaaatcaatctctactttgctgatcattcttctctgtgcagcaaatataacagaatcaacaaaccctagcaagaag

SEQ ID NO: 68834 - DNA, 749 bp, Prunus persica
  Intron number 1 from transcript ppa020973m (locus ppa02097 3m.g) derived from phytozome v7.0 (chr-ID scaffold_1; pos 45099189 to 45099937)
gaggtgtgggtactttgtctctgttaaaaggaaattgcaggtttatggtttggtttaaacaattgtgtggctgtgtgttcgctttaggtgtcagtgtcgtgatgcaaaggagactgtgtttctaggtttaaattcagtgtttctatgtacataattaggtgatttcttaatatttctattaggttatttcagtttgttttctgtttgatttggagagctgcgcttggcatgattgttttctttaaacttggttgatttaggtttggccagaaggtgctggcaatggctacagcgacatatccaccaccaccaccatattataagctctacaaagattacttgcaagatcccaaatcagctccggagccgccttctccaatttaaaggacatgcatttgttatggtgacaattacactatgagcttttctcattctttgcattcttcctgtcaaaatttatataaactgtgtaatttgatttctgaaaattgcttttgtcactaatgactagatgctagaagtttttgtgaaaagtaaagtttgttgaatttactgtttgaagaatgccatctctcctttatagcagttgctttactgtttgaagacctttaaagttgttggctttgaatgttgagtttggaaaatatgtgtaattctataatctactgtgttgatgttatcaatgtatgatttctttgttttccttgtaatctcttcttaattagttttatcttattttatatagactg

SEQ ID NO: 68835 - DNA, 816 bp, Prunus persica
  Intron number 1 from transcript ppa008722m (locus ppa00872 2m.g) derived from phytozome v7.0 (chr-ID scaffold_7; pos 21218383 to 21219198)
cctccgatcgccctggcaatatcaccttccacaaggtaccgtcttttttcttttctttgggttgaattttagtcattcttgttttgcctctctgcttctgttttctttcttttgcattttgagctttattttgaagcttttatgctgttgttggttgtttcactatttttgtgattacataagccggtacctatgactgggtttatgaaatgaatatccttttttgtttcttttcttccaacattgtggaagttgaaacttgaaatgaatttcaaattgttgaagatgagtaaataatatgacatttgcaatttgagaatacatagaaaagtaattagggtgattccaactttgtttctcctaggcatatggatatgaaaatttaattatgtgctgtagttacatgatgggttgaattggtggtcatactgaagtcatgggaacctaggttgtgcttttgattgattgaaaatcatgcattgcctttagttctgctgcccttttttagcctttgtttcactgagaatatgaaacatgcaatatatgatgcttaggattaaatacttgagagaggctgtgatattaaacggcattccaattagcacaaccaattctatttatggcatgttgtttgatttgtatagggaagcaatgggtcatgttttttccctttcttgtctgattcgttcttcatttttataacaacagataactattaataagctctccaaaatgtcaatttgtaatgctgtgataatctcctgtctgctgcgtttctaatgtgaatcttgcttatgtgaccagttggtcagtcgg

SEQ ID NO: 68836 - DNA, 883 bp, Prunus persica
  Intron number 3 from transcript ppa000703m (locus ppa00067 0m.g) derived from phytozome v7.0 (chr-ID scaffold_1; pos 4690776 to 4691658)
tcttttcaaagaggctggaaaccaacaagtgagtacttcttttcctgtattttctttgaccattaaatttttgtaagtatcatatgtagtaaaatgtgaggacatcatgatatgttgtttgaattgcatcttcttttatcttttggtttcctttggcccggtttatttctggaaactgctccatgcttcaattatttgaatctaatagtagcattatacctagtcggaataatttcttctttgtttcactcaataaactgctttcatttacgacaattggttcccttaatgctaataaccaactaatgccataatgccattgttcagttctgaccagggggtgtattcttgcttcactcatctttcctttcttttattatctgctccttttccatcctttctagccatgtgtatctggtacaggggtttctgttttttttattttcaataacacactctgtagctctttttcaaatcctggaagccgttttgttttgcactgtttcttcttgtagcttatatgatgacaaactgatgtttgataccatcccgttgaatatgttccaaaagtgaattttaattttgttcattttaggttaataccctgtttgtcggtctggaataggtgctatgggaattgatctcgtgatcctctcatcatttcttgttcacagttttatatttgaagaagaatcaattgttatagaatgtctaaagctacattcttgttcatttgttttaggattgtgttttggacctttgtagatttatgtcatatatgaatctgtgtttagtaacactcttctttcggttagttttatagttaacttgctgtttcttatttttaggaattgtaccaccgaaaccaagttctgctggcgat

SEQ ID NO: 68837 - DNA, 609 bp, Prunus persica
  Intron number 1 from transcript ppa000020m (locus ppa00002 0m.g) derived from phytozome v7.0 (chr-ID scaffold_1; pos 37777757 to 37778365)
gagtggaggagactgagtatcggtatgtttataaaatttgaacggattattatttgtacaatatgtgtagtgtttttatagattatggtttgtacttatctcagtgccacttacgctctatcttgcacaattgtttcattaactagttagaatttaaacctgcgctaaaccttttcaaagaagaaaccattgataccaagattaaaggtttgtggttctgttcaatagtcttctacagttggtaggcaaatatgaagattgacacatattttatgtttttagcttctgggcctagttgtttggtttgtcataaatgtgatagataggtatgaggaggattggtcagtttaagaaagcttttatacatgttactttgaagatgcttcatgaattgtgggccatcttaggagtggtgtctgtggtgttcagatgtgagattagatttatgtgttactgcatcttggatgaattttgagaatggcaatatcagaaaaggaagtagttattattagggtatcttctccttgaaataccaaaagtggccttaggatgtactgcttactttcttctagaattttttttccattcactcttgatgttccttgcagc

SEQ ID NO: 68838 - DNA, 798 bp, Prunus persica
  Intron number 1 from transcript ppb025553m (locus ppb02555 3m.g) derived from phytozome v7.0 (chr-ID scaffold_3; pos 1187305 to 1188102)
tttcagcttgaacaggatgtaagttttcttcgtaccaagaagcaaaaaacaactaattgtgtctctgtacaactattctttatgcatcttctatggggttcagtgcaaaagtgttgggagcagagtaggtatcgaaaaattgcttttgactttcagtaagacttgtgacttaggagatagatgtataacattatcaaccagtgagagaatgtataaaatttccgattgtgtcctggatgcttaattatccatatggacgtggattttagtaggcttgttctctatgtctatttccatctccagggatttctgttttactgcagtagataacatttcttcaactcttgctaaattcctagtttaggttaacctataggtaacgtcatagttctaatggcatgctaaaagaatttccatagaaagtggatctccccaagtgtcaagccactgagaattgttggtaacttgtgaaggtcctctgcaatgtcatgccaaatttggacttggaagatgcccgaaagtttgaattcggtgtatctaattgttgaattgatggattacactgatgatatcatgacagaattttgcagataggaattaaaaaatatgaatatgatttctggataggaatgtcgcagctagggcacatctaattgtttaaatatcttccgtaatgtcaaagagccaatatttaaccttttaaaaggacatccttttcatagtcacaaattacaattcaccaatgtaattgcttctgttataggtacaaaggttgcaacaacagctgcgagaagaact

SEQ ID NO: 68839 - DNA, 1051 bp, Prunus persica
  Intron number 1 from transcript ppa010876m (locus ppa01084 7m.g) derived from phytozome v7.0 (chr-ID scaffold_6; pos 1849013 to 1850063)
cattaagaacctcaacgagaaaatcaaaaaagaaggtaactcaatctatgctctatctcttcttccctttgtttggctaccgagaaacctgaggaaactgtaagaaaacaaaatgccgaatctctcacttgttttaattaactcaccgtagtaatgtctagtctgcaaaattaatcgcattagtctcctttgaatcgattatagtgtattttcttttgtttcttttttaacttctcttagcgcaagttgaggtttagggttttagtttgaattggcgagtgcaaccgcagcagatagggcatggtgaatttggtgaaaattcggtatggtagttgattcagaaactataatggtgaatctttgtgcaagtgttgaaaggactattgttggttgtatattgaattgggtacttgaacttactcatatgaaacctaggtaatagttgaatttcatgaagtataaccggatactaaggttgcattgcagttgtgaatttaaaagaatgggttttgttttaacgatttagtttacatgatttgcataaaatgctaaaaatgtggagaaaagaaaattctgatacttattgttgtaaatcaagaacaaaacactatatttatgtcttgagtatttgaactttatcctatttcaaacaatcaagttcacgttgggagttagtaacttttatgttaatggttatgaaagtctcattaaacaatttaaatgagtaatcacttcaaaatctcatcttctgaatccacaaaccaaatgcaacattggggagttttgtggttgtaaagtgattctggtttacttgggtgcttgttggatcataaaattgagaaagtgacactgtagaggcaagagggtaaccacaattttctgctttagtggtcttgacatcttacttcctttttgaagtcgacttttgaattgtctagcataacaagatattaatgttacttttagggctaaacttttgtatgttaatagtggcattctttttgcttcctttgcagaattgaagaggtccctgtattgcttattctcgcaa

SEQ ID NO: 68840 - DNA, 782 bp, Prunus persica
  Intron number 1 from transcript ppa020136m (locus ppa02013 6m.g) derived from phytozome v7.0 (chr-ID scaffold_8; pos 11070468 to 11071249 reverse strand)
ctctaattgctggaattgcagacctgtctttggttcaaatttccagataacatattcatattttatatatatatatatatatatatatatatatatatatacaccagaagtttaatttgccgttatcattgttctgctgttgagtattggcttcttgttgtctcaaatttcactgaaacatggatgacggtttaagaccggggaagttttaaggattgcagttttggaaactctggttttgtcttcacagtgtttcataatttatgggttacatgatgcccaaataatttttttcttccatcagtctagttcccatgttagaagatgattgatttatttgttgactctacttcaacatcttaccaaaatatgtcatggagaggcaagagctagatgatgctgtttgtgcaaatcagcaaaaccactcattgccactgccattgtgcaccaaccatgcatctgctagttggttagggcctttagactggcaaggaaaatcatgacccccatcatgtggagtagctgacgtgtaatgctatcggtcgtccatgtggtttttggccaacatcaaaactttactattaaaccatagccatttgtcagtaagtatggaaaaaacaagcaagagagatcataacaaccgcgtatttactttccattttggactcttcacaatgtgagcgtcatgcatttgtctgtttactaaacagaagaaaaataaatatcataagttttccaagacaatatttcggcctatttttacaaggtgggcaaaaaccctc

SEQ ID NO: 68841 - DNA, 1016 bp, Prunus persica
  Intron number 4 from transcript ppa000794m (locus ppa00079 4m.g) derived from phytozome v7.0 (chr-ID scaffold_1; pos 41780677 to 41781692)
ggaggaaaccggtatggtgatgatgattcattttttaattaacacagtgggagtaagatttccatcttcctcccattgattatatgcagacacaatcttctgttaaattaaggttttacattagagagaaggatgctctttcattgggcccgcttggacatataggagttggatcatgacccacaaatgtgttttaagtttttagagattgatgacatatcacagaacaaatcaaagatagttcttttccaatttcaggaatgttttttttcatatcttcaccactgccaccactcaattaacccttttccacaacataccgcccctgctgctaattcaaccacaacacaccctccattaccatcccctcggcatgatcaccagtaacgcagcaccaacattagcacctttctgttaccatcccatcggcatcattaccagtaacactttactaaacacaaccccatctgtcactattcactaccacagcctgccacgtttgttggaaaaggaaccaataaaccccctttaatccttaaatcaccagcacctttatgcccgcttcggccatgcttctgatttcacagcttcaaatttccgcactcccccaatgacctaaagtttactaccaagctttcatctccaattttgcaaattctagcatgtcgtgactagctatttgttttcccaaagcagttttaaactacagatagaaccgaaaagtttcacattttgattgtagtcaccatttgactagtgttctctatggtatttattttattctgggagaaaaaaaggggaacaggagatgaaaacctggggttttatcaaatttgacctttccatatgccaaaatttgacttagtagaagttcttgtactattgagaatttttagttgcaaatcggtaatcaagattagtgtgcagttatgcttgcacatacggactggtggtttttgttattcacatagtttgctgccaaaaaattaaccaggttttactcactggattggctg

SEQ ID NO: 68842 - DNA, 485 bp, Prunus persica
  Intron number 1 from transcript ppa008542m (locus ppa00852 2m.g) derived from phytozome v7.0 (chr-ID scaffold_6; pos 25130410 to 25130894)
caattgtcgctgccgctgcttcacaggaggaatcggtgagttgaatttgtgagttttcttttgttttatgataggactaagagtgtttgggtgttttcatttgtttgggtcgtgaacatgggggattgaggttaatgtatgccatgtgtttgattgcgtaatgctgttacttaggtgggattatcaagttttgatttttggcacttggaaacaagtatgaatattttctgaaatttgagtttgagaaatcatatatcatttaccctgttttttatttatttaaaaaaactctatgtttgatcatagtgtcgtgaagatttaaaggcctgctaaccaattagatttgataggaagagagttatatgcatggtctgggattgatttatcgttcattcggggtgcaacttgttcgcttatcatgacattgatttgaattttctttcctagaagcatccagagattgaggtggagaaagaaaaggatac

SEQ ID NO: 68843 - DNA, 416 bp, Prunus persica
  Intron number 1 from transcript ppa007626m (locus ppa00762 6m.g) derived from phytozome v7.0 (chr-ID scaffold_6; pos 19707319 to 19707734 reverse strand)
tctggtgttctttctccctttaaattctcaagaaggttattattctatataacttaatttcccattcattttttgtttggtttttttaccatttttattgcattcctagatttgtctaaatgtggttcttaaaaagcacaatgattcaatgaaatggggaagataaaaaaatgaacaaactgggatttaaatttgaatcagtatccgtttgattaaattttttttttcttaatcagtaaaaatgattttgcagttgtaacaccatgtaacatgttatattgacagtgaaaagccgacacatattcagtcagtacaaaagaagtttaggatttatgcatgctttaatgtcaagatctgagttcttggtttgtgtctaaaattgaatttatttggttgcagagaaactggagagaaag

SEQ ID NO: 68844 - DNA, 1012 bp, Prunus persica
  Intron number 1 from transcript ppa002753m (locus ppa00275 3m.g) derived from phytozome v7.0 (chr-ID scaffold_2; pos 10414841 to 10415852)
aaacagggaggaagaggaagaactgggttttgagggtaaagctgtggattctgtaggttgttcttgatcttcttctttgtgagaagatgcgtagttagctagagagagagagagagagagagagagagagagaactaaatttcagagaaaagtgatatgtgtgcaataagtagacaataaatatatatttataggtgatagttgaaatttttttggaaagaggtagtattttcagaaaacattataaaaagaatagcatttagagctatttccaaaaaaaaaaaaaaaaaaaaaaaaaaaaaaaaactcaaaactattcacaaggaaagtggtcctccatcgtgattaatgggatgaacaatcccttgtcgtctagttactcctagttgtgaaagaggtcaacaaaagcactttagtattcgttttgtagatggagtggagagggcctggccacctttcccgtctgtaattttccaagtaatacaggtacttcttttcctcattcataaggattaaaaatggtggggtggcgttcaacatcgtttaaaatagaatatttagggggagtaaataatacgttgagctgcacattcgttgaatacaaatactacaatataccgacggcaagttgactactacaagccacactggatttagaatataattttgtcaaggcctgtctgtagactctaaggaaaggaaggaacttttctaacaacaaatacaaagagcataacgctaaacaggaagctccaaatcattaccccaacaaattattaataattaacaagcaacgaagagaaggactgcagtcggcagactcgactccctcgtatttaaagcgctctggtcttcctcagcttactgtgcctgcctgccaactgcacggctccaaaaataagcactggttgttgatccctaaatttaaattagctatgttttctgtcttcaataccttcaatactagtgccttgcagattctcatcatcctaagcttgctcttggcctctgc

SEQ ID NO: 68845 - DNA, 542 bp, Prunus persica
  Intron number 1 from transcript ppa019125m (locus ppa01912 5m.g) derived from phytozome v7.0 (chr-ID scaffold_4; pos 7393724 to 7394265)
gttgccacttctcttgactccagaggtaattttagatcatcattgacttgtgtcaacgtctaagtacttcatttttaactcattatttctggccaattccttggttttcaagcaacccagtttgaaatttaaataaaaacattcaattttactctaaatttggttactttttctgtctgcaatttgactctctgttttgttttagaatttacattttggtaatgactcaaaagaaatgatagatagaggggaccaaagattttgtcttccaaatgaaacaacctagaaggttcctgattgaaatactttgcatgctgattgtagagtcatcgatggtgaaatgatagaggggtcctattaattttttgtttaaactggagggtttctgaatcctgattgaaatcatttgcatcctaattgtagagtcattaatggataagtaatagttaaaggggcccaaagatgcaattttttattttagtttaaaaagaaattagagggttccttattgaatcctttgtatgctaattgtagagtctctg

SEQ ID NO: 68846 - DNA, 785 bp, Prunus persica
  Intron number 4 from transcript ppa010513m (locus ppa01051 3m.g) derived from phytozome v7.0 (chr-ID scaffold_3; pos 9848375 to 9849159 reverse strand)
aattacagtggggaatcggtttgttctcatcatatctgtttgcttttttgtttgaatttaggctcgcataaatgttctctacataatacctatgataatttcctattagtgattacatggcataccattagagtgagaatctattatttgaatttctgttacacttgatgaaaatgttcaaggaaacttgaaaatgatccctcatttagtattattattcctattttcctcaaagccataataggtcattgatggaagagccgtatactcaagaaataccatttaattcccagggatgtgtaaaagtaataatgactaattagctcctagtgttctattccgaaaatgattacaatcgttagcatctgctcacagagtttaacctggctatgaactaagcggtgctcattttatggcaacaatcacaaatctttccatgtttgaaattttcaaatcatatgtttagtcatggacaacttgtggtgcatagtcggatgattaattgaattttctagctgaataaaccttatgtataagttaacattgtgatcaattgatagttggcaaagtggaataatgtgacaatgtgatttgccaatttccatcaatactctgctttatttttttgttaatggatgctcttacataatccatgagcattattgtatacctctactttcctttagttgaataaaggatgtgaatgtgattttgctaccttgagatggaattttctgtcactttcttaaggttggaccacttgcggcatattatcaagtgcccct

SEQ ID NO: 68847 - DNA, 358 bp, Prunus persica
  Intron number 1 from transcript ppa000174m (locus ppa00017 4m.g) derived from phytozome v7.0 (chr-ID scaffold_2; pos 7203104 to 7203461)
gtgctcttgatcaccctcacgtttggcccttccaggttcttttcaatttcttcttccacttttgtttggttgtttagaaactcaaatggaaaattgggtttcgtgaaattacaagtgtttaacaagttcatagagttatgtgttatgattaaggaacgtaatttttgctgaaactgttggattctgtttgggagctgagaaaatttgatgtttctaactctaagagttctaattttattgggttaattttattttaagcaattatttagagttggcattgcttgatttagttatatggcctccctgctgtttcctctttgcagttttggcaagagacagataaagccgcttaccttgt

SEQ ID NO: 68848 - DNA, 602 bp, Prunus persica
  Intron number 1 from transcript ppa008109m (locus ppa00812 8m.g) derived from phytozome v7.0 (chr-ID scaffold_8; pos 20796135 to 20796736 reverse strand)
aatccaaggtacactctgttccttgccttgatcaatcttagtccctcaaagccctccctctctcttcttgtttttctcttcaattttaattttatcgtgttgccattttgggcctgcctatttttggttctagcaagttggagattgctgaacttgagagtcatttggggccaaactcaagtttgattcccttttctctttttgtttgggttgaaggtttgaattgttctcaagggcatttatattaatcacctttttttcataaaagaaaaattatcttctgtgcttaagattcgtgggttggttggattttcttagttctttctatttcttctgtgttgggtccaatttcttgttctggaaagttacaagtttgataagttctagtttcatttggtgcaaaagtttgcaacttttcactaagatttgaaggtatttgaggtgaattaggcacatcctcgtttgttttcccaccgattttgccttccttgttcaataatttcctgctggcttactttgaaggcttgaaatattatagatagattcaagttctaacccttgtcatttcttttcctttttcagagggtcgttccgcttaatac

SEQ ID NO: 68849 - DNA, 629 bp, Prunus persica
  Intron number 1 from transcript ppa009141m (locus ppa00914 1m.g) derived from phytozome v7.0 (chr-ID scaffold_7; pos 22277606 to 22278234)
tgctctaatcactctctctctttcgtcgctcaaaggtacccgtacaacctatataaatatgtataccatcatttctataaccagatgaaatttatttatctataaccagatgaaatttatttatctattttgaattagacaaagctggttattgttgttcaattttgggttttgattgtctgtggcctggaattagttgggttgggtgctaaatttttttcttcttctttcttggttatgtgttttcggcctaaagttctgctcttgattggtgtatggtgagcttaaggttagatgtggagtttttcgtcaggaaggttaggattatgaattatgatgagactagcctaaattgattaacaatgttttcagcatctacggttggtttcaaatttctttgttttagagttaagacttagagcctgactggacggtgaaagtgtgtttttgccaaatttgcattttgaagcttcagttcttactttttatttgttaatttgattcatgaagtttggcgtgttgccatcttaaactttccataggttgttactggttggttgtaatttaaattgccaaatcgatatgtgcttttaggtgcccgaacctcgaggttctttcaatcaagtgct

SEQ ID NO: 68850 - DNA, 884 bp, Prunus persica
  Intron number 2 from transcript ppa021526m (locus ppa02152 6m.g) derived from phytozome v7.0 (chr-ID scaffold_5; pos 8630267 to 8631150 reverse strand)
ccagcgtgatccggaactgccaccgccgcctcgtcgtcagactcagagccgtgaaatcgaagagaacgatgggcctatgtctcaccaggattacatagataaaagaaggcaagagctgatttttagtttcaattatcaaattcaaatttgttccatagtttatgaattgcagttgttgctttatttatttattatttattattatttaaaaataaataaataaattgcttattatattagtttgtgaaatgcatgagcagaaaagaagttagtgcatcgcaggcttatgaggaattgactgctgatgttttggtaattgaaattgctgctgttaatttgtttgcattgtaaatttgtgattgattaaggtcacattttgaggtttggtttcttgttttggcagggaaagccgggaacttcgagcttaaagttggtacaatatgacagtaagctttctctttttctatttctcactcttcattctctgatattagtcaacgatggttgtttgtcactagtaggagcttgtcaagttctacaattttgatagttttcagccaattgataaacatggtaatgtgaaaaatataggtgacgaaagtacttcggaatgtgagttgaagcaggattctccaagttctggttagttattcttgtataaagaaacacgtaaagatactcaattttgctgataatttcccttactaagtgtgataatctgattgggttgggtgaatcagctcaaatagagatatggattcatcgatagtttatcctaataaatttgtttctttgtaacttgaggtggctaattgccgagaaattcattaatttgtccttgttaacgctactttctcttggcatgattctttcaggtcacatac

SEQ ID NO: 68851 - DNA, 913 bp, Prunus persica
  Intron number 1 from transcript ppa007019m (locus ppa00701 9m.g) derived from phytozome v7.0 (chr-ID scaffold_5; pos 14919353 to 14920265)
tcgccggtatccccccttcacactcctgtcattttaccctcttcttcttctttcttttggggtcctttcaagtttctcactttcgtgattttcttctcaaaaatcccatctttctctttcgatttcgatacccatttttagaaatttaatcttttgttattaattgttttctgctgtatgttatggttgtttttattaattatcaatacccatttggtttttttgctttaatttaatttaaagtttggagataattggagatttggtttccagtggtgaaatgtagttgatgtgcaaaagcaaggttgaattggtgttgttttacagtgctttactttattttggtcagtacaatattggattaggtgaactctgtggttgttcttgcaagtcattaaaagtttgctgctttatttatatatacatttaggtgtaatatatatatttgtagcaaaattccaaacgcatatccaatggactgtaatgaagggttgccgattgtccactgtaacgtgctcttatggtttccgtgactcttacacgggtttgtgttgaatttcctgttgagagcaacaacttggataatgttgttgtatttctgaactttcatgtgatccctccacctgttagttgaaatatattcaacagctgaataggaacactgctcataaatacatatccatattaagcaaaactaagatccttagttgccattatgttattgtagtcactatcctcatcattatctaatccaatcaaattatgaccttttaggttctttgtatttggtcttccttttttatttattggtttatgatgatacaaaatcgggttgcgaattttacaattctactaacggctccttttcttaacatcagttaaattacttgactggggtgaagagggtcaccgg

SEQ ID NO: 68852 - DNA, 914 bp, Prunus persica
  Intron number 1 from transcript ppa005261m (locus ppa00522 7m.g) derived from phytozome v7.0 (chr-ID scaffold_2; pos 23770401 to 23771314)
cccaagagcggtttcgcaatattcgcctccaggtactgctctttcttttgattttttattgaaggaaagtttggggctttgatgcttgtttacctccgttgcgtacttaggtggttgtggttagctctagcttttgtgctgattttcattaagttcaaaaaccaaagataaataatgggttttgttgttaaattattaggatgatagatcctctcacagaaaattgaaaaagatgggactctgttgtcaattattgtcatgcattccttaattttgttcagtccttctattcactgttaaggaatgtgagctcaatagctcgattattacttattcaagctccctagagacaaaaaatagaatatttcttactctaaaaactatggtaagctgaaatcccctcctattgttaatttgtgggtgttaggagcactcagtgtcgttcagttaacaatatgcttcggtcttcagttagttgttcctgtttaatttgaacatggggcctttatacttgtgatgccgctattttcaaattcttagtgctacgaacctttcataggctctacttatatgatatgcatttggatcccacttcatattactaatgggaacacttgaaagcatgttgtgtaatgaagctcatatgcaacaatactgtaagaaagttgtaagtttcaagattggagattcgatttgtgcagtcatgttgtctcatgttcctgagtaaaaactgtatttgtttatgctaacaatcaataccgaaaatcttaatggatttaatattgcgatgaaaacggagttatgcactagacatgcttttgaaatatgagtgaaaagattcctcacggacgatgttagtgcgcctgcaatacctaatttctgattctggtgatatgtaaatgcataggaggaat

SEQ ID NO: 68853 - DNA, 574 bp, Prunus persica
  Intron number 1 from transcript ppa025629m (locus ppa02562 9m.g) derived from phytozome v7.0 (chr-ID scaffold_4; pos 23981029 to 23981602 reverse strand)
gaggtgagcttaccattcacttatttgcatttagaaatcttactggattatgtgagcgtgcatatacatgtaagcacgcgcactttcatacatgcaagaagtttcaagttagaattgtagcattaaagaaaactgtgaacatatatatcttctcgcctacaatttaatgattagaaggtttcaagttttagatttttttcgaagattatccataccaaaaaatcagtcaaattttaaattgtttatctactatttgattattgtcattagtatttcattcttgactgagaaactgtaattgtctacaaaatttaaagtacaaaacgtttccgagttggtgagttttttgtaacgatgatctttgaagaatgatctaaaatattgacaattacgatcattaaactaaatggtggggcagccattgggaggaataagaacatcctcacttgaaaattttccaaaacctatattatccttacatttgcatacaatcaactagtaaaaaaccagatactaattgaactttatgagtaatgaagggcctgactgttcatctgttggagctggagccttc

SEQ ID NO: 68854 - DNA, 1040 bp, Prunus persica
  Intron number 1 from transcript ppa004014m (locus ppa00401 4m.g) derived from phytozome v7.0 (chr-ID scaffold_1; pos 24419471 to 24420510)
ggttttcaggaatcgtgggttgctctgatatgtaatattcatttcctagttgttgggtctcgatctataacgatgataatgcagaattgaaaaagtttggttaagcatgtgtttgtgttctgtttttgctagattcttcctctcttggcttattttggttgttgatcaagttttctcaatggttttggatttttctaatgattttgtgatctaggtgtgccaaaatttttgatctttctggctaattcttggcaaaaaagtttgcttgtaactgcaacccctgttattggtattaaaaaatggaggttgattttgcttgcttggtccattttgatcgggttaatctgacccgtgtcagttataatgagtttacgtggatgaaattttcgcctttgatgtcaaaattctttcctttttttggttgtcttttgacggtgggaatatccattcatggaggactagtattcctcttctcaaagtttccgtcttttagtgtacctcaagtttgttttactgttttaaggttttgggtttctttgttaacccctattcatttggaaagtctgaaaatttgcggttttggctttggttgcactatgatcaaaatggtcgggttgtgaatttctctggtttggaattttgcagatgtttggtcttttgttgtaaacgattttgaatcctcaagtccagtacataccttctgttctgtttctttgacaccatttcttatgacatgttgattggacataacttgttgcaatatttgttcttgtagttgctgtcatataaagagtttttttataggtatgttttttttatttgtaggtttgagacttgaagtttgttgatcaataaacatatttgtcaaggtagatacccctgcatagattctccgtgaataaaattagcaagaatttcttcaagttttaaaacttcagatgctaatgctggataattgagaggagtaatgtggtaattgttgtaccaatatttcataattttcagcaatttagaacttctcgtttgcaaagcttggccac

SEQ ID NO: 68855 - DNA, 578 bp, Prunus persica
  Intron number 2 from transcript ppa011925m (locus ppa01192 5m.g) derived from phytozome v7.0 (chr-ID scaffold_2; pos 21026418 to 21026995 reverse strand)
tctctggtatgatatgtttctctcttttattactttgtttcgaaaaattctttgcttttgattttgcctgaatctctgttacttaatctttcgtttcttgttgtatttgtttacttttgtctaaatcttgaactgggttttctgtgggttcaatcttaatttcataggctgaaacttgaagcataatctagaatataaaaaaagggactttcttgattcttgataatcctggatgatggggatgtgtggtgcagaagttaggtaggtaggtgtgtgtgttctctaggaattcaatacaaagcatcagattatggatgcactgcgtgtgtggttgtctgagaagtcttaacctttatcacacttccacttgtaggctttacacactagaaggacatgttgttctgtcataaaattttctatgctgatcagtatcttcttgaagtttaatgtctaataggagtccatttgatgaattgatgaccttatttcttgttacttttcatttcagttatgagacaaagtaactcttggttttactgacgtttgtccgtccaacatctattggtccttgttttcag

SEQ ID NO: 68856 - DNA, 350 bp, Prunus persica
  Intron number 3 from transcript ppa022505m (locus ppa02250 5m.g) derived from phytozome v7.0 (chr-ID scaffold_2; pos 14256362 to 14256711 reverse strand)
ataaggtaattatgacttcacagtgaacatatttaattatttatggctttgtttgtactttgcaattcatggaaatggagaaaacgagaaagggaacattctcttagactggggtttgatcagggcccaagagaaaacaacaaaaagaacagaaaaatatttatcttctgcatctgatactttgttttgtttgcatcagtcatgttctaaattaattttcctctgttctttatttgattcaaaatatatctatactatttctataccccttttctgtctttggagctgctaagtagaggtcgtggaatgatctttctctaattgtgctttaactgaaatgcagcttacga

SEQ ID NO: 68857 - DNA, 884 bp, Prunus persica
  Intron number 1 from transcript ppa011733m (locus ppa01173 3m.g) derived from phytozome v7.0 (chr-ID scaffold_3; pos 19756608 to 19757491)
gtgcacgttagcttctaccgcaactgtaaggctctcacttctctctgcatctcgtatttatggaccaattagggttttgaacgagatgtttagctgtgtttgtaatttgattactttctctgcgaagggtttgagttgattcattttgttattgcaatcggaaactgttttgatcggtgccttttgattttgcccagttgagtttcccattgttttaaaatcaccattaaacttttgctttcgaccaaaagagtatatttcaattcgttccagcttctcaagcttcttgagcttcttatataaattatgttggagttatttatcctagatctgatttacagttttgttatcgactactgactgtgaagctttgtctgttggaagagtaaaaggcgtaaaatcagtgtatatgaaatgtcttaggtgggtgcttaaaagtatactgtctttaatgatgaaatggattttggtgaaatttgtttgttaatcttcctaatgataatccatttccgtgttgtttcctgtaatctgagaatcggtatatgtttgagtataaaaaagaaagttgcagattatgattttgttcttgccaatatttattattcatgagtgatacgaaaatattctcctgcttgaaaaacaaacagaatgggaagtgagactccccgacaggagtcgaacggtacttcaataaagagaaagaaaagtagacaaacaagtcacatcgcctgttgtctaatgagaaacctaaagaatgtttaaaattaggatattgttcctgccaatatttgtgattgatgaatgatattgtgtctaagaaagtgtgtatattataatgggtgatatcagacgggaagacttttaagaagccacgacgtccttat

SEQ ID NO: 68858 - DNA, 897 bp, Prunus persica
  Intron number 1 from transcript ppa009735m (locus ppa00973 5m.g) derived from phytozome v7.0 (chr-ID scaffold_1; pos 34597349 to 34598245 reverse strand)
tcttcttgttgtctctgctgcagctgctactcagagtaagtttcctgcaaatctacaacacatacacaaaagtggtttctttctttatgcatatgtttatagtaggacaatatgaccttggaattgtgtcatgtctcagatttggaacttatatctaagtgggtaccaaatgttagatctgctttaagatttctgggagactgtttctttaccttgagtcgagtgtgtgtcttcgatacattttctgaatgtggctacacttctcacttctgcatttgcatacaagtctgtgactttattggttggagtttaagttggctttagatctctctggtcaagatcagagcttacattttaagttactcgatctattttggtgggagatttttcacttaaaaatcttcatcttttttatatatttatgtttctaattacctgttgtagtcatgttgattttgtttgctgacaaaatttgagggaaacaagaaaaacaaatattacaattttggatcttggagtttacatgatttatgcttgatttacaataatgataaagaacgaaaagcagaaaaacttcaaattatttgaacccaatattctccttacttgaaggattagtttttggtaaccaaaacaatagataagattttatgagttgggagattttttaatttttttgcttcatagttcggttctttccatcattgggttcagtttgacttatcaattgcatgctctcaactagcgttcttgtgggatccaaaataatttttcttgtttttggttcattatttgttatattgatattattgtgcttggggatcagagaaacttatgaactcccacttatgagatcatatgtgaaaattgcagtcaaagttactgataaccctgcgg

SEQ ID NO: 68859 - DNA, 1049 bp, Prunus persica
  Intron number 1 from transcript ppa005914m (locus ppa00591 4m.g) derived from phytozome v7.0 (chr-ID scaffold_4; pos 14023605 to 14024653)
aaaccccaaaaacccttagctccgaggacgatctggtgagcattttctctgctacactctctgcttttctgtttttcattttgtatggtttttgtttggatatgggggttgttttagttcttgagggatctgagtgttctgaaatttcttgttcatgattaaatgtgggggtttctgggttatgggttgtggttggataatgcaaatgagggttctttcttggtgggttttgtgttcagcatgctccactgtgaagtgaattttgttattggggtttatagttgtgtttgggcttgagattttttcctgatgatttgttcttggttatggatttggaatgttggatttagtgctttcatttggttaattaagtggggattagtataatgtactactatgattagtgctttgtttttggtgatgggaagatgagagggaaaaaagttagtattcttgattcttgtgttctatgtctagatttttaagatcagaatctttattttgcttttttgacactccaagttgaaagaaagaaaacttaaaaaatggttcatttgtttgggttgctttaacttggtacttcgattgtaatttttgtttactgggtaacacgatctgatttgcgtgatctgtgtttagaacttcatttttattttatcaaaatttatttccgggttgaaggtattaatagttgaccgccgtatttccagaacccagaagatatagagagggcatctctgtgttatgtttatagataccatataaaaatcactctgcttttggcatttgagttgttttatcttattttatggaatttaaatttctaatgctcagctgatggttgagcttaaacagggctactatgtatttctatcgttttctgaggttaattcatacttgtggtcttttattatgcttgatcctttttactgattacttaccttcttatgtgactgatgctgacgggtgtttatacactatttatgaaaatgtattaagtgtcttctgaacattttcgatgatgcagtctaggtggtgatttaacaaaa

SEQ ID NO: 68860 - DNA, 801 bp, Prunus persica
  Intron number 1 from transcript ppa009266m (locus ppa00926 6m.g) derived from phytozome v7.0 (chr-ID scaffold_5; pos 17634932 to 17635732 reverse strand)
gattgcaccctttgagttgtcctgaggcattttcagtgaaccaaagggggaaacttgttggggatgcgagcgtgaagcggttggagagaaattgcttgagcagcagtggatttccgggtcttggtggctgctccaaatgcttgaaaagcctccaccttgtaagtaaatcctttcttctttctgattgcaaagtttctatctttgtttgaaattttttataattatagttgtaagtaaatccatcgctttttatttatttattttgatttccacaaattgaagaagaagaagaagaatctgataagggtttcttctaggtcttcttccaaagttccatgcttgctaattaggaaagtgcttatgcttattttactttctttggtaaaacttgtactataaccctagacgcgccatgagagcaagtgtattacaaatagtgagagtcggtactattactattaaattagcacaacaagaatgagcggtgaagtgagtgagtatttttattaatttctggtatgttgttggttgggatggagattagttaggttcttttattcatttggaatattgatgactcttcaaggctctagtttaacgtgcatcaacaaatatgctttgctagcatgaatttgatttgatattgcacctactagttagtgcattaaacttgacgcaccaaacccttgtttgcccaatcaatgagatgaccatctctttcatttgcttcttctaaaattctaattgggaaattgatgttgcgcagcttaacaagaagaagactttcaattcaagcaaatt

SEQ ID NO: 68861 - DNA, 719 bp, Prunus persica
  Intron number 1 from transcript ppb023600m (locus ppb02360 0m.g) derived from phytozome v7.0 (chr-ID scaffold_7; pos 7988175 to 7988893 reverse strand)
gcaacgggtcgggtaggggccgggtatgacaatgccatcctcatccccgctctccatccctcctccgtccccgagcccatccccgtccccatcctcgtcgggggactatcccccatacccttcccaaatcctttctttttttgcataaaaaaaatttatcatacattttaacattaagtttcatattaatttatcattcaacacatccaaattaactataaagttcaacttaactattcaaaatcatttcaatatgaaattccaaagaagattaggaagaattaggagagggaggttaacttagggttaaacataaatattataattatatatttatttatttaaatataaacatatatatttttgggtcgggttcggggatggggacaccaataccatcccctccccatagccgttggggatttttcaagttcggggatttccgtacctgatacttatttagccacgaaatctccccccattagggttaggacccgatgggcaccagcccccatgaggatttttgccatccctaggttatcctattgatgcaagtcttgggaaatatcttggtatgcctcttttacatttaagaccaactcatgctacttataatggtttgattgattgagtgattaatcggttggcttcttggaaaagtaagcttttatctattgatggtagggctacccttgttcaagctgtggcttcttccattc

SEQ ID NO: 68862 - DNA, 759 bp, Prunus persica
  Intron number 1 from transcript ppa014533m (locus ppa01453 3m.g) derived from phytozome v7.0 (chr-ID scaffold_1; pos 10887277 to 10888035 reverse strand)
ctccctcctctctgacgactacaaaggtttgaacagtaagtactcaattctctcaaccatttctaacgaaaagctttccattatctgcctatttgttgttgttgttgctgttgttgttattttacttgtttgtttgttttgaactgggaatggttggaggcttgtaataatggagatggattatggatagatggaaaggattagattcgtttttttttgggttttcaatgtttaatatcttatctttagggaaaatatgatatggttttgctttttcgtatcaggcttgttgaagatgttaatatgcacataatatatggattttaagtgggttttcaaagttttttttcttttcagttgcaaagagctttcttgattgattctatacctatgtggcctcccttaagaatttcatttttagggcacaaatttacacctgcaagtatggtggccctgtgagttgtgatgggttttctttactaggattacttactctcattataagttgttctgaaatcttgaaatggatttggattacagatggttgttgttcttcatcttgactaatttttcctttctgttgggggcaatattgaaggtcatgtgaaggccaataccgatttagtaattttcatgtttcctgcagatgcacatctttagtttaacacatatttatctgcccacccttattgtgtggtgaaacatgcgtttttctgttacttttgattggttctctctttctcttgcttgaattaagga

SEQ ID NO: 68863 - DNA, 345 bp, Prunus persica
  Intron number 1 from transcript ppa003714m (locus ppa00371 4m.g) derived from phytozome v7.0 (chr-ID scaffold_6; pos 6085928 to 6086272)
ctcttgcaagcataacgaggcactacaagtttgaagtatgttgtcacaaagtttcaacatatatgtattgcttaagtcaaaataaatttttcatacatacaatgttaacatgttatgttgtgaaactgttaatttgcacgatgattttgatttggtagattctttgattatatagtcacagtttgatactatagcagtcagtttatctgacaagagaacattaccgaagctaatcttaccacaaatataaagtttgtgctttcacatgcattttcttcttctttaggttcttcattgtcttttctttacagtacttttgaataattttgcagatcaaacagcaaa

SEQ ID NO: 68864 - DNA, 589 bp, Prunus persica
  Intron number 1 from transcript ppa004244m (locus ppa00424 4m.g) derived from phytozome v7.0 (chr-ID scaffold_7; pos 10256384 to 10256972)
ttactgttgcttttccggtttcacgcaccactgaggtgatagattttgtttcctgtttgattgagtgttgttgggttgtgtcatttgtgtccatccaatattataagtaaaaatacactctagaagatttcacacacttttaagaaatggaaaagaaaaacagagcattttgtagagtatgaattaaacatattttcgtgtttgacattaacgtgacctgtttattattcgtattagtatgtgccaattgtcttatgtttgggttcttgaggtaacaaaattgccaccctcgattctattctcttgctgttgtttctttcttcttcttcttcgtcttttgttttgtgtgtatgtgtgtgttgttttgatatataatttgtgtttgattgagtgactgtaatgagttttgctaatttcattagatttcttttaccaatttttttctgtgtgttactacttttgccaatagatcacaacacagttaatactcagttggctgtacttggatcacaaattgatgacagttactaagtagataattattatttttccaggtgaattctgttcagagaactcttgtggagacttg

SEQ ID NO: 68865 - DNA, 721 bp, Prunus persica
  Intron number 1 from transcript ppa005670m (locus ppa00567 0m.g) derived from phytozome v7.0 (chr-ID scaffold_6; pos 21727127 to 21727847 reverse strand)
gttttgtgcaagcagactgagatcagtaaagcaaggtgcttttttattttctttcccagaatttcaattatcatcttttatcattgctttttctctgtttcagcttgttttgttggattgcaatataccagtttgaaactttttgtcttgggccttgtaaacgaaatgagaatatctctgattttgatttttcttgggttctaatgaagaatgataaatagggatggtttaacatttttagtttccttatctgaaatctgggttgttagaagtagttggatttatgcaaaaaatgaaaaacacagttgatttttcattgatggttatttttgggagaaaaacagaaaacaaagggaaggcatgagttactttctgagttaaggtatttgggttttccttaacttttgattaagttaccgagtagggaaaaacttggtcacttgttacatcctcttgggcacttgcaaaacacctgtattggggaggaaaactggcagttgtaaaaagttttaatttttaatttgagctttgtgtgatatctgttgatcataaaagtcgtcacatttgaagaattggagagggacatgttgagtgtttgctacattatgaagtgttttcttatcttgacttttgatggttttgaattgttgcttattatggctccctaattctagggctctcttcagcttctgaatcttaggtgagggatcataacacttaa

SEQ ID NO: 68866 - DNA, 421 bp, Prunus persica
  Intron number 2 from transcript ppa007239m (locus ppa00723 9m.g) derived from phytozome v7.0 (chr-ID scaffold_3; pos 18479560 to 18479980 reverse strand)
actattcggggtacggacaatctactgggaaggtatgggatttggatttgtattaatttgtttggatgcccagaaaacgtagctccatagaggaggggaagcgaaactggaaaatgttaattttatcgttacaattctctatatttgatttcagtagggtttcttttgtcagaggaaatgaaacttcaatttggttttgttacttggggttaaagacacttaaaacgcctgatgcaccccctttgttgagtttttcatcctgcttaattcgttttttaattagacacatttcttctttcctacagaccaaattgagcatttgataaatgcaaacaagtcttagctataatttgcttaggagaatgttcaaaatgagatatatatcttttcctttatggacagccaagtgagcaaaacactt

SEQ ID NO: 68867 - DNA, 718 bp, Prunus persica
  Intron number 1 from transcript ppa010560m (locus ppa01056 0m.g) derived from phytozome v7.0 (chr-ID scaffold_3; pos 7864117 to 7864834 reverse strand)
tatctgcaactcacgtactccccgtaagttttccacttttctttgccaaccctctgtttggttcctgggaaaatctaataagaaaacggcaggaacgaattccaccaattggcttttcatgatttgggttgatgggcatatcttcgtttcttgtaccgttgtccgtatataaatttagaagttagtaccctttttggtgggaaatttataaattagttatgacacttactgtttgaatagtattattttttatgtatagtattttattcgcaatcaaaagtaaattcaaatgaacatgaatttcataattaagcaagagaaacattacaaaaattctatttagcatttgaaattaaacatcatatataagaaatgtgtggttttataacaaagctgattttcataagtacacacagtatttagtggacaactaggcaaaaggagggtgtaagggaattgtgtttggaaggaagacctagattttagaatcaatctggattttcaaatgctcaagtatgtatttagccaccatttggtaacattttattatgtgtgtcatgttccttttcgctttcccttactagaacatgtttttcttttcctgaaaagttcatttccttttgttttctcccgcaaatttcagttggcttgaatgatcagtccacttgtcttctttgtctcagaactgcagcagtagtttaaactctgtggctaggcg

SEQ ID NO: 68868 - DNA, 922 bp, Prunus persica
  Intron number 1 from transcript ppa007407m (locus ppa00740 7m.g) derived from phytozome v7.0 (chr-ID scaffold_6; pos 15550408 to 15551329 reverse strand)
tggaggagaggcctcttttgctcagagctttgcatgtatgcttctgaggcttgttcccttttgaagttacaatctttgctactatatgctgtttcatatgcttgtgtgtggtggtgatacttatattgtgagtataatgaatgaggttgggtaatagattgtatatactgacgtagccattagaaatcaaaactgatagtggattatcaaactttaaattcgctgattgggggtttttatatttggtttctccgctgcatataccctattacaaagtctgtcttttggtgataaaaattgcatgtaaattatattctattggtagttcctaatattttgtttttaatttgaatttaagtagtagctagaaaacaactcttatgattgcatttgacacactttcttctctgcctgtttcttgttaagtttatattctcgttctgtttcatcacagattcacagttttggttcaaagtaaagcattgtacttggtgagaattgagtatgccatgcatatatatatatatatatatatatatatattgtgagagagagtatggcatacatcttatatgcattgattctttaggtggggttttcatagagttctcaagtcccttgattttctaatggcagatttagaacagatatatgtaggtcggtaatcaattgtgtgcaaggaaatcaacaaatgctcaaaatgttaggttcggttgacaattcatgtgcttctttatatctaatatggtatctagctggatggatccaacttcgactgcattacatgggtgatataatcaatcacagtcacttgtaggcagtaaataatgcgttgttatatgtctattgacaccttatgcatctttgcttgagaaacttaaaccttacagatctcttcttttctcagggtctggcattggtt

SEQ ID NO: 68869 - DNA, 253 bp, Prunus persica
  Intron number 2 from transcript ppa003212m (locus ppa00321 2m.g) derived from phytozome v7.0 (chr-ID scaffold_5; pos 15806068 to 15806320)
gttaagtttgaaaattgacattaaatttcacatatttgcaataagcaaagggaactaaagagtgaaaatatgagaagaacagcagtctcacatcacctaagctcactctcttcttctcagtctcatcaccccaacgttcctgtttgttttaccaccaacatctcccacactcaaaccccaaaacaatcccttcttgacctcatcaaatcatgcaccagaagatcccatttgctccaaatccacgcccacatcg

SEQ ID NO: 68870 - DNA, 286 bp, Prunus persica
  Intron number 1 from transcript ppa008280m (locus ppa00828 0m.g) derived from phytozome v7.0 (chr-ID scaffold_3; pos 6573119 to 6573404)
aggctacattgttaggggaaccttgagaaacccaggtcactccaaatcattatcttcttggcctttgagttgtttttttgtcctacattcggagtatcgacttattatgttgtgagactgtgaattaaaactggccattaatttatttgaattatatatgaatttgctgttttgattcccagtttgacataacacgtataacatatattgggagacataattcttccttgtattgatatgtttttttttcctttttggtgcttttcttattttgtgttgatcacag

SEQ ID NO: 68871 - DNA, 649 bp, Prunus persica
  Intron number 1 from transcript ppa005796m (locus ppa00579 6m.g) derived from phytozome v7.0 (chr-ID scaffold_3; pos 21549593 to 21550241)
aacccgcccaggtatttttccaaactttctgggatttttatttctctgctaaagttttgtccttttgggttcctgggttttgttttgtcttcattttttgagatgtcggttgggagtatgttgtatcattgtattgtactgtggtctgtgatttgttctgttttggcttcattttctaagtttcttgaattataattttgaaccgggagagtttcctctcgagtctggttttcctcccttggtatgttttctgaagttttagttttacaccgtttggttgatgagaaagcagaggaaaagaaaggaacatgagtctgaagttttagttttacaccgtttagatgtccttttcttttcatctggttaaattttcatgataagttgtacccacaaacttcttgagctctactgagttttattttactttttcccttttctttattttccaaatatgctaaccgggccaagggttccattttggattatgtatggcatataagagtttatttggaacctccctcttcaggaaacttcttggtttgggccatttgattgtcctcttctttcaagtgtgtatgagaagcaagaagcttaatctgatttgcctcttgttcttgcagagttgtgattgacaacgatacttgcgagg

SEQ ID NO: 68872 - DNA, 886 bp, Prunus persica
  Intron number 2 from transcript ppa010504m (locus ppa01050 4m.g) derived from phytozome v7.0 (chr-ID scaffold_8; pos 4549072 to 4549957 reverse strand)
ttgtacctttggcggtacgagcacaaacaagtttttatgctgatttctcactttcattgagaattcttcaagtttcgtctttgtatttgctttgataattttacttgagaataagttttcaatgttctttcttttcaatcaatatcatacaatagctttgttcaaaatccacaaaatcaattattgattttctatgtgcaataaaatggtgtattttttgcctgtactatggatgttaaacatgactgaggcactttagtagcttgaaaattgcaatcagcttttgttgtaatcctatgcatttcaaagagttgatgtggctagaatacacattgcttatcaaccaagtataggatcctaagctttccttataggtttatttctttcatgaggaatatgtcctcattagtctatacgaaaatttcacaaaggatgctctggtgtttgggtttggactttttgttaaactctgccctctttggttactcgtttcaagtccaagtgttatcatgtcgcatcaggaatgactccaagcgtctgtgtctttcttttaccttacttggccgtactctcttccccttatttctcaggattatgaccttacaatgttgtattgtaatttcattttgagatgttcaaacagactatttgaatatgaagatactcctattactggctatttaggtgctttaggtgcacttaaaatgattttataagtcctttcactcagatgtctcttgatttacttgttatttcatgttgtatagagttgaatgcaccttctgcaaactgttaggtcttattaaattaaatttcacatgggattatataaaatttgtttctcatatcaggtttggatttcctacaaggagtcaaactggattag

SEQ ID NO: 68873 - DNA, 882 bp, Prunus persica
  Intron number 1 from transcript ppa001521m (locus ppa00152 1m.g) derived from phytozome v7.0 (chr-ID scaffold_4; pos 11560462 to 11561343 reverse strand)
ctgcatatctttcgacactccggtaacctcttccctccattttttttgttttaagtttgtttccgatgaactgtgagaacaatcgaatttactctgacactcactttcactacttgaagctttgatacttttcaattcgttcgcttttctttttgtgttttcttgagcttccttgccggccaaacagaggatcagtattcttatttctaatgttgttgttgctgattctgtttgcttgtgtaccgtttggctgctgacgaagtataggaaacaacaagaagctgctacaactaatttaggattagctcactatattgcccattttcttaatttttcttttccttggatttctcaatagctagtgtttttgcattcgagtattttgcccaactgctacttcaattttaactgcattttgataattcatatggcttatcaattgtgtttatttcaattttcttttttccttgtattttgttggtgcaatttcgaatttttttatttttttcatgattgtctagaaaaaagtagagaaggaaagtagagttggtaaatttttctgtatgtgtccaagggaaaataaatagaacctactatgaaacttattcttagggtttcagttacgggtttcttccaaaatgattgtatgttggttttaggagttttgtgctttgtttatctcctcctagttttgtagtttcgcattattatgattgaattcttttcctttcttctttcaagttataagtgctacgaaggtttcacttttcgttgacttgtaaatgttgaaaagttctccgtttatgtacttcttacatttgttttctgtgatggtgttcccatgatgagtttcagagatcagaaggtggcttgtttgttgac

SEQ ID NO: 68874 - DNA, 285 bp, Prunus persica
  Intron number 1 from transcript ppa002091m (locus ppa00162 7m.g) derived from phytozome v7.0 (chr-ID scaffold_5; pos 10515768 to 10516052 reverse strand)
tgatcggcgaggaccccaaacttactttagccaaggtatgtatgtgttgtttgtgtattatggcataccagttgtttgctaaaagttgcatatgaacttgtcatattggtagaaaagcaaacccagaagttagttatattgaaagtgagaagagttatcttctctgtatatatatgtgtatgtatatattcttatgagtggttctgttgaaatgtaatttttttgagaatattattattttgtgttgtagatattgggtagaaaagcaaacccagaagctactta

SEQ ID NO: 68875 - DNA, 820 bp, Prunus persica
  Intron number 1 from transcript ppa024546m (locus ppa02454 6m.g) derived from phytozome v7.0 (chr-ID scaffold_6; pos 27018124 to 27018943 reverse strand)
tctacgatcgtgtttcaagtacgtttttttctttttgggtttttgcttttgttgtttgtttttgttttgatgagcattttggcaatgtgaggcataattaaagtgatggtttaggatttgcaagataacccaattgggaatttggtagtttttttgtgtctgtggtaaaatccaaaacttaactttgttttgttgggttattttgcattccattttttattctgagtggagtggtttcgaagttgatgaaaccttaagtggaacgttcagataattagcagggtttgaggttgaatcttaaatatgttcaagcttggcttgacgttttagtacctctggatctttagaaagaagctttccatttggaaattgcattctgtgaataatgcttttctttggaaccaaaaagtattgtccaagtgtctaatgatgattgaagtagtgctttacacatagtgaagaggttattgaagagattataatccatggttagaaagtggtggatggcatggaagtccaatttaataaagtaaccgctataagatgctttcactctctgcagttttgtgaaccagaccactagtctttgaattttctcaattttaaatttgtgaaactagattccaatgaaatgcagctttagatttgtaatgtaaacgtgaaatcacacttgctgatgagatgaacatatggaggttctgaaaagtttgcttatgtatgtatttgattgttggataaaggttttggatttacagctttctatatcgaaatgaatatattgcctaataacaaagataattgcaggttttcttgaatcatt

SEQ ID NO: 68876 - DNA, 1057 bp, Prunus persica
  Intron number 1 from transcript ppa003386m (locus ppa00338 6m.g) derived from phytozome v7.0 (chr-ID scaffold_3; pos 18638984 to 18640040)
ctaaaaaccaagtcttttacaacaaaactcaggtgccaaaatcttctcttttcgatgatttttgcattggattattggttttgatgggtttttgagatgcaacgttaggggtattgtgttttttgagttggttatgaattggaagtttgttgggtcaatgttagttgttgaaaagttgctgttggttgctgggaaaacaatgcaggacaagaaaagaaattaaagttttgaattaaagaagtccgagatgttaaggtggtatttgtgtgattaatattcgttgaggaatgtctgtgagggggtcttggagatgaaatgttataggtgtctcacatttgaaagcatttaggtgaagcaacgccaattcacatgtatgtatctcaataggattatcatttaggttgagtatatttttgtctaatggaaaagaatggaacgtcagaggtatgtgtcgatcccaaacaataatgatgttgatgattgttgccttaagtgggtttcttttgtgctttttgtttttgtttcagaactttataaaattattaccagatataaattgtgtgtctccctaaccatgggaaaaagaataaagaaaatgaaatatcaaaagtgaatgctcatggatgaagcgagaagctgtagccgtccgcacatattatacttttgggcattcaagttgctgatcactttcttagaattttataattttgcgcgttatagttctctttccagttttaacttgtctgcagcccaaagttccttgttctcaaataaaaacgtgtttgtcatccactgctttcaactttgacatatttccaacatttaacagcccttgtccattatattaattgaaccttttttagtatggtaaaaatgatgtagcctatgctttgcaatataggcgactgttaagctttaactattagtatttgttggttacattaacacctccaatttttccggttggcttttagatttcataatatagaaggatcttgattgtttcagtctgtaaaatttaggttaacaacagagatatatcaattgcggttctgag

SEQ ID NO: 68877 - DNA, 387 bp, Prunus persica
  Intron number 2 from transcript ppa012013m (locus ppa01201 3m.g) derived from phytozome v7.0 (chr-ID scaffold_2; pos 20587151 to 20587537)
gtccacctgtaagttgtggttagtttcactccaattatgataaatgctacttgcctatgtttctactttagaagattgcccagaatagagaaaaatctctactttaggatctgattgttatgagatttttgtttgcttttattatctgaagttctgaaaagttggacatttggtaaatctgttcatgataaactttcaaatacttgaaagaatcttttgagaatattttatctgctactaggagtaaacgtactgtggaataattacataaacctgccttgcaaatgtaaataattgttttttccgtagatgtaagctgatgaaatgctattccaatagtaatgaggttgaagactcaaactttctcttttccaggctttattattt

SEQ ID NO: 68878 - DNA, 589 bp, Prunus persica
  Intron number 1 from transcript ppa025632m (locus ppa02563 2m.g) derived from phytozome v7.0 (chr-ID scaffold_4; pos 2622222 to 2622810)
gcacaggtatgtatatcttgttagtgttattgctattatttttagcaacgattgggaaattttgaacttgaagatatttgatatcattgcaaatgatcatttatatttcgttaacatatgaccacaatacatattctttctcccatttgttgataaattattcttgcccccatttgaaatctacttattttttcctctgaaatcaatatagtcatagctttttttgttgctacttcaatttctgagctacccatatagtgcttgtgaatcgcatttactttatcatcccaatcaacatatgggtatttgtgttcgatagagttgtgaattttttgttgacaatggtgtatagctcaccttactgttatgctgctggagttgaactcctagttctacttatatggagtcgttctttcaggtttctgttacttttgttgcttgtaaatgcatattggtgtatgaatatgacattactgacacttatttgtcatgctgatttgttttcgaaatctactttcattctatgcattaaactatgtttttctgtctaatttattggaatcaggcaaaccatcaagtcaccacaaga

SEQ ID NO: 68879 - DNA, 672 bp, Prunus persica
  Intron number 1 from transcript ppa003786m (locus ppa00378 6m.g) derived from phytozome v7.0 (chr-ID scaffold_5; pos 13813620 to 13814291)
caactcaatctctgaaggtagataaatgaagctcgtttagattttggttttgtttatgcatgtaattagttaggtttattttttattgaccttgtttctgtttgattctgattaagttgcttagttggggtgactcatggatgctcaagtttgaatgtcattctgcttgtgtgtttgttgttaatcccttgttgaatgggaatatgaagggaaatgatttatgcatacattaggcttttgtttccacattcaactttcaagaaattcatcacaaattcgacccaactaaatcagtttgcattttgcctggtttattgaaaaccttgcaaaaattgaagctctagattttactgattgggttgtttgggttttctatatggggaatgcttaaatggtctaactggttgtgttgaggtactgaaggtcaacttttttcccttctcctttcttctcccaaaaaacttgctagagtatctcatgttgcatatgtgaattggaactagcttaatagattatataatatattagaatgtttatagttgaagtatacttttgcatctcttgggttgcttggtgtatttaaatgacgtttactcttttaatttggtttttggtgaggttctgtcaactaaaagggtattgcttattaattttggttgcatttcaggggtt

SEQ ID NO: 68880 - DNA, 405 bp, Prunus persica
  Intron number 1 from transcript ppa004801m (locus ppa00480 1m.g) derived from phytozome v7.0 (chr-ID scaffold_5; pos 18355962 to 18356366)
accgcctcctcttcttccactcccctcaacctcaggtttgcccattccttccttctaacttctaagatttaattctaatgcactcctcctaataataataaaatatcttctttatttatttatttataatttactgctccttttttgcttagggtatcttataatgaaattggaaatataggagaaaaagatatatataaacaaatgaaatacaagttatctgctttacttactacttgtcgtgtcgttgtaaatgtaaagcgcatcagcaatcaaacgagttgagttgagttgagttgagttcttgttttgaatgaatggcagtgtctgtcttgtttgtaaactaaatagtaaatagtaattttggcagtgtcaatatcgggcacctcgaggcagttgttcacc

SEQ ID NO: 68881 - DNA, 729 bp, Prunus persica
  Intron number 2 from transcript ppa003843m (locus ppa00384 3m.g) derived from phytozome v7.0 (chr-ID scaffold_1; pos 7328690 to 7329418)
gttcgtaatggctttatatactccatgtttcccctgctaactgtatgtttggctgactagtggagataaagctcatacttgttagtagttaataaatgatcattgcatagatgcattacttgaaaattttactcatgggtcctaaggattttaaacaatgttgaaaccagcatttctggacatttaggagcttgaatagaaattccgaactagttcattacgagttataaaataattttacttctttaaagcatgaaaacttaagctccttaattattcttttgtagtatttattcaatattaagctatcttgtgaccgtagtctgccagtaataaaatgaggtatattggtgtctaatgcatgtaagtattgctaaggttgttttgaaccatgggtgaacataggtatagtagagtctagggtatttagttataaccatcaaaataatcttactttgattttgagctttacattattgtcgtagttgcttatagaagtttctgtgagctattatctaatgttgtaatcaagtgattcaaaagactgaaaagctttttcatttgcattggtatttcttctagaaagatttcccttgatttccatccgaaaatgacatctaacttctactgcatgaagtaattgtatttctcctcgtggtttttgaactttttatggttttcttgttctatgtaggtcagggctccacggctgtttcagtcctttttttc

SEQ ID NO: 68882 - DNA, 409 bp, Prunus persica
  Intron number 2 from transcript ppa007501m (locus ppa00750 1m.g) derived from phytozome v7.0 (chr-ID scaffold_3; pos 20112040 to 20112448 reverse strand)
tgaaggaggtgagcatttgctctctaagtttcctacttttttcacattcacagtttctagtgcatttcttccaattgtacctattgtagtgaagtttttgaattctagttgggacaacttgtttgttagcaatttttagttttgaaagcaagcttcattttccttggtctatgagcttcaaagtttggtttttgcgcttcttcttttttcttttgtgttggtcttatataagatgcacaattttgtttcttttgagttaaatattatgaagcttaattcattgaactatctggtatttggttttttgagctttcttcggaatgattaaagcattgtacaatattttaaagcagaatgtattaatgctttattgctctgtctcaggaactgaaagctcgaaagcaggaaa

SEQ ID NO: 68883 - DNA, 990 bp, Prunus persica
  Intron number 2 from transcript ppa000833m (locus ppa00083 3m.g) derived from phytozome v7.0 (chr-ID scaffold_8; pos 5400895 to 5401884)
gacttaggctggccactggtgggggtgaccacaaggtgcgacttctctcctcctttgtgctctgtttgcttgcttaggaaatgtaggaattcattaaaaagaaaaattaattgtgttttttttccctccaatatatcagaatcagaaacctgtactcatggggggaacattacaagttttcccgttcactatgtattgtttctcgtcattattgttctgtttggttggaaaagtattaaacagatgggacatttaagttttcagagaccctggaaaagaaaaccccaaaatacatttattttacttcgttgttataatcttctattgtatcctttgccttgtttggttgggaaaatattgaacagaccagacatttgagttttcagagacccttgcaaagaaaaccccagaatacatttatattgcttttatattgcttagtttttagaatcttcaattatatcatctgccttgttggtggatattttgatggacataggttggaatttgtgtctactgttgtgtttggattgtgagtttacaagggctctgaattcttattaaaaattgtgcaatttaaaagtattaatgttatggaatctactatttgaaatagggtggaattcaaatacgtcattttaaattcactctctaaatcacactattttttcctcacaatctgtaacacgaagtaataaatctctgttttttatttttcctgatgtttgatttaaacaatttaaactatgtagtcaaatacatacatacatacatatatatacatacatacatcatacatacacatatatatacatacatgcaaattgatggatctatatatatatatatgcaaattgatggatgtatatatatatatatatatatttatttattttatgggcgcctttgttgcatcactttgcatggcatcatttgttatactgtggaattgattgcttcgtccctactttgccaactacaggtgcgagt

SEQ ID NO: 68884 - DNA, 890 bp, Prunus persica
  Intron number 1 from transcript ppa011185m (locus ppa01118 5m.g) derived from phytozome v7.0 (chr-ID scaffold_2; pos 2792969 to 2793858 reverse strand)
ggcttggtggttttcgttcatctgagctcctgaaggtgaggctcttcatcatatcttgattgcttcgatatcataggtgtagttctggaatgctgttgaatcgaaagattccccatttcagtttagtcatttgaacttgtaatgaggaataacaaggtgagacatggaaatgagaattagctgaggtgttcaaaagatactgaaaagcaaacaaaaaaaattgcatgtgaattcaattaaaattcttgaaattatatacgattcaaaagtcttgtttgtaggtgaatccgagccttgtggtccgcccatttttcatgtttcaattttttttctcgggttgtgtcactcgtattagatatggaagaattccatctcattgtgtctttttagtttgtagtcaccgtagatgtctgttctgcaaatgtactctttgttggactcattcattttaggataaatggtaggatatttttatccccatgttactgtggaagggataaagacttgggtataaagatgcattgcttttcaatataggtgcagtgctttgccaactcttgtttcatattctcattcagttattcccccgttgagatcagatattcatattagttctcaaatctctcttaacatgcagtggaaatcattttctgtatccctaacttcactactttctaggttgatattatgtgcttgcaatttctatttgctagaagtttcaacttatgctctgtattttttatatttttctttgcaagtattctatgaaccatgactgttttgtatttgacgtcttgaatcatttgttggtcttaatccggcttataaaattaaaatgaatgattatgtgtgcagcttcttgttaatcagctggagcctctaacagagca

SEQ ID NO: 68885 - DNA, 590 bp, Prunus persica
  Intron number 1 from transcript ppa013848m (locus ppa01384 8m.g) derived from phytozome v7.0 (chr-ID scaffold_3; pos 16075035 to 16075624 reverse strand)
agcattttggaaccacccagccggcccgaaaactagtatgtttacttctctagttaattatttctgtttcccttactccacaagttttaaaatgtttgtgttgttcttgatttctcaatgatgaattgttgatatcaaagtttgaaagcttaatcataccatgctaatcagctagatggtgcttgattatcatgcatcaaagttgttgagattcaagaacatgtttgagattgttggtttctaactcaggaactaccttctcagagaaagaaatcctcatcagtttttaaaaccaggtctcagatttgattcagatgcaagcttatgaaagaaaaatagaaagatttgcatgacttcaaggataattgatcactttttcccaaaagattaaaaataatttaattactttactgaaattgtgcacatatctcttcctataggaatgtgatgacagctttaactaattatttttgtgtgtgtgtaaaactagataaatactagaactttcccaattgatcctagcaacttatatattaaaggtttgttgtatgttttaattttgcagtccatttttgggccccaacttttaa

SEQ ID NO: 68886 - DNA, 767 bp, Prunus persica
  Intron number 1 from transcript ppa003951m (locus ppa00395 1m.g) derived from phytozome v7.0 (chr-ID scaffold_8; pos 19455455 to 19456221 reverse strand)
gcgactgcttcaggttctttcttcttttccatcgtttattcccaatctctcatatcataaatttcacaatttgatactcaaaattggtctgaatcattaaaaataaccttttttggtagaatttttcttgaatttaattcttgaatcatattcattacttatagcagattgaagatttgattgttttgagctcagatggggtccatagtgagattcgtttagtttatggatatttagggtttttccgcgacctgggttgaaattatgtcataaaaatttgaaattgattggggcttaccagttatcacattcaagttggttgacatttggattttatagttcaaatcactgttgtcaattctccaactcaaagtgaagatcataaaaacagtatgaattggtgaaacaagaggaaacaattataatttgaaaatgggccttacagcttggatgattgctgtgcttactaatttatatatgcctatgaaaggttgatttttttttttttatagcagtgttagaaacttaggcgttaccttagaaactactatgttgatgtgataatatatggtttctctttatgtggactaagtttatcttaatctagaatgtagataaccttttttcaccttttgcttttctgggttttggcaaaacttgtggtttttgagaaacttgtgtttctcctcccctactcctatattgatgtatcttatgtggttggtcttgtagtggcgttcaaatctagggaagaccatcgcaaacaa

SEQ ID NO: 68887 - DNA, 739 bp, Prunus persica
  Intron number 1 from transcript ppa004627m (locus ppa00462 7m.g) derived from phytozome v7.0 (chr-ID scaffold_5; pos 15788514 to 15789252)
tattatatttccgaggagccatatacagaaaagatgtacgtttttttcttcttttacctcttgtcatgaattatatagtcttttatattcaatttgttttcaattggtgataagatgcatgatgaaatttgttttgattagctcatattaccggaatttgatagtggaatgaattatccggccattaggattttctggaaaagggctatctcatataaaggagcaaacaagtcatttcgttatagggtatgctagtgatttgccccctgaacttgtgcctcactttcgatttaccccttatccttttttttatatagaaaaattaaggatatgaacttctttttttggccaatttcccccctccgtctaaatgcataaattagtccctttgatgcagggcagtctccaaaactgattgctaatttaatatgctaatatatcctaactccaatgaagcaacaaagtgtttgaactaagactgacatgatccatttcataatcatatcatttattctgaattctgatgcgctcttctcattattgctggctcttgtttccaaaaggcaggttttttttttttttttaatttttttgctgagcttcccttctccctttacatcatacactattgttttagcaataatcagttttagaatttccagataatatgttactaaagtaatctttactttgaattcatccagggaggagtaattcgccaggaattgtattatattct

SEQ ID NO: 68888 - DNA, 811 bp, Prunus persica
  Intron number 1 from transcript ppa008208m (locus ppa00820 8m.g) derived from phytozome v7.0 (chr-ID scaffold_10; pos 296764 to 297574 reverse strand)
cttccatttttatttactacaccgagtaagatttgattttcttacttgctcattaatttcaagtctatagcttgatgtatgatttgatagcttgatctctcagtatatgtctaattcatcacaactatagagtattggaccctctggctattgtgggaatttgacttaacaattcattttatcaacatggtctgtgatcaataagataccctgtaaataagttcctaattctgctgatcataatcatggttttgtttcattactttgtgcctgcccacattaggaaactaaattgatggtcaatccgttttattttacaagtaaaacagtaatactggttagggttttgactgaaagggtgagaccaatgaccaatttggtaaagtatgtgagaggatgatacatcaagctcacccaacgttctgcacattatgtgcatgagggcaaccctgtattgaaacaagattgaagcaccacgtatatactaaagcatcccttggaaagattaacatgtggataagcggcagtaattgctgacacgatgaataaagcatgcctaaaatttggttttatagtacgctttcagagttccttggcaattgtttcagcttgagttttctgattcaacctaaaccttcaaaccatgcatgtccattctcaatacaagttcttctccttagattgcaatcctctggatctatgccacttatcaaacatgatatttaaccttatatgtgttaatgttctgttaatgatctccttcattatttatttgatgttgttgatctgcaggtggacttttacgttggtt

SEQ ID NO: 68889 - DNA, 590 bp, Prunus persica
  Intron number 2 from transcript ppa024929m (locus ppa02492 9m.g) derived from phytozome v7.0 (chr-ID scaffold_3; pos 3466804 to 3467393)
ctctagtagtcaccactggggatcaaatacaggtaaattaaatttaactttggttattgttatttactgggaccaatggagaccacttaatctaataataaagccaccatgataattactttgcctccccagatggtctattgctttagtttctatttacagtgtttttaaagttgtgtaaaagttgcactaagtcatatttctcccttgcattgtagcagaggcatatgaattatgatggctgcaagcccaccatcatggcgattagtttcttcaaccatcattgctttgtatattttatatccaatgccacctatgtggagatggtctaatcatagggcaaaaaatgttttaatatatagtagaaatatattctcttatcaaattatccgtcatattatgttgttaaattttcaatttaaacaattaaaattatttattaagtgagtgtttacttggagaggcggtttgcattgttagtctagcaacataagatgccagactgtctcgtaagcgaacatacaccagactgtctcgtaagcgaacattactgtacatgtatgaactgtttgctttgttctcttgcaggc

SEQ ID NO: 68890 - DNA, 503 bp, Prunus persica
  Intron number 2 from transcript ppa006126m (locus ppa00612 6m.g) derived from phytozome v7.0 (chr-ID scaffold_6; pos 23741870 to 23742372 reverse strand)
cgctttggttagttcgccggagcctgatcctactggtacgcatcttctttttctgtgtttatatcccaattatgctttttgcaacctgggttttgcgttttgattaataggtagccatcattttttttattttagtgagatttcttccaaaattaaacacttttttttatctgctgtttggccgctaagaatgagtgaaaaatgaacttaaggtctatgctttttagctttggaattgttttgagattgagaccaggaaagcttccactcagctgattcctctaggacaatatggctaagttgattacataaaatgttggattaatcgatttttcccgttcttatttggttctctcatcgggcaaaagagggttacaacttaaaacattggacttttaaaccaatgatctttgctgtctgccattattgtcatcagatgtattttgatggatacaaattgtgatccctttttgcagagcaagctgtcgcatatcaaggtggat

SEQ ID NO: 68891 - DNA, 915 bp, Prunus persica
  Intron number 1 from transcript ppa018343m (locus ppa01834 3m.g) derived from phytozome v7.0 (chr-ID scaffold_6; pos 17888545 to 17889459 reverse strand)
tgagctcgtcaagcgaggcattgttccattcaaaggtatacttccgttgcatatttattttaggcttatgaacatttttatgtgacttgaggttgaatcattcaatcccacgataatattccaagcacatattccttggagtgataaatttcttatgaggcttgaggtagaccaaatgatacacttgcgtagtttttcaaccattgctttttcttggttgagctgtggtgttatccttctatccttttgactcttttgtatccttttgttccttttagatatttgaaaactagatatctcttctttaaaaaatggaaaaaagttccatttagattaataacattacgtattttttttcttatatttttattttgaggaggtgtcaagcaaaacagagaaaaatattactaaattaagaactagttttaggattcctaatttctgttttaatattaaaaaaaagactaatctttaacttctttcaagattttatacacattctacaatataaatatttttaatcaatatatattaattctttataagaaaaacacgttgaaagtcattcactcttgattttgtatgcatgataacatagacataatttctttgtttaatataaaaatacatatttttgtttttttatatacaaagcgatattgatgaagggaaaatcaaatataggagctagaatgcaaagtaaatactcttaaccacttgcaaaatacataattattttgttcggaaagttaggtccagttctccaaactaaaaaatgacaccgtattatgtagaatattaacctatgagtttcgtgtaatatttgagatcaaatatactcctgtaatgtgaccataaagtatgatcacacatattgttcaccttccatgcatatttcagaagagactttcctgc

SEQ ID NO: 68892 - DNA, 984 bp, Prunus persica
  Intron number 3 from transcript ppa003267m (locus ppa00326 7m.g) derived from phytozome v7.0 (chr-ID scaffold_10; pos 734706 to 735689 reverse strand)
ctatttgagactgaagagtcaagtgtcagaaggtatcatagcttttcatggttaactacgatattagtattgttaacctaatgatcacttatgtcatttgtataggtttcttgcaactgtagaatcatttattgcttgtttataacttacacatagcataagtagtttttattgattttggtgcacatttctctagaattaaaccaccaaaagatcaatatttttttattgggtattaccctatgttgcacggacacggacacggggacacggatacgcgacacgggatatggggatacggaaaatatataaaaactaggacactaacacggcaattgaaaaataaataaatttataataatgcttttatatattaaataaacaaactgttcatgttcatacttcaatttataataccataaataaaacaaagtactcatgtacttctcatgattcatccacataataattaaaaccacacaaaataaaacataaatttatctcaagtaccaagaaaagaagaaaatataatgaaaactaagagaaaaagaagagaagaaaaaggtggggaaagttgggagagagaggaagggctgagaaagtagttggtataagtataaaagagtttcgaaattataatttaaacccccccagttattttaaaaaatttcaaattagtccctcagaaagtttcaataattgtgttttgaccccagttttctttaaaaaatacaaaatcgcccttgccgtgtctggaccatgggttgactgtgtccaagtacgttgactctgtccaacgcgtgtccaagctgtgtctgagtgtccgacactccaacactttagctaattgaagtgttcgtgcaacgtacctaatactgaggcaacaagttcatatcagcaaacatagatgttccttatgcgtgttgcattgttatacttagatgtgcactattgacatatccaatgcttctcttgtcaaggtac

SEQ ID NO: 68893 - DNA, 719 bp, Prunus persica
  Intron number 2 from transcript ppa005605m (locus ppa00560 5m.g) derived from phytozome v7.0 (chr-ID scaffold_3; pos 20491408 to 20492126)
aattaccacgtgattcgtggtgcttctgatctcaggttagttggtttctgattctttcttcgttgaaatgtatttactgttttgttacatcaaattttggttcggcaattctaattaagttgtagtatcagaacaatttgatgatttaatatagttctgctttgcctcaacatcaatgtcgtgaacaacagatatacgagttctatatacgtttggacctccttcaattttgataagttcgttgtagtttatagcctacaggctagatgccattatgggttgtaaaatgtggctctgtgatggcccatttgttcttcaacctaagcatcatgtcactagaattatggagtctggagagtacaggatgtgtttataagaaagaagagggatcgatagaatcctgtcaaagtttgtgttggggatattatggaactgtatgttcgattaattgattggcttccccatatcactcttcttaagggccgttcttgagtataattttttctctggtcatgtgtgagacatcttttgcttgcaaattgagataattttttggtgtgacgtcattagattgtttgacagagattctctattgtcttcttttctttttcttttgtggtgttaattgaaaaagtgacaatggaacctctcctcatggtttgcatctaaatcactgctagttatttacagggtcacacttgctgaccagtcaacttttg

SEQ ID NO: 68894 - DNA, 911 bp, Prunus persica
  Intron number 1 from transcript ppa019709m (locus ppa01970 9m.g) derived from phytozome v7.0 (chr-ID scaffold_5; pos 13774652 to 13775562 reverse strand)
acggtagaaatgagttatagaaaggttatttttaagagtgactctgttcagatagtttgagctcttcaacatgttcgggtcactcaggaagattttatccatgtctgtcatactactaatggaatgacttcatttacagtatgtatcatttgtacttttttttcgttgatctaataaatttctattgccttttataaatacaaaaattgtgtaaaaaatttcttgaatcaacggagaaaatgagagttcagatttgcaaaatcttttatcattggacagaaaaatatcactaaacaaaataaaatctagacttctataggagtgcattcgaatccgcatgttacgtcatgtattaatacacaataatttcccgtgatataagcgtgtgcgcgacgcagtaccagtgttgcatgtgagacattacccagtcaataagtagtgggtaacaacaagtcagaaggagcaagatgttgaccatcaactatagtctcttctagagcgttgaacttgttccatcttcttccatgtaatctgcttcttcgtctcttcccttttattttgcttacgacataaaaaatacatcacacatgacctgtgagccaccgtataccccgtctcttctcgttttttcctcccttttttgaattcttcatttcattcggatgtccagaaaactcacagcagcttctacccaggatcatggaacatgggaaagtcggttccaacacttcaacacggcctccaagtctatatataaggctgcatgcttgttattgttccattgcaatcaaactgagagttgggtttctgttaggttaatctatatatataactagctaatccattttgcattgtgttttgccattgtaaatgaagagcaacagaggatttgatcgtgtgctcagctactt

SEQ ID NO: 68895 - DNA, 892 bp, Prunus persica
  Intron number 3 from transcript ppa007383m (locus ppa00738 3m.g) derived from phytozome v7.0 (chr-ID scaffold_7; pos 13529240 to 13530131 reverse strand)
aatcggcgtaatacaggtaccgattctcactgttcactgtagtttatatttgaggtatgctctttattgatttccatttggtatcacagtattgtagcgcattttaccactatggtaaaatctatatctgacttgctggtttgctactgtttgtatcaatcatcattaccattttctctgctgtgattaaatgtttctttggacagtcttttaagcgaagataagaagtaaaaataaatggtttagtctgcttcctcaaaaaatataaataagcgaaacttatggttcaagcacgtcactgatctatggataattctcaagattgattcatatcagttgatgagaagcttgggatatttggtctcttcaaagtggcatgatattcatgttcatgaaaatttgagaaatagatcaatgtaaagtcaaaattgtcacaaagttgataaaagatggagcttgttttttaagtgccatagaaaataaattcagtaagagaaacaatgatttgagagcgaaagttcagaggtaactggttgcctgtcacaagaaatctacttttagcttcttgtctaacctatgaactagggtctaaactttgtttcttatcccagaaaagaaaatggaactaagtggttaaatttctagatagttttaaaatgagtgttttttcttttcataaggtcattctcttttgtttatgagcatattcttattaggaaattgtgtacatactatcttcttacaatatctcctctagttatgttagtaaaatatgttgtgcatgcatttacatacaactatgcatatgcccttgtaggtattaattttacattaatatgtggttttatcttgtacagataacctagtggagaatctcttgggagattttgag

SEQ ID NO: 68896 - DNA, 671 bp, Prunus persica
  Intron number 1 from transcript ppa002031m (locus ppa00203 1m.g) derived from phytozome v7.0 (chr-ID scaffold_6; pos 777029 to 777699 reverse strand)
acccaaggccttcctctctactggttcccttctctgtaatgtcgaattactgttttctccttctctgcctgcctctatttaatttgtttgcactttaattgctgctgtattgtttcttggtcattcaagtgcctaccctaccctttatagcatttcgttgtattgtagttatttttggaatccccctcactccctccagtgttgattgtagttatttttgtttcctttatttcttgtaaacattttgtttttaacctgacatgccatgccaggaatgaatctcaactctaagttgagctaaaaatgaaggggaataaaacccgtcatttgaactaatccacttataatatatcgaaatcgaaccatatatgaaatcaatttcaaccatttcgaacatttgatgcttctttaataattttgtagagtggaagatgtgtatgactgttggtacattcaaaattcattctttacccttacttatgtgggacttcatcacacatggattgactaaacctgacacatttagcattagtgtgttgatcttggagcaataattctgcagacatggaatgtcttcttgctacttttcatttttgcttcacaattataattgaacctgttcttctctattgtcagataccagtctagacatacaaacttgggacggttga

SEQ ID NO: 68897 - DNA, 808 bp, Prunus persica
  Intron number 4 from transcript ppa009426m (locus ppa00942 6m.g) derived from phytozome v7.0 (chr-ID scaffold_2; pos 1537317 to 1538124 reverse strand)
aatcgcggtggccaggttggtggaccgttctgcctatctttttctgcttaattttttcctctctttttggttgtaacttgtacttaaatctgtagttgcttgatgatgcattcggactgcatggttgtttccaagttttgtttttggtgttcttacctggagatctgagatataagagatcaaattaaatccagaaatatgcagtacagcctttgaatgataaggaaaatagaaaatctgaaagaggataaaagatagagataattttttccctctcaaagaatacttgactcatcaaaagctctgtcatttaaatttaactgctgacacaagaaattagacggagctctgctctgaacttatttgaatatatatatatatatatatatatttgatcacttcttatgaaccaaccatgcgttgcccaatattgagttattggaagatgttttctgtgtagtcactatgttaattattgtgtgtgattttttgtgtgttttctattgtttatcatttgttgtgctacaatttatttctagtttgacccctttactccagaatatggtgagatttatctcctttttgaggtgtaactgctatagttctttttgatattgtcgtgtttttcttattcttgcaatgtgttaatcgaaagagttggtacctgttgacaacctttcaaatttaaggacatacgtgcctggctctgaagctttgctccttttccatagtagagcatacattaattttttttcttctttcaaatcctgcaggttatttctgaaatcattgaaacttgccgtgcaca

SEQ ID NO: 68898 - DNA, 779 bp, Prunus persica
  Intron number 1 from transcript ppa017551m (locus ppa01755 1m.g) derived from phytozome v7.0 (chr-ID scaffold_4; pos 6901364 to 6902142)
tggtcctggttcgggtcctagcattcgtacagtgtgtatgagtttagtatatcatcatagttcgggttctagcatttgtacagtgtgtatgagtttagtatatcatcgcctctctcaatattattttcacgtgtgaaaataaggaatgatctgctataatgtttcacaggatatcccattgagcctgtccaaacaaatcaaagggaacgtgttttggactgatttaaactgcttgattacttcaacacgtttgagcaattaaaggatagtatacttacttaatctactgattatttagtggatgagaaactttaaatattagatgatctgtactctgtcaagttcaagtaaatgtaaacaatgttcaagtcttgaacagctaatatatgttaatttaattcattaatttggtccacgtgtaaattttccactagctaggaccttccccaattggggttgactcaaattccaccatgaattaaatacagtataaatctagaatgagacttaattttcaaagctacgtgtttgcatgttaccctttgttctataaggctcaatagtgcttctcacgtatttttcagaacccaacaacacattaactcagtttctagagctatatataaaaacaagtctagctgaagatgaaaattaagcatacaacataacaccaactaccaagaccaagctgaaattaaacatgaagttgtgcatttctgcattgtctgttgttcttgttctgttgtttgtatctgcagcaccgcaattagcagctaaaa

SEQ ID NO: 68899 - DNA, 1036 bp, Prunus persica
  Intron number 2 from transcript ppa000487m (locus ppa00048 7m.g) derived from phytozome v7.0 (chr-ID scaffold_6; pos 26351923 to 26352958 reverse strand)
ctggaggaggagaagttcaaagagtccgtacacaggtaagctaagattcccaccctctgtatttataattgtacacgtatacgcgtaatttatgtatgtatttttacatgcatgtacataatatatacatgtacttgtcaaccggaggttgttgtgttgattttggctttatgtgatgattatgagacttaaattatttaaagttcatgtcttttcattttcattgtttttaaactttaatttttaatgaaagttagcctatgcttggttcttgagcggtgattatttggatttaatttttctatcctagcaaacttttttaagttgttaaaaaaattgataacttcactccaaatggacgcgctaggctgaattgaggttcatataaggatcatgggttaagactttgaaaactggaacaatatctatgagtaaatttacctgtttttcgcttgcgtctttcccggaaaaaggtgagagagcatgaacattttacttaatttgatcaaaatagtagcatttgagcttagttgattaatgagggtgatttattggggtctagaaacatagatgcttacaaatgaaataatctaaggttttagagtcaataatgtgtcccttgtctctctcgcaattaattgaatgataaatgatgttgcagtatgagagaaattgaaaaaagaaaatgatgaaagatgaagctatgaatatgtgacaactaatagtgaaagagaaatacatctaatttggtttaataaggtttggtcaagcaagtttttttgtttaaattgggatatattatgatagcaagatgtaatggaaaaaaaaataatgataatgagaaaaaactcgtgtttaacaaaagtaccaatataatttctgtgtgtgcaattaattttcttttctcaatttggaaatcctgtttcaacattttattttctttcttacattccaaattcttctatcttgaaattattttaatttcaacctatatgttgtaggcttgagaaagaatcagggttctttttcaacacaa

SEQ ID NO: 68900 - DNA, 986 bp, Prunus persica
  Intron number 1 from transcript ppa017217m (locus ppa01721 7m.g) derived from phytozome v7.0 (chr-ID scaffold_5; pos 6249796 to 6250781 reverse strand)
ttgaaggcaacactgtattgcacattgcaacagcaagaaatcaattccaggcaagctttcgtcccctcactccctaactgtgatagagtaatattttgcttcaggttagtagatgtcccaaatttactcaacctgtaagcaaacatatatgtaattgatttttcaatttttttccctttgctctttcatttatttctttgcttgtcttctaatttttttattaccaacacaaaacacaaagatagtaggacagtagccttagaagttagtttctactaataagcttcaaaaatatggtagagctgattacaaactcaaaatagtaagcatttagctcttctacatagatgaaagaaccaaattgcagaagacatttaagtgatactctaaccggtatctttgacctttttcggtatgattttcctgagggatatttgttgaaatgtcacctgaacttataccttagtttcaatttgtcacatgaaatttttttttaagtgaaatgtcacctaaatttttcaaaatccatgatttgtcacatgagtttaacatcatccaattttccatttatttttaagggtattttagtctttttattttcaaggatattttaaaaatggaaaaaattattattaaaaaaataaagcttaaatgcaaaaatggttgggggttaaatgtgaaaagatatgatttttccatttttaaaatactcttgaaaataaaaagactaaaatacccttgaaaatagttggaaaattggatgatattaaagtcatgtgacaaatcaaggattttgaaaaattcaggtgatatttcacttaattttttttttctttttcaggtgacaaattgaaactaaggtataagttcaggtgatatttcaatgaatatcccttttcctgaagaatatgttttcatttttgaaaacaaatactattttgcaagaagttaattatagatttttgcatgctaatattatgcaggtg

SEQ ID NO: 68901 - DNA, 710 bp, Prunus persica
  Intron number 2 from transcript ppa018012m (locus ppa01801 2m.g) derived from phytozome v7.0 (chr-ID scaffold_2; pos 26657350 to 26658059)
tcaggtatgattaatacttcatcttttctcgaaaatttctgagagttaaacctgttagtttctgttcaggactcaaaattagttttgggctgatggttgatcaccttcattgccccttagggtgttggagcttgtatgatatatgatgacacgtacaactatattgagaaaataagataacgaggaactgagtgttcagtttttaaaagctgcacccttttctaacttggttttgttgcaaatgacagcagttgaattttctccaaagagcgagactgaaaaacttaaaaagtgttctagattttggcgtgacctagaagttaattatctgtatgagcagtcttattgggaaacaactatctgtattaggattgatgctagttgagcttgatttgaattgtattatacttgtcgccatctatttgcagttttctcttacttttactaacattaaacataatgtagttagtgataccattcactagataatttcccagattcttttagtacagtcttatgtggtcttctcattcaaagacctcgttgactgggaagttaccttggcccattactttcttcctcattgcttagtttcacttctttggagtctggatgagccatagcatgataaaaaatttgacagtccattttttatgatgataatctcgttgtttcatatttgtactggatttgaaataggaactgaggcc

SEQ ID NO: 68902 - DNA, 516 bp, Prunus persica
  Intron number 1 from transcript ppa009595m (locus ppa00959 5m.g) derived from phytozome v7.0 (chr-ID scaffold_1; pos 32641947 to 32642462 reverse strand)
tttcaggcaatttcacggcgatatcccggagacaggtaacctctttcttccactattggtttcgtcgtcattgtttattacatagtcttcctctacagtctccgccccattttgtattttgatttttctctcggaacgtaggattctgttactgaattctccaatttgtttagcgttttgtatataacatgcataatatgtataatctgattgtctgggaaaaacttgtctttagatattattaattgggatgttttattcttggggcattgtaattattgtttttagggttttaatctgcctacattctggttgaatcaagggaattttacccaatttcaaatgaagagaaagaaaaggttttagttttcattcaaggcatgtaagttcacacatttcaatgctgattgggaaatttctatgatacaataataaatttatgatctctagagtctgtattttctagtgtttaggatgatcatagcatactaataagtggaatgttattgatttcag

SEQ ID NO: 68903 - DNA, 495 bp, Prunus persica
  Intron number 1 from transcript ppa026966m (locus ppa02696 6m.g) derived from phytozome v7.0 (chr-ID scaffold_8; pos 10990703 to 10991197 reverse strand)
cgagaacaagcgcaagattagagaagctctgcaaggttacccttttatctttgattttgttttagggttagttgattttctacttaatcttattaagatttcagagagatggagccttagatcaagcaacatcgatattgtccccaatttaaccaggtttatattgtccctaatttaaccaggacgaaactatttaaccaggtttatatattgtcccctaaaccctaaaccctaaactatttattacatgagactttctattttgttaagtttctggtgttagcctcgtgtatgcttcaacaatccttggcccaccactaggaacaatattgtccagtttagtaaattcttgattttattaggagtgaaactatttattatgcgagcctttctattttgttaagttttcgacgtgggactcgtgtattcttcaacaaatttggtacaccttttgttttcttgcagagggaaaaacgattcccactgagcttcaga

SEQ ID NO: 68904 - DNA, 576 bp, Prunus persica
  Intron number 1 from transcript ppa024802m (locus ppa02480 2m.g) derived from phytozome v7.0 (chr-ID scaffold_7; pos 3329600 to 3330175 reverse strand)
gttgtgtctcaaccattcttgctttgcaacaacaggtttcatcatatatattaaccatattactaattaattacttaattaatcatcaaaacacacacacacacacacatttacatacctatatattctctctccaatctattattgccttcatggaaattattggtcaattaatgtgatgagataagagatgatatcgttgcaagtgcaaaccagggtagataaatttacttctttttcttacaaaactttccatagggggttttgacaatacttcaacattgatggccacgaaacattaccaattgctccctcttctagcagtttctatagggtcctgagttcaaatttcatggactacgaatgttcaataaaacaaaaggcttcaaaatataaaaaataaaaagggaaaactgcaagctctctcaccttttgttcataagatggcgttagtgttcacatatataattgaagctccatgaccaatcttaaaggacagttacaatatctattaattaattagctaactgttgtggcattaatgtccaggttgcatctttgcaagccgagcttgca

SEQ ID NO: 68905 - DNA, 864 bp, Prunus persica
  Intron number 2 from transcript ppa006430m (locus ppa00643 0m.g) derived from phytozome v7.0 (chr-ID scaffold_5; pos 9326563 to 9327426)
aaggtagttggttggcttttatgttttcttcattgtatctatcacaaaagtcttggaaaaacatgaaatactttgatcttgattttcttttccttggtacgcacttagattttagtgtgaagttttcatggtccataggacttacattttggctgtttagttgttttctttttcctggaatcattaactttcatgtagtggcgatgttttggggtgaaaattttgattctgtgcatatattatatgagaaatatttttattcccaggattgtgcttcccaaatgagtaagaagagtaagaagaaacaagctcacatataggtaaaactgttgggccttgattgtctcagctgagattaacgaccatcagattatcacagttgtgacgttgaatataccagttaactttccctgtactgataaataacttcttattcatggaagaagggagctcctatacgtagttcatcttacatatgggaatctatgaggaatatgtttgacctctcctaccatatgtacgaaattcagttttttggttactaatttccatttttttccttctgcatgtggatgagttacttcttcagctagacttcagactttatgttttggtgtctgttgaatatgtttgatctcatatacttgaaaattttcttgtttagctactgatttccttttgtttcctttaagtggataagtcagttgttcaacaggacatttaagccttaacttttattgtgttgcctttacagttgtacctggtaactcttctcaagttttacttaatgaattcatacattaatttaataaatttataaaatttgcagggttatcgggtgatttctgttgatattccacgtgt

SEQ ID NO: 68906 - DNA, 626 bp, Prunus persica
  Intron number 1 from transcript ppa006708m (locus ppa00670 8m.g) derived from phytozome v7.0 (chr-ID scaffold_7; pos 21139853 to 21140478 reverse strand)
tcatccgggttgccccaagcaaggctattgaggtatgaggtcaagaatgttgtgttttacatttgaagtttgatagttgattgcaacaatctttgagtaagtagacttgtgctggaagacttgttaagttgaacaaatatttcattctgtatggttgtattttgttggtttaattcttgtcaaaaatctctatgcagtgaattattcagctgagaagtatttcattcactgatttgcttcttttccctctgttgtgagatgctattaattttatttattgcttgtgcaccagatccagcactaggctgagatttctacattaatatttgatcagccagagatattgacgacgatggcgttggccttctcttgaatttattgggagctgggatattacttggagaatcagtggattagcacacataattactcaactgattagctgaagctctagtatgcttctttgggatcttttttctctccgtaaaatatatgtttcgtagttctatagattttcaaatctgattggtctggttcctgcctatctaaacactgcatatttctgaactgcactatttggtaaatattttcatttgctgattgaacctttgtgcagttattcgctt

SEQ ID NO: 68907 - DNA, 570 bp, Prunus persica
  Intron number 1 from transcript ppa009994m (locus ppa00999 4m.g) derived from phytozome v7.0 (chr-ID scaffold_1; pos 31347966 to 31348535)
agggcttgaaattctgttccaccttcgacttcgtgagtccgacttcaattttctcgttccttttcgttctcgtggttgtggattgattttgtcgctcaaattgattagatcttgttacaatcggtctgtgttttcgcttttcaattatcgcaaacttgtttctatgattcgttgctgtttggttcctgagaaaactgaaagttaaatataagatgaaagttgaatgttgaatgttgaatgttgaatgttttcactcttggatgacaaagtgagtactttaagcttagattcttagcgatctgtttaactcattttacacttaatttccgctttcttgtctctctctttttttcttttttttttttcaattttatgatatgaagaccctgactttattaaatactttttagatttttttgtctttcacttgtatgcatacctgaagtttaatactcattagttttttttttgttcttgtcatcattgtagttgatttgttgggttaattaggaagtagcccactaaaacttttgacttggtttctgcaggcttccgtggtggcatttacag

SEQ ID NO: 68908 - DNA, 637 bp, Prunus persica
  Intron number 1 from transcript ppa010166m (locus ppa01016 6m.g) derived from phytozome v7.0 (chr-ID scaffold_8; pos 15946916 to 15947552 reverse strand)
tcctatcccagcttttcccgctgcattctcctgaggttactctctctctctctctctctcttacttctcttactattgctctttgctctgcttttttccggcttttagatccatttgaatgggacagagtgatttatccacaaattaagtttctttactgctttatcgatctgaatttgaattctcgtcttcattttcttttcgaagattggctttttgtgattgtgtttttgagttcttattgattccgtggctgcttggatatctgggttggtcttatgttcacaaattttgcgctggacatgcgtgtttcactggaattttgctcaatcatgccatctttttgagtagtaatgataaattcgttaagatggtatttgaaatgcagaagaaaaaagggttatgggtttagtatatttattatgtatgagtttgaattgacgtttggaaagaagatctctttgtggcactgtcatgatggttgatgcctatttaattggattatatgaaaattttgagatcaatgagtagaggacagttagaaaaatgattcaacacaaggcatttggaaacactgctaagcgaagttttgtttcaacttatgctagattttgcaggctcactacttaataaaatc

SEQ ID NO: 68909 - DNA, 700 bp, Prunus persica
  Intron number 1 from transcript ppa012356m (locus ppa01235 6m.g) derived from phytozome v7.0 (chr-ID scaffold_5; pos 14726709 to 14727408)
tggctgtggatcggccattgcctcttcttctgtcggttagtcacgtttatatgcatatttgtttatgtaattgtttgtttggttgcttagaaaattttagggcagaaaagattgaattttttttaaatagaaatcgaattttgacttattgattggaacgaaggtcttgctagtttaattaattctgctatgctttgctttgcttggttgaggtagaaattggaggcattgagccgcttataacttgttctgttggttgtgaattaaaaatttaagttatttagattgaattaatacgttttctgagtttgcgtatttcattccaatttgtattatcggtttattgaggtatgattaatttatgtatttgtataatcgttttggatgcgttttgcatttcatcaaagtacttgtatgtgtcatcatcatgctgcctctttttatgaaaatttagggtaatgggaaattattgtttattgaaattactctgatgtgttgtggaaagttgctattctctgaagtcagtcaatgacggatcatatattttatagagagttaataaattattgttactgtttcatggcatgtgatgcttcccttgcttagttttagttcaatttgtctgatatgattctttctggactgataccatcgattttaattgtctaatgttgcttttgtatcttcttccagctactga

SEQ ID NO: 68910 - DNA, 655 bp, Prunus persica
  Intron number 1 from transcript ppa003451m (locus ppa00345 1m.g) derived from phytozome v7.0 (chr-ID scaffold_1; pos 3356055 to 3356709)
ggtatttttctaaagttgcatggagctcttttgatataaaaccctaggtacatctaaacacgcctaaagttgaaaataatatcgatacaatatgaagagaacatgacccaataactacaatattttatttttcctttccatttctcttattttgcttagtcagcttctcttcttaggttacacaacttcattacaattcataaggccatttttctcaacaaggagttttctccttccaaaggttttgtaagtgtgcgttgtggattgatatgaaatttttaatgagttgatccggataagtttcgtgtgagattcgagtcttataccaagacgtgtcgtaaattgtcacctctaaatttgaacaatttgagcttgatcagcattcataatgagttggactcgagttgagtttatttaaatcaaaaggagttgaacctgagcccgaaaaccaaatcgagtatatcgggttggatatgggtcgcctcccaacttgcttaacccacccaacttgcttggccagtccattttactttgggctagcagcttaatagaagcccaactgaagcctgtccgattttcatcataagtttgatagaatccctaaatcataaaatccaaagaccatcgacctgattttctctctttcacaaattgg

SEQ ID NO: 68911 - DNA, 575 bp, Prunus persica
  Intron number 1 from transcript ppa006548m (locus ppa00654 8m.g) derived from phytozome v7.0 (chr-ID scaffold_3; pos 8857643 to 8858217)
ttggagttgtgagtatctgctctgcctttgatctaacattaccttctgaatcatgagctttaagcttttgaaaatattgtattcttttggatcatcatttctgttttattttccttcttcatccacccgacgagttagctacacagtatggagtggaagtgttcagttttattttaattatgtttttcttctctcttcttgtcctggaaattgagtaattttttggtatgaaaccggacctggaaatgaataaaacagtaactttctcggaagccaaacagcaaccaaatcaaggggaaaaggaaaagctgagaataattttctttttctttttttaaaattttaaaatgtctcatttctgttttttttataaatatttggtgcttcgttggcgagcttttgttggcttccaaaggacaaaaatgttctaattgaatgtttttgtagtaatttttattctgacgcattttttgtagtactttaacaatagctaaacagttatgaatatgtgcttgattttttttttttaatacatatttattttcgaatttatggattaaagggtgcgtaccgag

SEQ ID NO: 68912 - DNA, 1002 bp, Prunus persica
  Intron number 2 from transcript ppa006548m (locus ppa00654 8m.g) derived from phytozome v7.0 (chr-ID scaffold_3; pos 8858256 to 8859257)
gaagcagagcggagaattgcgggaaacttgaacatgtaagtgggtatattttctgaagtttagaaccacttttgttattaattgattgattgctttccttatatgcatcatctcattttagattttgcatttttgtaatgggagctgtgacatgtggcttttttttctttttttgtttttgtcttggagaatgctaatagtgttttacaacttgctacttttgcagtggtccctttaagttagcttttatattgcccaatgcccactacggccacaaacatatccttggttcttttgtcacacctactctggagtcatgatactgctcgtacgcttgagaatatttttctttttcgctatttgcatttggatatagattcttaactttattctgtcttgatcgttcgagtagatttatttatttttggggagtggtggggcttttatagttttgggtatttgatatagtggaaattgggctagcaattggcaactttagaaccatattgtactctccacgctgggacttattgtcttgatagccaggtcgtggtgaagggtaatctttatctgttgttgtaaccgtgactctgcaatttgagtttcctaatgttgagtttgatgctttataattggaattggattgagtttgtaggatgttaggattatgttagcagcagtgaaggtttatgtattcattttcagttgtgagagatgaaggaagaatgagtagatagattccttcaatctctcttgttcatagacactataaactacaactcttcttatacttcaaaaaaacccatgctagataagttaatgcggaaaattttgtgcaaaccggctactaaggactggaatattgcatatgcatctttacaattagaactaaaaaccaaaccttccactgtatcatgtaagttcccttagtttcttaattttttcgtagcactaatgtatataatttacaattggtttgttcttgccagggagtatcttcct

SEQ ID NO: 68913 - DNA, 768 bp, Prunus persica
  Intron number 2 from transcript ppa002001m (locus ppa00200 1m.g) derived from phytozome v7.0 (chr-ID scaffold_3; pos 18162346 to 18163113 reverse strand)
ccttcccccttcgcttcatctcagaattcaggtaacacagtgaacatgcacaacaataattatttcattttcttgttggtttgttgacacttttaagtattcaaatttgattcgcggacaaggaattgtagcagctgttccaagagaattggaagaattataaatgtttaattcactgtaaaatgctaattatttgccttttaatattttcccagttgtgatttcatttaaaatggacatcacattagaacatccaggaatacaaggactataaggtttgataggttattggttgacaagaagcatctgacactagtaaataggaacaacattagaacaaaaggaaaattactgtaaccataaatagatatcttaatcactactaatcacatgctagaatctaaaagcttattacaataaagcctatttagataggtaatcccaaaataataaagtacctaaattatcctaatgttatagaaaaactgaatgtaatagggaaccttaaaatccattccctaaattactataaatagagccaaatagataattacctctctaaattatagtattagtagatgaaactaaatggaaaactcgatttctatgctctggctaaaacattgtataaatcttattaaagtcaagcttctgaattaactaacaagctgtagatgaatgcacaaatgaggtcatttagttcaaactaatggatcttttttctgctctccagattcagtatttctgaagccacattctccagctccc

SEQ ID NO: 68914 - DNA, 399 bp, Prunus persica
  Intron number 1 from transcript ppa007140m (locus ppa00714 0m.g) derived from phytozome v7.0 (chr-ID scaffold_4; pos 2707288 to 2707686)
ctggcaccaggtctttttctttttcttataatgttttaaaagttttaatttttgggtttcgcttctgagagaggcttatacaaaaactcacttttcatttctgtttttatcaaaatttgaacggggtcttaactcttacgtcttacagttactgtttgttgtaatttagctgttgcaatattgtttttgggcaaaagatgtatattttgaataattttgagtttttgggttggatttgagcctccatttctcaaataaagattgtgaccgagcttgaggagtagagcaacaatccttttgtagtattctagctcatggtgtatgtgtatgtatggaagaatcttctgactgtttgatgtggcagtgttgcaaaacatttggagtcagcaaatacggtgt

SEQ ID NO: 68915 - DNA, 411 bp, Prunus persica
  Intron number 1 from transcript ppa018900m (locus ppa01890 0m.g) derived from phytozome v7.0 (chr-ID scaffold_6; pos 1962403 to 1962813 reverse strand)
actgctttgtcaatgtaggtttcattttgtggttgtgttcaatatcttctttttttgttatttcttgtatacaaacagagccatactttttctcaaggtagcgggatatcgtctgttgtcagactgtgaatctgaagcattgatcctatgaatacttatttgaatgagtgttacaaaaccaaacacctttagagtgtgtgtggttgagtttcacctctgtatggacaaggaaaaaagatcacttgagatttggaaactgtacagtttttacctaacaaaaaggagatagttgtttgacattaatcatcttggattatttgtattaatacttatgtttaaaaaatcgtgaagattttaatactaagacatattgattagtttgaatttttccatcttggtgacaggggtgtg

SEQ ID NO: 68916 - DNA, 339 bp, Prunus persica
  Intron number 1 from transcript ppa023747m (locus ppa02374 7m.g) derived from phytozome v7.0 (chr-ID scaffold_7; pos 19926720 to 19927058 reverse strand)
gtaaatcgctctctctctgaaccctaatttttctttaattttatttgtatttctagctcactcgttaactatagtatcagatctctcaagtttcaaatcctagctttttgctccgtttggttactgagaaaatgcgcgaatgaacaagattcaatatagtttttaatcttaagttcaaattaattgctccaattaattatttgtgtcgcatagaaacgaaatgtgttagtattttgaatttcttgcgatttctcttctctcaattttttttctttttgttggcgatgttttcatttgtgtacagtcgaagaagagaggtctttcgttggaagagaagcg

SEQ ID NO: 68917 - DNA, 879 bp, Prunus persica
  Intron number 2 from transcript ppa006796m (locus ppa00679 6m.g) derived from phytozome v7.0 (chr-ID scaffold_4; pos 5807457 to 5808335)
ctagtaagggccagacccctcttcaggtaacatctagttttaaggtgaatttccagtttctgtggttgctagaaatgtgggtacaagtaatttcacttagataatgtaagtgttgagtttggattgacatctgtgctatcactttgtttcctgatgtaattaactggatgtcttttatattggcgactctgtaatctcggggcatctctgtatcaaaagaagccaatgttgccttaactcaaacttgcattgagcaatttgttagtatggttgagtttattttaattctgcagttttcgtagtttcggtcttgctgcttgtaattctgaggcttatgtcacatggttagaagccaatattactgtgatttcatacttcgttttagcaaatgtggcaggtagaaaaattttgctcagtattttatctctttcctgtcgtttctttttattggtttgtactgacatgtatcgaacattaggttatggtgcatactctttactttgtcgaagaatcttctcaaacgaaaaaaagctctaaagatgacagacaagaagaaaagaccattgatcacacaggtaaattcttttaagtgattctcagcctgttttgtcaccttatagtacttggatggtcatcatgcactcaaggatcaagtgctacctttcctatgtattgttgaaccctgggggatttgacatgctgaaaacattgccactagaatgcatgaatttgatttcattaatccatacttccgttggccttttatatttatatttcagatgtagcatgcatttgtgatttacaacattcaattagtgattactttgatttgaaatataatgtttatatctgttgaaagagtttatacctgttcctttt

SEQ ID NO: 68918 - DNA, 966 bp, Prunus persica
  Intron number 1 from transcript ppb014585m (locus ppb01458 5m.g) derived from phytozome v7.0 (chr-ID scaffold_8; pos 16936255 to 16937220 reverse strand)
agcacaaagggctggtgatggtggtgagcaagtaaaagttcagaaaatattttttctatttttttaaaaaaatgtttgtgttatgttgatgtttccagatctgaacttgagtcacacaacaaggccaagcatagtgttgagggtgatacctaaatttggtgaaggttttggtggtgatcggttgtggttttatatgttcaaacctcagtttttctatttctttaactttgattaataatttaatttaagaacactacttttaactgttttttattgtcagccactttgatttaccactttccattccaaaatgaatctcgcgcactaattgggtcaaattactcttggtttacattgagcttgtatacttaatgccggaatacttgctctattggttgtgagccttgattgatatggctaatgtctagctagtcatagtccaatttcctgtaagcttctaaaatctgcctgtagtgtacagaaagtgcttgctctatgaaccctttagttttataagccgcagcattggaatttccttcttgatttgatataaaactgtgacattgatatccatctttacttttatgctgaggcgagctgcaaactgtgtgcgctgcgctaccatagaaatggttacaagccatgattctgccaatgtctttaacttaacattcaaggccaaacacatgtacaatatttatgtacgtatatttttaaaatcagtagaaaacattatataagctactcatacctagaaaagaaaataatattatacagctgaattgaaaaaaaaaaaaatttcaaacctctatacatcatcaggaggtttggacctcatcgtgatcaaggctatagcctgcaaatgagtttataagcatctcagaatctgcaaaagcttttagctttcaaaaatagcaaaatacagtcacagcacacagcacacaattaagggacataagtcgggct

SEQ ID NO: 68919 - DNA, 592 bp, Prunus persica
  Intron number 1 from transcript ppa000655m (locus ppa00065 5m.g) derived from phytozome v7.0 (chr-ID scaffold_2; pos 397703 to 398294)
gccgagcctcgcgcaaagcgccccaagattacaaggtacggagatttgttcaacattgaaaattttaacgtttcttttgggtactctgtttgtcaatcttgtttagcattaggattttgtcgttttcactgcatttgttctttgactatctgtttggttaccaaaaaaattaatgtttgcttttttaattgtgtcttcttcaatgatgatttatgttaaataaacatttgattattttccttgtcttttcttattatgttaagcaattaagctgaggattatggaagtcacccctacaatgttaaatgcttatgtctggtcttgaaaaaaatgtagtacagtggtaaagatttaaaattttgtcatttgggacctattagagaccctaagtctatgcagaaacaagacatctatgtggttatgttgaattgacttccttgtcttaaaatcgagagtatatactgtatactcaatttccatttatattctacataaaagatgaaagtgaaattttatctcgtttgttttcttgttttgatctgcaactacatgaatatttaacgattatcttcgctttctttcaggggtgaag

SEQ ID NO: 68920 - DNA, 894 bp, Prunus persica
  Intron number 2 from transcript ppa000504m (locus ppa00050 4m.g) derived from phytozome v7.0 (chr-ID scaffold_6; pos 8285946 to 8286839 reverse strand)
aagaggtgctacttatgtcaatgtggtttcaatgtaggagtgcttatgacgtgtactgtcctttaatgttaggatactttagtttttttctaagtcattgacatgcttcaaatagcagaaaggttgctaatgtgatctccttcgtgtaacagacaaattttcttaacaaccacaacaagacaaatgctaattaagttcctgttaaagtttttcacttataaaacattggtgtcaataaggaggctagccttcatgagatttatattgctggaacttattcacatgtttgattgatttactactctccttgatgatgctgacaatcatacattttcattttttaaatataagtttagtcatgttatagtggcgtaagaagctgtttccttaacattatgcagttgatgacaagagggagcaaatcattgatatgcatgacaacttggatttgctatctccaaccttaaaaatgattcgtagtccaaatatgtgttctccacacgtaaaatttggaattctggacttgtaattgcctgaaatctgcacatatatgatgtgtggaaaagaaattaattttatcataattctgccactccattctctttttctccttgttattatgacccggcacaaacaaaatgaaggaaccatttttatggaaattcatgctactcattgagagcatctactgttttattatatcttctttggtagtttttatctccattcttttgcactgtaataaacttgataaagctccacttcttgactgattgtttacctaagtagttactttttctatgtggatataagttttgaattatctgtctaaaaggcttttgttattacctgtatgcaggattttgatccagttagacatattctggagcatat

SEQ ID NO: 68921 - DNA, 513 bp, Prunus persica
  Intron number 1 from transcript ppa000504m (locus ppa00050 4m.g) derived from phytozome v7.0 (chr-ID scaffold_6; pos 8286968 to 8287480 reverse strand)
ttggccttcttccttctgcttctgatcgccccgaggtgattgaatttcaagttttgctcataatgcagctttgctgcactccaattcgatgtgtttcgtgtttggtttgatgcattttgattatttcggactaaaaatgagttcaaattatgtaattaggtattttaatttgacaatgcttaatccaagtgcatggatattgctttacatactaataatagtttattgtaattttaattgtggttttgtggcaatcaagcagaggtttaagttaaatgagtaacattttaagagcaatgcttcttaacctgacagttgtagttaattcattgttgaaaaagaaagaaaatggttgtgtttactgcgaaatatagctgcttggtacaggcctaccatttgttttctgtcataaatgtactgatagtattggaaagaaaagcgttgttttgattcatgtgttgtttatcttcttgaacaggttcccgcgcgagctgcggctgctgcagctgttgc

SEQ ID NO: 68922 - DNA, 402 bp, Prunus persica
  Intron number 1 from transcript ppa004280m (locus ppa00428 0m.g) derived from phytozome v7.0 (chr-ID scaffold_4; pos 5850407 to 5850808)
tctgattccggagactttagttccctccggataaggtaatggaacctgtacttcgttctttcccagttacccttccaatatgataccctttcctatttttgtatcttatctttttcttttcttcattgttgtttcaaaaaattgctttgaaattttgtacagttttggagggatgaaaattagtcctctctctttctattttgggttgatttttgtttatgtgaaagagctaacaattatgtatcttttgggatttggggaatatataaggtaaagcacggatttttggctcatttggatgaattcgttgatggggttttcttgtttatcgatttggatttaggagcggaatgattactgtctgagatcagtatttctttgtggtatttataggtggaggtg

SEQ ID NO: 68923 - DNA, 403 bp, Prunus persica
  Intron number 2 from transcript ppa004280m (locus ppa00428 0m.g) derived from phytozome v7.0 (chr-ID scaffold_4; pos 5851443 to 5851845)
atcaggtgagtccttctctgtgaaatagttaactttctttgttcattttggttaccactttagaagacgttttaaatatgaagccaataattctgctagccttgatttttgggtggctgattttcacaagttccttgccaaattattcattgcaatttcagcgtttgtgaccgcatgaatttattgacgaaaaaaggggtcaacattatttttaacaacacaattttataggtttgagtgatggataaaaccttttaactttcagcaatacactttgaatgattgctaccgagttttatttcaccttacttcatttgagttgtagcactagcattaaattattcaaattgtcttcttgcatgtcaagtttgctttaatgacatgagtttttgacaggtatcac

SEQ ID NO: 68924 - DNA, 793 bp, Prunus persica
  Intron number 1 from transcript ppa016272m (locus ppa01627 2m.g) derived from phytozome v7.0 (chr-ID scaffold_8; pos 21663728 to 21664520)
ccaaagacagatttcatacctacactactcctctagtactactatacactcagacgcatgcttaattaatatataatacacacaccacaccctccatcccaaatcccaaatttccctctttccttttcccattgtttcttgttttcattgtattttgtaaaaggggcaatattattgccgcatttttgtagattgacaggttaattagagtgtttccaacaatattaatattaataaatagagctttgcagttcatagtctcttctcttctttgttttgttttctttcataaacgatattggaggaaggcaaattcaaacacataaccttggatagatgcaaattttaaaaaactactcttaaccacttgagaactaccaagtttcttaattcttctttttattttgaacatggttaagaatcttaaaatggaaggaaattgaacgcccatatgatcatgattcatgaccatgaggtgctaacagactacagctcctatcctaatgtatcagccttcctttcgcgcatacagagtatagtgtgagtgtgcggcattattgtacaattatttggccttactaaagtaaagaacgttacacgtacattttctaattgacaaattaaaaacaaaatcaaaatattttaaaacaataatctgtcatttgttttgggttgaatcaaatgcctgcatattttaagtgcgaataaatgatgaaaagaaaatcccaagagttccagaaatcctttcgaaaaataagaatttgaataagctttgaactgagcagcatcataa

SEQ ID NO: 68925 - DNA, 957 bp, Prunus persica
  Intron number 1 from transcript ppa012788m (locus ppa01278 8m.g) derived from phytozome v7.0 (chr-ID scaffold_4; pos 5541817 to 5542773 reverse strand)
cagaatccaagtgacccacagagggtttgcttctggtaagctaattcaaacctaccgcttccctcttttcctggattacttttcttttattgatttgctttatgtgttccacaatgatctctgcaaagatgaatacttttgaacgtggtttgttggtaatttttatattcaatgcttagattgataagaagctgatttttctgacattggttttggtattggtgaagatgtggatctcatttctgggtttgttaaaatgattgatctataacttttgcaactaaagatctgatttttcctgacgggttgtgcgtctttttgccaaatggtttgatatgatgtggttgtggatttaatcttccagagattaatgggtttttgcgtcttttgcaaaatttgatgtcagtgaggtataataatcagcgcattatgatcgtatagttattgctctttggctagaatttagtttcagctgtgagtgactgtcattagtttttgacagatacatgttcaaggctttcattttcatttgttctagttacaaggtcgcctctagataaatatatctgtgcattgtgaatgaaaaaatgggatttcttgtctgtctcttctcttgcatttaaaacaagttcagagtgggtgtcatgaacatgaagtctcgatatggacttataattgtttaaccaagccaaataatatctgagatggtataactttgggattattatttactcagtgtattgtaaagtgttttggccagtaatattatctgatgagatatgaacctaattcgaaatattgttctgttcgcaaattcagaaggaagttgttattattgtattgatagatggtattatattatcagaactagtgaatttttattttgttacattcatagcttcctggtggttcatcttttacatttccatttacttgcagttgtgaaggatcttaagt

SEQ ID NO: 68926 - DNA, 1025 bp, Prunus persica
  Intron number 1 from transcript ppa024939m (locus ppa02493 9m.g) derived from phytozome v7.0 (chr-ID scaffold_4; pos 9552534 to 9553558 reverse strand)
aattggtggctgccacggataaatctcgaggggaggtatgccttgatttcctgctatttcctgctgtagattgtgaataagaaaaacaaaggaaaaggggaataatataaacttacatgaggggggcttacaagcctgaaagtcagtgtgcgtggtaacgaagtattattaatcctgaaagtcagtgttgtgctacaataatgcgactcaaaattatttcttaattttatttgggctcctgcatcattgaggctaaattgaagcttgctgaaagtaagatgattgatgacagaaagaagacagaacagcctagatactaaaggtttatgagtatcacatttcagaaaaagaggtatcaggcacccaaagcctggcctcaacacgaaattttattgtaaggggctaaaatacttcactcataattattcataacataatatgtatagcttatctacactccatcctgtgaatggtgaaattgcaaacttgagggaccaaataaacttgaaagaaaacaacaacttacaaagatgaaccaaaaccaacaaataatgtcctaaaacaaatgacacgcatattctagcctgaccaatcaactcacaaaacaatacaaaaaagaccaatattcccttgacttgaataccagcatattccatcttactcaaatccattagcatttgttattatagtatattaacgagggaaattcccaagtcaattccagccttttattctttcacaattcttggtgaagtgaacgctttggtctatttgtttgatttctgctcttcatcttctcgctgaatctgctaggttattaatgtcttatttgaaatacctttttttctttttggtaaaaaataatattgaatcatgcaggattcaaatgaaagtacatacgcggttgaaggaaaggaaagttctcaaggaaaaagagtaagcataccctatttttggcttccttataacatgctttgccaaaggaaattcctgtggtgattttttgtgtttcctaatataggttc

SEQ ID NO: 68927 - DNA, 745 bp, Prunus persica
  Intron number 1 from transcript ppa011120m (locus ppa01112 0m.g) derived from phytozome v7.0 (chr-ID scaffold_7; pos 19253784 to 19254528 reverse strand)
gagtttcctatttggcaagcggaagacgcccgcaggtttgttgtagattgatgcacaatttgttcaatatgattttgttttctgtttttgtatctcaatgttttcttagggtttcaatctgttaaagttctgtgaattttatgacgctcttgatgtaaattttgtatatattgttggctgcttgaggaataggtttcgtaatcggggagagtggttggaggaacacggataaattttgataagttcaattgtaaaataaaataaatgattttttaagtgttctgctactgagtttctctaattgttgattttttgtagctaaatttgggtgcagattaggtttttaatccattagaattcaatctagttggttaagaccttcaattctatcacgatgtccagagttcaagccgtagtggtgtaatgtgtaactttcaattgggatatgtatatacacaacgaagaaaatcttactactttaatgtttggttaggcattatacaccattatttttttagtcgtatggtaattgggttatttggttcttaaaataaaatttgtatactatgtttgttatgtgatggtgtgcatctgtcaggaggcttgatttatttcttgttgcgtgggtatacaactcgattttgttattagcatcagtgttttgtttagattatatcatttataagctgaaatttaatgcgggtgtaaatttctgatttcagagcttctgcgggaaaacaagagg

SEQ ID NO: 68928 - DNA, 852 bp, Prunus persica
  Intron number 4 from transcript ppa016175m (locus ppa01617 5m.g) derived from phytozome v7.0 (chr-ID scaffold_8; pos 15333143 to 15333994)
ttcatttgtcgccaaagaaaattactgtgtccacggtacgcattgcaaactgctattatgtataagattctttatgcttatttttttttctctttctaaacagtattcaaagggttcataagaaaattcccccctcctctctggaaatgcatcaagttaaggtttcatgcaattaagttatttagaaagctgctttatgtttggctacttgattttccattcaagggactctttcatgagggaaccttattttgagaagtgagattagctatagactaaaacactgatgataagcacggttaatctcaacttttggttaaagttatatcatatttcttttggttctgtccatgaaaaatgtattcccaccattattacagttgtcttggaagtcactaactgaacttagaccattatattgttccaggcctttggatatgatggatttaataaatttctcataccattctatatgcttctataatcaaggttttgtaatttttttttttctttcttcttgttagttcatgatattttgtctacagtgggccagaatgggtaaagcgtttccctttaactgaagatatgattacatagtttgtttttttctatgatgacctgaattggggacctccatggatgaaacttaagatgcaatcccttccctgccacttttctttttatatggcagatgtaaagtaactacatagtacaaagctctcctaagtcttcagttgcatggaaatgaatcatagttgcagtagtcttatgaaatagttctcaagtgctagaaacgtttggcttactggtctatcagttgtgcatctaatcttctgtaggttggcattattc

SEQ ID NO: 68929 - DNA, 457 bp, Prunus persica
  Intron number 1 from transcript ppa005428m (locus ppa00542 8m.g) derived from phytozome v7.0 (chr-ID scaffold_8; pos 1660982 to 1661438 reverse strand)
ccagcacttgcttgaaaggtcagtggggcactcaggtaatttcctttctcaatatgatgaaattcatttgatttgattttataaattgttttaaatttgggtagatttgaattcatgctctgtttggcaactgaaaaatgtgtaggaaaataaactaaccttgtttatgcggcaattgaagccaagtctaggtttttgcaaaatgtaatatatgaaagctagtatatatgtgcctgtgcttgaaatcctgactactgcctgtgcttaaatgtctaagcctttaaacttgggtagaataattggttataggttcttttgttgttgatgagaaactttctaaatggagaaaagaaagaaaatcatgaaattgttattagaaagtatatatgtgggctttgaatttgctttgttatcaaatgtaggttaaaatacacaggctactgctaaaatcgaggtt

SEQ ID NO: 68930 - DNA, 362 bp, Prunus persica
  Intron number 1 from transcript ppa024256m (locus ppa02425 6m.g) derived from phytozome v7.0 (chr-ID scaffold_1; pos 34549756 to 34550117)
aggttagcagcagttcaactagattcatttaatttcttatctgcaattttgttttagttttttttaatcgttttgcttttgggttttctctaaatcttaggaaagaaaacgattcattacacaaaattacaactttattaatcagtttatacgtttgtcttgattggttaaatcaaaaagtcaaattagtgtcgttttagaggatgtttctaatttgggttcgtcgtaaattgtaattgtttgcgtaatgtgagctagtttttttttttttttttgttttgtttgatctgggcgttttgactgatgagaaatgggtttttgatgcaggagagggatctcaaaattctataactacaaatcca

SEQ ID NO: 68931 - DNA, 475 bp, Prunus persica
  Intron number 1 from transcript ppa018453m (locus ppa01845 3m.g) derived from phytozome v7.0 (chr-ID scaffold_6; pos 15536433 to 15536907)
ggggcgtcaatatcaggtttgcatttttgcttctggggttttaataacattttgatagaaccaaaaagaaagttgattttgttatttttttctatagaatttacgggtagaacttgtttctttgccaaaccagcaagagaatggtgactaaagaggatgctaactcaaaaatatttacacttttaccattatgctagagccaccaaatggtctatcattaaatgcatcaacacctagaggcgaagcagacatgggtttagccaagttagctagagtggcttcctattctgcacctgagtttgaatccccctccccgtagttcagattagtttaaagcagaatatcgcttgtatcaaaaaatcttgaggctcaaaagtatatgtttaagggaatatgtaattataattcaatcaaattaattacttgatatgctcattatagttgttgtattgtgttgtgacttaactttacaggt

SEQ ID NO: 68932 - DNA, 795 bp, Prunus persica
  Intron number 3 from transcript ppa006646m (locus ppa00664 6m.g) derived from phytozome v7.0 (chr-ID scaffold_1; pos 31319526 to 31320320 reverse strand)
attggccttgtccaatgtaagactgcattctccctcccactctcaaggccttttctatctcgtagactcttgttactgttgttgttgttgttaagttccagtccaatgaagtggaatggtgggaaattatttaataatttagttcatgagcagctctgaattttaaaaaaaaaatttggctctgctgtttttacaataggtgaaagtcatgtgaacttaattaataaattaggcgaccacaatctcagaagtttttcctatataagatagtgaaggattttcagcatctccatattttggaagcatggtttcctcgttatattttaagggttttttattttatcttcttgtgattttgagtttctttacatcttaacgtatcttttatcatattgcgaagttttgggagttaggtgccatcctgcatcaaccttagttaattggtttttatgacacacataacaccttgacattgtgagttgtaaatacttcatgttgcattaggtttcatacttgaaggctaagttcagtgagtctatatgattgatgctgtactggcctactcaattgttgatattcagatatatagaagtttgcatattgcattcatctcgtaagctaattctttgtgcttgaaaactagatagcagtatctatgcattttttatttgatgttggacaacgatgttatttatattgtggcatgagctgagctgagtgcattattgttcacactttccgtctgcttttttggtttcaggtgtggcaacatcaactgggcaaagcgtacaaaat

SEQ ID NO: 68933 - DNA, 850 bp, Prunus persica
  Intron number 1 from transcript ppa011901m (locus ppa01190 1m.g) derived from phytozome v7.0 (chr-ID scaffold_7; pos 22368428 to 22369277 reverse strand)
tggtgctgggagcttactcatcctaaccaagctaggtatgcatctctctctctctctctctctctctctctctctctctctctctctctctctctctctaaattgtcgatttgtgcaagtcatgcatgacccaggttccgatcaagctggattggtacgcatatgttcatgggtccgaccaacatggtcattaagtctaaccaatcttcttcttctttgttaaattgaatgcttcatcttatttaaacaaactgcatgctcaattaactctactcactaaacttttagtaatgctcattacctgttcgataattctcgtacggaatgttacaaattggaatcaaagtgcctaaatattataaaaagtttctatctttattttctttggggggtggggtgttcttagtgcatttacaaattacgtcttcagggagtgaaacggaaaaagtgaatcgttaaatgcactaagaacaccccatcgtttagatgatgaaaattttcgccaagtaaagctcaaaaagttgtatggtttgtgttaaagattactacgtcgtcattctgaggtatggtaggccagcaggattatgttatcagtaaataagtagggatcggtaatttctttctctttttaggttacaagctttgttatagattctggtaggcatatggagattggtgtttgtttatatcacagtttgatgttatattttaatattacagttccatatttaagtctgtattcgtcttaaggatgtagaatccaattcctctatgagtggtgcaaagtgattgcgcttcatgctactgcaacctgggctgcctaattgacttaatctttcattgcccagat

SEQ ID NO: 68934 - DNA, 929 bp, Prunus persica
  Intron number 2 from transcript ppa017499m (locus ppa01749 9m.g) derived from phytozome v7.0 (chr-ID scaffold_7; pos 16603491 to 16604419)
acaatattgtgaaggtatcctactacttatttcctcttatttgttctcatgcctgcattttttataaatatatactgtttgttcatcatttcttggaattggaaagccttttctctcttttgtagaggactttaacaacttgtacctgcctggtatgagttctatactattctggttcctcagttcctcggtttggttattagaagaaaacatttatgtaaattgaccttttgtttcaagaaacatctttcttcgatttatatcaaggtgatgagatgaaatcgtaacctgaggaaatgaacacctctgagatcgctgtacttttgttcctaaattggtattcaatgcccttttagcttctgcaaactggttgcctaaatattaaagtaatgatggtttgggataatctttgcttggagtagtacttgttccctcacgattccttaaattactcataatgtaaccatatatggaacttttggtactatactgactgtgagaataaagtatctttgacaaacaactcctgctatacatcactgtatgtgattacagttccttttttgagaatttactagcactctaagaactgatagagtattatctgcacgaaacctacatattaaggaatagaatctacatattaatagtgatgatagtattatctggaacttttagtataaattatgagatatagtgatgatagtaatttggaaatctacatattaaggaataaaatctcttttcctttttggtttctgtatctttcggtttcaccatgcttcacctctaaatgtatctagattcatatcagtgtcacttattcaagcttgaacatcttacgttcatgatcaatgccctttgcccatgtgctcatataagtcattgctctgaaacagtttattggtgcgtgttttgaaccatctctg

SEQ ID NO: 68935 - DNA, 947 bp, Prunus persica
  Intron number 3 from transcript ppa011358m (locus ppa01135 8m.g) derived from phytozome v7.0 (chr-ID scaffold_4; pos 7677356 to 7678302)
aaggtatttaaactggaccctactgttcatggatctctatcctgcctgtataataccttgtagaataagaaacaaacatttagaagcatattttgtcatacattagaggagaacatatttgtcatcgaataataaactcaccatatgttcctaatcagtatcctttcatcatatgctccttcatataatgattgtacagacacctctaacagagcttctctactgaacactaataacaccttttcatttaaaggtgagaaataagaaaatagcatagtgcattgaaacatcaaaaagttaggtagtgtctctgagataaataattctacggcaccaaatattttcgagggatttcaataacttcacatcttcctctacaaaagaagtgaatttgatttacctttaaggtgatatccctgacttgtgtggctaatatggttattgtgttgatatccaagtaattaacttccgtaatggtttagttcaaatcttgaattaaaagtaataacaagacaaaatactccctctctctgtctctctctttgtctcctctctgttggtgatttatgaaatggtaatgaagggttttgtgatattgaacctcttgagtttgtttagggggtactgattcataatttagtcactttggtggttgttgcgatattgaaccttctggtttctctgagtgggtgcttgtccattagttaataaatttgctaatcacttgattgattcccgctatttctacttttatactctctttttttgtttctcgtaattgaattatgtcaatttgttactatgaagttgcagatttaaatatcgttcgtttactgaaaatcatgaaaccaagttagttcagagtaagggggtttttattttatgattagaaacctaattgttggttcacagccttgaagacttccgggcaaagattttctgtgact

SEQ ID NO: 68936 - DNA, 830 bp, Prunus persica
  Intron number 1 from transcript ppa008743m (locus ppa00874 3m.g) derived from phytozome v7.0 (chr-ID scaffold_1; pos 14606495 to 14607324 reverse strand)
tcggcagcaaaaccacttgtaagtcaccacttctgttaagttctgtggtgtgtcaagaattttgtatcgaattgttatggtgggtaattgtctttaatttgttatgtttttgttggatgcttaaaatggttgaatcaaattttgaatagaatgggctagggtgatttgattgggatttgttaagtttgagtgaatttggtttatgaaaagtttgtgttttcagcaactgcaagtcctatcttcatggacatacagtatatggatgtgtatatataaatatgtagatggtttaggatagaactgttatagtgggcagctgttgttatttgtaatgcttttgttggatgcttaaaatggttgaatcaaatgttgaattgaattatgggttgtgtttttgcgggtgaggtttgataggatttgattgtgatttgttaagtttgagttaattgggtttatgaacaatgtgggtcttgtgaaaacatcagattgaatttcacttagaacatagaaacagggatgtgaagaactaaaagggttagaaatttttatcttttacttttttcatatgtttagatagatcagctgaataattggtcaatcaagtaaagaatgagaattacaatgatagtaaatattaaaactatgggaaaaaaatgattgatcacaaatacatattgttaaaacttgatattgttgtggatacaaagtagaacgggcttaatacaactctagattggataagctagaataagcttttgctgaaattcacatatgcgcaccattgtttttatggttgatgacggcgagagcaatgatttttccaggtggtt

SEQ ID NO: 68937 - DNA, 583 bp, Prunus persica
  Intron number 4 from transcript ppa026217m (locus ppa02621 7m.g) derived from phytozome v7.0 (chr-ID scaffold_1; pos 40926976 to 40927558)
agtcaaatattaaaggtttgtagttattgtaatatgtttttctttttgtatttagaatagaaatgcacatggatgactgaagtgaaaacttatgcccctccctctcaagtttaggtctgacaaaatatacttaaattagttcttaccatttactccagcaacaaaaatttctaccttgagaaaaggccacaatatgtgatggaaacacaatcattgtgcaatggctctataagtacactaatcaaacatggcctaattgccaatgagtctgataggctacataaccctttctccttgtcagttacattgttgtagccatttgttttgacatgtttggtagagtattagaaaagattggaatttttttgtcctaagggagttgattgtgcttgattattgggttttgggaagatgggaaaccagaatctttcaagtattttttctttagcagcttccaggtgatgccaaataatcaaatctcacatttaatattatacaaacctttgacggttcctgctcagatgactgaactttgtttcacattccagtgtcccagccacattctgaagcagtgaggaacgcc

SEQ ID NO: 68938 - DNA, 925 bp, Prunus persica
  Intron number 1 from transcript ppa004052m (locus ppa00405 2m.g) derived from phytozome v7.0 (chr-ID scaffold_6; pos 21023582 to 21024506)
aagttgcagaggaaggaccgagagccgcctgtgaagtaagttcaatggtcttttttcttttcttatttcaattatctttccttagttcctatccataaaatgttttattgcattgccttggatccttgagaatataacttgtattgaagtgcagaactttagttagatatcaaaacaatgtaaaggagataattgcaatcttaccatggaaatgggagtttatatcactagatattgccatcaggactattcatctgtttcttgtgatttggagtgcatgcatatgataagaattcttcttgtcttgatgtctgatgcatatgtggggattaggttttactgatcaccatctatgttggtgattgatcatatagcatttataatcttatatcttgaaaattcttgccaaaggaatagaatggagatgtagggtttggggctagcttattcggttacaaagttctcttttgcttttgacattcctctattatcaaagttataaagctaatacagaaaaaaatcattatttgggttaagaatggaacttgaagacatgataactgtttagccttttcctaacctcaatttagggtgtattctaaatccttgttacctaattccaacatactagctgatttttcataacaaataaagctgtaagttcttataaataatttatatcataatttactagcataaattatctcttgctgcacaattaacttttggatgtcaccttccataaaaagatcatagtttctttggcaatacataacagatttttttttttttttttaatttttaaattcatgcaattgaatggttttgcagcttgaaatttcagagttgctaatcatttgggcttcaaaaattttgtgtcttttgggcaggtctgtattctgggcgttgtttggagctatatatt

SEQ ID NO: 68939 - DNA, 390 bp, Prunus persica
  Intron number 2 from transcript ppa012936m (locus ppa01293 6m.g) derived from phytozome v7.0 (chr-ID scaffold_2; pos 15577902 to 15578291 reverse strand)
tagcaggtttgagaagaagggcttctatttgaaaggtaatttccaaccaacgatgtttgatcttatagtattatgtgcactttgataatttgtgatgtgacaactctatttaacaagcttttcctattttatcatgattatcaacttgatgaatttctggccaaaaaattccgacttcaaatttgatttgcgtttggcttacttcttcattatttatctaagtagtgtggaaatatgctaaatttaaactaatgtttagagtttctatattttaattatactacaataagttttttggggtgcttaactaaattttgatgtgtaacttatcagggttttcttctcaataagttttgttttctggtatctgttcaggtttgaagttcatca

SEQ ID NO: 68940 - DNA, 559 bp, Prunus persica
  Intron number 3 from transcript ppa006565m (locus ppa00656 5m.g) derived from phytozome v7.0 (chr-ID scaffold_8; pos 17101623 to 17102181 reverse strand)
gtgccactggccgtccggaggagcccatcaaaacggtaagtttctacagttaattgtcagttaattgtttctttgctcgtcaatagaaacagattaaatcagcctagaaattaattcccaactgtagatcatcttttgaggctaccattgatcataggatgagcagttagttcattacattcgatcaaagaatgtcattgtctactgctcctttcctacttgctttacagtgttgtgacattgtcatatggacttgcttctgttttttttgttttttttttcagcaataagttgttgtgtttattcttgttcaatgaagaaactgaaaaagaaaaaattgaaaaaggtgtaaccgttcaataaatggtcccaatgaatccagaaagttgttgagagattcttgttacctattccatttcaaggtccttggcgattatgagggctattttatccatggcagaaaatatgatcagacttaataacgtgtctggtatattttttcttctctgaccattttttatgtttaggtagattgggaaggaaaagttgctcttataca

SEQ ID NO: 68941 - DNA, 1017 bp, Prunus persica
  Intron number 1 from transcript ppa013109m (locus ppa01310 9m.g) derived from phytozome v7.0 (chr-ID scaffold_6; pos 22717069 to 22718085)
cgtcgccaacaaaacccgaacaaagagaaaaggtgagtttttcactctttacggtccattttactcatctagggttatgaccttagtatctgtttggctgctgagaaaatttaaagtaaattaaagtaaattaaacgatttttaattttttttctctgattgcgatttcttagcagccaaacggatcatcggtttgatcgatttgtttttttatgccggttgtggtcgatctgatagttaaaaacgaagttggctggaatttgagctcatttactgtttatctatgcatctcgtgctctcagatctgttttgatgttgaatgtttgatcgcgatttgctttagtctagattggttatgtgttgccaaatttttatctgattattgttgattggaaatgttatggatctactatctgtagcagatgggttgggatggtctgtgttagatttaattgtttatttttcttatgatatgttatatcaatgattacttggtacttattgtgtaatgttgatgcccgatacttaatcgttatgttttatttatattaaacaaattgttgatctattttttcttagctatggatgtgtatgcgcgttgtggttgagttaatttcacatgagtcggaccaaaactaaacaaatagaagtgcattttgtgtctatttttcggaaggggttcatgaaaggagtttgaaagggctgacttttggttgtattgttaggatgcttagacattgagggggattttaattttaagatcttagcatgaaaagacttaccaaggataaaaaaattgtgtgcatttcagctgcgttatgccctttttctgttggaaatgaaaaattatgggttggttgagagtgcatatagaccatttgtttttgcttgtggagattcatattgtcttggtaattttgatttgttaaaatatatttttaatttatattatattgtgatgttgctgtctgatctttgctcattgcatgcaatttacaggccaacgcagcatctggt

SEQ ID NO: 68942 - DNA, 1061 bp, Prunus persica
  Intron number 3 from transcript ppa009919m (locus ppa00991 9m.g) derived from phytozome v7.0 (chr-ID scaffold_1; pos 17362797 to 17363857)
caactgagggttatcacagagatttgtttttccaggtatcttatctttagatttatgctaattttcctttttctctcccaaagaaccataaggatacttgagtatttcccatcatgaaaagtcaatgaaacttattcaagagatgcatctatgagacagtaatgctagtcctgtaagcatgtagaatcgttgaggatttaccttagtgaagcatggatggctggtatgatcttaagctacagtgagctcatataaaattctgttattgtaagtttatggttaaatcttgatgtgaactagccagaacttgaatgagaaagtggaagtaacacactgattgaatgaaattttagcttgtctacacaataaacacaatggacagttgaagtgtgcatggattgatccattactgaaaataaaaatgttttacaaccaaatgggtgtttacaaaataataggtcaacatcaaactgatcatagcaaattacattttaatcaagctacttcaatcatgtgataacacaaaaaattacgtagatttcaagattacactgatctgtctggtcacagaacattaagaaaagaattcactgcccccaaacatataatttcatctcaaatagcagttaagtacaaaataaaataagcaaataattcaaatactacaacttattagaacatgaatctgaaattcacacattagtttcctgatatatgtactctatgtgcatgccccttttgtatttgcaagcatgttcaagtaattttgtttttttattattatttagaaacattttttattaggaaatatgatagaacataaaaagcaaacaaggagtccagcaacaaacaggataaaactgtttgagtgattttgtttataagaattttttgtaatacatgtcctatcaatattctagtacatgattaataataaaatatatacgttctctcataccaagagttgataagaaatgaaatttctttttttatagtatttattaagagttgcaatttctttcccaggtatatttagtgaaggataacaatcctggatcact

SEQ ID NO: 68943 - DNA, 771 bp, Prunus persica
  Intron number 1 from transcript ppa002691m (locus ppa00269 1m.g) derived from phytozome v7.0 (chr-ID scaffold_2; pos 26591771 to 26592541 reverse strand)
accgccgctcaccaaagatcactaccccacctgaagtgagttttagcaactacacttgtattctactgctttatttttatttttattttcattcttttcttttccggtgacacttgtagtgcttcagtcatttagagcacatgtacttccttacaaattgttttagtctgctttggacataaaattgaaaatgaaattctgccatagatattaatgatgctttagaaatataaatactagctattggagatggagtttgaactttttatttcattttcccttttctgattctttcttgaaaaggaaccaagtgtctctcacgtcataggcttatagtaatgtgaattgtgatctacaattgttaatttataatattttcagaaacaaccaacacgcgttgcaaagggatcagaaatacaggctcaattaattctccttcaggaggatctaaagaaagcaaaggagcagatacttttgattgagaaagagaaggcaaaagcaattgacgaattgaaagatgcacagaaagtggccgatgaggcacatgagaagctcagagaggctttggtggctcaaaagcgagccgaggagaattctgaaattgagaagtttcgcgccgttgagctggagcaggcaggaattgaagcatcccaaaggaaggaagaggaatgggagaaagagcttgaagctgtgaggaaccaacatgctctggacgtggccactctactctctaccactcaggaacttcaaaggttgaagcaagaactgagc

SEQ ID NO: 68944 - DNA, 517 bp, Prunus persica
  Intron number 1 from transcript ppa006515m (locus ppa00564 3m.g) derived from phytozome v7.0 (chr-ID scaffold_2; pos 26254932 to 26255448 reverse strand)
gacgccctctcattgcaagtaaacccctacttctttttattttttgttctgtaattttgagcaaatttcttttttcgtttttgttttttgttttttgttttttgtttttgtgtgaattttataagagtagtaattgatggcttgcggggtggggatttttaggagcttgtagagtgggagcacaagagtaaggttgatggtaaaatgcacggttgtggtcatgatgctcacacgaccatgcttcttggcgctgctaagttgcttaatcaacggaaagacaaacttaaggtcagttaagttttatgttgtgcagtctgagcacaagtttcaatttttctgtggattcagcaaggaaaaacatcactatataatactgatagaatagaataactggttcagcttcttcccaagaaaaaccaaagcaaaacccttttaaggcaagaaaaatttgcgtaaaacttctctttcatatggtgttgaagggaacagtgagacttatttttcaacctgcggagga

SEQ ID NO: 68945 - DNA, 418 bp, Prunus persica
  Intron number 1 from transcript ppa016778m (locus ppa01677 8m.g) derived from phytozome v7.0 (chr-ID scaffold_8; pos 17912672 to 17913089 reverse strand)
cggtaagttgcaagtgcagggatcttaaccctttggttttttcctttaataatatgaaaatgatacttaggatctttaattgatggttaaatggtcccttttaaagagtaagttttttttgtggtcattccctagggagggggagcgggagcgggaagtaatatattgggttgcctcaagattgtcgcctaagattttaagttcatgactttatctcactcaaattcaaaccctttaacccaggttctgcatatataccagcctattttacacttttcttttccttttttagttcatattttacaaactaaatcagggatgcagaaaaattttgataatcaagagaaagaatgttctattatgaggtgatttggtcataatttattttttgtgtgcagttgttgaggtgtttaccaac

SEQ ID NO: 68946 - DNA, 599 bp, Prunus persica
  Intron number 1 from transcript ppa025184m (locus ppa02518 4m.g) derived from phytozome v7.0 (chr-ID scaffold_2; pos 7146731 to 7147329)
ctgatccaaaggttgcagagaaggcaaaattaatcgtaagtctcactgactctgttctaaacttgtacaacagaggttttatttttcattcagacgtcgatctttttattaaccgtcgttataaatgaaaacccacgacggtttttatttaccgccttttaaaaaaaatataacatcagtatttttataaaactgacgtctgtattaaattacaacgacggttttgtgtttctgtgttaggttttttaaattaaattttgaactttcttcatattcacacgcacacacactctctctccctctctatttctctgcaattggtttctacactatttttggatcaatgatattttggttgggcttttatctctgatgtcaaataaacgacggttatttcattgaccgacgttttaatatacacaaaacgacggtggttttgggccgacgtattaaatatttttctgtgtttgtttgttaaataaaccatcgtcgtaacctatttaccacgtcggttaatatttttattaatttatttatttaatcagttttacaatctgttcactcactaaccttctctctctctctctctcacttttagg

SEQ ID NO: 68947 - DNA, 822 bp, Prunus persica
  Intron number 1 from transcript ppa005972m (locus ppa00597 2m.g) derived from phytozome v7.0 (chr-ID scaffold_2; pos 13627154 to 13627975 reverse strand)
cagcctattttcagttgcaagttcatccgagacaggtgatgtgatttatgttatctctcttacattaaatgtttaaagcttttgaaaaggctgctgtctagtctcatcttcttttggacattcaaattggtgcatgaaaactatgtatggattgcatccctgagaagagagaaaaaaaaaaaagaatattaaaagaagcaaagcaaaaggacaagtataacaatgattgcaaagaacaatttatttttcgtcaaacatttatgcttgttctagattcttgttggatgaataaggcttcccaagttgtatagttttgactggattagtttcaagaggcaatcatcattttaaatttccattgttaggtacaacaacttcgggtgcgaatcagcatttggttgattagattgtcacattattgtcatggttgttttcttttttgaacattcactgtgcttggcctaaagtcattttccgtgtcccctgttggtcttgtttccctgttagatgtttaatagccatattcttttctatttgaattttaacatttgccttgtcaggaatcaaacaggcgtatatgtaactacataataaatttagtaataatcaaaacatttcaatttatcaacgaatattcaagatatgttggatacagtatatagcgtacgtaattttatcactgaactttggacgcggttttctagtattatgcaaaaaccgtgtattcattctctcctgctatggacaagtttgttttctcttttacatttcaccttgtgttgatgaagattttgatagtttaatgaattgacagggttcccc

SEQ ID NO: 68948 - DNA, 965 bp, Prunus persica
  Intron number 1 from transcript ppa007995m (locus ppa00799 5m.g) derived from phytozome v7.0 (chr-ID scaffold_6; pos 1444711 to 1445675 reverse strand)
ggtcttgggggctgcattgctcaggtaaattaaattcattaactttatccattaattagaagataaagaagaaagaaacgattatgccatgacatagatgtacaagtacgcggcctaaccatttttcttttttcagctgatattctctttataattaaaatgagttagtttattctagtaaaaaaaagtccttgacatgcagaggagtgctgttaagttcgaatttacatagcacttgagtagtatgtatgaaatacttcttttctttttagtttaaattatcgcttatactaaaataagtaattttttaaaattaaaatatatcaaattttgctttcataaaatatgaataggcattttggggtttgaattcattccattttgaaaagaaggaggtaaaataataaagaagtgtttcgtggttgatttaagctttaaaaagtacagaaagaaagaatccacaaactaatattttacaatatcagaaactaatagccaaaaataacgaagcagattggtaggattctatgaatattctaaaataaacgatgtagtggcaaaaatctgagtccctcgtgacagatattgacgcgtggcttaaaaaaattctcagaccacctggaatgaatgctgctaactttaacaaactaaagtgctttacatgtatgtgggatggaagtgggtaaaaatagaacagtttgaaaacttcacattaacatcatcatttttcttttgggtacagaattgagatcaataattctgatgaggtgagtttcaattgtggaattccttaaagtttatttgtgagacaccgttgtagggttaactgcatcttatattttaataatccgaactgttgatcaaggaatccttgaataaaagggactgattaattttgatagtgtatctgacgtatatgggttatgatattgcaggcaggatttaagttgggaacaacagcctac

SEQ ID NO: 68949 - DNA, 578 bp, Prunus persica
  Intron number 1 from transcript ppa026563m (locus ppa02656 3m.g) derived from phytozome v7.0 (chr-ID scaffold_1; pos 33435399 to 33435976)
gattacaccaaactctggtaaattagccgtgcttttgttaagtttactcttgtttatgcttgcctgctgcgaaattgaccagaaagatatgaaaatttggaattttgagtgtaaaatgctttccttaatttttacatgcaataaatatgaacttttttttttcttttctcatttcataaaaagattataaagtttcttttataattatattactttatattgataattaggtagacgtctttacggtgcagaattgtttgattgaggatagggtagagtgtttgagaattgagaatgttatttagtgtgagtgacataattttattaccaagatgatgcaaatgtgtttcttgaagaaaccaaaaactcaattaggaattaacacaattctatgcctgaagagttgcaacatttctttacaagggcgttggcttccaccggaatatgatccttaacatttttttttgacttccattgattagcccgcctgaatcgaaactatgctttctggcctattgaaatttcttgcttgctactttaaacttgaacaacagacccagtttatacttgtttccacg

SEQ ID NO: 68950 - DNA, 667 bp, Prunus persica
  Intron number 1 from transcript ppa012041m (locus ppa01042 9m.g) derived from phytozome v7.0 (chr-ID scaffold_1; pos 36196900 to 36197566)
ttgctgcgccggacgaggaccctccatcagacctggtacttttctgctctatatttgcagaaaaatccgtactttgatcttttggttcgtttctcttttctttattttgaaaattggaacatggtttctccatgtcccttcccaaaaaaacccaattgacgcttactttgtgtgatttattttcattttttggttgggatctaatggaaattggaagggatggggttggcttattgacaagcttttttgtaatgatcaaaatggaaaagtcgtcttttattaattagaaattgtgggttttttatcttctttcttttcatgaaaataatgactgatatttgttatagcgttgctcatttcgtaggggataattgaaatataggaatgccaatgcttccttttgcactattatggaagtaatattgtgtgtatgaaatggtttgtgtttcaaaaactgagaggatggtgttgtctaaattttttttgtttctctagtgacaacttttaacctcttttttgctggcaacaaaggtgaaatgttttctgcaaagacatgcatatgtacatgtatgtgtgtgtgtatttgtgtatttgtgtgtagtctgatttaaagatttctgatcatagtacataactttattagggtactccggccacaacagaaact

SEQ ID NO: 68951 - DNA, 844 bp, Prunus persica
  Intron number 2 from transcript ppa026730m (locus ppa02673 0m.g) derived from phytozome v7.0 (chr-ID scaffold_7; pos 2257262 to 2258105)
tttttgacaactaaaagagcttctaacagcctttggtaggaaaatttagaaggttctaggtcatagagacattttctggataagcacatggtatgtgcttctttatgaagcattctaagtgttttttcaggaagcacttaaatttcttatgaaaatttcaagggtttagaatcatttcatctctcatcacattcaggcttgcttagagattttcttattttaggagtataatgaagttgagtttttataatattcagtctaaattttttttttttaaaaaaaaaatttaatacaaacgatattgggtgaggggagaatcaaacctaggaccttaggtgtagaagtaattggtcttagagcatctccaagggaagaggcaaaagagtaggcaaaccccattgccttgccacatcagcatttttatactccaagggaagaagtaaatgggtaggcaaaatatacatactctccccgacaaggcagtattgcctatacttcaaagtgaagaggtatattggggccgacttgctttttataataaaacaccatctccactctctcacctactttctataaaatataatagtaaatgtaaaagataaaaataaataatgtaataatagtttgtagactttcattacctagtccctttgaatgaccaacttttttaatgggacaaatgggtaggcaacatgccacctaggttgttataatacaattttgcctatttcatttgcctctttccttggagatgatcttaaccacctaaagctacaagccccttaggccctgtttggttcatgggaaaggagacttgggaacggaaaatcaattgctttcccat

SEQ ID NO: 68952 - DNA, 261 bp, Prunus persica
  Intron number 2 from transcript ppa021603m (locus ppa02160 3m.g) derived from phytozome v7.0 (chr-ID scaffold_7; pos 21171386 to 21171646)
acactattgcaatctttgcttcaatacaaacagtggtttgttttttagactatgtccattttattattggtgtatgcacatgcatcttttctttttcttttttttttttgaatgacaaggttttttaatccaccatgatcatggtatactatatatgtttctcttaagtttcttggtgatatgttctaaccattgccttcttcttgtgttccataataattaactgtgatctaatttaatcaaataattctgatgcagggc

SEQ ID NO: 68953 - DNA, 525 bp, Prunus persica
  Intron number 1 from transcript ppa005768m (locus ppa00577 3m.g) derived from phytozome v7.0 (chr-ID scaffold_3; pos 21875068 to 21875592)
tcgatcgaaatttcaacttgtccgagaaaggtcaagtaagctcccgagctccaaactttgttttttcaccttttattttctcttgtttttgttttcttcttctttaaataaataattgcatgatttcgcataatgattcccgatctatcggattgatgctaaatgccgattatattaatcatttcatccgacaccgacgccgggattgatcattgatctgccatcttttacaccagcagatttaatttgcttactttgagacctttgggtgtttctcaattatgcctctgcaattccaattcctctctatctttaccttttaataaaggttcctccatttcaatagctccatccatgccagagccatttctaaattttatagtaagtaagcaatgcgattgatgattgtattcaaacactgaccgatacatgggaattcctcaagcattactcttgctaatcaatcgctatacgtttcttcttgtgccagattttataacgattgagtgtcaacttccggtttca

SEQ ID NO: 68954 - DNA, 704 bp, Prunus persica
  Intron number 1 from transcript ppb016122m (locus ppb01612 2m.g) derived from phytozome v7.0 (chr-ID scaffold_3; pos 13703524 to 13704227 reverse strand)
cttattgtaaggttcttctttggagggaatggtggatcagacggattgaagctgaagactttggaattggcatgaaatgtggtgttttaggaatgcactgtgcttttggtatggaaagtaccgtgcttgtggtgtaatgtactatgcttttggtatggaaagtactgtgcttgtggtgtaagaacatgttttcgaaaaaagaagaagaagagagaacctgttttccaaaacaagacagtttcatatagcgtctaaactattaagatggacgtctagaaaaatatggtggataaatgaaaacttttaagacaatatatcacatgcacgcgatttaaatatgaaactgttgaaacaaacatctatataaatacaattgcgaaaaaatatttacgaaactttataagtcgtgcatagcgcgcgtgatttaaaaagaaacttgttttactcgcggaagcgcatgcagaaagactagtatgtattatatatatattgtctgacattgttttcttttcttttcatttagatatttgattaaaatacaatattattttccttaaaggaccaacacctacctatcttatctttcctcttctttcacgtgtccctgcctccctcccagttcccagttcccaagttttttttgctttgttaaacttatcttttttataggtgcaatatttcttgaaaatctattttgaaccttt

SEQ ID NO: 68955 - DNA, 893 bp, Prunus persica
  Intron number 1 from transcript ppa020340m (locus ppa02034 0m.g) derived from phytozome v7.0 (chr-ID scaffold_1; pos 41494511 to 41495403)
tcttgcttggatttggtgttgggttcacaaaccaagtaagtctaccaatctctaaccctatgtttgggtttgctaagaatatagcccatcaaaatggaagattctattacattcccaaaaatgggattttggacccaataatttcttcaaaattctaaacattggagtattaacaaaaagtgggattgtttaaactgtcgtggcagcgttgagtggttgaacaatttaattaaaataataattatctttattttcttaatacatgtcatctttaaatagattgtttgccactcaatactctgacatcgcaaaaacaaatcatgcaaaaaaatttctccaaaatgtaccatcccactgtgattacctatggaccatctttggaataaagatgtggagcccaaaaaagtgcctcacaaatcaattgagatcgtacaaagagttttatcctgtacttatgatattttctctagagactcgattacatatgacaaggtactaaaatacctagtccatcaattggtcttggcctaattttatttctcccctattgttgataagaaataaaaataaaaaattgcattaacaatgtacaaaattttaggcatttaggtatttaattaatctcgcatttataatgcgcattgaagtaatattgcatgcaaatatgggttaagtcagtttacaaacacattgtgtctctaaccccgcatttgtatctgacacaaaaattcaactacaacttgtacattatagtagtttagaattgtcttgtcaaaagatcaaaaataagaaaaccaattgcattgctcagtatgaatccacatttactgacatccccttctaacaatgtccaaacagtctgcaccaatctacctctcagagatcgcaccacc

SEQ ID NO: 68956 - DNA, 842 bp, Prunus persica
  Intron number 2 from transcript ppa007211m (locus ppa00721 1m.g) derived from phytozome v7.0 (chr-ID scaffold_5; pos 12941418 to 12942259)
gacttctccatcctcagcgagcccaaactcccaaggtgatatgcttcttaccaagaaaccatttttttaattttaattctcttcaatttctttgctcttttttttcccctctgtgattacttttgtaagttcaagcgatcatttctgtgctctgcatccgatttcctgctgtgttttaatatttttagtcttgtgttaattaatctatccgagttcaatttgaatttctggtgtttgataaattggttgagtgattgtttctggctgttgattttgatcactcaagtcactggttgggagtgaccaactttgatgtaatttttggttttttgtctgtctgagtggtttgattgatttgatcagatgggttctaaatttcgatggcatcagcccatcagggtatcatatcacaacctccaagcatgatcaagttttgattatgtatagttaacaacgttttaggacaataggagattcaaaatcccatttctcttcgtatcaagttttttattgttggctgcatgtatctcagtcaaaagcgggatcttttatttgtgattataaatcctcgtgtgtattttctttgcctgtttttgctgctgtctaagtcttgcagatttcttcaagttgtgaaatattgctatctccaaatgaattcctgtttcaagcattataatatgcaagttttttacattgatgtagacactcccaacttcctagaccaaaacagagttattctgatctaactatatgcattatgaggatagaggcgattcgtggttgttgaattgaagtatgcttcttaggtttctaacagattttttgcagtgttaccataaaga

SEQ ID NO: 68957 - DNA, 187 bp, Prunus persica
  Intron number 4 from transcript ppa007211m (locus ppa00721 1m.g) derived from phytozome v7.0 (chr-ID scaffold_5; pos 12942805 to 12942991)
ctagtgggcgtactacaggttcttaccaattcaaaaaactgggagtgatctatctatttaaattgttataattctgccaccaagtgcaaacaaagtaataaatttggaagaaaagttctaatattttgaaagttcattaccttttaatcaacgaaacgtttcccaggtattgtgctggactctggtg

SEQ ID NO: 68958 - DNA, 729 bp, Prunus persica
  Intron number 2 from transcript ppa011812m (locus ppa01181 2m.g) derived from phytozome v7.0 (chr-ID scaffold_8; pos 18165375 to 18166103)
gggtaagaatggattatcagtcagtccatattacatgcatcagatgggccacttgttttcttcaaaggttttattagtgtgttcaagacacttgtcaggcaggattcctaagttttttaaatttatatacgtatggcaagagaatattccatatatatatacatatctatctattttagaaaggaaaatgtgtatgctgcgtgtcttgatagcataatgttgccatgttttatatgaaagtaagctgagagggggaacctgtgtcaaaaggtaagctgatgtggcaaaccatgtgagatgttagtgcccccagaccttgttttgtggccaagtatgctcgtaattcctagtttcttgatctagaaggttatacagcagcatgttcttgtacaaatatttattttgaaggatttaatcagccaaaaaaagaaaaagcaaaaccataagtacgaaacagaaaactctattttggaagaacccactagagattctatattccttatcaattatttcttgccttttctggttagtttaactggcatgccatactcagatataatccaaacttaattcttcttaacctattctaaaactcaggtgtctaacagcataagtttctacgcgttattaatatgtaaaacagctgtcacggtgtatattccaaaatgtattatttgctattcgtgcccacttatgttcattttagctgattctttatttattaccaga

SEQ ID NO: 68959 - DNA, 538 bp, Prunus persica
  Intron number 1 from transcript ppa005549m (locus ppa00554 9m.g) derived from phytozome v7.0 (chr-ID scaffold_1; pos 21937416 to 21937953)
tcttggtgattttgactgtcactaatgataatttctaatgcattttctggatttcagaggatactgatgttgtttctcggacttatatttatgtcccattgcaatcatgtttgtagaggaaaagtgaagaactgagaagtcctttgctacacacacacacacgtcccctatgcatcgttttatttgtcatatatttttgttcaaaggtagttagactgtcaaaagtaatttaaaattgggtgcaaacctttctttttctgacattcatgtgagcaactacatctacgtttctacttctgtatacccctcataaaattggaattattatggtgcctggttttctgccttttaattttgtggactagtaatgattcatataacttaactagtttgtatttagtagcaaccagggattatatcctttcaaaaatgaatagtaacctggccttataacacttctgctataatgcctcatacaataattgtgataacttttttcttaatattcttttcatatttctgtttgaattcaaggcag

SEQ ID NO: 68960 - DNA, 610 bp, Prunus persica
  Intron number 1 from transcript ppa025436m (locus ppa02543 6m.g) derived from phytozome v7.0 (chr-ID scaffold_4; pos 4285263 to 4285872 reverse strand)
gatcttgaagccaaaaggtttggaaggggtaagtaagaagctttagatgatgagaggcttgttttgtttttttgctttctcatgtgtttgattgctattaaaagttcatgtaattgaggcatggtatctcattttcaaacaaagattctagttttctatgcgtattttgtaattccttgtagataagtgtttctggattcactgtttattagagcttcacgtctggagtagtacgtgaggattaaacgcagtgatatatcaattagagctttactcaacccttttgatcatgaaatggtctcttggaagagtcctgagaaggttaccactcaaacatatgaaaactatatgctaaattttttcggagacttctatttgagaatttgtatgcatagattttctctcccgagcaggtgagatatggataggaaattcagtaataagaaatgacagttaaccttgtttcgccttgttaattttcgtgtgctgttattaatctattcttagtctctccttatgcaaagtgaatcactgtaacagttaaggtgctttcttgaaccttaaattattatcaggtccgagggaacttggtggtgctactgatcttata

SEQ ID NO: 68961 - DNA, 191 bp, Prunus persica
  Intron number 1 from transcript ppa006309m (locus ppa00630 9m.g) derived from phytozome v7.0 (chr-ID scaffold_6; pos 20346668 to 20346858)
ccacctcccattcctctccttctctctctgtcaaggtacaacccgtcatcccacccattaatctcaaatatgaatgcttcttttttcttttttggatttttatttgatgttttatctttattttgaaactgggttctgtccactgtttctttgcagctccaaaagcagcttcctttggcttcttatcaagc

SEQ ID NO: 68962 - DNA, 305 bp, Prunus persica
  Intron number 2 from transcript ppa006309m (locus ppa00630 9m.g) derived from phytozome v7.0 (chr-ID scaffold_6; pos 20346875 to 20347179)
tttcgtcgatattccacattgtctaatacttttgtgtaaagcctcttcattctttttgggtttcttttaaatcttcttgttgttattattatcttcattatttctcttgtacgctcaggaaattgtgaatttcattgattataaacacattgtttgctttgattcttttgtttaatcaaactattcattagttctcctagtttcagatcaccatttgttgttgtcgttgtcgttttgtttttgttttcttagttttgttatgtgatttggttttgtgcattgacatgcctttgttgggttcagca

SEQ ID NO: 68963 - DNA, 683 bp, Prunus persica
  Intron number 1 from transcript ppa021153m (locus ppa02115 3m.g) derived from phytozome v7.0 (chr-ID scaffold_1; pos 21003166 to 21003848)
tctacaccaaaatctctatcattattcactattcagtaagttttcttttttattttctcttgatcttgttatgtattattgggcaattgaatttgttaacttgtctacctaattagaatgaaatattgaaaaaaataagaaagtgttttcattggggcatccacttcttctcttttgttgctgatctcacaacgagagcagctccttgttcagggttataagataagagatattcgttattggtttaagttcatatcaaaatagagattaggattcagttagtagagtgaactatcgagattctaaccaaaaaattagacattccatgttctcagagagtgctctgtcggctttgccagttcaagtttttttcgttttaagggtgttaacatagggttttgaataatttattttaagtcttacagggtttgatcttctaattttgtgtatcattcttgtgtgccattatcggattttattgcataatttgtggtattaaagatgaacaatacatattcttatagccactggaaccacttgcctttctctttaagtggaaactttttgttatcatatgtctttttcttatacacctaatagattgcctgattattttatatgtttattgcagatctaaaaatggcacaggacgtggatcatagcccaggttcccaatcaatttc

SEQ ID NO: 68964 - DNA, 544 bp, Prunus persica
  Intron number 1 from transcript ppa011451m (locus ppa01145 1m.g) derived from phytozome v7.0 (chr-ID scaffold_7; pos 15140233 to 15140776)
ctccaactctgttgacgatcttgcccccaccattggtaataatctttctaccccatttttctttatgttgcttttagcttagcatttcatttgggagctgataaaaatgttgggcaataaaacatttcgctgattcttttgttactgccaatgagatgaacggatgaagtgttggtaagaacccaaagggagtttattactgttggatctatgattggattttgatagttgaatagctggatttcttgtatattattctcaatcataggcttatggctccttacatttcctgtttcattgatgtaaattgaactcaattagtgagttcataagtcaatatgtttgtgattagaaaaaaaaattaaatttttttgtgaacttccagagggtggatcataaaaagttagttgcttgaatggtttcttcatacgaatcttgtgcatactttggattgattgagacaatcattgtgtgaggcatttgatgggttttgttcctttgttttgtaggtgtggattttaaaatcaagctgctcactgtagct

SEQ ID NO: 68965 - DNA, 822 bp, Prunus persica
  Intron number 3 from transcript ppa004830m (locus ppa00483 0m.g) derived from phytozome v7.0 (chr-ID scaffold_5; pos 3595569 to 3596390 reverse strand)
agtgctgcatctgttttagtgagtttgcaggtaatctgacataaacctttcttgacacagattcttttgaatttgacatagaatttatttctattaaaaaattggtttttttttcttttctcttttgggccttgagaaatataaaacatatctaatatttacttagttcacttatagttgttagactagtttttctctatgcttgagaattattaataacgttggcactagagggtctttttcataagatttatgctgactctatattctggttgagggaactaaagtatgatcattgtttgcatacacaaagggaaataatcattgaacaattatgttgggaattttcattcaaatcatttatccgcaataagagcaacagttcaatacatttcattcattacccaagccaaaaagaaattaacttagttacaacttacacatgattttctctaggcttttccagtatgatttctacacatgcatacaagtacatgtaaaacttaatattcatttgtctgtgtgttaaacaatgtccttgggatggatctgtctaagattccgtccttaggatgaaactatcaggattccattttgcctgaattcattaaaattatttcatgattgattgtaattacctggtcataagctctcgttagcttgtaattagcttaattgattcatccttaggaggcagcttaactgattcatccttgggaggtgtaccatctattgaacttactgtctatgaaaaatcaatgcaggtcttattcaccgctctaattgatctatctttctaggtactgagtttgtcagacttcc

SEQ ID NO: 68966 - DNA, 646 bp, Prunus persica
  Intron number 1 from transcript ppa015011m (locus ppa01501 1m.g) derived from phytozome v7.0 (chr-ID scaffold_1; pos 15065788 to 15066433)
gtcctaagttttttcttccaatccctagtcctaaaaattggggaccctagctttagtaattgtttaaaaagggttttactttgattttgttttttgattaacttgtttctagttaatttaagtttagtccatccttatttatttttaagaacattttaacttgcaaaaacttcatgaaaacaagccgaacacataatgtcttccaaagaaatgccattaaacccatagccacttattgggccacttggatgacacaactcaaactaaactactaaaatgactttaaaggaactctaaacttccaacgtgggacaaatttcaactcaaccaatgcttctaaagccaacaattgttcttgtacaaattacagataatagtaattaatactcgtaaatcgatgccccccaaaagaatcaaatattctatttgggtgctattggttctatattgctaacatgttttatgtcacacttttctgctctttccttccttgtgcatatattaagtacttgaacataatgtcaggagtatctatttaacagagtttaaatcttattggttttcttttccttgccccctgctacaaatcataccaactttagatgtctacacaggctattacatatttatctgcattattttgtac

SEQ ID NO: 68967 - DNA, 510 bp, Prunus persica
  Intron number 2 from transcript ppa016362m (locus ppa01636 2m.g) derived from phytozome v7.0 (chr-ID scaffold_1; pos 31013918 to 31014427 reverse strand)
agtaccctgttaccactgagcttcaggtactgcaattaatttccagattatacgtaaaactctgtactaatgaagcttagaacagcacaggagtgttaattcgttaagttgacgatttcttaagtattttattggttgatgtcttagtagtgtttagacaaaaaaaatatatataatttatttctataccgttcccttttttcttttcctcaactttgtattttttgtcaaagctttttctttttggtgtattttttgaaaaactcaaatcgagccagtgattctgtgtgtgtgacgtgactctctctggcaagatttttttttctttttctttacacaaaataaaataaaatctgagtatggcacgtgtggtgggccttacctacttgtagaaaaactgaaacgaccgaagactgaatgtcgttgagtcaacgattcaatggggaattgatgctaataaatttcactgtctctgtcgtgtgtttgattacacagaatcggtgcgtgaac

SEQ ID NO: 68968 - DNA, 591 bp, Prunus persica
  Intron number 1 from transcript ppa005791m (locus ppa00579 1m.g) derived from phytozome v7.0 (chr-ID scaffold_2; pos 25637493 to 25638083)
aacaatcgaggttttacttcctttgaatttttcaggtaaccgtttcctcacctataatcctttcgattttggcacctatttgccccaaattttaattttctgtctgtaatatgcttctgtccattttgtttcaattctctattgcgtcttcgatctcctcccctctctgtattgcagaaacgcatatatttatatgattgtttgcttttctaggatatttatgcgctaaattgctgtatctttcggaaaaatttacacttattttttacatattctcgtaatttttttgaagacataggtgtcattctcatgacggcaatttccctactttgatttgcttacgcatattatttgtatgcattgtgtacacaaattaaaatttgcctatacgtattacgtgcattcaatatatataataatatattcatcatatttatgtcgtaaacaataatatgggcatgaagtgtaggtttccgttgtgtgtaattaagatgaagatatattgagtttgtgctcttgtgaaagtgtggtagattgagggactgaatatttgtgtggtgttgttctgtaggtgaagggttggtttacaga

SEQ ID NO: 68969 - DNA, 859 bp, Prunus persica
  Intron number 1 from transcript ppa020301m (locus ppa02030 1m.g) derived from phytozome v7.0 (chr-ID scaffold_6; pos 21935141 to 21935999)
tttccaccaacaaagctggcccttcaatccaaaaggtacctcattttcgcttccttgttgaaaaatctatgatgggttgttctgatatgtttatttcctgctcataaatttcattacttgtggattcaattcatcttgccggataatgtttgtgattatctctatgtttgtgtttaaaaactcaaacttgaagttttttttttgtacttaactgggtgaaccatagttgatatgtcatactcatttttcgctatgcaattattggttttagtgcacagccaagacaaagtgctgaaagatatcaattgatttaaggctccataatctgtcaacaaccataatatcaatcttcagttgatatttgtattaatatgaaattcaagttagaagcttccaattccttttagaactagtcaggatttacactgctattgttttcattctgtatttcttctgttttttttttttaattataattttttttggacaaaagagcttactgctgattttggcttaaaattatgtattttcatgttgctctgaacaaaggacaaatcacatgattatgttctttcataaatctgcttcaatatgtatcccctttggtctttcctttatgctggctttgtcctcaatctgccatacctatgcaagtgaagtgaaattgacttgagctagttcttcaatattcatttcttattttccgttcatcatagatgtgcttgtctgagatttttgtataactgatcaggaaaagataatgtgaatgtaaattgcgtattttcgctgatcctggatgattttcttttgctcttcttttgcagggtggagacgccgctgagataattgaagaagctcc

SEQ ID NO: 68970 - DNA, 463 bp, Prunus persica
  Intron number 1 from transcript ppa025180m (locus ppa02518 0m.g) derived from phytozome v7.0 (chr-ID scaffold_7; pos 15641032 to 15641494)
tacaacttggtaagaatatatgtaatgtgtccatatctggttcttctttctctcttcaaatgaacttggaaagtgaatgtgggtggaaaaagaataagaaacaaagaccaatatcagatgtgctcctttttttttccctcaactttgaatcagaattgatgtgaacaatgcgcgtgaacgtctatctttatactattccttaatggatcagacctcaaacaacacaaatccagagagcttatataaatactagttaatgcatgtagcctccatcaacatatcagaatttggaaccatttggaaaaaaaaattatgtcacgtagtttcagctttctcaggtttcaatatggctctcctagaaagcctccaaataaaccatctcccgagttgagtttctccaaagagaggcaaaggtctagcttgtcaaggccttcatcccagccaaaagctgaggagataagat

SEQ ID NO: 68971 - DNA, 461 bp, Prunus persica
  Intron number 1 from transcript ppa006680m (locus ppa00668 0m.g) derived from phytozome v7.0 (chr-ID scaffold_1; pos 35383973 to 35384433 reverse strand)
aggaagaggacttaggcggtatgtatagatagaaatatatacacaaaatgatatgcatgtatgtatgtatgaatgtaggtctcagttctcattggtcaatttagaagtgtggaaaattcgatgcggttaaaatgtacattgcataatcttcttcaaattattgactacaaggcttaacattcaatctttaatcaatgtgttggttttttgaaaatcttaaattaggaatataaaattttctctttaccaatgggggatgttatgcacaatgcagttgacaatagttgcagaaatttgaatgagttcatggtgaaattgttggaagaggagtttgattacattggacaaaacccttagttttgatattttctctttcctgatcaaacttattgctcttttttaatcatgtagttcgatggttgatgcctaattcatacacctttcttattttagattttgaa

SEQ ID NO: 68972 - DNA, 730 bp, Prunus persica
  Intron number 3 from transcript ppa010775m (locus ppa01077 5m.g) derived from phytozome v7.0 (chr-ID scaffold_3; pos 1421240 to 1421969 reverse strand)
gcgtaagtttattcacaactgacttcctttaaattcaaataggatttttcttggtgtatttgtaatttgtatcaattaaaaaacgctatatgaaaatttgagtttcgagtgacattttggctctctttatatcagcaagacaaagagttgtggttccaatatttagtaagtaaataaggtgaatttcatttgattatatgtgcctaaaactttgagcaagatgtggcatgagaatcacagtttgcgaaatcagttaaggcattgttacagcattgaccagcattgtaaaaaaattatgacgcttgaagtgcaaccgaaatttcctcaatctcctgctttcttgaaatttcagtctagtacagtggaaataggatttgtcaaacttccttataatttatgccgggtttgagcatttttggtattttccctattaactagcattaaatgccagttctagggtttgtttatgttaatttaaggattttagtgatgtgccaccatacttctagtcatattggaagtgtagaatctaaagcagacacacgataaatctgttttttgtgtaattcatccttctcataatccttcttctatagtatttctaagtgtgtaggtacagttatctacgtcatattataatttatttcattttgtttggggattttaatctttactctttatatctcatgcttcagactacgtgttggagggaagtgaaggaacacctttt

SEQ ID NO: 68973 - DNA, 990 bp, Prunus persica
  Intron number 2 from transcript ppa012197m (locus ppa01219 7m.g) derived from phytozome v7.0 (chr-ID scaffold_4; pos 22161068 to 22162057)
tgtgctcgtgggtatgtattggcgtgtttcaattaactactctagaattacattacttactctactcactcaggatgaaaccatgcatctgcctcctgtaaagtcttgcactcaatttttcatttcctttcaaaagataatgcttttgttttgcttctgttttaagatgcaacatatgaggataaatttacctattctagtagaaagtattatatgtaaaaaaaaaaaaaaaaaacattaaggttattattttatgccggatgcttggggggggggtggttgggtgggggtttggggttgtagttgagttccttgaaatttccatatagaaccaaagccggtttccatcattttgaagatgagttgttacaggacagagttcacttaaaaccttctcctgtaatcactagagttgaggctctcttagagaagaagaaaaataaaagaggagctattggcactcttaaatgtcgtcctgcatccctcatttgtttttttatttattcatttattaactcagatactcaattgccaaaactgccgtttccaaaatgtaacttgacactacttgttagtgccaacagcacctctcgaagagaattaaacacaacattaagatctctggttctaacagaagtgacgtaggtacacagtttatgcattacttcaaagtttgattgtgccatgcgcttcatctacaagattgttgtgaatttttttcctgattttattgctcttggaggtacaactgtgtgttatacccaatttgaagagttggagagaatgtccctttttggtacaccaatcttccaccaaagtatgagcgtcaatagaagcttaacagatcaccttttatataacctgcttttttgttagatcattctgcttcattagctttgtgagactgaatttataaatgagaatctctgtatcacacgagcttttcttttggtaggttgaagcagatcaaatcagcgttttattcacttc

SEQ ID NO: 68974 - DNA, 799 bp, Prunus persica
  Intron number 1 from transcript ppa000731m (locus ppa00073 1m.g) derived from phytozome v7.0 (chr-ID scaffold_2; pos 20718171 to 20718969)
gtgcaaggaggaagagttttgctgacattttacaggtaatcagcagtacattcaagacttcactctgtagcatttatgtagttcttggttagacttcgattgtatggttttctttctggattttgtttggatgccatttaacagctaatattggtatttgtttatttctcacaatttgtatacttgggcgtctttatgttgttgatcactgcccccctttgattagtattgctcttgtggggaggactagatgtcagtttgaagcttgcacacagtttatgcatatagtcattttagatttgatatttattgcatactacacgtgatcacacatttccataagtcctgggacacccatatagggataaagagcaaggatgtagccaagagcatgatcctactctttagaatcactgttgcaactatctgaactgacttctgttggaagtgctagcttttatattgtatgcacatgacataacaaatgcatcacgttgtgctaagttctcatttctttttgctttttcctcttcctttctagatatcaagaaaatgcagatgtttattagttcttcccagttcttatgcagaaattttcattttccggattctttaaattaatatgcttgtattttctctttgccaaataaattcaaacgatgtggtttggtttgccatgcacaactactgtgatgaattgcttggttttgttcttgtttcatcttttagtgccctgtttcattgataactggcatgtgctgcaggaaggacttgatccacctgcttccttgacaaggcc

SEQ ID NO: 68975 - DNA, 533 bp, Prunus persica
  Intron number 2 from transcript ppa009902m (locus ppa00964 4m.g) derived from phytozome v7.0 (chr-ID scaffold_7; pos 3688177 to 3688709)
ttctctggagaaatcgaacgcattcagatccaacggtacgctttctttctttcttttttctttaattcaaaattttagttttttttatttttataatattatttttatctaaacactgggtttttcaatttgtttggctgccgggaaaatttaaggaaaaaacaaggagaagaacactttaatattttccccggcaattttcgaaggaaaaaaaggtcaaaaagtaaatgcatgcatactttaatctagctattttaaagtatattttaaccttcctgttttttttttttttttggataaaatattaggaaaataaaagaaaaaagaattcacttgggtttaatttcataaatttgacttaaagctaatgtaaccaagtttttattttatttttaattttaccatctttcttgcaattgtactgagcaacgaaaccaagccagttgtaagtgtttgttgcgattgttaatcttgtttttttgaattggatgtgtgcagtgagcctggacaatcaaagactgcatttgttactt

SEQ ID NO: 68976 - DNA, 907 bp, Prunus persica
  Intron number 2 from transcript ppa002625m (locus ppa00262 5m.g) derived from phytozome v7.0 (chr-ID scaffold_12; pos 561750 to 562656 reverse strand)
ttcggaactttatacttcatactcttcagttgcaggtaatgtttgtaatctggtaataaagaccttctgttattccacagtcaatattactaaatggtgcattctcatattactaaattttgtggactagaaactttgtctagttgaacttttgtggtatgcaattgtatatatcaaatttggtttagattctcaatcaaattcgtgtatatgtgtgtctatgcttgtattgatgtgtgcatatatacggagagggattcaaatatgggacacaatgttcgagctcaccctgcaatggtgtctaatgagcggaattgtctattttttggtccacttgaagaataatgctcgcaaaaataatccaaattggaaaacatttagccatgtgattatcatcacaattatttcagtgttaatcagaaaacactgtatttattttatcccaattagatatctatatggttctgatttagctaatttctgctaggatgatcgttaaaaatagacaatctggatttttgcactacattgcgggatggggcccaccatgttttccttacgtcttaaggatctcttacttgaggcttctctgtgtgtgtgtccagttatttgcaaccaggagttaacatatttggatctctgtccatgtaactacattcttgtaagaggatgtttcgatttcaaagcagacacccattcattagatagagaagaagatcacaaagatttcgtgatccgctactgaacttattcaaattatacatcatatcatatatatatatttttttaatcatttatgtttgtattcttgtttgttaccatcgtgaatcatttgtaaatttgttttctgtacttgttatcctatttagtaagcgtattccttatatttcagagctgggagaaaaca

SEQ ID NO: 68977 - DNA, 618 bp, Prunus persica
  Intron number 1 from transcript ppa002625m (locus ppa00262 5m.g) derived from phytozome v7.0 (chr-ID scaffold_12; pos 563417 to 564034 reverse strand)
tttctgtggataaccagggaaatagctacaatttggtaagcaattcatttggtttgctttaaattttgttgtgattttgaaaatctttggctgggttttcgtttactgccttctgttgcctgaaaactttaattgttattgtattttgtttacttttaatcagctgctttctttttgtaccggcttgcataagttattttatatatttgttgattcctattggggttttactctgtatctaatagctttgattgaaaatcttgtgcattcttgaatggtcatgagtttggttggttgaacttttgtttctcctttgatatatttttgatatgtttaacttctatgttgatgtgaattgtagatttcttattttattttgcatgcttaattcagagagattgaagaactagagaaatttggttcataaggaatataaagaaaaaggagaggcttttaacttttgcagtgattgctattttgacaatgcataatccctttttatttttatttttattttttatactaatgctaatattgatacactattgttgaagtaaatttgaataagttttctcctgttcagatttaaggtgtatattcttctccgtaagttgaagt

SEQ ID NO: 68978 - DNA, 856 bp, Prunus persica
  Intron number 1 from transcript ppb013084m (locus ppb01308 4m.g) derived from phytozome v7.0 (chr-ID scaffold_4; pos 20845261 to 20846116 reverse strand)
gaggatctggagataaagaaggtggagttggggttgatggaggatctggagaggggtgtgattgttttgagtgtttaagctgatttttcttaatttttgagttttttaaattaatttaaaatttaaacaaatttttatttatttttggcttatttatgtacatgccccttgtgctttcaaacttgtctcaaattaccacatgtgtttggaaacgtctcaaaataccccctaaacttttaaaaatggtctcacgttacccgttccgtcagtattatagacgttccgttacgtgctttgggccccacttcgttttaatctttaacctttgggaataaaggtttttcagttttaagaaaaggggaaattggagaagagggcttagggtttatgaaaatctgagatgggcttccattttgggagaatctggagaagaaatcattgtttggcgttagactttaaggctagaaaatgcaaatatggtggtgcttagagaatctggaggttgtcaacccatatgtaagtggacccattctcactcaattttcttgattttggcatgtgcattgaattgctgttagagtttttttttttgtttttttttttgtatgctttttgactttgtgctggtcctggtgtggtcattgtgtggtccttgcgtgttccttgtctggtccttgtgtgttgctggagtttttttttttttggttttttcgtatacttttttactctgtgctggtcctggtatggtccttatgtggtcattgtgtggtccttatattgtctttgtgtggtccttgttttgtctttgttacctttatccatttgttaagtgaatcttcctcttacacagataaag

SEQ ID NO: 68979 - DNA, 486 bp, Prunus persica
  Intron number 1 from transcript ppa017983m (locus ppa01798 3m.g) derived from phytozome v7.0 (chr-ID scaffold_1; pos 12510217 to 12510702 reverse strand)
caagcagcagctttgtcagggttccctttggacgagtaaatttctaattaaccccctgatataatgatttttattttgttttgttgatccaaaaaccaaaagtaattacaatttttttgttagaagaagttattataattttttgatgtcaataattaattaatagtgtgaaaaatattaaggttataattattattaataaagtaattttctctgtttcaaaaattatactatagtagttgaaaaatagaagctattttaattcttgacaaacttcaattggaataagttttataagagttaaactatattattttatagaaatgccatgttttatattcttttcctattactaattcattaggttttatattttatagtttttaaattactttttatagaaaaatgccgtgtgactaaactaatgtttcatatgcttttaaattggcagacatagatctgaagctgaactgattcataaaatcg

SEQ ID NO: 68980 - DNA, 380 bp, Prunus persica
  Intron number 1 from transcript ppa012200m (locus ppa01220 0m.g) derived from phytozome v7.0 (chr-ID scaffold_4; pos 20005448 to 20005827 reverse strand)
gcaaagaccgttgattctcagtctgttctcaaaaggtacatcttcatcttacttgacttaattttgctttctgggttttgattttttgttttgctttcttggttatcagaatttctgggttttgttttcttaccccagattttcactttttcgatttaaagaaaaacagtttctttttgtttggggattctatttctcagttaatttattttaatagactccctttattttcattaagtttcttttgtttcttctgataattggaggttttcaaggtttcttggttatgaatctttgataattggtggtttacaatgtttctaaccctgttgttttcttgtgtttttaattgctcgctgaacaggctgcaatctgagttg

SEQ ID NO: 68981 - DNA, 925 bp, Prunus persica
  Intron number 2 from transcript ppa007600m (locus ppa00760 0m.g) derived from phytozome v7.0 (chr-ID scaffold_4; pos 8872046 to 8872970 reverse strand)
cctcacctattcccaaacctcccttctcctttcaggtcctctcctctcatcatctcatcatatatattactgatgggctcggtctgagttggttcgattttgggctcaactcaaacaccgaaacactggctttggtttggttatttggaaatcagagtcaaaccataattgatgaaaaccaaccactttggttaaccgaatttgttttgttggtttggttcaatttgaattttttggcttttttagagagagagagagagagagagagagagagagagagagagaagaagaagaagaagaagaagaagaagaaggaaaaaaagaaaagaaaaaaaaaaggggagacgggaagagggagtgatgacagacaaacgtaagaaggagaaaaaaaaatagagaaagagggactaatggagacaagacagacggagaaatggagagagaagaaaagaaaaaagaaaaaaaaagagagagaagacaagatatgcatgttttgagggttttttaaaaaatttcttaggcatgcccaacaacaaaagccagctttttattatttttttacttctttaaactatgtattatatatatatttttataataatattatatataatatttttaaatatcattggtttgatttggttaaattgtgattttggatattgcaaaccgtacatcgaatcatatatttcgatttgatttgggttcaaattgatgaccaaaaaaattttaaaaaaaccaaaccaactcaaactatcgatttgacttgggcggtttgatcgggttaccggtctgaatgcccagcccaaatatatacatatactttgtgtgcatgtgtttgtgattggaactgagtatttttctaaaaccgacttattgttgacatgtagagagaccttagaagtttactcattggaactgaaga

SEQ ID NO: 68982 - DNA, 435 bp, Prunus persica
  Intron number 1 from transcript ppa007600m (locus ppa00760 0m.g) derived from phytozome v7.0 (chr-ID scaffold_4; pos 8873174 to 8873608 reverse strand)
tccattttgcttgcaaagagtggggtttctttcaggtacacaacttttttcactcgtttgtctgtcttgaggaattaatgagaaaattaaatcacaatttagcatcaatgggaagttattggcaggtaatgttgggttagaattgatagagcaagtacaagtattagtagcgtagaagaaaaagtgtgtccctataaatatatgttaatttgctcgtggattttttttgaaatctttaccttgttagacgtggtcctaagtttaaattcaaaaaacaacggttgttaaataaatgaaaaggagttcaagaattcaggtttaggcaattaatcatgtcattatacaagtatttttacttgatactaactagggcattaagaaagtaatcatggccaacattaagacattatgtatatatgttacagttggtaaacc

SEQ ID NO: 68983 - DNA, 957 bp, Prunus persica
  Intron number 1 from transcript ppa022517m (locus ppa02251 7m.g) derived from phytozome v7.0 (chr-ID scaffold_4; pos 13784180 to 13785136)
ataaggttgttttcttcttcttttatttatttatttttctcaagcgatttctgattctgattttagatggccatggaatttaggtaggctctttttatttatttatttattataaataaataaaataataataaatgttttttttttcctgaattgatgttgtgccctaaaatatggtcaaataccacgttatttccctaataaaagatttgggaaacaagatgcaaaacgtgggagggtaacatattttcagcaacactaatatcattatacccttctttttttttttttttttttttcttatttgtgccagaagaatatttgttaagtattaatttattattatttttgttgtgtaaagcagaaataggcctggtttttcggatggaatgcatcggaatcaaaagattccaatttcttccaaaaaaggaacaacctgtgtagtctaaccttgaaactccattatattttagaatgcagaatttttgaaaattagaaatacatttcaattccaatccaaatttttttggaattttcggtccaacttgcacccctaagcacagcgtaatcgactcaaaaagacaaggttttgaattgtattaaagtttgcatgtttcttttgagttgtcgctagcaagtgagcattatgtgatgcaattacattaatgactgacaacaactcgcgtgtgtgggcaatactccttaacaattgttttgttttgctatttggtgaaaggggagttgaaggccaaacgaatacgaataacaaatacgcacaaaaaatttgtttttacatcagcatgattgtttatatttgactaaccgtgctttcgcggtttgtttaacatcattggttgttaactaattgttctttctttgggttttatgagcaagttttatttatgtatttattattttttaaagcttagattaaggagtttatcgaagcagtaatta

SEQ ID NO: 68984 - DNA, 1060 bp, Prunus persica
  Intron number 2 from transcript ppa010685m (locus ppa01068 5m.g) derived from phytozome v7.0 (chr-ID scaffold_7; pos 17879113 to 17880172)
ttacattttttgcaggcggattctcctcgcaaaaagtaagccctataatttctattgctgtttttcaatttctgggttcgaattgcatcctaatatatattatgtatatttgtagaaaaataattgcctttcaacatacttgttgggtcgaggctttcgatctattggtgctgatacttttgctttgtgtcagtgtattggagttattggaatttttatttgactatgtttggctattgaagctttctttgtctgttttttgtgagccacttaccatccgtaaatcattttgtcaaaatcactctctctctatctttctgtttttcttataagaaaggaagaacacaaattccctgttttaggattttcaatcttagcttcgatttttacaaatacagtcatagatatgcgagtgggtaaggaaatcatacggttctgcttatatgctgtgccttagtccatggaagatgttctacgggcaatctgtttatttgggaaaccatccaatgcggaaactgttcatacatgcgaggttttgtctttaccatgtaggtctaggtggtgtaattttagaatggtatatgcaagttatgtttatgcttggaagttttcactttggagttatagaggataaagtcacccagaagttttatgttcagatttgttactttttccattatgttttgcagaacgttttaaatgtcttatttagtggggcgaaaattgttgaattgtgatactaatgaatcagggagactctagttaaatatgtggtgttcatatgattccatttggggtagttggttatgatcaacatggcttgctttctcatttttcacactgagacgaccattctagggtctggtaataaaagaattataggtgaatattatcttttagagcatattagctgtgagtttcttttcattaggaagattcactatgtgggaaagtgttttgtgctgtttggctcttattttttgatgttgttcagaagttttatgccatacatatgtgtaaatcaggtactcacgatccccttctccgtggagagctcagt

SEQ ID NO: 68985 - DNA, 348 bp, Prunus persica
  Intron number 4 from transcript ppa019832m (locus ppa01983 2m.g) derived from phytozome v7.0 (chr-ID scaffold_8; pos 17749877 to 17750224 reverse strand)
gaaaacttgccccaaggtagtcatttctcctagttttcatgtaacgcacagacactctagagaaagtacagtaatgctacgtgtttgttgctcttgtgggttttacctctgggtgttcttgcggcaggtttgatatgggaggggggaaaacaaaaaaaaaaaacaaaaacaatagaacaaaagaacaaaacaaacaaacaaaaaaaactttggcagattgcttgactagttttcaataaaataacctcattttggtgagatttctcttcatcatgccatgatcttttacttcagagcaaacctaacttttattatgtatacaatgtttggggttgtccattacagaaa

SEQ ID NO: 68986 - DNA, 788 bp, Prunus persica
  Intron number 1 from transcript ppa013004m (locus ppa01300 4m.g) derived from phytozome v7.0 (chr-ID scaffold_7; pos 14441949 to 14442736)
ccatcgtctccacagccttctcttctctccgtcaggtacgtaacacaactgttgcgaaataaaattatgtgagtttgtgcttgtgatttcgagatttttctcttttaggttgtttcaatttctaaagtatatgaatttttctgaatttaaaataatggtttaggatttagggtttggattattgatctgtggccacgagagcactttctgcgcaaccttttttttttttccgcttaggtactttggcagtcttcctgggttttatttctcttgtgagattttgggttttgcctttactttttttttttttttttttttccttttttttttcctgccatgaaagctagttatttttacacaactgctattcagagtcgtggcatcttgttttcaacaatgggaatttttcttttattcctgcatcttttgatatacttacccttccactatgattgatggttcatatatatatatatatatatatatatatatatatatttcacattactccacttgggctgatttatatatatggtaattgttgggtatttgagtttgtgtgattctgtatataatgaatagatatgaaagaaatacagattgtggcatataccgtcttatatgttgtggaacttgcaaatgattgattgttctttttgcatgatgtcattgaggaaaatgtatttctactaactggtgggaaagatgtgctgcttaaatgtggaaggcgcctttggaatttatacactattaattcatcatatttttccactgatgacaggtagaaa

SEQ ID NO: 68987 - DNA, 296 bp, Prunus persica
  Intron number 1 from transcript ppa012106m (locus ppa01210 6m.g) derived from phytozome v7.0 (chr-ID scaffold_6; pos 296763 to 297058 reverse strand)
tttgcctcttacactcgctcaacaatctcttccaggtaccttttccaaaacccatctctctttccctctctttgttctagtttttgcatagtggttgcgtagaagaagggtaatagaagagaacccactaattatttatgcccaaatcgatcattctgctttagttctatgattttgtatcacagtcttgtattttttttttcctttataatcaaatatttttgaatgtgtttatttgatttgatacttaaatgtgtatgctgcttatcaaaacaattatgttgaacagcaaaaag

SEQ ID NO: 68988 - DNA, 829 bp, Prunus persica
  Intron number 2 from transcript ppa022180m (locus ppa02218 0m.g) derived from phytozome v7.0 (chr-ID scaffold_1; pos 18199894 to 18200722 reverse strand)
gaagcggtaactgaaccaatatgcttttgtgctgatatctttagtgcatatatattagttgctctttattggattgtatgccattgtgtgtttcttccatcataccatcatctatctttttctctttttctccatctttgctctaaatctatgatacttctttcattgtttgaattcaccatttacaatccaaggatactccttaagaatctgtctagttttctaaacaaccttttcagaaacatgctgcaatgagtttttatttatttatttattttttactgattcactcatcatatgttgatggcatgcctcgaagttacctgagttagagacttggcaacgatagtgttgtgaaaccaaaagtttcacatatactaggttaatgatttgcgtattaccaactctatgctaagacacaaacacacacacacatgtataaccgtatatatgctatctaaatattggatatttagaagatcatgggtgcatagtttttccttaaattattgaaaaagttaggttgtaaactttctaagttctaactaaccatgtacaacttcaacttttctaatcatatgatatctaaatatatggtgttaaatttgataagggcatatttgtaaattggccaagatatgtgtgtcgctaatgtttatttctttgttaatcttgaatctgatgcttgctttttggttgcctgtggttaaaaactttactggatttctttttatttattttcctctcctcaccgaaatcatcatcttaggaactggaggagaaaaagaagaaagaagaaagaagaagcgaaagcaaaagaaaaagaaaa

SEQ ID NO: 68989 - DNA, 868 bp, Prunus persica
  Intron number 1 from transcript ppb004154m (locus ppb00415 4m.g) derived from phytozome v7.0 (chr-ID scaffold_6; pos 6154465 to 6155332 reverse strand)
taccaacatcaacggcaacaaacccaatcatcaaggtaattcttttccaaaattaatttttatttaatttttgggtcattgagataaacccatcgggttgatgatcatatctgattttcatattcagatagtttcttggggtgattttaatttttacattgtgggttttgtttttttggctattattatttccctttttgtttaatttttatgggtggtactcttttgccttacctgggtttatgttcttcactctctgaattatttggtcatcaaatttttttatttaaaattttgggttaaagtttctgaatttggttttgtttggtcctgctttgcaccttatatcgattcaaaaggtcggtgccctctttgactttgccatgaaaccactgtcaatttttgaaattttgtaatggatggaggaagaaagatggctaaatttttatgtagtgagaatgggctttaatcacatttataaaattttcatacttttatattcatctgggtttgttaatttctcatctagtgccaaagttatttgttttggttcttgtgactgttcattaacaccgcgtctcattcattttgtttgtttgtttgcgtgattggttgggaaggtccaatccataatccaaattcccatagtgttgaactttgtcattttgtatttttgtttgcatttaaattttaatgactccggttttttcaatctcatttttgagaaaatgaatcaatatgattttttggattttggttaccatgtgccgaattttgtctttatgcttggccttctcaatctcacttacttacttgtctgtgtgcatgtttgtatttggtcattttgatatgtcagaagtgaattcaa

SEQ ID NO: 68990 - DNA, 520 bp, Prunus persica
  Intron number 1 from transcript ppa012728m (locus ppa01272 8m.g) derived from phytozome v7.0 (chr-ID scaffold_8; pos 16486151 to 16486670)
aggccgaccagagtgttctatttgatacaatcttggtatagtccctcaaaaccaaatctttttcagtgtttatgcttcgtttttgttgcatcttcttgaatgttgtgttgaattttagttttaattgtgaaaaacttgagcaaaaaagtggtttttgtttgtgtttcttttggtgatacttggaaaaaaaattggatttttaatgcctcttcttgactgtttgttgtggatgatgctatattatttatctttaggattcaagaacttaagttttagagtctcatagctttgttaatttctatctttaggactcaagaactgcagttattatagtttgctgattgtgattttgtgaaatcgttgaattttgtaactggagacctgtcattggttgtgattgtaaatgcatcactggctaggttttatcagcaccaggttttattatcatcatcttttgactaacaactttttcccgccaatttcaggctgcaaactatctgaacatcaagagcctgctgga

SEQ ID NO: 68991 - DNA, 620 bp, Prunus persica
  Intron number 1 from transcript ppa025571m (locus ppa02557 1m.g) derived from phytozome v7.0 (chr-ID scaffold_6; pos 26311988 to 26312607)
tattgacttggcttccaggaaggctgaggaagcttgtaattatatttccttcattctctttatcttcttgacatttgaatttggattaatttgagttttattttatctagtttattggttcttccatttcttgggggctttctgttttacattcgattgaaacttgtagagttttaccaatttggggggataagattacgaatttgtcaagcaatatgtggtaagataataatttgatgcaaatttaatgcaacgatttttggaatttctagaatgctgaatttttctgcgcggaaggaggaatgattaatttgttctcgtttttatctctatctctgtaatttttcttgatgaattttggcattgaaaactaagcatttcgttgaatgtaagtttggtattaaactttcaatgaatttggagatgagtttaaatatcatgacctcaaatttacaacaacaattcgagagtagaagcaaagtttctgatcctatgacttaaatcagattgaacagttttgtttttcttcacctcttcagtgataatcattccattgagatttggtatatggcaagtaaaaaaatgaatgttgccatgctattttgcagccttgagaaggt

SEQ ID NO: 68992 - DNA, 784 bp, Prunus persica
  Intron number 1 from transcript ppa024819m (locus ppa02481 9m.g) derived from phytozome v7.0 (chr-ID scaffold_1; pos 33901740 to 33902523)
ctctactccgtcggtgcaaatatcgtttgttaatggggtttctgtgatgccttccggttttgtttggtgctaaaatggtgttttttgtttagattttgtgttgctgttggtagttttcattttggttatgtaaatttatagcacctccgtgatttgtttgcacttgaggttttttgccaaagtcagtttaatatatgtttgtacgaagatggctgcttagatatgtgtttcttgaaaagattttgtgagtcaattttatatgtctccctgattcaataatttcttctaatatccatttgtatttaaacggttgatccaatcttctaaaattagaagtaaaagtcatgttatttcccttgaatttagaaacaagaatatctatctctaagttctgtaattttgtcagtcaattttatattttctccctgattctgtaatttcttgtaatgatgatttgcatataaaaggttgattctttttactaaaattaggagaaaatgttttgttttttcctttgaatttagaaataagattatctcttagatattctagtcaattagagggggcaggcattcagcaaatggattcttaattacattcaacttgaattgcattttctataggtacaatcaacattttcagttctattgattgagctgtggtagattggtctgttttggttgctctttttttgcatctgtacgtttgatttccccccttgaaatttggtgggtatatagtaaccttgatggatcttgcagttaccactaccagtcaggcaata

SEQ ID NO: 68993 - DNA, 839 bp, Prunus persica
  Intron number 1 from transcript ppa026573m (locus ppa02657 3m.g) derived from phytozome v7.0 (chr-ID scaffold_1; pos 2113428 to 2114266)
gttcgaagcagatcgtcgatcatattgagcaggtatgtaagcaaatattacttattctttttcaagtaatgaatatcaagttactgatggtatcatatcatggctctttgctcattgctgttgctttctttggttgttctttgtcatttgatcttaattcgcacaaaatatatacaatgtgtacgtatttcatttggttaacatgttgaacgtacaaatcctcacggaacccattggagaatttgatcaaatatacttcaaatcctcaaaatcaattgtcggaaaaaggaattcaaatcttgtcaaacaagttccttacatttttttgttttttgatttaaatgtattacaaattattcgggttaatcggacttgggaatgtttaggaaaatttactagaagggggttgtatttctttgtacttctgaagcttcaatcttacctgtaattgatttgcttgtgcctttgtttgcagaccccccgagtaaatgctgaaaccatggatggaataactatcccacccaacttcagcacgacgttgtgcattctcaagtccattgtccatgaggtcattatctttcattattatagcttataagttagttttcttttctattatttaatttctttttctaaatcgtttggcaagaacaagaagaatttctaacttgggacattatgaaatatagatcagaagataaataacactgactaagagaaagagatgaatagatacatatattcttgattctttacaatattaagtccatccatgtaaatacattatatctaatcatagtaatgagatatgaaatttcatgtgccatgtaaggctccag

SEQ ID NO: 68994 - DNA, 788 bp, Prunus persica
  Intron number 2 from transcript ppa004742m (locus ppa00474 2m.g) derived from phytozome v7.0 (chr-ID scaffold_5; pos 17725999 to 17726786 reverse strand)
aagcctctgatcttgacaaagaagagcgacctgaggtatatctctatctgtatcttatatataatatagcatacatgttttgtatggaaaaatgacaatgctgctgaattggtgaggtactggctgcagaggactctgtgtttctaaccgttactaaaatctgtttgcactatggaacaaaacctgtgcgaaatgagagttaatttttgaactgaagactgatttgagaaccttctgatatgaatttaacagtgctctgattatttgagaaatgaaacattaacaacattccccatgaatcagtcccatggttacaatgccgaagctaacagagccttttcagctcttcactggataactaaatgagaaggaaactatggtccttgacttatgatctttgactcgaatatgacctgtataattcatttgattatcacacatttctttgtaaacaacaactcccaagtttattcccctcctctatatgcggttgccagtaaaagggcaaaaagaacaactttctgagagtggaaagctattggcattcagaataatttttcggttgatgtttctttttgcttgttgtttatttagcaatgatgttttgatgagttatatcttagctttttgcctttctatgatgtgaggctgagaaaaccacttccttttctaatcattttgctttctttttcaaatttataaatttggtgtattttatatgatgttttcatttggtcaatatcccatgtcaaggacttgatttaactggatcatatcaggtgctttct

SEQ ID NO: 68995 - DNA, 863 bp, Prunus persica
  Intron number 1 from transcript ppa013426m (locus ppa01342 6m.g) derived from phytozome v7.0 (chr-ID scaffold_6; pos 10782425 to 10783287)
ctccaggggattttcttccaagcttttggtcaaaggtactctctctctctctctctctctctctctctctctctctctctctctctcactgttttgtttctgtgatcttttccattgatatgtttctatcatttaagacaactatgtctaaggaagaaaaagatttgatttttgattgccgtatgtgacccattttgcagcttagctgtttgttgaattgcctcttcggagctctttttgagttcaataaaatgtctctgtgtatgtaacttctttcttactgctattagtgttgttgaataatgcttggaataagatttttagaagccaatggattgggaatcgccgttcgtgtctggaaaagcttggaatggagctgttcttatgtttatgaaaaattaatggaattttgctttgatggtggaagcataaatataagagcatgcttcattttgagttattataaaagttcaagattcgaatatgagaatgcaaaacctatacaaaacatgagaatgcataattaggaaatgttaaactcatttttaccctcaatttgaacatgataatgcaaatccctaaatctggtagaatgcattatttctattcgggcatgttaaactcattcttcagccttaatttttcaaaacaaacacagcattcgggaacgggagatccacgtgagcctctacggcactatgtgaagggtagggttggggtttatgattgtaagtcatatgaacaagattgctagttttgtgcatcttgcaagttacattgtttgacacagccgaacttttgaaaactcatggggttctgtctcattaggtatatcgttcacctccacagaagagtcattgact

SEQ ID NO: 68996 - DNA, 361 bp, Prunus persica
  Intron number 1 from transcript ppa001952m (locus ppa00195 2m.g) derived from phytozome v7.0 (chr-ID scaffold_6; pos 3200866 to 3201226)
catcgtcaacctttcaaggacaggctctctcacaggttttgctagctctccatctcagttcataaagtaacaactaaaaacaaatattgaaaaaaatttagattctttttcaatctagaaaattgtataataagagtatttttagtttgtttttcaataaagaacttgtacaatctaaggtgttcttctgatagcaaaaactttgcatcaggtgagttatgacgaaaaggttcaattttgatatcaatctctatttttctaagtccaaatcccactttgttttgcattttcttgttgtgtggagtttgaaaattggatttctaattaatgaagttcttatgattctttacatattacagat

SEQ ID NO: 68997 - DNA, 831 bp, Prunus persica
  Intron number 2 from transcript ppa023231m (locus ppa02323 1m.g) derived from phytozome v7.0 (chr-ID scaffold_7; pos 15208198 to 15209028 reverse strand)
gacaagttacacctatcaagttacttggtgtcaaggttgcctcctactctttttcttttttttcatcactaaaatatatgcaaacttatttggttcattctgccttcaataagtttcttagctcccaaattttgaccaatggtttcatgggttagttcaattttcctcatttgtatgtaagtaatgcgattcttcaattatgttcacaaataacttgagcattatgtgggttgtgtgtgcaactatggtggcatatgcgaataagtagtaagtacacgccaatagttgctggctgtaaattcttggtagagtgctatggctgttattatatgttttcctcgtatatatgttatgctaactatgcacatttagaatagaaacttctgcttcttcttggcgccaatgttgttcgtttgccttttgttcttttttaacctttaaaccaggtgctcattgtaaagttcgaactttgtaccataagaaattgcctttatgttctaactagggtcttatcttttttctctatctcatgttacccgtaaaattttattactttattaaaagtctggaattgttttgtataattatgtattctgcttctctggaggtgtatttagtcatgtacttttaggaaggcagatcctgtgcttgaatagtatatttgatagatggtgtttcaaaatgcaaaatatagagaaatcttaatgctttgatttgcatattgtgcccgtgtcatagatatatcaagtttttacttattattatgtataccttgcctcttgtgcttctttgttattattcttttaattgatccctgattttcatgcaggt

SEQ ID NO: 68998 - DNA, 920 bp, Prunus persica
  Intron number 3 from transcript ppa022110m (locus ppa02211 0m.g) derived from phytozome v7.0 (chr-ID scaffold_4; pos 1192295 to 1193214 reverse strand)
gcttattctccttggtcctctcaaggtatgctttgagcctttgatcatcactataatgcatatttgcatgtatgtatgtatgtatgtatgaattaatttatgcatgctggccagaacatgaatggcatactaggcaaaataatgcagaactgagagctgggacctgagtgtcatatgaatgattttaaggctagctttgcttgtcaatttgttccattaaactatgccttgtatcatgtgcagttgtgcaatagtatcgttctaaccagacaagtttgagcagatcttttcacggggtcaatgggtttaggagatatgtgattaatgtctgttttagtttattggtataaatttatgaggtgtgcaaaagttttcaagattctttgccccaactgcaaggttttggctcttctgtcacgaggcaacacactttcctacctagaagaaatatgatagctcgtgggccttggccttctagaaagaaaacgctagcttgttcttggtggtccacagggctttgctaagtttgagatttgtaccattactttaatttggttgataaaatactacttctctgtcaatattttgatctttggtctggtgtgattgttttagctactttcgattatgggcaaggcattttgaagattgcttgaacattatcattgggattattatatcaattgtcttaaattgagcaataatttcatcttatagaggttttaggatcgttaggtttgtgtgtgcctatcatttcccctgtggtattgtggtgtggttgaagtggtcaaatcttgctgtggtgtgtagctttcaccaatttattttagattgtggtgctttccatgattgaagaagacactttaacctctcttttgcttttgtttctgtaatcttttgtgacagattttgagcattcg

SEQ ID NO: 68999 - DNA, 798 bp, Prunus persica
  Intron number 1 from transcript ppa001591m (locus ppa00159 1m.g) derived from phytozome v7.0 (chr-ID scaffold_1; pos 32751839 to 32752636 reverse strand)
attcagcggacaaagacgatctcgaagctcctgaggtatctgattggttcacagtttctgcattttggttttctttgactttccatttttggcttgtttccgttggttcaattttgttgggttctgctgtgctcttttgatttgcatttcattaatttgtgattgtgagggctgagattagatagttttgtttactttgttgatttggttaatgaacctttgagatgctgtggagcgttactaagaaaccgctaatgctctgtttggaagctcagaaaacaaaaaaaagctgtactgaagataaaagagtttctaaactaagatctgacaaaatctaggatctgtatttaactggatttctattctatacaatcctagcatcgagtggaggacatgcttattagattaggaatggagatacttctaatatgtgattttcatatcatggaaagagtgaagtaaggacaaccaaatggtttatatttgaagattgtgtaacttttgctaatatgatgtaattaggctaaatgcattcgtaaattttctgaaacccatgttatatgcaagaacatttggttgatcataaccgccatctgcatttcgtaattactgtcaacttttgatctcatggttagctgatatatggtaataggcgtagatttttcttttgcgattcatttaaaatgcttattgcatgcacgtagttgcttctaatagcactttgttctatgtgtgctctgtattgatcaatgttctttccatttcattctagagcaagggttcaagtgacaaacgtgg

SEQ ID NO: 69000 - DNA, 371 bp, Prunus persica
  Intron number 2 from transcript ppa010580m (locus ppa01058 0m.g) derived from phytozome v7.0 (chr-ID scaffold_1; pos 8261117 to 8261487 reverse strand)
tggtaagaaaattaaactatttatttatttattttatttaatataagctatactagagatgaagttttctcacacacacttctaaagtgacatggagattcgaatttgagaccactaatctgtatgtcaataactttttcacctagactatacccctttgagaagaaaatcaaacttttataaattttgacaatgttacacaagaaatgttacattaatgcaaatgattataactatctcaggtcatttttgtttcattaattgcttcaattatacttgtttcttccggtacataacttcaaattgggttatttatgttttttttttatatttcagctgcaggcagtgatacggcagaaggaagtcattgc

SEQ ID NO: 69001 - DNA, 531 bp, Prunus persica
  Intron number 1 from transcript ppa016211m (locus ppa01621 1m.g) derived from phytozome v7.0 (chr-ID scaffold_1; pos 24675260 to 24675790)
ttatttacgttcatattcatattaccttagctttggttagtgtgagtatattggcaaggctactgtgaagacgtgaaattgaagtaagcaagattatttggcatgcttttctttttcttttatccctgatacatactcttatttattgattcatgctacatatgctttcatttattggtccctgctgaatgcgttgcttctttcgtttttttccttttcttttttggttcctatgtctgcaacaattcaaaattttcctctttctcattgagactatctaattggttttctgtgtgtggcgctttgaattggatttcaattaatgttttggtatatctacctccatccttcatttttaatttgtaaatataaatttgacagttatcattgtatgatagattaacattattatatttgttttatagattgagaatgaaagattcagtcgctacaatttgtgaagataatttacattataagcccatatgtgatatggaattctttcaaaacaagctgcatatgagttttata

SEQ ID NO: 69002 - DNA, 841 bp, Prunus persica
  Intron number 2 from transcript ppa008873m (locus ppa00887 3m.g) derived from phytozome v7.0 (chr-ID scaffold_3; pos 19501443 to 19502283 reverse strand)
ccgagaacatcacctttgagaactcttctcctgaggtaaaactttgtttcagttcttagttccatttcatttgttattgttcaagactgcatcttttgattgctttttcgatgttagtgtagttcggcattttggttttctgtattttgaaacttgtaatgtgaactagcgcagtggtaactcgaaagttctccaattggttttttcttatgattgttttggtttggttctgctctatggcgggttatgaatttggagttgctagttcctttggattaagcgagttttggaagttctagttgggactgaagaaaatataaatgatatgatagaaagaagggaaaatatgagaagttagaagatttttcatttttcatcttgtttggatttggggaaaaacgggattattcatatcatacaacacaaaaatcgcattctctataaaaatttgttaacttttggagagaatatggaagtgcggaaaagaagatctaaaagtctctctgcttatctccatattgggtcatctgaacaagagaaactttaaaacttttcaatttcatgtctcttcttttctctatttgtctcaatccaaatatactttgttaagtttgaaagtttttttttcttttgaattttactaatagtcaaaatctttgtcattatagaaattggggaatgcttaaacttaggctgtgggaaaggcttaaactttatttccccttatctccttcatttcactcctgggaacttggtttactatcaacattgtgtttaactttttcttctctctttttgtttggtagggttcaggccaagctgtggcgattagagtaacagc

SEQ ID NO: 69003 - DNA, 549 bp, Prunus persica
  Intron number 2 from transcript ppa010544m (locus ppa01054 4m.g) derived from phytozome v7.0 (chr-ID scaffold_6; pos 24188733 to 24189281 reverse strand)
gctacgtcgagaggaggcacaagtttccgggggtacgtaaatttgtctttcactggttataactgttaatctcttgttaatttgttaatgtggccccttttatatatttattcacatttgctctttccagttttgttttgtcacatttcttcttttttatttgttccctatttgaaatcaaatttatttattttttctgtttctgagcttgaatgtttgaatttctaagttttcatattaaagttctgtggatggtgatgagcaaatggttttatagcatatgtcaatggataaatcaaaagcatatattggttcaattccgcacaatcggatacttaggttcagtcacttcagagggtagtagctgctttttactagagttgttttgacctttcattgaacattccaagaggttgttttggttttctacttttagtatattggtctggttcttgattgcttctttatagtttcgagttctataaaccaatttatgtagcttggtttgtttcaggagttggtcatccgagaattttcgtttcatcagct

SEQ ID NO: 69004 - DNA, 439 bp, Prunus persica
  Intron number 3 from transcript ppa009440m (locus ppa00944 0m.g) derived from phytozome v7.0 (chr-ID scaffold_7; pos 15179044 to 15179482)
tgaaaagggttagttgcttttactgtctctgattcatagcagcttagttttaaaaaaggaatgggaaatggaattagaaactgtggcctttttatttttcaagtagatttgattttatccggattttgctggatatgaatttaattttatttactttccatttatatctccttgtgctgtctgagcgttaaagggttcacatcaaaagatctgaactttatggataaggttcagagcatctatcttttgtttctctatggactgttgattacttgcacatattatgccaacttgaaatagtcattttcttttctttccttttattttctcccctcttcctacccttatcattttaagtttatgttgaataattaaaaagtttcactttgtttgccttgtatggttcaggtcatctgctccttgtgcaacacagaacaag

SEQ ID NO: 69005 - DNA, 1003 bp, Prunus persica
  Intron number 1 from transcript ppa007321m (locus ppa00732 1m.g) derived from phytozome v7.0 (chr-ID scaffold_5; pos 670045 to 671047)
ctttgggtaaagcttctttccttttatttttccaaattgggttttccttaaatcctttgaatcttattgggtttgcttttattttttgtgggcggcgttttaaatctgcgttcttctgtgtctttgatgttgctattgtttttcttttgcgtttacccttgtctgtcgcgtggtgatttttcaatgtttgagtgagccgttgggttttaaggcgacagtggctttgacttattcccataccgggatcaactaagttctatttttatgtacttgtctttgtttttttttttttcttacttattatcttctctattggaggttccttgttcccacccttttgggtttctgacagaaaatgaagtggtcgttgttttttatttaatgaaaagggatatattcgtggatgactctatggaatagaaaagggtactggaactgaggttctgttcagtgtctctttagattcttatgtttgtttcaaaattacttatctgcccttgattcttgtattgcaatcagatgctgtaagctcaaagatattgaacctttgattattcatgatatttccatgcgcatatgatatcttataatgataatgctttttcgtatttctttcaaatggaattattcgtcttaaattgtttacgcagagtctattttacagtggaactttatcaataagattttataaaatatttccaatattggaaaaatatgcttttgaaagtttccaatcatgctgcttaaatcttattaatagcgtttaatttagtatttcaaatatcaagtggtaagactagaattgtcacgaaacaaaaatgtttatttgtttccttatataacttatagatgcagtggcaaggatcttattttattgtttccttttcaagaattcaattttgatgttgcttttccccctgcaaattaatgtataataataacggtgctaagtgttaatttgttttcctctttgcaggatctgtggggtttggattttcgccac

SEQ ID NO: 69006 - DNA, 1020 bp, Prunus persica
  Intron number 1 from transcript ppa000852m (locus ppa00085 2m.g) derived from phytozome v7.0 (chr-ID scaffold_8; pos 18734251 to 18735270 reverse strand)
acagtctccgagcaccttgccggtcactaggtcccaatctctctcttactctctgtctctctgaatgctgcttggagcagtgtcagagattgtggctgagttgtccttttgatttcacagtagctttttgtttcggggttgcctttttggtctctctctctctctcactttttctccgatctcgcacttatcgaagctcttaagctctactgataagcgaatctaattccttctctcgctggatttgcttttctgcttagctaaagctgtagacgtagcagctttcccaaacataataatattctcgctttttgtttaaatttagctcaatgatttcgtcttaattagttcacttttggctatattttgatcttagaaaaatcgttactttttggaatttttttttttgggttgcttttttggggtgcgggagcttgtatgtgatcggtgttgttttttgaataatatgtgtttgggtggagtttgttctgcagtgacgcgacgcataaattgattgtgatatttcgacgaatgagctgaattttcaccttgcataacattctatttgtctctattctctcttataccggtgcccttcttcttttactctttggaaaatcagctccctctctctctctctctctctctctctctctctctggggcttgcagcttcttccccaaaaatatctgggtcttcaactgtttttgataaattggcttgctttcccaattgagatttaggcgtcaagccggcagctttcccattaaggtttgtttgtgttggttttgactgaaagggaaagatattgattttctatccgtaatttttaatcatgttgaattttgtgcttgaaattagtttttttgcccctttcttagttttgttggaagttgtcctgttcaacgcttttgtttattttcttggaattctttgactttagtccttcaacaaatgaaacaaaaagtgattgcatattgggattaatctactgaagtatgtgatcacgcaggggttcaa

SEQ ID NO: 69007 - DNA, 512 bp, Prunus persica
  Intron number 2 from transcript ppa007647m (locus ppa00764 7m.g) derived from phytozome v7.0 (chr-ID scaffold_2; pos 17740451 to 17740962 reverse strand)
gcatccttgttcagttacctctgcctcctgtatgcttttaaatttgaattttgctttccctttgtgaaattatgttgcaatgagaatataaataacaagttgttttgaaggcataacttgcataagtcttcaagctcttctattcatccattttagccaatgttctcttttagcaaatagagaactgttgggtcatgtaggtgcatgttttagcttctgaagaatgattcactctatagtttgttgtagatgaatattttttgtttcttgaagagttcattatatacatgcctttacgtacttagctatgaattaggtaagtgtatgtttggttgcccatgtatctttcatcccttaaacctcaagttgtcagtaaaacatgatctatggatcattatgatcatgaccacgtacatttatatgaatgtacattttattaggtttacagttgttctctcatgatttattatgactaaacaatctaattgttttcatgtgtatgttaccagcat

SEQ ID NO: 69008 - DNA, 444 bp, Prunus persica
  Intron number 1 from transcript ppa007647m (locus ppa00764 7m.g) derived from phytozome v7.0 (chr-ID scaffold_2; pos 17741225 to 17741668 reverse strand)
tcactcctcttcttcactctctccatcacccactggtacggttctcttccctctcatacatagcaccaaattagagttttctgataagaatataatgtaaaagctggtttagagtgttcgtatcccctgctacatttcttcgaatatatagaagcccatgaatgaacccgtagcaaaattatgctttctaccatgctttggtgttttttgagtgactgattagtgtcacagactaggtttgatttttgttcctgggcaaatgggaattgttttattgcattaactgtttggtggtcacattacaaatccttgatagatattgattattccaacattactcagcaatttctctaatttgttcaatgaaattttcaatattgtagttaatagatactggtcgattttacagcttcattggcgactgaaacaccggctaaagtgatt

SEQ ID NO: 69009 - DNA, 428 bp, Prunus persica
  Intron number 1 from transcript ppa002724m (locus ppa00272 4m.g) derived from phytozome v7.0 (chr-ID scaffold_7; pos 21695377 to 21695804)
acaaccgcactgccgctgcacagtatattattgaggttctttatttactctacacctatttaatttttttttcttcccatggagcatggtgaaaagggtttgctttgtttgatgcgtttgtgaattgtgcttaaattgcatatcaaaatttgagatttattattgattagtggcattacagttagactttgtgttacttagttaactgaaaatgccaacttatgctcagactgcttctcttctgtttttttaaaaaaaggaaaaagataacgagaaatgctgtattagcattaagcattttgctatcggtttttgttgatgtcattaatgattgttgttgttctccttaagacaaattttaatccaggataagtgtctttgtataactagtttgttatttggttttgttaaatgccagcacggaggtg

SEQ ID NO: 69010 - DNA, 642 bp, Prunus persica
  Intron number 1 from transcript ppa013636m (locus ppa01363 6m.g) derived from phytozome v7.0 (chr-ID scaffold_6; pos 22087860 to 22088501)
gcagtttcttcgacctcgaaagatctacagatgtgagtattaatatctcactctttctcatatatttttctttagatgtatcaatctctttctcattcgttgttgtatttagagggttctgattatgtgggagattctgacatagggttttgcatctgatttgggtggagattagggcatatttagctaaacccatcttcgatttccgataaattgccatgggagctgaaattttttgaagcttttgatataataataataaaaaagaagtcagtttttggattatatgtttattactgcggtgggatttaattaaactccagttatttgtgcccaatgaaccaaggagtttaagaattttagttttaatgggctacaggtactgatcatggaacactttctatctttttaagtttgattaattagaactgaggtattgtaccatccatgtttgagttcgaaatttctgctttttgttatgttaaatttataactgtttgataaattctcaagaaagagttaactgcacatagttgcgagttaatttttttgcttgcacaatattgtggacacaaccagtgaagcttatgtataaaatttgcaacaggtcacacctttgatcggaggaatcgctgtagctgc

SEQ ID NO: 69011 - DNA, 973 bp, Prunus persica
  Intron number 2 from transcript ppa013636m (locus ppa01363 6m.g) derived from phytozome v7.0 (chr-ID scaffold_6; pos 22088611 to 22089583)
acacgaagggaagcagctctcatacttggagtgaggtaccgcctggcttttttttgaaatatatatatatatgtatatgctctcgttgctagtattttcacaaatatggcctgttattggggttagggctatcttatctttcaaaatgtgcccttggtaggtttgagcctaggcaaaattgattgttaaagggatgaacatgatactttcacccttctgtgcaagcctgtctgttatttagaatcgagaattttgttaatttcttctctgcaaatatgtgcccttattcttcaacggtcttttaacaatagggtttgttttaaatttaaactgactatgtcattgcttgacctttgaggcgctgctcagtgacatccaatagattttaggctcaccttgtgctcaaatagaattttggaatgattgttggtgcttacacaaagtcgattgtctgtggtcgagttctctgtgactcctgaacaaactcaaccttagtactttaggcctcgtacatgcttccctggttcttgacaagaattttcttaattggagtaattaaaagacaggaaattacaaattttcaaaattaaaagagttaaatggcatgtttctgacttccccttagagggctttctctatagtactagtagatttcccagtagcttaaaccatattacattgagctcagcttgttaaatgaatgagccaaagtgttgatcttaataagctcattcttttatcgaaaaatcgtacttgaatatctttacaattacatgaactcaatccatgcacagtcagccctgctcaattatagcaagtctcaagcaggaagtctgagacaaaatgcaagctgtagggtgctgtttcatcgtcttattgcatttatcctctatgcatgatgtatttagttgtatatatttttatatttgctttctcagggaaagtacccccacagacaaggtcagggaagcgc

SEQ ID NO: 69012 - DNA, 639 bp, Prunus persica
  Intron number 1 from transcript ppa013988m (locus ppa01398 8m.g) derived from phytozome v7.0 (chr-ID scaffold_5; pos 18217885 to 18218523)
caagcgcatctcttaacggtccactgtactgcacataagaattcatacaaacgatacgattgactacaaaaggaaaccaaagcaatatcattatagtttatttataccaagaccaaaatacatacctgtgcatttatcccttgttgattcacataaatccgcccacgtatgtcacgaccctctaagaaagagagatgcttggccacctctgcctctgcgtctttgatgaacacaaaatggtaaaaattgacgaccacccactccttgtcctctctgctttcgtaggtgcattgttgctgttgtacttgtaaagcaactcccacactacgtccacctttccattttcttctttctgaaagccaaacgcattctcttcgtctttgtctttgtctttgaatttggctttgctggttatgctccttatggattaacaaggcaaagcaagttgaggttgaggagcagactggcaattcaaaaggatctttctttcttctgccccctaaaacaatttgagtcattgtagagctccctgcaccggagataaccgccggcgcaggaaaacaccctctcatcttctctctctctctctctctctctctaatagcctcttatctgttagaggagctaccttcagtttca

SEQ ID NO: 69013 - DNA, 879 bp, Prunus persica
  Intron number 1 from transcript ppa019456m (locus ppa01945 6m.g) derived from phytozome v7.0 (chr-ID scaffold_4; pos 8791912 to 8792790 reverse strand)
aatctctcgtgcgagtgccaaacaaagagacaattgttctttgtcttgttagaaagaaagaaacattgggcaaaagcaaattagaagaacgacaaaatcatgaagttgacatggcttcccgtggacagatccaggcccagcttgtgcatgatgatcagcagcaacatattgactcaagtacttatgatcaactttttttggaagactaccttatgaacgatgtcgagggtgaacatagcaccatggttaatccaagtttgcttgcacagtacgatcagcaggacatgattggcacaagtactgaagatcaacttagggttctcgaggatttccttatgaacgatgtcgagggtgaacaggacaccatggttaatcccgctttgcttgcacagtacggtcagcagggcacgagtattgaagatcaacttaggcttttcgaggattaccttatgagcgatatcgagggttaatccaattttgcttgcacagtacaagcacaattaattcctctttttgtaatttctctgttcttaatacaacactataagtatatatatatgtagcttgcttagtgcatttgtttatctgcggcttagtcaaaacagttccaaatttaatacacaaaacgatttattggagtactttcgtgtattaactatttatatggcgaagaatttcataagttgtatctacgaagaaaataataaaacacatacactacttaaagacatggatattcaatactgctttatttaagacaaagttgcgcaaggaagtgaaaatattgtgaagttaatattgttgataaatctcacaaagagacaattgttctttgtcttgttagaaagaaaaaacatcgggcaaaagcaaattagaaga

SEQ ID NO: 69014 - DNA, 757 bp, Prunus persica
  Intron number 1 from transcript ppa010856m (locus ppa01085 6m.g) derived from phytozome v7.0 (chr-ID scaffold_5; pos 17292909 to 17293665 reverse strand)
ttaccgtttccgtctgcactgtcgttatacttgcggtaaagcactaaactctctctctctctctctctctctctctcttataataagaatgctcctctcttacattgattctgggcagagagagagttcagtgctgttcatgggttttgatgtatttgagaagttgtagtattggtttgatctgagtagagctttgtttttcaagaggggtggtgttgcattgattaaaccaggggtgcatggagattgattttttgctcataaaatttcttcttaagctgtggaatgaaggacagtttgatacaatgggagattggtttcttgtccttaacaaattttggtgcttggaaactttggaatttctcactctaaagtaattttcaggattattcattttttcttgttgtatattttaaatatgaatgaaatccatatttcaatttcacttgcttattgaagtcccttgtcagttcccaaaaaacataaaaacagaaagtagtcccatggcgcagaagctgaaacagattcaaaagaactagaaactaaacaacaacataggtgatacgttgttttaaagaatcatcttaactacaatcattttgaaagcaagatgttttcatggatattttctatcgaattatgacgtttgttggtgtgttaatactccttctgctgtactgtttacaagtcatgtatactaaatcattcttcgattcttgtagctgtggaggacaatactgctgagaccatttaagct

SEQ ID NO: 69015 - DNA, 407 bp, Prunus persica
  Intron number 1 from transcript ppa020211m (locus ppa02021 1m.g) derived from phytozome v7.0 (chr-ID scaffold_5; pos 3849328 to 3849734)
atccctctgccgatttcaagtgcctcgcgcttgaggttacgtttttatttatttataaatattcttgttctttgagttttggtttaatttcacttttcggataagttaagaatttggattcgtgattctgatttctatttgaattttgggtcttgggttcgacctcaattattgtttttagcattcgattttgttttaagataattttttggtcattttcaaaaaaataaaaaagcctttagttttttggaagaactaaaaagacgggcataatttgtcgcttcattttttttttggctttctggctactgaaattgggcttgttgtttggccaagatggtaatttgacacatcattgatatttgttttcagtcgaacccacaggactggcaatttgcagtcagagg

SEQ ID NO: 69016 - DNA, 857 bp, Prunus persica
  Intron number 1 from transcript ppa017226m (locus ppa01722 6m.g) derived from phytozome v7.0 (chr-ID scaffold_5; pos 14163727 to 14164583)
gggtataatttcgctctaccctttactccaattttaaagcttttgtttttttatctgctgttttggttttgtgtccttgtgtctgtgattggttttctcattctgaagagggtgcgttgatgaaattgtggtgaattagaaataccagttgagaaattttggaaagtttgcatttttgtattgattggaattgggggtgtgccataagatatttgtggattgttattcatgatttgatttagaaatatgaatatcttaagaattctgatttagatatacaagtatcttaagagttctgtttagctcaagtagtgttttggctcattcaatcaattagcaatgaagttggaataacaaagcggtttgggatctacagtttaactggaagaggttttataaatgaatatcagaagtaggtgaacctaaatgtacacggttggaagctgggacagttaatttttaattgtcaaggttatagaagcaaaaaatttgtttatgaactgcccagtgcccattaagaagttagttagactgcttattctgtggtatatcatattgaactaaatttcactatttcctcccatcgaatcaaattttggttatttgacttaaaatggaaacacaagtacctgaagaaaacgtgaaagttcaactggcattcacttcaatagctcagaggctagccatgaaggcgaatctcctttacccatgcacattttgttatatcagccgggatcctgattgtatgcaaacctaggtttcaagtgcaattgtttaattgaactaatttgattttaccacattatttggaaaacacggaaaacattctgaaccatattatttgaacgtgggcaggt

SEQ ID NO: 69017 - DNA, 794 bp, Prunus persica
  Intron number 3 from transcript ppa019104m (locus ppa01910 4m.g) derived from phytozome v7.0 (chr-ID scaffold_7; pos 16089835 to 16090628 reverse strand)
tgacttcagtgttgtaccagctctcgcccccagaggtaaattttgagggaaaacggcgagaaattgtttgagatatatatatatatatatatatatatatatactattatataaacttggaaaacgtcaaattattcccattttaagtaaaacaaatctaaatatagaatttagtttatgtcttcctccctctatctcacgcattccaatttcatcattcagtcaaatttcgtaaatttttccatctattggtgaaactcgggtataaatttagaaactatgatggttaaaaaaaaaacaactgatggtgaacctagaaatatttgtagggggaggctaaattttttttcaatatattttcttcattatatttagaactttttgttattacacaacatttgaaacagaaaaaatattggaaatattgataatgaagatttggaagagattaaagggaaacaaacaaagaaagaaaaaaatatttgtccatggcgggctgatttatttctttgattggtctagattgagccatacacaataagcctgatctcaaagtgagcacatgctattctattcgtggatccgcccttgaaaaaaaccctattaaaattaagggtgctatagtaattatgcccattttatgcatacggaggagtctagtctacatccatctaggttcaattttccaattggttaagcttctacgtttcctcttttttctttcatttgtttatttatttttgatttggatgaaaacaggacttggcactggcgttgtcatcgctgagatattt

SEQ ID NO: 69018 - DNA, 476 bp, Prunus persica
  Intron number 3 from transcript ppa024161m (locus ppa02416 1m.g) derived from phytozome v7.0 (chr-ID scaffold_7; pos 11763349 to 11763824)
caagtggaggtttggtttcagaacaggagggcaaggtgagaaaaattcttcaccgagttggagggcattgttgggaatcaaagggaaaccaggggtagaattgtcatttaaactagtttttgttttgtttttggtaacataccaattgctttcacaattctcatgtgtctgcattgaatgagatgaggccaaatctggttggttcccataaataatattccccaaacatgttgcctgtaattaaatgagacattgatgatcatgtctaccaacttcattgctcttttgggttttcctaggtgcctgttccattttagaatttgaaagattatttgtttggttcatggtaaaatctaaaatgggttctaactaaccaatcatttctttcaaaataacacttttctatttgcattcattgttaatctgttaaataaaatgcaggactaagttaaagcaaacagaggtggattgtgagt

SEQ ID NO: 69019 - DNA, 881 bp, Prunus persica
  Intron number 1 from transcript ppa006069m (locus ppa00606 9m.g) derived from phytozome v7.0 (chr-ID scaffold_7; pos 21457093 to 21457973 reverse strand)
caggtgtatattctttagcttgtgttttcattctgcaactttcagtatttatgtgttttctcaaaatcttagaatcttatagattgatctaattatctcataaatgcgccatttgaatcttcttatgggtgtgttctgtcttcaatttctcgcggacttctgaaactacgcgctctatctgtctatctctgtgaatttttcaagcaattcaaaacagcttcagtgtttaaaaaaaataaaattccgggggtgattctatactcagctttcccttgttttctcaacaaagtttcaaaattttgttgttcagaactgtctctgcagttttatttgaattgagaaatcacgatgtagtggtaattccagatctcgaacttggtttctgctggtttctctccaagatctctatcctgagctttatccaccaaaatttgcaatcaattttttttgttttagtcaaactcagtggtcactgaagactatgggagtgatttatacctcgttccttctcatggatgcataaattttgttccttgactgatgggaaaccgcagtactaatccttatgggaaaccgcagtactaatcctcataaatgtgacacggtcttcatgccacttatctgattaatttcacaaacatctgaaaattttgagtttcctgccctttagttaactgatcttttagctcaatttggttgcataagttcagtcctgctggaatgttggttgaatttttcaatatctgtggaagttgtatcttgatgttctatttcaaaatgtcaaacaaagcattagaaagacgtgtgattgaagaattgttgttaaggctcattccttcattgcagcaacggagaccagatatcttaacgctagcaatagg

SEQ ID NO: 69020 - DNA, 859 bp, Prunus persica
  Intron number 1 from transcript ppa007173m (locus ppa00717 3m.g) derived from phytozome v7.0 (chr-ID scaffold_3; pos 18843167 to 18844025 reverse strand)
accctcttctccagcctcaccagcttgttaaccaggtttgtgcttattggttctggctaaattttgttaatttggatttaaaggttggaacttggagtggttgtggagttaatttgctgtttcctcttgtgggtattttgcaatatagcatttgattgtggaaattaatgagattctaattttgtgattatgatgattgaattttttttcgagtttttcttgttttgtttttggaaaggaaataatgactgaaaggtcaagacttggtttggttttaggtaggatttccattttgttcatactaactggtttcttgggttaatttttttcttcatcccgaggcggtaatattgggctgtaaatatttgttgttctactttgtatgtatcatctcttctcttctcacacgtgcacaaacggacaaacacatgcatgtttgtctctgcataggtgtatgcctctatttgtctggacgtattttatgttaaggatattggacttttgttttaactaaatttcatatatttggaaatttgttttttctgtttggatgaaatttacattttaatgcatgccgatgtttatactcatgtcgagaactggacgtcatgactatgcatttaaataaagataaaattatcaaagagaattatggtgatgtttaccaaggtgttctatgaaattactttgttgtgattgctcatatatgctccattttttcactgacaattgatagacagccacacgatatagagggaatttgtaaaagaacaaaaacaaaatcccatcttttttccgttgttgtcattgaatcgttgatgaattcttttggttcctaacaagtttttttttggatagg

SEQ ID NO: 69021 - DNA, 594 bp, Prunus persica
  Intron number 1 from transcript ppa015206m (locus ppa01520 6m.g) derived from phytozome v7.0 (chr-ID scaffold_6; pos 8963598 to 8964191 reverse strand)
aacacccgaagactagttcgtcgtcaggtaaattgattttgtcacatattttacccgagttttttgtgtatgaatttctgttgaaattcttttcttacttttcaatatagatgtttacaccagagaaaacattccactggctaaactttcttaacttctggccattgtacttttttggtacaagtactcccaatttatgaacaaaccttgtttatttgagcaccttttctgccgttattcatccatggaaatccttcaatatttcaaagatatatatgtttaatgaacatgacgcccttgatattttcagtgttttaacaaccaattctagatcttttgaggtataagttatctcttgcacttcaaaagtctttcctctttgttaaattcgtttgatctcccaaactttttatggaacctattggctacccgatagtcactaagctaagttttcttttgtttttgaagagaagatattgtgaataattaagtcttacaatgttgatcagttcatgaaacaaaagtgagaatgcttataatgtaattttttgttccacagaaacgaaggataaaccgactggaggcattgtttgg

SEQ ID NO: 69022 - DNA, 848 bp, Prunus persica
  Intron number 2 from transcript ppa000071m (locus ppa00007 1m.g) derived from phytozome v7.0 (chr-ID scaffold_4; pos 25610943 to 25611790)
agttcaagaccttgcttctccaacgactggagagggtaagcccctacgcctaatttctcttatttttttctggttttttcatataataaaattaatacaaatctcatttttcattttggaattattggatcattaattaattttgaattattgatttatcacctgtggcgggaagatgtttcgatgaacgagcagagaaatataccgtatatactgaaattgaaaggtgatgaaggagagtcgtaatctaacgtgctcaagttcatgccacaatgcttggacgctgtttgatttaattgctatggcttgggcccgccgtccctttttttgtttttgtttttgagaccgggcccctcctattttaaaactcctatcattaattaattaattagccaggtggttaattatgaaattaactgtgtccgaagatttgccttccccaaatttaacctaacccgttacccagtcaatatccagaaccagagaagagaaattggtagctgttcatataccacgtttcttcaaatttcactaatttctttcgtagctcgtatgcatttgaacttgtttacaaattccattactggatttcttatttctccattctgtgggtgatgattgccaagggatgagttcaaatggggtggtaaattggattttaataagagggcagaggactttttcactgggtttctgctggcttcatgttgaacaacactctcttctttgctttgatcagtgccttgtcattctcagttcccaatagaaaatgaagctctgaaatttgtctaacctgttgtattatatttggcattgaagctgatgtaaaatttgtttgagtcaggaca

SEQ ID NO: 69023 - DNA, 810 bp, Prunus persica
  Intron number 1 from transcript ppb025124m (locus ppb02512 4m.g) derived from phytozome v7.0 (chr-ID scaffold_1; pos 43876299 to 43877108 reverse strand)
tactggcaagaaattccacactcacgatacattgggtaagccttaaattgtccaacttttatgttgaatcatgtctaactttgaagtataaagttgttgaattatgtcaatttttattttccctttgttttctgaaatattttcatattcgtgggttttgatagatcttaacgaatgttttccgaaaaaacacattgcagaaaaacggaaaaaagaaaaaaaatttgtaggatgaaagttatgattcctcaaaatatagaaatgaaaatttgaggattgagaaaactatgacaaggtattgccatattttgttaggagggtgaaatttttgttaactcgtaggatttttaattggagtctaatatatcaattcgtttagtaacactcaaaatccactttggaggaggtcatgaattcaaatttctttggcctattcaatcaaataattaattattggcttgaattttcttttttctagggaagatctatgaagatatcttcatataaaaaagcaaagagaaagagaccccatgccaacacatcttagcattattttggagagcatgatctccaaattttaaaaggaatgtcttgtatttttatttattttgttaaacgacgggataaaagggaaagatatccatctttgtattaatcctttataagtatttagtctctgtgtctaattattgaatacaattattgttaattttcaaaaaagtgaaagatatcttgtttagtacttaagagctaaaacacattaatgatcttgttataatgacattttatttgcagtgttcaaatacaata

SEQ ID NO: 69024 - DNA, 483 bp, Prunus persica
  Intron number 1 from transcript ppa001778m (locus ppa00177 8m.g) derived from phytozome v7.0 (chr-ID scaffold_6; pos 25535198 to 25535680 reverse strand)
agaaacgtggcatttcaagccttttccctattcaggtactttgttcctctctctggttttgcttttcttatctttttattttaaaagttgtgttttttctatttctgtaatgatgaacttactctaatttagtttttttcacaacccttttgagcatcatcctttagattgtgtgtttgtatggcaatatgtaagctttctgcagattaaaacattttgtagccattttggtgcccttcataacattatccatcatctacctgcattttctttgttcatcctcccatgttgtgttgtttgtcttgttctggcgtgtaaatattttagtctcatcacacagtgaccttttcttgtcaaatttaacatttttatatttatgtatcaaaatgtgtttatcaaggtatgtgtataatgattttctagttacttttttctttaaaaattttagagggctgtgctagtacctgcattggaaggtcgaga

SEQ ID NO: 69025 - DNA, 680 bp, Prunus persica
  Intron number 1 from transcript ppa006908m (locus ppa00690 8m.g) derived from phytozome v7.0 (chr-ID scaffold_1; pos 34533846 to 34534525)
cacttgcccagaaaggccatttcgtttcttttcaggtagctcacttaagcttcttacttaaatttgctattcttcttcttcttcttttgtttttagtttttttagtaacagatctctgctgttgatctcgtagcactagatcaagatgttccctttttgttattttattagttggtttgattgaatagcattttgggttgtctttggagtgagtgttctttaatgggttacctttttttttttttcatcttcacttttgtggaaaataagaatttctttagctgatgggtaattttttagtttgtttatgcaggccatggtgcccagctaaattctttaaaaggaaatatgtagttatttcagtaaacaaatctaaagttaatattttctcactaattatcttcaacattgtggtctggaccatctttttctgccttgcctaacttaagtctcactagaattccatcttaatatcacgaaacgaatgtacggccgagtggttgcatgggttctttttaattttaggtattgatgtggctttgtgtcttaattgtaatggtttgtttgaagtcattgaggtcaggttctatagtgccccctgacatctaactttgtgattcggtccatttggtatgaactttacagaagggaattgaagatacatttaacacgttgtggag

SEQ ID NO: 69026 - DNA, 736 bp, Prunus persica
  Intron number 2 from transcript ppa014374m (locus ppa01437 4m.g) derived from phytozome v7.0 (chr-ID scaffold_7; pos 14198517 to 14199252 reverse strand)
ttggggtatggcagctattttatagtttatttacttttggtagtttgcatgcacttgatccatgtatattagtatgttttgcatttccagtttggaaataatatgtaggcttgaagaattatatgtatgaatgtatctatgtgttgctttatgggttacatacagatttgggtgaaaatttaaaattgtaaataccatatgtattgcttttacccattctcccttctgttaatgcatgctggttttttggtttttcactaaagacactttttagcccatggctggaggttctgaacatgtttatatggttgtgcatatatgcttgtttggatgttaattgggtcccggatgtacgtgtttggtagagagtttagtcggtgccgtttatagaggaacacgtctttcccaatttgttggatacaagtttttgggggaatgtttatttggcatttcttgctcttccttgcagacctcacccgcatcaaaccaattggaatttttttaaattagtctggccacaattgagatcagttctgttgctttccacatccataggaatttatattgttctgcatttgcatcctttgcagttgagatactttggcagcaagtggtttacagcattctcaatatttaatgtacttgtgagaatttctcgattttgatcgccgtaactggagatccttacgagttttacgtcagaacttgatgttttctttctttgtgcagaaacgat

SEQ ID NO: 69027 - DNA, 638 bp, Prunus persica
  Intron number 1 from transcript ppa014374m (locus ppa01437 4m.g) derived from phytozome v7.0 (chr-ID scaffold_7; pos 14199286 to 14199923 reverse strand)
cctttgtcatcgccggcgctttcctcggcgagcgggtgagccttttgcagctttagattatgattttcctcactgaacatctccttttagtttttgttctgtctctcttatgatctgtttggttgctaggaaatctgaggaaattaaaggtgattgatttgcgattaggtcaacttagtctagtatgaagctcagagatttcagtttagtttgtggtatttatttaattggccttggaattaaacgggagcggttatttttattattgtgttagtgatgaaatttgatattgtttattgcgatttaatagatttttagcaattctttttctacctcgaactctataaattggtttcatatctgttcatatatgcaatgttaacgtagagttgctaaattcatcaagtcgaggctcatatatagtgactggatttgcatttcagttgtagattaagtatttttcagaattttgggatatatgcatattcctgtttgagttctttctctgcttgctgaatttttttgcttttgttttggtgtataagctgagtgtcatttgatttgtgttgttttgtaaatgaagaacaaatatcatagtgttcttacgtacctgatttatcggtttcaggctgtagatt

SEQ ID NO: 69028 - DNA, 725 bp, Prunus persica
  Intron number 2 from transcript ppa007047m (locus ppa00704 7m.g) derived from phytozome v7.0 (chr-ID scaffold_1; pos 29141817 to 29142541 reverse strand)
ttgacaaaggtatttttatttttgtattcgatgctttagagtgctacgttttccatttaataataatggtctaaatctacctttttaaaataacacttgacctagatttgtaggaaacatcatgtatatcatgtacttgttttggattatgtcggaacatagttttagctttaagaaagagggatcaaaccaagaatatagtggttacaaatgagaattccaactggcaccagtgagcttataaaccatgttgaattgaattcttgataaagtagtcacagtaggtgagcttggaagtaataaataatacagtggtgacagtaattatgcttgtattatagctaatgtcttgctaaacaaccatcatggaaacggaatttattatatgccattcactacttttgaaatttctatttggtgctaatgtcttattcttgtattgtgatttccctgtttattcacgtctggtttgagcccacctcctgtcattccctaacatacaatttgttttacttgaagttggtgatgttgttttgattgccctatttggttcgcatctgatttatgccaactatttttggtgttgaaattccttctcccaccagataatgttgctcaatcttcaattctttgttggtttagaatgatgacaagttgttttgacttactttatatacctgaaaatgctagagtaagagctcgtctggtgaaggttcaggtgcatc

SEQ ID NO: 69029 - DNA, 548 bp, Prunus persica
  Intron number 1 from transcript ppa007047m (locus ppa00704 7m.g) derived from phytozome v7.0 (chr-ID scaffold_1; pos 29142688 to 29143235 reverse strand)
ctcacttcgacgtcgaagtgaagcctgaggacacggttagcctcaatcgttctgaattcaaatatttaaaatttttaaatttcgtgttatttttttaaattaaattttcaatcgcgcattatgatcgtaattggagtgttttctagggttttggtctcgaatttctgtttgtttcgcaatttggtaaagacttaatgtgcaagctttaacaggtttttctgtttttggcttgtgtacgtcaattggacttaggtttttgcttctaacacgttgagtatttttggtttatggtggaattggagtctgggaatttacgctttccttgttaaattacttgttccttatttttttcttctttcgtttatgtgtttttcgcaattttcaagttatacggtatggctgactttgcttaattatagagtacattcagctttctagatgcaggaattgtagttcggtgtgcttataaatttactttgctataattactgactactttgtctaaattacattattgatgactaaccactactctttccaggttgctg

SEQ ID NO: 69030 - DNA, 586 bp, Prunus persica
  Intron number 2 from transcript ppa016073m (locus ppa01607 3m.g) derived from phytozome v7.0 (chr-ID scaffold_7; pos 21890681 to 21891266)
gaggctggaacatcagcaataagcattactgggcggtcagttctcttatcttaaccttaatttaatttacttttgattcatcgtcttttttcttttttgttatttgggtttctctcaatttatgaatgaatgatcatgttatttgggtttatcaattatgctgtttgataatcaagaatgaggtccgtgttctggtttcctgtatgtatgtggttaacttgtgaatttctgcatttggtttgcggatttcctgacttactgaaactttttttgatacatataagtataggccatgatcagaccaaaaaaaaaatatataggccatgatgaacttgccagtttttaaatttttttgcgttaatgatgtccttgttgattatatatatatatatatacatattttttgttgggtttgctgatactctggtttcatattctttctttctcaaatcatgttattctgtttttgacattgttaagttgaagaaatgtatggtcgattatgttgctcaacgaatgcttttgatatagattgttgatttatgatgcagtctgtcggttttaccgcggctcccttctttgtcac

SEQ ID NO: 69031 - DNA, 644 bp, Prunus persica
  Intron number 1 from transcript ppa027155m (locus ppa02715 5m.g) derived from phytozome v7.0 (chr-ID scaffold_8; pos 3034818 to 3035461)
agtaagttttttcttaagccatttgatcgtaagccatcacatcttcttatatgtatgcttcttatttttaacttaatcatcgttttacttttcttccttgtaggcagtggcggacccagaaattttttagcagaggtgcaaaattgattaagtatgaaaaatagttttttggaataatcattttctcaagataatttttggcggcttttattccttacacattaaataagaaaacttgattttatgggattttagtatgaagtatatattgacttaatgagccatcatttttagcctaaatcgtattttgcactaaaaccgatttttcatattttgatttgataggaatttgattttctagtatttttatttgaatccaaatggggggtacttccttatttacattataaacttaagtaaatggagtaatataaaaataaattaaagtaaaatgacaaagacatttacttaaatgttgaaaatggaaataaggtaatttgtacaccagttgagcaaaggggcagtttgaagcacctacaatggtttttccggcgagggaaggtgcaagtgcacctccttgcgcctatgtagatccgccagtgcttgtaggtgtgaaagaaagcttattgaaaagattgttcaac

SEQ ID NO: 69032 - DNA, 893 bp, Prunus persica
  Intron number 1 from transcript ppa026574m (locus ppa02657 4m.g) derived from phytozome v7.0 (chr-ID scaffold_2; pos 13953044 to 13953936)
aaggtacctaatttaggtcccgtgattttcttcctcttatttttttcatttgttacaagggaaatgaaaaataagcaattttctcttcaaagtacatatattttctggagaataaaagtaatagagatttctatgaacttttgagcaaagaaaagcaatagatttctaaactttttctcttcttctttccttttcttgtgtacattagttcaatttggatagagttgcattgcaaccttgatttcaatttggttatataatctaaaaaattctttcattttaagtagatatttgatttttagatttttagtggagttgtaaagatcttattttcattataggagataacctttttactgtctttcctgttatcacagttttttcctttctataaccttcaatttcgttcattctatcaaactcagatggcgaaattggattgtgtagctccatgatctctctctctctctctctctctctctctctctctctctctctctcatatctatcatatatccaatttcttttcattttcccaatcattcttataccttgaatttctattcaccattttttgttgtcttgaatttcattcttagtatcataaaataagattcacagatccatgtatgtagtgcttttatattattagtgaaataaatcttactatacgtgcgtacgtactgatgcatgaccgtcaacgatgtctgacctccacttaagtttttcttcacgtaacatatgtacccgttttggaattatctgatacgtatcttttgaactttttaactagagtatacattagggtacttcatttcactcattgtatatagattgtatgatatttttgtggaatgataattattcttttgtgctatgtttcagttgtggca

SEQ ID NO: 69033 - DNA, 1009 bp, Prunus persica
  Intron number 1 from transcript ppa001919m (locus ppa00191 9m.g) derived from phytozome v7.0 (chr-ID scaffold_7; pos 6673514 to 6674522)
gaacaagaaactgcagtttctggtcaaaatctgctacaaacaaccagaaaccaaaaggcaaagtactaaaacaaatatcaaaacacatttaacttcatgagctgttataacattcccataaaccagcaaaaagcactctgaaattgaattatggaatcagaaactgcagtttctggtcaaaatctgctacaaacaaccagaaaccaaaggaagaaacagtactgaaaccgtcgtcggtgtaaaacctaaaatcgaagagagtactgattcattttcttacggtttagcttcggtcgtcatcggtggtcgttgctcgtcgtcgttggtcgtcgtcgccgttggtcgtcgtcttcgtttctggtcgtccccgttgctgctcatcgacttcgtttttggagaatagtttgtaggtttgctgtgggatatgaaaggtcgcgcgaaaccagtttgcaatagcacatgtagtaattttagagttgttggatgtcctgttggtaaaattaggtggttttggttttatattaattaaacaaaattaattatctttctttcaaattaattaagttttttatgggttaaaactaaagagcccaaaaaaaatccattaaaaccacaattgaatacacccaaagacccatccccgctttttcccctttcttcactctcggcagctccccgttctcaacctccgaccaccctcaccaaaacaaccacagccaccattttctttctccccttctctctcaatcactctctgaaccctaccaactgcaaattccaatgttgcaaaatctaaccaaatagtgatcaagacttcaaatttccatgggaagcaagcactaacccacaaccaggatcaaccagagacggagagagagtgagagaaacttgaatatcggctggctaagctttttttttttttttttttttgggtttgatacattatttagagctgagttgtgggttttgtgagtttcccaattccgatggagaatagttcagcaatatc

SEQ ID NO: 69034 - DNA, 378 bp, Prunus persica
  Intron number 1 from transcript ppa013947m (locus ppa01343 5m.g) derived from phytozome v7.0 (chr-ID scaffold_5; pos 8712963 to 8713340)
ttttgctttctgggttcgtcttcagacttcacgaggttcgattttcatctactatttcgtattaactccctttcatttttgtaccctgttaatataatctgttgataataacccagtagtcttttgatgtcagaattgacttctgattgtctttctgtgtgtcaaaatctgagttttagatggtgaatttcatgggggtttgattttcagtaatattttgtgtttttttctttttaatttcaatattttataatccatctgatcaagggtgttaattaagagataaagaagatgttgtttacttttaacttgtgtaattgaactgaattgcttttgatttttactttttgcttctgttgtatgctaatttcaggcagc

SEQ ID NO: 69035 - DNA, 721 bp, Prunus persica
  Intron number 3 from transcript ppa013947m (locus ppa01343 5m.g) derived from phytozome v7.0 (chr-ID scaffold_5; pos 8713510 to 8714230)
ctaggatcagagagaaatacccagatagaattccagtaagaatttgaaatccaaactcagttatccattttcaattactgcccatgatgtgaaatacttacacatgatttttatgtaggaaattatttgaatggttctgtattatttgtctctggcactaaatttgcgtaaattattatgcttgtctgttttaatgagattgtatcagctaatagagaagttgatttcagatgtgttaatagtttccacaagcatgcattcttttttggatttcttacccatgtgtgtaaaatcttcattttatgatttgaaggtgattgtggagaaggcagaaagaagtgatatcccaaacattgataagaaaaagtaagctttactttctctcttgatccctgatatataacattgctgcttgttgattccatttttcttgtttttcttagttcaatttctagcaaagtttacatctttccaatttaggaccaaagtttaactggccctctcttttctcatctaattcttccaaagccttaagttggatgttctttatttgttatgtttaatatatcgttattggtaaaatggcgaaaatttggttatgtttgattgcctctctatgatatttcaacaacatccgttgctttttgactgtttctttgactataaacggaatctgaaaattacaggtaccttgtcccagctgacctaactgttggacaat

SEQ ID NO: 69036 - DNA, 374 bp, Prunus persica
  Intron number 1 from transcript ppa005969m (locus ppa00596 9m.g) derived from phytozome v7.0 (chr-ID scaffold_7; pos 19411618 to 19411991 reverse strand)
aatctcaaggtatcgcaagctcgtctgctggaactgtgagtgtatttctagctcttcgtcttaaatttcacagatctgttagcttactgctgaattgtgttttgagatattcaatacttgttcgtatgaagttttataattatgggtcgttttgaacctaggaaaaggattagaaaagaaaaagctttggggttttctgtgaaattgttgcatcaggtggaaaaaaaaaccggtgttgaactgttgctatgctaaactttcccagatgatctaatgggtttttgttttgttttgtcttaatttgaattggttgcttttgtgcttcagataacaaatactttcatttaggaatccgagtcaattaagtagttgta

SEQ ID NO: 69037 - DNA, 1016 bp, Prunus persica
  Intron number 1 from transcript ppa021273m (locus ppa02127 3m.g) derived from phytozome v7.0 (chr-ID scaffold_3; pos 14017428 to 14018443 reverse strand)
gctccgaattggagggaccttataaactctagttggtcagtacccatttcatttcttttatgatttttgtaaggtttcattgtcttcgttcttggattacagtgaatggccaatatgttacaaagctttgctctttagagagtttcacatttttgcagggcctggtggcagaggaggtttctctgtctttaagaaattctgtgaaatgtgttgaattgttgcttaaaacacattatcagaatgggtttcattacaaatttgaaaatttggaaacccatgcttggatttttttttggatataaaggattattttgagttttattggttggttggtgtagaatatagaagggaactacctttgaaacagagaagatagcagagtttttgtcactctatgttttgagcttttattaaagagttaataaattagggaaatgcatcttggatctcagatcatttcaatcaggatcagccgagaaacttgtagcaaattttgctgcattttggtgggactttccttaaattatggtctcctagattcaggaattttgatatagaaggttattattctatgatgatatggaatacttatgtaaagttagttccattttagtcagctcaaattccaattatagttaagtctccaattatagttccattttgattgtttttttttttttttttcattttgattgtgtttgcttggtttttttggcataccatgctatctagaattaattgagcataaattacagacacaaatgtgcaaagaatgctgttgacattgttaatttagtgatctggatttagaatcattgaatcaaatgctagctttgtttcaaatttaggcagacttggttctggggtatacttatgcttgcctccctcatatgacatggcacaactctcatgtagtatgggggatgaaaaaccctatgcgccactaattttggtaaatgactagcttttcttttcatacaggaaggacgggaattataaacgaactgtaatcgcat

SEQ ID NO: 69038 - DNA, 524 bp, Prunus persica
  Intron number 1 from transcript ppa003682m (locus ppa00368 2m.g) derived from phytozome v7.0 (chr-ID scaffold_6; pos 25100067 to 25100590)
aagctactgttactcgccttcacccatccactcaggtaacttataaacattcattttattaggatgtggattacagttttctcatgttttctggtccctgattgccttatagtggctgataattgaactttagaaactacttccgattgtgggtgaatattgagattttcatccatttacaatgtatgaatgtactccgtagatgctgtgcaatgttcatggtgtagcaagaatagattatgttaccatagcataggtaattgaggacatatgtagcatctcatgtttttgcagtttttgttattaaaattttatatcctttcttcaaagcaagtgtttcgcattcatctccattgatttctaagcacatgtttgattatatgtcttgtgctatagaacaatgcaaacctaatcatatttagcattttgcctctgcttctacacttcagatggtttgtgaaataatctcacttttttttcttcttttttaatttataatgtttagggtttaaaggagttcataa

SEQ ID NO: 69039 - DNA, 545 bp, Prunus persica
  Intron number 1 from transcript ppa003032m (locus ppa00303 2m.g) derived from phytozome v7.0 (chr-ID scaffold_5; pos 16053423 to 16053967)
ctgatcaccggaaaacccgttctaccggcaccgatgtaagacctgaccttatatgtgtacctgccattaacttgtagtttcaagattagaagattctttcttttaagtttgaattgtgatatatgcatatggtttttctagcctaactcatagctttgtttttggtttatgcaactatgctgtgaattttagagatgtgatgtatgagatttgatcattattttgtaatttctagggtttccagtttgaattttacgcaagtctcaaattgttagtagttctttgaaatgcatatttgaaggtgatatatttatgcattgtgtctaatctacaaaaactgtattgctcaacacataaatcttgtaatgaattgtatgtaattgttttcttgataggctgttttggtatgcattatgcacctaccatatggaaatcctaaaatcttgcaaatcctacaaatagtgattgtatattgactaattttgttgatcctccaacgttcttttgcaggaggagagtgagaaagagagagagcttgaaggtgt

SEQ ID NO: 69040 - DNA, 562 bp, Prunus persica
  Intron number 2 from transcript ppa026972m (locus ppa02697 2m.g) derived from phytozome v7.0 (chr-ID scaffold_2; pos 20269108 to 20269669 reverse strand)
ttcctggtaacccattaatctttctcacttattcttcactacccatttcctcatttctactggtactatgcttttgtttatataaatttatgatcatgatcacttctgttgtcgggtagttcaagacttgaagtgggttggtttcaatatcttgttttgtgttgcatttcgcttttaatcctcttgaaagatccaacccatctcacatttctgttgttctgttttgttgtatttatgatattgttcagttttgttgtatgagtacttctggaaagagccaacccatctcacatacatttctaatgttctgttttgttttatatttaaaatttatgatcatgttaagtttttgttgtctgagttctggacttgaagtggattggttttaaattttcaatacttagttttgtgtcgcatttcgatttcaatgttcttgaaaattttgatcatgttcagttcttctgttgagtacttgaagacttgaagtggttggtttgaaattttgaaaattttgttgtgtgtggcatttcagcgttctttgaagaggcagactttccagatc

SEQ ID NO: 69041 - DNA, 845 bp, Prunus persica
  Intron number 1 from transcript ppa026972m (locus ppa02697 2m.g) derived from phytozome v7.0 (chr-ID scaffold_2; pos 20269757 to 20270601 reverse strand)
aaggtgaattgttggggttggaattagaaaagtccacaacagacataaaatttaactgaggtacgaaataaaaagggaaattagttatgctaacgaaagagaagggaaaaacacttttgaggctttagaaaaagaaaaaaaacaaggacacatgtcaatttatggttgggccacattattaggtaagaaagagttcctaaagagggaaggattatcgcaaacttaaatagattttgaacaccacagcgaacatggaacgtgtaaccgtgtcacgaacaataactcatgaagaaggttttgacccatgtatcaagagtctagaatgttcttcttccccccaaaacaatgattaactgaagaatagaaacgtactaaagctcaacttacaagaggggtagatgagattcccgcaaaagaacaaactaaaaattaacgcgtgaaagggaatgagtgtgtgggggctgcccttatatgacccaagccatgtccttcttcagtcaggtaaactcgaacttgtatgagaagctcagggacttgggatcaattatcaaacacattgacgaaaacaaatatatataaaataaaaaaaatcatcaaacaaatgtataaaaacaaatagtcaaaagaactagtgctttgagttagtgggacctggttagtgtttagtgtttataaatacttcactcttattactgcttcccaaaacatttgaaaatcacagtgccaaagttcataacaagaaggagagatgagcagcatcagcacaatggaagaaggggattcaattcctgtggtcctacctgggttcagattctaccccactgaagaggtgctggtgagctact

SEQ ID NO: 69042 - DNA, 376 bp, Prunus persica
  Intron number 1 from transcript ppa011772m (locus ppa01177 2m.g) derived from phytozome v7.0 (chr-ID scaffold_7; pos 16614625 to 16615000 reverse strand)
gcgcttctcggatccaacatagccagcgaggtcaagtttcaccttcctctgattttgctttcctttctttgctcaatgacatttttctcttttggcttgctctcgtttcaatttcgcgtcaacagttgtaacaggctgatcccaaaattcgaattccaatttgatttagggattcgtaataactgataatatgaaattaaattgtttattcaataatatttccgatgattcactttaaatttttgctgatccggtgcaagataatgaattagaggaaataaaccaatgattttaatatcatttccagtgagaaattaagaaactttgattgtcaaatgcaggtaggtttacgattgctcctttgccctctcggttc

SEQ ID NO: 69043 - DNA, 984 bp, Prunus persica
  Intron number 1 from transcript ppa018179m (locus ppa01817 9m.g) derived from phytozome v7.0 (chr-ID scaffold_6; pos 25899631 to 25900614)
gagtaaaaattacaaccctatctcctagtttcggtccatgcatgtcacaaaatcctcatatattttttagttttattgtatcatcaagtcacattagcttgctaggtttgctatgcatgtgtcaagtttcatggatttttgtctctctgacttgcttagtttatttgagtcaaatgagtttcaagattttcaatgtataaacaagctttccctgtttgtttcttattattttatacagaaagtgagttttgatagtataaacaagtaattgtttaattttgggttttgttggtcactgaaaaaagaaacaagaagtttgggttagctcttttttagatgataattttttaggagttgttagacctcacttgatctgtactagttagttgttgtttctttttagggtttgtttcccctatctcatcaaaaaacaagaagatctagaaaagaacagagaacaaaatgtttctctgtcctttttttttttgttcttcatctcagttagattattattttgatcaaatagaaactgtttattgatttgagcctcttgttcttccttccttcttcgaaaagttaaagtggttttaagagttttttaaggctgaaagtgtgcaattaatttaaagttgttcttggaaaatccggagacgcaaaaaactctgatgcagaattgaatgagatctgttttggcattgaagcacgcgaaaaacgcagaaggccatgcatgataattgtgtccaactttttatcagtctgtctgtatttgaacttaatttaacgtgccgcctagtggtttgacgggtggcataagtcaaagccccaccagctttgcatggttgccatgtcatctttcaccatttgtcttttccttcttctttgcttagctctaggccatagctaggtccaaagaaaaaaaaaatctatttcaagtttataagatgtttttttttttctgataggaaaacaagacccaggatcaca

SEQ ID NO: 69044 - DNA, 620 bp, Prunus persica
  Intron number 1 from transcript ppa007589m (locus ppa00751 5m.g) derived from phytozome v7.0 (chr-ID scaffold_3; pos 826530 to 827149)
agacacacagtccacagacagagaactcttaccaggtattcttttgtttatgatataacttctttattttcctctcaaatcctttttttcttttggcagttaccctattgcatattcaccttagagctattgtatttcctgtgctcttttctgtttatgattatttgttcaatcaattttgaattgaactgccacctctcatatggataagagttcttgaacttttgcagctaaggtaacagattaattcttgtatttgactattgaaacttttttcttcctttcttctgttcttcatgcttatatatcttgtatccccttaatcccttaatttgtttacacaatttcagaaactctcagttgaatttgaagtggatttgcaatgataatatctatcttattttggcttcactagtatataggctgctgattgattgaactataatgcatagaactggaccagcaatactgcacattttcttttggagataacggttctagctttcataagcatcaccctttaattgcaaagaaactgccattaaagtatacaagactggttaactgaattgcttttgattttatgtctaggtcataaaccaaatttgcatcaatctctt

SEQ ID NO: 69045 - DNA, 593 bp, Prunus persica
  Intron number 1 from transcript ppa023863m (locus ppa02386 3m.g) derived from phytozome v7.0 (chr-ID scaffold_1; pos 10683870 to 10684462 reverse strand)
gagtgttgggcacaagggcagacctacgttagggctagagtgggctccaatacagtcctattttttcgagtaggcttaatttgtaagccaaatttagataaatcaaaatttagcccgaaatttctctctctctctctctctctctctctctctctctctctattttctctttcttctttaatcctttcgccgttcttttctctctcttctctcttttctttttctttcttctctctcttttcttgttcttcttctttctctccgccatttttcttctttctctttctttccttttgtctttctctatttgtttctctgttgttttattaagtctctatttctctcttcttcttttttcatacgtttctctatctacacattgatggtggttttatgtagtgaagatgttatgaactgatgttgaataggtggtttgatcatcttgagcttgtgggtgttttgttggaggacccgattatagtccgaatcacataggtgtccaaaaaaaaacttagcccacccttgtaaaaaatcctcggttcgtcattggttgggcagactccgtttggcctgttctctaaggtttcatcatt

SEQ ID NO: 69046 - DNA, 658 bp, Prunus persica
  Intron number 2 from transcript ppa004671m (locus ppa00467 1m.g) derived from phytozome v7.0 (chr-ID scaffold_2; pos 16837922 to 16838579 reverse strand)
acgtccactcccgtgccttcctatatcagccacaggttatcaatttttcagcttagtttctgattcttgtaattgttttcttctttgattattgttgaagtattgctgaagttgctagtctgaaagaaatggtgggtagtctctaaatttccgtctaggtgatatgtttgtgactttatattttgtagaaataagagtttgaccatttatatgttagatacaaaattatatcttgaattgaaaaagtaccagtttttctgagtaagtgtgattaatgttgtagcatatgaactttacttttgaaagtcttttgtgtaagttgtgaagtaaaagtggcatgagtatttgtatttggttaatgacttcagtgacaaataacgattttagtgattccagcgtgaagagcttcatctcttagaataggaggcaaagcatgactttggtttgttggctgatttttccctctcaaaggatggttttgcatgtcctaaagaaaatgaattgcattcctgcaaattcgttagagagagcaaacacaaattcattatcaagtcaaccatgatgatcgattctgagatgctcttccattgttatcataatgaaatgtctgttctttgtggcagtgagcgagagaaggtcaaatcttatcgccaaaaaa

SEQ ID NO: 69047 - DNA, 644 bp, Prunus persica
  Intron number 1 from transcript ppa007813m (locus ppa00781 3m.g) derived from phytozome v7.0 (chr-ID scaffold_8; pos 16165244 to 16165887 reverse strand)
gtggactgttcctatataggtttgaacagccaaagaatgtcatcatagatgagacctatgttcttttcggatgaaacctatgttaattcttggtttttatacaaggcggtaggttttcacaataattttcttacacataagaataaaattatttatttattgacaacgaaggaaaatatcatgtctcactcacttgttgaggaaataatttgagtagaatgtttcaagattagttttagatacgtttcggtttataaatttcatgtatcaagtaaatttgaatagaattatgtatattttttgtattaaagtaaaaattacaaggaaaagccacgagggcaaccaacaatgagggaatcgtagccgttggcaaatttttggtaggaatagggtaggtgatcgtttggttggtacctgacaaacaaacaaccagtaaaaaaaccaaaccctagattgttggttggtaaagtttttaaaaaagaaaaaagaaaaaaaaggggaaaaaatcgcgtgcatttgacgttctaaataacagcgtgaaccatccatccctcctatcctaacaatccttctggttaccataaaacccaaccaccctctttctctcagtgactcactctctcactcgtgaaatacaagtaaaa

SEQ ID NO: 69048 - DNA, 543 bp, Prunus persica
  Intron number 1 from transcript ppa018199m (locus ppa01819 9m.g) derived from phytozome v7.0 (chr-ID scaffold_1; pos 4419909 to 4420451)
gctttactttcgatgtatggatttttggtatttaatgtgcaagcaatttctgtggcttttctttgatatgagtatgtttgattctttcacaattttcaaagggccactggtttcggcgctttctgtagttgtgttaaagatttgaagttcttagtcagccagttgacttagttcagtttatagaaagatgtagtgttgtttgaaatcaggaatttgagagtctattcaaagtgaaggattgaattctgcttggttgcctggaaaatccaagatttaaaaatatttaatttctggaaagtgaagctcatttcaaccatgccgaatagatttattagttctcgctgactaattttcagtttttaaggttcaaaagaataaagtttctgatagtccaagcttgtagtttctttcttttcctgcattgtcttagaactgaaccaaatttttttttccttgaacttgcaactattttaaaattgataactcgaaaataatttcatttgtttccttgctacagtttcatctttctttttcttgaaaatt

SEQ ID NO: 69049 - DNA, 665 bp, Prunus persica
  Intron number 2 from transcript ppa018199m (locus ppa01819 9m.g) derived from phytozome v7.0 (chr-ID scaffold_1; pos 4420528 to 4421192)
ggaagctaaacccagtggcaccgaacttcttattggtattggattctactcctctatctgtgatttttcttatcagttatatataaaactgtggtggccaatatgatatgtggatggaacattcttgtttgatttcgtttatgcgtttctatgctgctctcttttgattcatacttttctgttggaccctattttattgcacttaagttcatttcagtctttcatttgtgtccccatatgatttactttttgtaatgtatatctatctttgttgttgctattttgagtgaagcttgtttatggaacaaatgaagcttgtttgtaacctaaccctttgtttgatttcattcacaaaagatggagttctatgaatcaattgaaatgggtaatattttcatttctataagtatatttgaatccgattattttcttatttttatgtgttctaactcaaattggtttgatttattttattatactttgtagaaatggggagtaaaacatccatgacaaatttgaataagactctcccttcttagtgtgattaagatatgttggaaggtatttttattgcatcttattttaattatgatttgttgatggtgaaactttgtgttaattcttttaagtgttgtgtaggttgctttgtgaaggcttttggaaga

SEQ ID NO: 69050 - DNA, 374 bp, Prunus persica
  Intron number 6 from transcript ppa010965m (locus ppa01096 5m.g) derived from phytozome v7.0 (chr-ID scaffold_4; pos 12471766 to 12472139 reverse strand)
ccttcaagtagacacgtttactttgctgaagacaggtttgagcttcatctgctttttctgtctttggaaaatcaaaattatatctgaataagtggattgctttttaatgttttagtttttcttattgttgttgttagttgtaaccagacttagatatgttggagagaccattttctgtttcttgtcatttttagggagactttcaattacaccccttgaggtttggcctaattacagtcagacgctacatgtttcatttacacccgttttgccaaatatattgtttttgaacgttttttttaaaatatatcttatctggttatttccttttgtttgtagggaggaggctaaagaaattcattcacgttcaaaaa

SEQ ID NO: 69051 - DNA, 419 bp, Prunus persica
  Intron number 1 from transcript ppa010965m (locus ppa01096 5m.g) derived from phytozome v7.0 (chr-ID scaffold_4; pos 12472889 to 12473307 reverse strand)
gttaaggaatagaataccaactcgacatcgttaaggtttggtcactttgattttttgattatttatcttttgtattgttcaattttaacgagcaagttgctgctcaaagttagggttttgattcaatttgtagacttgacttgtaaagattgatatttggaaactacccaagaataaatgttactgttcttcaacatttttaattatagaatttcattaattcctttccctctatccaaatgcactgtaattatattttcgtacagtctatctggagatggttataacttatatatttgttgtacctgcaattccatagcttaatagataccgaacgtttgcacactgacaaactaaaactgagtctttttgctaccttggcagttgatttgtgattgttgcttcatattattcagcat

SEQ ID NO: 69052 - DNA, 313 bp, Prunus persica
  Intron number 1 from transcript ppa001039m (locus ppa00103 9m.g) derived from phytozome v7.0 (chr-ID scaffold_7; pos 5068204 to 5068516 reverse strand)
aaagagggtgacatcttctacttgcttactcagaggtttgaactttgtgtcttgtttgtctaaacataatattatttttcttaataacatgttgcatttgattattaattttttaaattatcagaaatttgttcttctttgtgaaatgttcatgtttcagtgttttttaaattggtttttgttaaaagaaaaatcttggtttgctgcaaaacaggctgtaaattcatatgttctaatgaatgcttttgttttatgggctcatcttgaatatgaaaattgcttctaatgtctttttaattggttcccaatatag

SEQ ID NO: 69053 - DNA, 938 bp, Prunus persica
  Intron number 1 from transcript ppa000611m (locus ppa00061 1m.g) derived from phytozome v7.0 (chr-ID scaffold_1; pos 39070725 to 39071662)
aactcgttcggattcgtcacgattcagatagcgcggtaaagtgttttcagagttacccatttcgatttttttccgatttgttttattaattgtttgttttgatgtgggtttttgttgattttattttttatgtactgtgtggatctcattgttggctaggtggaactgagttttcagtaaatatctgtgttcttttgactgaatcggaaatgggtagttttagaaattggatatggagttttgattgagacaaggggcagtggatgttacagtcaaacttgaagattttagtttggatttgttaaagctctgatcttgtagaaatttgtttgctttatgaatagctatggaatggtaaatgtaatttctatcagatcttagaaatgtgtttatcaaattttaatctgtgatgtctatagctggatttgccgacacttgttgacaacccaatctacttattattacttttctagtttgatacttcttttatttttctagaatgaatctaagatcttgatagtttagtcctcaattgtcggtcatctcagttgaattcagctcaatgaaattttagcttctttcttctttcactgactcatcactcataacacatgcctgtgatctgttctctgaactgtgagttgaactgcttgttaggcttcgtggtttacatttcatgtgattgacaatgccagtgtaactaatgttagtttaacctttcttggaatgaaattctgagttattgatcaatttcataaagactttgatcatggtaattaattatgtgcatccttcgagtttcattattacaaaatactgcatttatcaatgaaccttttatttgctaaaatgctactttcaataaatttcctttaacggttttgaaaattgtcattggtaatgcagcccaaacccttaaaaaatctgaacgggcagat

SEQ ID NO: 69054 - DNA, 289 bp, Prunus persica
  Intron number 3 from transcript ppa022293m (locus ppa02229 3m.g) derived from phytozome v7.0 (chr-ID scaffold_1; pos 33335991 to 33336279)
cccaatctacaatcgcctagggatcaatatttttggtaagtagaattacttcatttgtgggagatagcttacaaaacaaacacatgcctgtagttgccaggaacttttctgtatggtcggggatagtggaatagattgttgttgcatgttaatggctgaattaatcaaccagtaacatgtgatttaatagtctcttcttgtctgaactctgaaccatcttattatttttcaatgtgacttgtttgaatctgcaggtcttggatttgccacctccctcacattcatcttt

SEQ ID NO: 69055 - DNA, 868 bp, Prunus persica
  Intron number 2 from transcript ppa000016m (locus ppa00001 6m.g) derived from phytozome v7.0 (chr-ID scaffold_1; pos 46044518 to 46045385 reverse strand)
tataagggatctcgtggtggagtttaaaaaggttttctcttttgcttcagtggctgggtttattttgttattatgactttggctaagtaaagaggttttccttgttccttatttcaagttgagctcagaaaagtattgtgaggcccacactagtggagcatcactagaattaccaataagggaatgcttgtatggtgtaattagtaatgtcatatactaaatgcaaattatcatgttaaatctagtgttagtaattttgtgacataatgtgcctaattcatgctactaaattactattcatgtttctcatgagatagaactcagtaattggcatgctaaatggtatcttataatgatttaagtggactgcttcactttaattaattcaatatggtattgatcgacttatcctcttgattactaatacaaaagtttccattaaaaataaaaataaaaattatcctactttgactttcaatgaggattctggtcccttgggtgcttcattccatacttattttaaatgcatttgcttattgaggctttggtccaaatgggaaggtgctttattatcttttcccccccaatggctttgaggttttgaaacagagctaagatgttgtttaaaaagcatgtgtatgtgcttgtggttaattgagtttttgtgataaatctctcgagtgctctgttgctcttactctacctggtgccctcagatactgtttggcatcttctgtctatgattgttaatgggtataaattttgttctgtcagaagattagtgtctatacaatgatgatattcgtctttttacaactttgataattttgcagggtgctgttgaatctgtttctgtcggtgaaattaa

SEQ ID NO: 69056 - DNA, 714 bp, Prunus persica
  Intron number 1 from transcript ppa019001m (locus ppa01900 1m.g) derived from phytozome v7.0 (chr-ID scaffold_3; pos 3212590 to 3213303 reverse strand)
aagattcaaactgttttcagaggctatctggtaagtgggttctcagtttttaatccagtccttaccttaaattgattattggtatgtttggttttgcttagagaatgttgcattgaaactctgcttgatatggttgcgtgaaatgttagtaaattttgactacgctttggttggctttatggaagttgttttcttagtttttacttttatgtctgctcgcaaaaagttgtgaaattgtttccaaatcctaatggaacagtagaatacaaacatttgtcgactattgctttcaaatcctatggaacagtaaaaacaattgttttcttggtcaatcaaacggctgagaattgttcttccctcccctgtttctgaccgggctactcattctgtaagcccccatgcccgaatgttatgtgtttgaaatttgaaatcttgtttcttggaacagggtcatgattgtactgcatgcccccatttgtgttatgatttcggttttcttgctttttttttagcaatgatttattttctaaagttggcattggtttttcaccttattttcatttgcacaacttgggctgctacatttgtgactagttttattatgaacttgcaaaacctaccccaacttcctctggtatgtgcattgttctgttgaatctaaatttggttttgccttcaggcacgaaaggcacaccgagctcttagaggactggt

SEQ ID NO: 69057 - DNA, 1066 bp, Prunus persica
  Intron number 1 from transcript ppa001226m (locus ppa00122 6m.g) derived from phytozome v7.0 (chr-ID scaffold_2; pos 15161095 to 15162160)
agcagccctttttgcccatttctgaggacaaaaaggtgaggcctttgttcctgttgcttctagttgcacatgtatttcattattagtgtgaagcaattctgtgcttgggtttgaattttggattattcgtattgggtatattggtttttgttattttgctgatttagtttgccaataatttgaataattcagccctgtagtcattgttgaaggatttttatgtcgcttttagtttgaggaattttactacttcatcaattaaattaccactttattgtgatgcacaaattttcaggctctggttttgcccccaatctatttgtaaggattttatggacccaaaagtttgtgatgattttacccaatggcaattgtttgatgatatggtttgaaaccaacacaaaattaatgtgacctgctaacaagaataatagataaattgggccagtgttaaacacagagaacaatactctgaatgaaagacaagtttaacttgtatgtgaaaattttccttttcatttcttctctggtattgcatgaaacctcttagagaaatgagtttatgctaagagataaagtatcctagttgagtttaatggttcacaaaaatgtgtgttgacttgaaaacaatacgattattaaataggtctgcttgatataaagtcatctaacacgggctaggtagagttaactgttatttgacacaatacaaacatgatactttccatctttaaggattatgtgtgcgcttcttagatatattaactttacaggcccacgcactcctttttttagtcaaatatcatttcttagttaaggtggttgggctctaaaatatgatagggtgggagaagaagagagaatataaatgagatgttatgtagtacttatttggatgttcattgaagacatgaagagataatttaaattgaaggcattcatttgaaagtcaaatgaaacacgtaggtgattttcttagatatatgtaatcttcttgttttttaacttatgttgtcctttttgacgtgtagcttgacattgctgtccttcaatatcaaaatcaaaa

SEQ ID NO: 69058 - DNA, 518 bp, Prunus persica
  Intron number 1 from transcript ppa025453m (locus ppa02545 3m.g) derived from phytozome v7.0 (chr-ID scaffold_1; pos 36444307 to 36444824)
aagaagaaatctgtttcttcaacaaggtccgtagggttatattggtcactctgtatatatatgtgtgtgcgtgtgtgtgtagctagctccctctctgtcactttatcatccaaatatatatattttttttggaattttattttgatttaattagtgcaaatattatacactctcattggtataaatcacacttgtctgtaacattatgcgtgaatgttccaatctgatcttttcaagctccgaccacttcttttgccttctttttctcaaaatataccaacagaaattagtaggaaaaaaaaccaccaaaatcccatttaagccgttatttcttcttttcttttcccttctttgatgggggagcttagatggaagccaccacagtatgctctgctatcactgttactgttaatttctttcgtcaactaattaacttcacacttatcatttgtcatgcattttttttttctttcttaattacaggatacagttgtcatcaaagctcccaagaaatctcc

SEQ ID NO: 69059 - DNA, 330 bp, Prunus persica
  Intron number 1 from transcript ppa003767m (locus ppa00376 7m.g) derived from phytozome v7.0 (chr-ID scaffold_3; pos 15069335 to 15069664 reverse strand)
cctctgatcagccccaggtgattttatgcaatgttcaggtcccagagtttagtaatttgactagtaaagatttgatttttctcttcatttcttacattttctgggttgccaacaacctgtagttatattgctgttgtcttgttgatctgaattggaaaaggaaaactttttagatggttcatgttaaaagctcacattttgatacgaagtttatgtttttctttgttgcccatgtatttacttgtgctgaagtgcttggactctatagcttgttgggtctctttttctgaattcagtatcaatgaatgcatttgatggttttgcaggttc

SEQ ID NO: 69060 - DNA, 390 bp, Prunus persica
  Intron number 5 from transcript ppa012391m (locus ppa01239 1m.g) derived from phytozome v7.0 (chr-ID scaffold_5; pos 3794926 to 3795315)
tgcctctcgctcgaggttacgtttttatttatttataaatattcttgttctttgagttttggtttaatttcactttgaaggataagttaagaatttggattcgtgattctgatttctatttgaattttgggtcttgggttcgaccccaattattgtttttagcattcgattttgttttaagataattttttggtcattttcaaaaaaataaaaaagcctttagtttttttgaagaactaaaaagacaagggcataatttgtcgcttcattttttttttggctttctggctactgaaattgggcttgttgtttggccaaaatggtaatttgacacatcattgatatttgttttcagtcgaacctgcgggacttgcaatttgcaatcagagg

SEQ ID NO: 69061 - DNA, 550 bp, Prunus persica
  Intron number 1 from transcript ppa014690m (locus ppa01469 0m.g) derived from phytozome v7.0 (chr-ID scaffold_2; pos 22115922 to 22116471)
ttgctttcacaaatacggagcgcttgattggtgacgctgcatatacaatctggtaataaaccccaccgacaccatcttcggtaggctcatgatcaattatttgtttatcaaatcagctttgaattttgctgaggctctgtatcatatagcaagtcagtgatcactaggcataacaactaattagtaatatcattgtggcagagtgagagaatgacagaatttggaatagtttaaagaatttttttattaacaaggagagagaaatatttttaaaagaagcctaaatggacaaaaatgcccttattatttttgaatttcctaagaaatcctttacaatttgcatgtctttggtttgaaagtagagggatttttctgtctttttcggaaaggttttggctttttccaaaagtaaaagtttttttgtggctaaaacctaaatttacttttattattgttatcatataccttgtttccttgtggaattgtgtatttctaatttcgtcatcaatttgcagacgcaaaaaggttaattggtaggaggttcagtgat

SEQ ID NO: 69062 - DNA, 411 bp, Prunus persica
  Intron number 1 from transcript ppa003690m (locus ppa00369 0m.g) derived from phytozome v7.0 (chr-ID scaffold_1; pos 27876804 to 27877214 reverse strand)
tctctttctttcactcactttctcctcttacccaggttctctttctctcctctatctctctgttgaaaatctagtattttcatttagaaccacgtggttcctttgctccttaattcaaatggttatcccaactgagcagaaatgaaaaaaatgagaaaccttttctgggtttggataattgtagagttttcttgatggattttaaggtaaaaggcatgaaaaaactagaattttcttaaacctctaaaaccctacaattattaattgcacttcatagtcttcgtcaaagaatttttttttcttacacttccttcagctcaattaccaaatgaatggtaatggttgtgatagtcaacttgtttattaaaatttgcaggtgccatttggattggcccaatagcccgtcactga

SEQ ID NO: 69063 - DNA, 954 bp, Prunus persica
  Intron number 1 from transcript ppa022812m (locus ppa02281 2m.g) derived from phytozome v7.0 (chr-ID scaffold_2; pos 18214384 to 18215337 reverse strand)
ctcagctccatctcggtccttcctccacacacaaggttcgattattttatttctaaaagttcaaggcctgcgatctcagctccgtttggttcatgagaaaacgcaggaaaatgcttcacaaaaatatcgaagtttttgaaattttaaattctcagtgttttagtatgttttagcttaatctagcttcttcaatctgcttttttcttctacttcttgtatttagttgataatatacataggatcgatctcagttattcttccaatcgtgcacgaactttctgtttggctcacgagaaaatgtaaggaaaatgttgagaaaatgaacttttgaatcttaagctttgtatcatctaggatttctcacttatttgagtcactcagaggcctatttcaatttttcttccccatgcatgcaaggttctgtgtctgtttcagaatatgttttgtttgatttccgaagtgtgcgggactatgcttagaaaaataagtcttgacctgtgaactttatgtatttcaatcgcttccagttccaattccaaaggctttggttgatcgctgagaaaatatagacaactgaaagagattaagaagattggattcaaagatttgttcgaactaagccttttgatgtaggtgtcgattcactttctgataggaaaaggaaacatagcatttcattttctttcgaacgtactcacagaaactaacctaaatgaatgagtttgttcagatttgcttctgctttctatgtttcttgctcttgccaatttagtctgtttatgggggggcaagtttttgccctatgtgaaagctttagcaaatatgtgagaaaaaaaaacttaattttatatgtcaactgtgatgaggctaatacagtggattttcctgaattctcttattcatattcttatttgtgtatcttttttccttttaaattcatgcgaaggaggccaa

SEQ ID NO: 69064 - DNA, 248 bp, Prunus persica
  Intron number 1 from transcript ppa007476m (locus ppa00747 6m.g) derived from phytozome v7.0 (chr-ID scaffold_7; pos 22465727 to 22465974 reverse strand)
atatccttcaatttctcttcttcatttcaggtgctctgaataatattttcttttcccacctaacaaacagtctttatgtggaaagttttcttattttcagattttgatccttgacgattttagttcaaacttttgctttgaatttgagtagatgactgcctgagcagaatactacataattcctgtgaggatttattctgaattttaatattttgtcaatttctttgtttcagtttcttcggaattga
